United States Patent Application Publication US 2008/0276334 A1 - sequence listing, part 6

SEQ ID NO: 34567 - DNA, 388 bp, Glycine max
  Clone ID: LIB3052-007-Q1-B1-F11
acagaaatgggaagctcgttatttcttccaatagtttgtcccatgcattgaatatattccacaaggggaaatccagtagaagagatacatcaaaattggaagatcaagctgtaaaatctgagaagcaaatagaggagggaactgctatgaaaccagaagcaaagtctgaaaatgccgctcctgtaaaaaaggctgaagcagaaacattaagttcagtgggaaagacagatggtgaaaaatcagttcctgcacccaaagccgctgaagttcctcctgataatgagtttgagaagcgaataaggcccgaggtaatactagcaaatgagattgatgtcacattctctgatattggtgccttagatgagaccaaagaatcccttcaagaact

SEQ ID NO: 34568 - DNA, 405 bp, Glycine max
  Clone ID: LIB3052-007-Q1-B1-F12
tttcactccgccgccgatcgaggacggtttcaccgccgagaaactcttcacgcagggcttctcctacacatacgatgacgtcatctttctcccccactacatcgacttcgctgccgacgtcgtggacctctccacgcgcctcacgcgccgccttccccttgccgtgccgtttgttgcctctccgatggacagcgtgtcggagtccgccatggcctccgccatggcctccctcggcggcatcgccgtcgtccactccaacgtccccgccgccgtccaggcggccatcctccgcaaagcgaagtcccgccgcgtccccatcctctccgaccccgccttcgccgcaccttccgccgtcgtggagcacgatgacgccttcggggcctcccccttccttctcgtcaccga

SEQ ID NO: 34569 - DNA, 292 bp, Glycine max
  unsure (1)..(292): unsure at all n locations
  Clone ID: LIB3052-007-Q1-B1-F4
gacaaacgacgccttctctttcctccttganaganaacgtagtttccaaacggagcctaacaaagccttcttcagcgtgcgagagaatattaataagccatgcgaactaagcaccgaagtggtgaattgcgacaaattggatttggagagtgaagagttcgattgcgaatcgatgctcgacgaggaaatcgaggaaggaatcgatggcatcatgcggggaagaacagttcaaaaagatgatactaattgcactgaaggtcacataggactgaaacaaaggtctcaatcaccg

SEQ ID NO: 34570 - DNA, 276 bp, Glycine max
  Clone ID: LIB3052-007-Q1-B1-F5
aaatcgtcatcaatttcgcgtcattcgttctcaattctcttagattctcaattgggtcttcaaaaatgcggatgagttgcaatggatgtcgagttctgagaaaaggttgcagtgaaaattgcagcatcagaccctgtttacaatggatcaaaagcccagaatctcaagccaatgctactgtgtttctcgctaagttttatggtcgtgctggtctcatgaatctcgttaacgcaggccccgaacatcgtcgtccagcgatctttcgctcgttgttgt

SEQ ID NO: 34571 - DNA, 346 bp, Glycine max
  Clone ID: LIB3052-007-Q1-B1-F6
gtttgaagaacaacatggtggtgctaaaggtgtgtttgttgcttcttttccttgtgggggttacagctgcacgcatggaactgagcttcttcaaaagtgatcagtcatcaagttatcatgatgacgagtattcaaaaccatgctgtgatctctgcatgtgcacacgctcaatgcctcctcaatgcagctgtgaatataataggctgaattcacgcaactcacattgtaagacctgtatgtgcaaacgcccacaaccagtacagtgtccttgtcttgacaacaacgacttctggaacgaaccttgcaagtccagagatgacgagcaattctaatagctcactcaaat

SEQ ID NO: 34572 - DNA, 298 bp, Glycine max
  Clone ID: LIB3052-007-Q1-B1-F7
gaacaatattcttgtgaccatccacctgcatcatgggattggaggaaaaaaggtgtcatcacccaagtaaagtaccaagggggctgtggaagcggttgggcgttttctgccacgggagccatagaagcagcacatccaatagcaacaggagaccttgttagcctttctgaacaagaactcgtagactgtgtggaagaaagcgaacgttgttacaatggatggcactatcaatcgttcgaatgggttttagaacatggtgggattgccactgatgatgactatccttacagagctaaag

SEQ ID NO: 34573 - DNA, 346 bp, Glycine max
  Clone ID: LIB3052-007-Q1-B1-F8
aatttctgaagcgtactggatttcattgcgatatcatttgtgtcactggatggactgccaccccaatgcaggatgttcaggttacaattgattggtttatttcctctcaggaatgtgttcccaggacctattgtgttttaaatccacaaaatccttttgtgttaaatacgtggatgggaaaattgactttcccccagggcacttcccgaagtgttaagagaatgcctctttctatagggggaggagctggtgcaaagaatgctattctcatgaatatgccaaatgctgttctttcaatgtggagatattttgttggagatctcgtctttgaagttttcaagatgac

SEQ ID NO: 34574 - DNA, 352 bp, Glycine max
  Clone ID: LIB3052-007-Q1-B1-F9
atggatgcaaagtctttgttgtgaacagagactttgaccacaagcgagtggtgagttccatggtggagcaagtagatcacgttgacgaagcacgactgaagttggtctcagtccctgatggtttaggacctgatgatgatagacccgatttgcgcaagttatgtgattcgttgctgaacaacatgcctgccatgcatgggaagctcagagatgatattcacttaccacgtgccaatagaagcagccttagtgttgcggatgtgtgcctgggatgggcgttggatgttgggagtacattgggaatcaaaggagccctgtattgcccctcagcagcagcttttatgtgctctgc

SEQ ID NO: 34575 - DNA, 313 bp, Glycine max
  unsure (1)..(313): unsure at all n locations
  Clone ID: LIB3052-007-Q1-B1-G1
taattattaacacttccttagttcaatatggggaagcccttcactctctctctttcttcnctttgcttgctactcttgtcgagtgcatgctttgctattagctccagcaagctcaacgagtgccaactcaacaacctcaacgcgttggaacccgaccaccgcgttgagtccgaaggtggtttgattcaaacatggaactctcaacaccctgagctgaaatgcgccggtgtcactgtttccaaactcaccctcaaccgcaatggcctccacttgccatcttactcaccttatccccggatgatcatcatcgccc

SEQ ID NO: 34576 - DNA, 238 bp, Glycine max
  Clone ID: LIB3052-007-Q1-B1-G10
atggagagctgcaagagggacaggtgttaaatgtgccataaaactttgcggtggcagcaatatcacagatcgacatgttcgagtaattatcattcacgacgaaagagagaccctcgattggcactcttgccagtccagaatcatttcttaccgcatttccggatgaagtgattcaaccaccttgaaaccgagtgaggctgcaggccaccaaggtcatgattcgattcaccatcaacat

SEQ ID NO: 34577 - DNA, 392 bp, Glycine max
  Clone ID: LIB3052-007-Q1-B1-G11
ggatgacgtttaacgaacctcgtgtggtggctgctcttggctatgataatggtttctttgcccctggaagatgctcaaaagaatatgggaattgtactgctggcaactcaggcactgagccttacattgttgcccacaatttgatattgtcgcatgcagcagctgttcaaagataccgagcgaagtaccaagaaaagcaaaagggaaggattgggatcctcttggattttgtttggtatgagcctcttacaagatcaaaggctgacaattttgcagctcaaagagccagagactttcatattggatggttcattcatccccttgtttatggagagtatccaaaaaccattcaaaatattgttgggaatagacccccaaattcactagtgaag

SEQ ID NO: 34578 - DNA, 397 bp, Glycine max
  Clone ID: LIB3052-007-Q1-B1-G12
ctgagactaatttaggacaaaatttgaaaaagaaaacagaaggagaaagaatagtgaagaagaagtgagagagacacagacacagtgcggtttgcgactctagtactattaattaaacaaatacttctaccacacattcttttcttcttctctctctcccagggtttcacgttttcatgtgaaaatggattgagaatctctttctatttttatattttctttcgggtcaattagggttttttctggcgtgattctgaaagcttggatctggatatcttctttgcttctttgctatggaagactcggattcagttgctacattgatagattctactacttctaagatacaacagctgcagaaggcatttgctgaacttgaaagttatcgggctgttac

SEQ ID NO: 34579 - DNA, 352 bp, Glycine max
  Clone ID: LIB3052-007-Q1-B1-G2
aattcggctccgaattggtttggacacatccatatttccacttttgggaataccttaaaacggaatctttcatccctttggattcaactcctgaccagaacatggttgggcaattgtctcaactagctcaaagaatgacatctcataagctcaacgcgttggtacccgaccaccgtgttgagtccgaaagtggtttgattcacacatggaactctcaacactctgagctgaaatgcgccggtgtcactgtttccaaactcaccctcaaccgcaatggcctccacttgccatcttactcaccttatccccggatgatcatcatcgctcaagggaaatgagcacttggagttgc

SEQ ID NO: 34580 - DNA, 360 bp, Glycine max
  unsure (1)..(360): unsure at all n locations
  Clone ID: LIB3052-007-Q1-B1-G3
tcattgttcaatctgcaaggccttatgggcaaagagcggttctgaagtttgctcagtacactggtgctcatgctattgctggaaggcacactcctggtaccttcaccaatcagcttcaaacttccttcagcgagcctcgtctccttattcttaccgatccaagaacagatcaccagcctattaaggaagctgctcttgggaatattcccaccattgctttctgtgacaccgattcacctatgaggtacgtggacattggaattcctgccaacaacaagggcaaacacagcattggttgtctcttctggctccttgcaaggatggtgttgcagatgangggtaccattcgccctggcctca

SEQ ID NO: 34581 - DNA, 397 bp, Glycine max
  unsure (1)..(397): unsure at all n locations
  Clone ID: LIB3052-007-Q1-B1-G4
acccttacttaaaccaggaattcggtccaattcaattgcaaaacacaaggaaagccaaataaccgattcttccccctcccctggactgaattaggcattgccgaaggaacccaattctccaccggaacccaattcggggcccctcaaccccaattacaaaaaccaaccctccggcatcaaccttgccaagcaccttgctcaggaaatcgccgcaggcntcttaaaggcggttcttcttcggcaattcgacgccaagcgtcccaaacccgaaaccggcttcgattctctcaatttgaagcctctgtattccgcatctcctcctcccgtctcctacggtcaccaaggttccagcaagaagattgatatccctaatggcagggttggtgtgattattggt

SEQ ID NO: 34582 - DNA, 355 bp, Glycine max
  Clone ID: LIB3052-007-Q1-B1-G5
cggctcgagtcattgttcaatctgcaatgccttatgggcaaggagcggttctgaagtttgctcactacactggtgctcatgctattgctggatggcacactcctggtaccttcaccaatcagcttcaaacttccttcagcgagcctcgtctccttattcttaccgatccacgaacagatcaccagcctattaaggaagctgctcttgggaatattcccaccattgccttctgtgacaccgattcacctatgacgtacgtggacattggaattcctgccaacaacaagggcaaacacagcattggttgtcacgtccagctccttgcaaagatggtgtttcagattatgggtaccat

SEQ ID NO: 34583 - DNA, 358 bp, Glycine max
  Clone ID: LIB3052-007-Q1-B1-G7
gcaaaatgaccaagttcacaatcctcctcatctctcttctcttctgcatcgcccacacttgcagcgcctccaaatggcagcaccagcaagatagctgccgcaagcagctccagggggtgaacctcacgccctgcgagaagcacatcatggagaagatccaaggccgcggcgatgacgatgatgatgatgacgacgacaatcacattctcacgaccatgcggggaagaatcaactacataaggaggaatcaaggaaaagacgaagacgaagaagaagaacgacacatgcagaagtgctgcacagaaatgagcgagctgagaagccccaaatgccagtgcaaagcgctgcagaagataat

SEQ ID NO: 34584 - DNA, 344 bp, Glycine max
  Clone ID: LIB3052-007-Q1-B1-G8
gaaagagagagaagaagaaaagaagaacaaagatgcaatcctcaaaggagaagatgaaaaacatggcaagtgctgccaaggaacaagtcgacatctataaagccaaaatagacgagaaggcagagaaagcaacggcaagaacagaagaggagagggtgatagcccatgagcacgcaaaggcaaaggaagctggagcaaagatggagctgcatgaagctaaagcaaggcatgcagcagagaagctaagcgccaaccaatcacattatggtctccaccatggccacaacaaccctcccttagtacgaacaactcagactcactaccagcaagggcaccagcaccag

SEQ ID NO: 34585 - DNA, 404 bp, Glycine max
  Clone ID: LIB3052-007-Q1-B1-G9
agcaaaatgaccaagttcacaatcctcctcatctctcttctcttctgcatcgcccacacttgcagcgcctccaaatggcagcaccagcaagatagctgccgcaagcagctccagggggtgaacctcacgccctgcgagaagcacatcatggagaagatccaaggccgcggcgatgacgatgatgatgatgacgacgacaatcacattctcaggaccatgcggggaagaatcaactacataaggaggaacgaaggaaaagacgaagacgaagaagaagaaggacacatgcagaagtgctgcacagaaatgagcgagctgagaagccccaaatgccagtgcaaagcgctgcagaagataatggagaaccagagcgaggaactggaggagaagcagaagaagaaaat

SEQ ID NO: 34586 - DNA, 369 bp, Glycine max
  unsure (1)..(369): unsure at all n locations
  Clone ID: LIB3052-007-Q1-B1-H1
cggctcgagaataattccttcacttgcagaacttagttctctgttgcatcatcatcatcttcattagtgttagccctaaacttcaccttcaaccatgaccacagtgccaccacacagtgtccaagtgcacacaacaacacaccgctacgaagccggcgtcgtcncgccggctcgttttgaggcgccgcgttacgaagccggcatcaaggcgccctcttccatttaccattccgagagaggtccgacgacctctcaggttctcgcagttgtcgccggccttccggtcggcggcatcctcctgctcctggcaggactgaccctggctggaactctcaccgggctggtggtggcaacaccgctcttcatcat

SEQ ID NO: 34587 - DNA, 397 bp, Glycine max
  Clone ID: LIB3052-007-Q1-B1-H11
tcccgttttcctttactggtaagttgtaaccctataagccgttgctcccaccgccgccgcgcagatctccgtttcaacttgggttatctctaaggtcctaaacaatcctctttcaaaaacataccgagaaaagtgtggaaatgacgacaccatcattggtagagtctctagttcttcaactccatgagatctcagctgtcaaatttggcaacttcaagctcaaatctggcatcttctcaccaatctacatagacctccgcctcatcatatcttacccttctctcctccaacagatctctcaaacccttatttcttcagtctcttccacttcctttgacctcgtatgcggtgtcccttacactgccttacccattgctacatgtgtctctcttgctca

SEQ ID NO: 34588 - DNA, 101 bp, Glycine max
  Clone ID: LIB3052-007-Q1-B1-H2
gcacacgattacgaacctaattgaggctgctgatcaagagtatgagaaagaaaagctgaatgagagaattgctaaattgtctggtggtgtggctgtgatac

SEQ ID NO: 34589 - DNA, 348 bp, Glycine max
  Clone ID: LIB3052-007-Q1-B1-H3
taatttcatcgattcacgcttcgttctgcttctgggtctattcaatttccctccactcagcaaaaggacgctttcactcgagcaaaattgaatgcaatttctgaaaggctcgcacttgaagactccaacagtgaaacgtggaccccactatctgtgcttttcaagccccatcacaatgtgttgactgggaactatgatataaatgttctaattgcggctttggaagagaagggaaagagtgtactgtggcatgatcatagaaagggggcatcttccaatgatgttgattcacctgaggatgttttgataggggttgtgatcaatgtggcattgaaaacgtttgctggg

SEQ ID NO: 34590 - DNA, 218 bp, Glycine max
  Clone ID: LIB3052-007-Q1-B1-H4
gctttttctgttccacatgctactgccagatcttctgaaaatgcggaatcctctgcatgatctggaatttgtgttttctttcgcttgttcgtttgtttaattcaataaaggaaattaggcatgaccctcttgttgagtatgctctgcctatttgaaaatttccacacctcttttaattgtcgtaatgatgtgtgaagtgtgtgttattttaaaacatg

SEQ ID NO: 34591 - DNA, 310 bp, Glycine max
  Clone ID: LIB3052-007-Q1-B1-H5
agatcatacatagtagtgttggtgggttgcaaatatgcgtgggggtcttctccacatgggtcataagagaccaaggacactgctgtagacacgcacaaagttgtaggacacagtgtccatgtgcacacttcaggaaaccgctacgaaacgtgcctcgtcacgctcgctcgttttcaagagccgcattacgaacccggcatcaatgcgtcttcttccatttaacaatccgagagaggtccgacgacctctcaggttctcacagttgtctcgcgcctttcggtcggtggaatcctcctgctcctggaaggac

SEQ ID NO: 34592 - DNA, 331 bp, Glycine max
  Clone ID: LIB3052-007-Q1-B1-H6
cgaacactttcatttaaaaatccaaacaccattgaatgttcagttttttttgaaagataatggcagacaccgaggacattcaaccactcgtctgcgataatgggacaggaatggttaaggctggttttgctggagatgatgctccaagggcagtgtttcctagcattgttggtcggccacgtcacaccggtgtgatggttgggatggggcaaaaggatgcatatgttggggatgaggctcagtccaagcgtggtatactaactcttaaatatcccattgagcatggtattgtgagtaactgggatgacatggagaagatctggcatcacac

SEQ ID NO: 34593 - DNA, 349 bp, Glycine max
  Clone ID: LIB3052-007-Q1-B1-H7
agattgtggaatttgtgatcacacaacataagcatatatatagaaagatgtcaggggcacaaggagcacaaccaaaggagtcaaaaacagcaacaacatatgagtcagtagaaggaggagagaaccgaacaaggactgacttgctttcaagggaggatcaaggctgcattcaagtggaaaaacttcaggagaaggtccatgatcctgctggcaaaggtggtcctgtctttggtgctggcaaagatgaagacaaacaagaccttggagttactggcacaggctaattaacctactatatatattactactatatactatatactgtatgagtatagtatatacccaaaaa

SEQ ID NO: 34594 - DNA, 349 bp, Glycine max
  Clone ID: LIB3052-007-Q1-B1-H8
ctcgagccgctccattgtctttgaacactcatcaccatggccaagcttgttctttccctttgtttccttcttttcagtggctgcttcgctctgagagagcaggcacagcaaaatgagtgccagatccaaaagctgaatgccctcaaaccggataaccgtatagagtcggaaggtgggttcattgagacctggaaccctaacaacaagccattccagtgtgccggtgttgccctctctcgctgcacccttaaccgcaatgcccttcctagaacttcctacaccaaaggtccccaagaaatctacattccacaaaggtaagggaatttttggaatgaaattcccgggttgt

SEQ ID NO: 34595 - DNA, 405 bp, Glycine max
  Clone ID: LIB3052-007-Q1-B1-H9
gaattctcgagagagaagaagaaacgtaaccgatcatcacttcacttcactaatacatcatgggagacgagacccagaacacgtatgagagctctgaggttgaggtccaggatcgtggtgtttttgactttctcggtaagaaaaaggatgaataagacaagcctcatcctcaggaggaggtcatcgccactgagtttcaaaaagtcactgtctcagacgaacgagagaagaagcacagcctcgtagaaaagcttcaccgatctgacagcagctctagctcttcaagtgaggaggaaggagaagatggagagaacatgaagaagaagaagatggaatagaaagggctgaaagagaagatctacgagaaaatacaaggtgatcatcatcatcacaatgatgaggaca

SEQ ID NO: 34596 - DNA, 73 bp, Glycine max
  Clone ID: LIB3052-007-Q1-N1-A3
tcaattttcaaattttactgcatcttcagtttagtcccatgccatcactttaatggtcttctcttctgatttc

SEQ ID NO: 34597 - DNA, 343 bp, Glycine max
  Clone ID: LIB3052-007-Q1-N1-B1
acataacaatgtcgttgattccaagtttcttcggcaccgggcgaagaaccaacgtcttcgaccccttctccctcgacgtgtgggacccattccatggcttccccggcaccaccgccctctccgctccgcgctccgagacggcggccttcgccatccgcgcatcgactggaaggagacggcggaggcgcacgtgttcaaggcagacctgccggggctgaagaaggaagaggtgaaggtggagatcgaggaggagggaagggtgctgcagataagcggacagagaacaaaggagaaggaggacaagaacgacccgtggcacccgctcgaacgctccagcggcagc

SEQ ID NO: 34598 - DNA, 328 bp, Glycine max
  Clone ID: LIB3052-007-Q1-N1-B3
acgttacaatctaccagattccacatctcgccggtgcgggtctaactgccaacatctcgtatcctagctatcatgccatctggcacatatcatcagtcttctcctgcgatacctgccagatgcctacacgctcagagagctgtgaatatgctatcttcacaagtactggttagatacctccatcgctcacctatacagcgctaacttgaactcgctcaccatctgaaaccagaagatcactggatcagcattaggtatggagatattccggagcttaacctgcattaaagctattgattactatttcttccctgaaattacattctaa

SEQ ID NO: 34599 - DNA, 369 bp, Glycine max
  Clone ID: LIB3052-007-Q1-N1-B4
gggatattaactaccagtttccacagcttgccggtgtgcatctttctgctttgattccgtctgctagtgatgatgcaatcagccttattacatcactttgctcctgggatccctgcaagaggccaacagcttcagaggctcttcaacatcctttcttccagagttgcttttacattcctccatcccttcgcaacagagcagtagcaagaactcctccacctgctggaaccagaggagcactggatcagcaagaggtcaagagatattccggtgctttacctacttcaaagctctccaataatttttcttccatgaaattacatcctcctttagcttcaagtgtgcaacggaagcttgatatgggtaaat

SEQ ID NO: 34600 - DNA, 155 bp, Glycine max
  Clone ID: LIB3052-007-Q1-N1-B5
acattacattgtcgttgattccaagtttcttcggcgccgggcgaataaccaacgtcttcgaccccttctccctcgacttgtgggacccattccatggcttccccggcaccaccgccctctccgctcctctctccgagacagctgccttcgccatc

SEQ ID NO: 34601 - DNA, 248 bp, Glycine max
  Clone ID: LIB3052-007-Q1-N1-B7
gcgcgctttttcgcttttcaaagtctctcccttatgccggttcgctctcccttaaaccctccatggtcaccttctcctctactcccaattcaggcttttgcagtggagaaatgcagcagaaggaggaagaagagacggaagaaccaattggacgtatgattctgccgaggcaagacgcgaggcagatgaaatgtctgagagtgccaaataaacgatgaatgaaggctatgacagggccaaggatcaag

SEQ ID NO: 34602 - DNA, 237 bp, Glycine max
  Clone ID: LIB3052-003-Q1-N1-A1
atctacacaaaagtgttccacttgagtgaaaagtagtgtgttaagaactaaacaatttttcaatggcgtccaagaaacaagaggagcgagctgaggcagctgcgaaagttgctgccaaagaactcgaacaagtcaacagagaaagaagagaccgtgatttcggtgttgttgctgatcaacttcttcgacatcatctggaagatcaacaaaagacgtggtgtaatctggttcatgttt

SEQ ID NO: 34603 - DNA, 389 bp, Glycine max
  Clone ID: LIB3052-007-Q1-N1-B8
gtttgcaatactagcgatagctgataagagagataccaacaagaaaagaaaaaaagaagagttgagattccctttgaagaaaagatggcatcccataggcaaagctatgaagctggtcaaactaagggccgaactgaggaaaagacgaaccagacgatgggcaatattggagagaaggctcaagctgcaaaggagaagacccaggaaatggcccaagctgcaaaggagaagacccaacaaacagcccaagctgccaaggacaagacttgcgacactttccaagcggcaaaggagaagacccaacagaatacaggagctgctcaacaaaagacctcagagatgggccagtccacgaaggaatcggcccagtcagggaaggacaacaccca

SEQ ID NO: 34604 - DNA, 53 bp, Glycine max
  Clone ID: LIB3052-007-Q1-N1-C2
cggttacattttactagattccaaaattcttcagggcgggtctaataaccaag

SEQ ID NO: 34605 - DNA, 389 bp, Glycine max
  Clone ID: LIB3052-007-Q1-N1-C5
tatggcttcaactctgcttcccctggcaaccttcttctgagttgtctccgcttcttatctccagattgctggggcgaaagcacaaccgttgactagtctcaagcttaactctccgatccttcaggagtctattgctaaagagatcaatgaaaatcctgaggcaggatgggaggctgctataaatcctcatttctccaattatacagttgaacaatttaagcgccttcttggagtcaaaccaacgcctaagaaggaactgagaagtacacctgctatatctcacccaaagtcattgaaattgccaaagaattttgatgcaaggacagcttggtctcagtgtagcactattggaagaattctagatcagggtcactgtgggtcttgttggg

SEQ ID NO: 34606 - DNA, 386 bp, Glycine max
  unsure (1)..(386): unsure at all n locations
  Clone ID: LIB3052-007-Q1-N1-D1
tagtagtagtggagaggtctttcattattcagttggattgancagcaccaagatgaaggttcaagaaacgaggtcgcatgttcatgcacttggggaagaagagaaggtgatgacaaggaagcagaaggctgagtccaaggcacatgaagtggaacattctccaaagaaggccaaggtggaaaaagaagatggccacatcaacgggaaatctgaaactggcgttgcagaagaatatgatgagttctgcaaagccacaaccgagcaccttcctttggaacaaatgagagacattctggaggccaatggccttgattcttctggctctgatcttgaaattacaagaagatgccaagacttgctgttttatggtgcatttggacaaatgc

SEQ ID NO: 34607 - DNA, 71 bp, Glycine max
  Clone ID: LIB3052-007-Q1-N1-D5
cacttacatttactacaagtacttccttacaatcggatggaacaactactatggcgggtggtcaaaagcac

SEQ ID NO: 34608 - DNA, 404 bp, Glycine max
  Clone ID: LIB3052-001-Q1-B1-A1
aaagcaatggctacttcaaagttgaaaacccagaatgtggttgtatctctctccctaaccttaaccttggtactggtgctactgaccagcaaggcaaactcagcggaaactgtttctttcagctggaacaagttcgtgccgaagcaaccaaacatgatcctccaaggagacgctattgtgacctcctcgggaaagttacaactcaataaggttgacgaaaacggcaccccaaaaccctcgtctcttggtcgcgccctctactccacccccatccacatttgggacaaagaaaccggtagcgttgccagcttcgccgcttccttcaacttcaccttctatgcccctgaaaacaaaaggcttgcaaatgggcttgccttctttctcgcaccaaatgacactaagcc

SEQ ID NO: 34609 - DNA, 322 bp, Glycine max
  Clone ID: LIB3052-001-Q1-B1-A11
atccaactccatcaagtcctccagttggtggaagccatgatccaactccttcaccaccctcaggtggtggtggaagttacaatccaactccatcaactcccccaggtggtggaagctatgatccaaccccatcaccacccacagatggtggaagttacaatccaaccccatcaccaccctcatgcagcaactgtggcacacgaccacatgacccctctagtctaataccctcagtcccaccaacaccatcaatcccaacaacaccatcaaccccatcaacaccatcacaccctctctcatgaagaagtgggtactataactc

SEQ ID NO: 34610 - DNA, 288 bp, Glycine max
  unsure (1)..(288): unsure at all n locations
  Clone ID: LIB3052-001-Q1-B1-A12
atgaattgtangaatttgagggagttggagttgcnggagagtgaggtggacgacatctgtgggcattggctgagccattttcctgattcgtacacatcactggtttcccttaacatttcttgcttaggcaatgaggtgaatttgtctgccctagagcgcctggttagtaggtgtcccaatctccagacgctccgcctcaaccgtgctgtgccactagacaggcttgccactcttcttcgcggtgctcctcagttggttgagttgggcaccggagcttacacgacagag

SEQ ID NO: 34611 - DNA, 307 bp, Glycine max
  unsure (1)..(307): unsure at all n locations
  Clone ID: LIB3052-001-Q1-B1-A2
gtagangcagagaaagcaagaccaatggaagaaacagaactggaagctaaaggaagagaaaaagctgaaaccaaagatggtggtggtgaggaaaaaggaatgagaagagaataaatatgagaagaaaataaacaatccagcctggaagagatttttaagtacagagctgaagctcaacagaaagttaatgagagaaacgagagagcaaaacaagcagcagaagctgccaaagagagaaacaagcacgcaaataaagggaatgaagaacgcagaagagaaagagaaaatggtgggggtgttcaacatg

SEQ ID NO: 34612 - DNA, 288 bp, Glycine max
  Clone ID: LIB3052-001-Q1-B1-A3
gaaagtcttccatagccccccaaaaatgaagagcaccatcttctttgctctctttctcttttgtgcctttcacacctcatacctaccttaagcaaccgccgaattccgggcccaataatgaaggtaacccccttgaaaatggtggcacatattaaaccttgtcagacataacagcatttggtggaataagagcagccccaacgggaattgaaagatgccctctcacggtggtgcaatctcgcattgagctcgacaaagggattggaacattcatctcgtccccatatc

SEQ ID NO: 34613 - DNA, 395 bp, Glycine max
  Clone ID: LIB3052-001-Q1-B1-A5
aaaattcttccaccaagttatgggtttccttgtgttgcttcttttctccctcttaggtctctcttctagttccagcatatcaactcatcgttccatattggaccttgacctaaccaagtttaccacacagaaacaggtgtcttcactgttccaactatggaagagtgagcatggacgtgtctaccataaccacgaagaagaggtaaagagacttgagattttcaagaataacttgaactatatcagggacatgaatgcaaacagaaaatcaccccattctcatcgtttaggattgaacaagtttgctgacatcactcctcaagagttcagcaaaaagttcttgcaaaccccccaaggatttgtcccaccaaatcaaaatggccaacaggaaaatg

SEQ ID NO: 34614 - DNA, 353 bp, Glycine max
  Clone ID: LIB3052-001-Q1-B1-A6
ttttcacagtaatatataaatattttatattcttcaataacaattaagtcttgtcccattagataaggtcaattagatggatcacatgatgtcattggagttggttaaaagccaaatttttatttattgtaaggttccctttgataatttcttctatatccttcttggtctccttttacccctttttacatagctaaaagccgtagcttgttccccgagtggcctcttggtgtggcaaacaaccttcattgtttttctctcatcctttctttgataggtactgaaccaatatcttcttgcatataatcattccatatctagtcctttcttttgtgggaatagcaaatatgact

SEQ ID NO: 34615 - DNA, 291 bp, Glycine max
  Clone ID: LIB3052-001-Q1-B1-A8
caagccatggaaagcgtgaacaagacgaggacgaggacgaagatgaagataagcctcgtcctagtcgaccaagccaaggaaagcgtgaacaagaccaggaccaggacgaggacgaagatgaagatgaagatcaacctcgcaagagccgcgaatggagatcgaaaaagacacaacccagaagacctagacaagaagaaccacgtgaaagaggatgcgagacaagaaacggggttgaggaaaatatctgcaccttggagcttcacgagaacattgctcgccctttaagcgctg

SEQ ID NO: 34616 - DNA, 327 bp, Glycine max
  Clone ID: LIB3052-001-Q1-B1-A9
agaaaaaataccaaccatggcaaccatttctactgatcaaccaagaggatcctactcctatggaacctcctatggagcaccctatggaaccacctatgagaccaacagcagcattaacaaccctccttcacgccaaaccgtgaagttcataactgctgcaactattggcatcacactcttactcctgtctgggttgaccctcacaggcactgtcataggtttgatcattgcaacccctcttcttgttatcttcagccccatccttgtccctgctgcgtttgtgctgttcctggttgcttctggctttttgttctctgggggctgttg

SEQ ID NO: 34617 - DNA, 337 bp, Glycine max
  Clone ID: LIB3052-001-Q1-B1-B1
caatctttaatatttccacctctcaacttcacaacagattatgagccaaaaattgtagaggggtgagctatgcaacttcatataccttggtttctatgtgtctgggaagcatgatttctgttaagattatattggtaattttcaaattaagatattatttaactgtttcttagttttggcttttctaagtggtcatttagtttaggtttcttctagattgttatcacttgagtgattttgcagggaaataaaatgatcatatctgtaactggagcaacaggttttattggtagaaggttggtgcaaagattgcatgcagacaatcacagtgttcaag

SEQ ID NO: 34618 - DNA, 304 bp, Glycine max
  Clone ID: LIB3052-001-Q1-B1-B10
gcccttcttcttcatcatcacgctccaaactcctccccattcttttaagctcttgtttcctctcaacatcactttcactcaatttttcattttcccaacattgcatgtagcagatccaaagctttcatacggactccaatgtcttgagtgtatgggttggaataaatgaagccgcagctcaaaattgctcttgctttagttgttagcttgctttggattcagcaatcattttgtgatgaaacttctgatacatctagcttaaacaagtggaggtgtagatgttctttccaagggaaccaaagct

SEQ ID NO: 34619 - DNA, 325 bp, Glycine max
  Clone ID: LIB3052-001-Q1-B1-B11
gacatcatggaactaccggtgtctatggtatagacaccgataggcaacaacatgggactactggtggctatgccggtgacactggtaggcagcatgggaacatcggtggcccttactatggaaccaacaccgcagacaccggtactggtcccagaagtggaaccactggcggcaccggttatggaggcactggtggcactgattatggaacaactggtggcactggttatggaagtggaactgggtatggagtcaacactgggggtgcgcacactgaagcatgatatatgaaggaacatcgtcagcatgaccaatctcatggtga

SEQ ID NO: 34620 - DNA, 266 bp, Glycine max
  Clone ID: LIB3052-001-Q1-B1-B3
gatgaggatcatgcattcaagaagattaggttgagagctgaagatgtgcaacggaagaatgtcctgacacatttctggggaatggatttcacaactgacaagctgaggtcattggtgcgaaaatggcaaactctaattgaagcccatgtggatgtgaagacaactgataactacacattgaggatgttttgcattggatttaccaagagaagagctaaccaagtgaagagaacctgctatgcacaatcaagccagattagacagat

SEQ ID NO: 34621 - DNA, 321 bp, Glycine max
  Clone ID: LIB3052-001-Q1-B1-B5
acaaggcagaaagcaagctcatcctagagttttaaaaatggcagcagcctcctccatggctctctcttccccatccttggctggcaaggccgtgaagctgggcccatcagcccccgaagtcgggagggtcagcatgaggaagaccgtcaccaagcaggcctcctccggaagcccatggtacggcccagaccgcgtcaagtacttgggcccattctctggcgagcccccgtcctacctcactggcgagttcccaggtgactacggctgggacactgctgggctttcggccgacccagaaaccttcgccagaaaccgtgagct

SEQ ID NO: 34622 - DNA, 279 bp, Glycine max
  Clone ID: LIB3052-001-Q1-B1-B6
ggaatgaatcaaccacaggtatctaaggtctattcacctatcatcaacatcatccgactatctggcgtctacacatctcggatgaggaaggcgtatagcagaatacagcagccctatctattcggtacgatacggctagaatgagattgtcgtcccagcagtgtcaccagtgagcgcactggttatcgcagcactcgtggaattgcttagtacatacattgcgtcacagggtttctaactcaaactgtatatggtctcattacttgatgttcacagaga

SEQ ID NO: 34623 - DNA, 320 bp, Glycine max
  Clone ID: LIB3052-001-Q1-B1-B9
tgctattatcatccgcagctgcttttattcgcaccgcaaacagtgagccatggccgtcggaaagaacaagcgcatctccaaggggaagaagggtggcaagaagaaggcagctgatccctttgccaagaaggattggtatgacattaaggctccttctgtttttcaagtgaaaaatgttggcaaaaccctggtctctcgtactcagggtaccaagattgcttctgaaggactcaagcatagagtgtttgaggtctccttggctgatcttcaaggggatgaggatcatgcattcaagaagaataagttgagagctgaagatg

SEQ ID NO: 34624 - DNA, 342 bp, Glycine max
  Clone ID: LIB3052-001-Q1-B1-C1
caaactgggccgcctggtgaaggagggaagaatccgaagccttgaacagatctacctccactcgctcccgatcaaggagcaccagatcatcgacacgctcgtgggtcccaccctcaaggacgaggtgatgaagatcacgccggtccagaagcagacccgggccgggcagaggacccggttcaaggccttcgtcgtcgtcggagacaacaacggccacgtcgggctgggcgtgaagtgcagcaaggaagtggcgacagctattcgtggcgcgattattctggcgaagctgtctgttatccccgtgaggaaggggtactgggggaacaagattgggaagcccca

SEQ ID NO: 34625 - DNA, 305 bp, Glycine max
  Clone ID: LIB3052-001-Q1-B1-C10
gcgagaaaacaagaagtagtgagaagaagggagagaatggaggaaaaggcaaaagctgagcagaagaagataggtatgaccgagacttggttgaagaagcaccgtcttctttacaatggagccactagacaccctcttattattagcattcgcgatggcaccatcaacactgcttccttcaaaacatggctcgttagtaattcttcaccctttttttttaagttattagtttaacttccttttcatatttagtacaattttgggtaaccatgtcaagattcaacaaaaatgtttgcaatttaact

SEQ ID NO: 34626 - DNA, 324 bp, Glycine max
  Clone ID: LIB3052-001-Q1-B1-C11
actcataacacaaagcacaaagcaaagctcatccttgagttaaaaaatggcagcagcttcttccatggctctctcatccccatccttggctggcaaggccgtgaagctgggcccatcagccccagaagtgggaagggtgagcatgaggaagaccgtcaccaagcaggtctcctcaggaagcccatggtacggcccagaccgagtcaagtacttgggcccattctctggcgagcccccgtcctacctaaccggtgagttcccaggcgactacggctgggacactgctgggctttccgcagacccagaaaccttcgccaagaaccg

SEQ ID NO: 34627 - DNA, 350 bp, Glycine max
  Clone ID: LIB3052-001-Q1-B1-C12
atttaatttggatgggttgaaagactcagacaaaacattgaaaagaatcagagcacaagaaaagggattctctacgtatcagtgcagcgatggcgttatccctactaatccactgttctcccaccgttaaccctctccgacgatccccaaaacccaccctccgccgcgtcaaccaccgcgtctgcgtggccagcgccgccactcccctcctccaagttaatgacttgagggccaagattgtcgaatccaacgtcgacattctccacggcgtcaacctcaccgtcaaccaaggaaaggtccacgccatcaagggaaaaaacgggttcgggaaaaacacctttgccaaaggt

SEQ ID NO: 34628 - DNA, 343 bp, Glycine max
  Clone ID: LIB3052-001-Q1-B1-C3
caagtacttccttacaatcaaaaccaacaacaactatggcaagttatcaaaagcactacgatgatcagggtcgcaaggttgacgagtatggcaacgttgagaagcaaaccgacgaatacggcaaccctgttcatgctgctagtgtcacctatgtagccaccagaactgctgctggtggttacagtgatgacattaataagcaacatgataccaccaatgcctacggcgtagacactggtagacagcattctagtggtggctacgatggtgacactaataaacatcatggaactactggtggctataatgatgacaccaatagacatcatggaactaccggttt

SEQ ID NO: 34629 - DNA, 310 bp, Glycine max
  Clone ID: LIB3052-001-Q1-B1-C4
tgaaaatcaaagtcatgaatgttagcgttgaagaggaagcagcagaaaacaatgattctattaagcaattgatggaggaagatagcaataaaactggctccagtgagaatcatgaagaggaagttaataatcttgatgaacctgatgcggtcactctagaaagagatggagatgccacataagaagaaaatgatttggaaatgaagcttttaattggtggggttgtacacaacaatgaagatactcctgtcaaggatgaatttatacgtcttccagctgaaataaaagatatggaaaatgattcatttgt

SEQ ID NO: 34630 - DNA, 235 bp, Glycine max
  Clone ID: LIB3052-001-Q1-B1-C7
gtcaggcggggctacccgctgagtttaagcatatcaataagcggaggaaccatgattagcacctcaactcctcacatggttctccagcaatccgtgtaccaggctttcactcaggtgtttgctcagcagctaccaaagcaagcacaggtgaaatctgtggcaccatttgggttatgcttcaactccaacaagatcaatgcatatcctaacgtggaccttgtgatggacaaaccca

SEQ ID NO: 34631 - DNA, 306 bp, Glycine max
  Clone ID: LIB3052-001-Q1-B1-C8
taaacactcagcagtcatcaccatggccaagctagttttttccctttgttttctgcttttcagtggctgctgcttcgctttcagttccagagagcagcctcagcaaaacgagtgccagatgcaaaaactcaatgccctcaaaccggataaccgtatagagtcagaaggagggctcattgagacatggaaccctaacaacaagccattccagtgtgccggtgttgccctctctcgctgcaccctcaaccgcaacgcccttcgtagaccttcctacaccaacggtccccaggaaatctacatccaaca

SEQ ID NO: 34632 - DNA, 311 bp, Glycine max
  Clone ID: LIB3052-001-Q1-B1-D1
gtttatggatttatacaaatggaaagaaaaaatggaacagcagctgttggaggtatcgaatactgtatatggtatgctggcaatgaagtagacatcactccaaagtatctgaggctataggataggatataaccaccctttcgttcataagtttttctctgttactcttaaaactggtagagtttagatattgtacagcattaacaacctgatcctgaaaatctatgccaaccactaagttcagaaaagaggttgagtctcaccctgctggctgagctgcaaactgttgatatgtctgactggccttttac

SEQ ID NO: 34633 - DNA, 303 bp, Glycine max
  Clone ID: LIB3052-001-Q1-B1-D10
acttaattagtgttcatgaatacgtcaagccttactttagtggttctaaattgaaaagctttctagctggtcataatatcaccattactgatggtattgacaagactagtgcaactttgcaatttagaaagttagcagattgtgattttctcaagagaaactttaagcagatgtctaatgttttgtgggtagctcctgaggacaaggcgagtttatggtcacaacttcattatgtttcgtgtaataatctggaaatgcaagaagcttatcttgtcaatctcgtaaatgtgttacgagaattgt

SEQ ID NO: 34634 - DNA, 343 bp, Glycine max
  Clone ID: LIB3052-001-Q1-B1-D11
gagttcttgggctacagctggcaaatggtgaacacgaggatggctacgacggggaagacggacgggaacaacttgctatggttgccgaatttcacagaattaggaaacgggcgtttcaagtgcttagaaacagggcacgaggtcctctcgaacgacatagcgtcctactcgcacagcaaagaatgccgtttgggtctcatcgatttcgccatgtccagtaacaaaccccctcacaacatgttcaaacaacaccctctctgccgttcaatgttgagacgttcgctgacaggtgacaatgtcaatagctcagcggaatccaactgggaccccattattgggaaaa

SEQ ID NO: 34635 - DNA, 247 bp, Glycine max
  Clone ID: LIB3052-001-Q1-B1-D12
gaaaatatggacacagagacagagagagggagagagagaatgaaatgggaagcacaaagtttctattgttggtgatggtgtttctcgcagtgtgcgtggggacatgcaggccttggggtgatgatgtagttgaagatggagatgatgtcaaacgttttgcagtaaaagccgtgcatgatgtcgaggaatatacctgctcttgggctgattgggctcaagacaagttctccaaaagtttcggggccga

SEQ ID NO: 34636 - DNA, 354 bp, Glycine max
  Clone ID: LIB3052-001-Q1-B1-D5
attgcccttgttctttcaaagttaccaagcacaagtacacagcacaacagcaccatatggcgtctgaacaattggctcgcatacagaacatcaccaccgagaaggagattcacgttgagaaacacatggttcccaagatggccacccacttcgagcaccttgcggagcaagctaaagaatctgacatcaccgctgggaacgatactccgcagggtagcatagaagccttgcaagctggacagagggtcaaagatcatgcaggaaaagccatgggagatattggtggacgtgggaaagccagagagactaacgagctgggtgcacactttgaatccctggctgacaaagtaactg

SEQ ID NO: 34637 - DNA, 287 bp, Glycine max
  Clone ID: LIB3052-001-Q1-B1-D6
acatctcctcttctctctccgtcactcgcacttcatcgtcactacacactgtctctatcgttaccactctctctgcacaatgctcatggttgctctaatcactaatgctcagattgagtatgcgatcttagcttccctcataccgggctcgcggacattctcctatatcggaatcaacggctctcactgcaaggcctctctgatcagattggtatcgtcggatcaatgggtcatggtcatcatggagtgctatgctcaaggtacgtctactgactacgaggttaact

SEQ ID NO: 34638 - DNA, 314 bp, Glycine max
  Clone ID: LIB3052-001-Q1-B1-D7
cttccacaattcttcttcttcctttggagctgcgatcctctgcttcgatggccaccgtgcaactccaatccctaacccttgttcgctcctcagcacttccttccgccaccttctcccctccgatcgccgtctccggccgccgcaactccgccgcgctgccgcgctactccggcctccggctccgacccgccgctgagaccagtttcccgactcacgccagctcgagaaccgcttctcgcggcggaggtgtcaagtgcgaggcaggagacaccgctgttgaagttgctctcgttactgatgcaaattggcaatca

SEQ ID NO: 34639 - DNA, 324 bp, Glycine max
  Clone ID: LIB3052-001-Q1-B1-D8
actttccttagttcaatatggggaagcccttcttcactctctctctttcttccctttgcttgctactcttgtcgagtgcatgctttgctattacctccagcaagttcaacgagtgccaactcaacaacctcaacgcgttggaacccgaccaccgcgttgagtccgaaggtggtcttattgaaacatggaactctcaacaccctgagctgcaatgcgccggtgtcactgtttccaaacgcaccctcaaccgcaacggcctccacttgccatcttactcaccttatccccaaatgatcattgtcgttcaagggaaaggagcaattg

SEQ ID NO: 34640 - DNA, 367 bp, Glycine max
  Clone ID: LIB3052-001-Q1-B1-E1
gactgataaagctcatatcttccgtgctgatcttccaggggtgaagaaagaggatctgaaggtgcaggtggaggagaataagatcctgcagataagcggggagagggtgaaggagaaggaggaccagaacgacaagtggcaccgcgtcgagaggcagtgcggaagcttcctccgccgcttccggctgccggaggatgccaaccccaaccagatcagctgcacgctcgaaaacggggtgctgaacgtcaccgtgcccaaggtggagaagaagccggagaacaagaacgtgaggcagattgatgtggtttgatgatgatggagcaacatgaagacctggtatgtttgaaagaattttggggtaagttgt

SEQ ID NO: 34641 - DNA, 278 bp, Glycine max
  Clone ID: LIB3052-001-Q1-B1-E10
atttgaatcgagaattgatacccttgttcctcaaaattattactaattttcattttatatatattttttaatcatgttttgaggtacggttttgtctgttgcaacctgcaacccctttcttcttttagatgtctaatttttcgtgactaagttgactctgttattttggagctcatcatccttgttaccaaagaaatgtttttcctttataaaaaccgttcattttgcatttcatctaacactttggagtgttaacatgcaggatgaacatctgataa

SEQ ID NO: 34642 - DNA, 316 bp, Glycine max
  Clone ID: LIB3052-001-Q1-B1-E11
caaaacagtaaagctaacttcaacacctttaattttctaaaagtaattcagcggctgaataccaagcggagaagatgagtcaggagcagccacggcgtcccaaaggccaaaaccccatcaaatacggcgacgtttttgtcgtctccggcgaccttgcacagaagcccgtcgcaccggaagatgctgccatgatgcaaagcgcggaaactcgagtgctcggacaaacccaacccggcggagcagcttccgtcatgcaatctgccgccaccaggaatgaacaggctggccttgtcggtcaccgggacgtcaccgacgt

SEQ ID NO: 34643 - DNA, 337 bp, Glycine max
  Clone ID: LIB3052-001-Q1-B1-E2
cgccttcagcttccacaatcctatcgcacatctttctcagttctacgatggagttttggggtgccgaggttaaggttggagagtctgttaaggtagacccaaccgaatttgaggcatgcatacacctttctcaggctgctcttggtgaggcaaagaaagataagcctgaaccggtggttctctacatgaaagttggtgaacagaaatttgtcttgggaaccctttccagggagaaaatccctcaaatatctctggaattggttttggaaaaggagtttgagctttcccacagttcaaagagtgccagtgttcatttctgtggatacaaggcatatta

SEQ ID NO: 34644 - DNA, 266 bp, Glycine max
  Clone ID: LIB3052-001-Q1-B1-E3
taactccggaatccggtccaaccggtccaaccttcctcctaaacaacggtggaaagggtgttcccaaggaattcttctgcgccttaaatcaacacttcatataacttgtttcctaaagttaattagtatgcttaaggttcaatattttgcaatattggttatttattcataatattctgtgtattttggtattcggtttggcacttgccatttaatccgtgcttgtttttcggttgagcaaccttcaaatgttcgttcaacgaaaa

SEQ ID NO: 34645 - DNA, 320 bp, Glycine max
  Clone ID: LIB3052-001-Q1-B1-E4
aagatctccatatctgttcccaaaagcttgtttgtaagaatggcttccggtgaacagaaattccctcctcaacaacaacaaacacagcctgggaaggagcatgctatgactccagtaccccaattcactagccctgactacaagccttcaaataaacttcaagggaagattgcattagtcactgggggtgattctgggattggacgagcggtgtgtaacttgtttgccttagaaggtgctaccgtggccttcacgtatgtgaaggggcatgaggacaaggacgcgagggacacattggaaatgatcaagagagcaaagac

SEQ ID NO: 34646 - DNA, 305 bp, Glycine max
  Clone ID: LIB3052-001-Q1-B1-E5
ctaacaaccctctccctccgcaacctctcttatcctacaccctcctcctcttcttaccctacgcacctctccgccaacccctcctccctccaattccccaacttctcccaccgcgccaccaccacgcgccgcgcccgcgtcgtcgtcgtctccgccgtcgaggcaccggagaaaatcaccaagctcggcgacgaaatcgcgggactcacgctcgaggaagccaagaacctcgtcgacttcctccaggacaagctcggcgtctccgcggcagcgttcgcccccgtagccgtcgccgcgggtgccgt

SEQ ID NO: 34647 - DNA, 327 bp, Glycine max
  Clone ID: LIB3052-001-Q1-B1-E6
aaaagaaagggggaatcggtgggtggaggcttctttggatcatcggagagaggcttctttccattttcaccacagcaatggagaagatctacctcggtggaaaggagcatcatattcgaactggctgtggtattgtgtctgtcatagtctatggcgatcccgacaaaccagctctgatcacttatccagatttggctctaaattatatgtcatgttttcaaggactatttttctgtccagaagcagcttctttactgcttcacaacttttgcatatatcatatcagtcctcctggacatgaggtttttgggagcagctgcaatttgt

SEQ ID NO: 34648 - DNA, 298 bp, Glycine max
  Clone ID: LIB3052-001-Q1-B1-E7
caacaacctcaacaaagaggacaaagcagcagaccacaagaccgtcaccagaagatctataacttcagagagggtgatttgatcgcagtgcctactggtgttgcatggtggatgtacaacaatgaagacactcctgttgttgccgtttctattattgacaccaacagcttggagaaccagctcgaccagatgcctacgagattctatcttgctgggaaccaagagcaagagtttctaaaatatcagcaatagcaaggaggtcatcaaagccagaaaggaaagcatcagcatgaagaag

SEQ ID NO: 34649 - DNA, 302 bp, Glycine max
  Clone ID: LIB3052-001-Q1-B1-E8
ggccactcctttgaaggtcttaccttgtggactctcaatcctaataccagcacaaggatcggatctgcacctgctatgtttcagtttccttctttcttaaccatcttaccaatcttataccttatgtgttagtctgctagattgtatggaagtgttgagcaaaggggtgcatcgtgctatggtaccggtagatgggcaagcggagaacatgtcagctggggtggaacttgtagagtctgcttccagctaccaaatgctgactcagatggatgtgcttaagttcctgcatgatcgtgctggtg

SEQ ID NO: 34650 - DNA, 313 bp, Glycine max
  unsure (1)..(313): unsure at all n locations
  Clone ID: LIB3052-001-Q1-B1-F1
gagataacttgacaaataaaatcaccatgtctatcatcccaaacttgttcggtggtagacgaagcaacgtcttcgacccattctctctggacgtatgggaccctttcgaggggtttcctttttccacaggtcacgtgccttcctctggtggggaaagcagtgccatagccaacactcgcgtggactggaaggagactccggcggctcacgtgttcaacgttgatcttcccgggttgaagaaggangaagtgaaggttgaagttgaagatgggaaggtgctgcagattagtggtgagaggaccaaagaacaaga

SEQ ID NO: 34651 - DNA, 86 bp, Glycine max
  Clone ID: LIB3052-001-Q1-B1-F10
ggatgctatcatggccttctcgtagatgtcatttgcaccatgagatctgactagcgagattactggacttgggacaatctggattg

SEQ ID NO: 34652 - DNA, 340 bp, Glycine max
  Clone ID: LIB3052-001-Q1-B1-F11
ctcgagccgctcgagccgattcggctcgagagaatataatgctgcacactatcctttactagttatggcattatactttctgattttatgtgtagtttgttttgctagaagaaattcctgctctccctagtccagagttgataacttgtttttactatgtggttgttgttgtttttactgctagttttctatggatacttttaatcatctttctgccatttcctaaggtgttttggctcttcctgtatcatggatggtattcatgggggtgattctcggatacacataactgatggacagcatcctatacacgtgccatatgtgcaagaacacgagcatc

SEQ ID NO: 34653 - DNA, 310 bp, Glycine max
  Clone ID: LIB3052-001-Q1-B1-F12
aaagagtcggagcccaagaaggcctttgatctacgggataccttgcgtggacatggggaatcagagtagatgaaagagtcggagcccaagaatgcctttgagaggaagatgcagtaccaacagcatcagcagcagttcaccaccaccaccaccaccaactccaactcgcaagccatagatccatcgtgtaaatctgatgaccttttccgtttatgtatttaccaagattccgtgcccgctgacttccagcctgatgttcttgggggtaaacgttgcctttcaatggtggccaataatacctttttccttt

SEQ ID NO: 34654 - DNA, 338 bp, Glycine max
  Clone ID: LIB3052-001-Q1-B1-F4
ctttattttagagagatgtggaagtgccaagtcagactttcgacgagtggaagcacttgaattggtaatggaaatattgaagtcactgtcaacatggaatagtgatgaacagaatgcatcgaaaaagattcttaagaacagtttggataaactttctcatctgttgaaagaattagtgactaatatgccaagtaaaccagcaaggcggacagatgtacagaagttttgtgttaaagccttggagattttgtctaagcttaacctcaccaagaattttgtgaaaactttggcacctgatactcaagctgcccttgaggcgcaacttggtgagcaattca

SEQ ID NO: 34655 - DNA, 252 bp, Glycine max
  Clone ID: LIB3052-001-Q1-B1-F5
ctcggagagaaagagagagagagagagaaaaatggctgatacaagtggaggagatgcaatgagaccggtggtaatatgtgatcacaagtgtggctgcacagttccatgcactggtggttccacttgcaggtgcacaagtgtcggcatgacagctggatgcggtgatcacgtgacatgcacgtgcggagagtactgtgggtgcaatccatgcgcatgtcccaagactgcagcttctggaactggttgcagatg

SEQ ID NO: 34656 - DNA, 407 bp, Glycine max
  Clone ID: LIB3052-001-Q1-B1-F6
taaacaccagtcttaattaatttatgcaggtaaaccctgatgatgttgtgtttgggggatgggatatcagtaacttgaacctggcagatgccatggccagggccaaggtgtttgatatcgacctgcagaaacagttgaggccttacatggaatctatggttccactccccggaatctatgaccccgatttcattgctgccaaccaaggagaccgtgccaacaacgtgatcaacggcacagagatagaacaagttcaacatatcatcaaagacattaaggagtttaaggaaagcactaacgttgacaatgtcgttgtcctgtggacagccaacacagaaaagttcaagcaccctatttgttggactaaacgacaccatggaaaacgcctttgcttccttggacaggaa

SEQ ID NO: 34657 - DNA, 291 bp, Glycine max
  unsure (1)..(291): unsure at all n locations
  Clone ID: LIB3052-001-Q1-B1-F7
gtttctttcaatggaagtcatttctgcttctagcttgaatcccaacgctccgatgttcatgccactcgcctatcggacggtggaggatttctccgaccagtggtgggacctcgttcactcctccccctggttccgcgacgactggctccgcgagtgcttccaagatccccagttccaaaacgacgacgctttcgacttcgactttgagctagatctccaagatgaagatgaaagggaacgaaaggaagggaatgangtggtgtcgttggggctgctgaaatggcgaagctg

SEQ ID NO: 34658 - DNA, 326 bp, Glycine max
  Clone ID: LIB3052-001-Q1-B1-F8
agagaatggctcccaagggtttaacctttctggctgtgttaatatgcgtttcagcactgtcactgactccttctgttgcgggggaagggcaaaataatggccttgttatgaacttctacaaggaatcatgccctcaggctgaagacatcatcacagaacaagtcatgcttctctacaagcgccacaagaacactgctttctcctggctcaagaacatcttccatgactgtgctgttcagagttgtgatgcttcactgttgctggactccacaagaaggagcttgtctgacaatgaaacagatagaagctttgggttgagaaatttc

SEQ ID NO: 34659 - DNA, 313 bp, Glycine max
  Clone ID: LIB3052-001-Q1-B1-G1
aaagaaaggggtggtggctgcttcgaaagcttaataatttgtttatttccagaacatcatagttttcgcagcagcaaactaacaaattactcatatcatataataagatggcccgttctctctcgcaagccaaacgtattggtgtccttgttgctcaatctatctccctaattcccgttcatcggcgaggttacgcagtggcatccgatgtatcggtaagagttggattgggtaatattgggcgaaggaatggaatcgtgggaggtgtagaagagaagcctgatacaagagatggttcaaaagcctactcaac

SEQ ID NO: 34660 - DNA, 315 bp, Glycine max
  Clone ID: LIB3052-001-Q1-B1-G11
ctgttcaaagtggatctacaagcatgtattttgctgaagctacggcaccacacaaacatgggggtggacttctcacttcaagtaaccatggggtcaagacagaacgatttgtgcaaagaggccactcttggtatgtggctactgatattccaagtgacttccttgttcaaattggagaagctaacttccacttgcacaagtatcccttggtaactagaagtggaaagctgactacagtcatatatgaatcccacgacccagatttgaataagatagttatcgatgatatccctggtgggggaaaaggctttgaac

SEQ ID NO: 34661 - DNA, 201 bp, Glycine max
  Clone ID: LIB3052-001-Q1-B1-G12
gtgaatctggttttcagcatgtgggaatcccaagagtgaatccgcttcagcacacaaatattggggtggacatctcacttcaagtaaccatggtgtcaagacataaagatttgtgcaaagatgccactcttggtatgtcgctactgatattccaagtgacttccatgttcaaattggagaagctaacttccacttgcacaa

SEQ ID NO: 34662 - DNA, 409 bp, Glycine max
  Clone ID: LIB3052-001-Q1-B1-G2
gagaattacagagcattttccaacacgattacacgaccgaatcaaacccctctttctctccgaagctgcttttaatatcgtactggccttcgattgttctcctctttaatacatactgttctctcttcgatttgagggaacagtacaagagtctgagcatcggttaacccaactgcacaggtagtctccaaataatggagcctcatgatgagactggatgccaggctcctgaacgccccattctttgcattaataattgtggcttctttggaagagcagctaccatgaacatgtgttccaagtgttacaaggacatgctgttgaagcaggagcaagacaaatttgcagcatcatccgtttaaaaacattgtgaatggcagttccaatggcaatggaaaacaggctgtgg

SEQ ID NO: 34663 - DNA, 316 bp, Glycine max
  Clone ID: LIB3052-001-Q1-B1-G4
caccagtgctatcttcaaatatcatgtccacacatgtcatcaaggtcgtcacactcgaagcatgataagagtagcccttcataccatagaatcagttccgatttgaagcctggaatggtgtttgttgtccctcccggtcatcccttcgtcaccatagcttccaataaagagaatctcctcatgatttgcttcgaggttaacgctcgagacaacaagaagtttacatttgcagggaaggacaacattgtgagttctctggacaacgttgctaaggagcttgcctttaactatccttctgagatggtgaacggagtat

SEQ ID NO: 34664 - DNA, 297 bp, Glycine max
  Clone ID: LIB3052-001-Q1-B1-G5
gctagaatggaatttcgatgctcagtcatctcttttaccattctcttctctcttgctcttgcaggagagagccatgtccatgcatcgctacctgaggaagattattgggaagctgtttggccaaacactcccattcccactgcactgcgagagcttctaaagcctctccctgcaggtgttgaaatcgatgaactccctaagcaaattgatgatacacagtacccaaaaacattcttctataaagaagaccttcatccaggcaaaacaatgaaagtacaattcaccaagcgtccctat

SEQ ID NO: 34665 - DNA, 327 bp, Glycine max
  Clone ID: LIB3052-001-Q1-B1-G6
gggaaacaaaactacccttttgcttttgctctttgttctttgccatggagtggccacaacaacaatggccttccatgatgatgagggtggtgataaaaagtcaccagaaagtttgtttttgatgagcaactccacgagggttttcaagactgatgcaggggaaatgcgtgtgctgaaaagccatggtggtaggatattttataggcacatgcacattggcttcatctctatggaaccaaagtccttgtttgttcctcagtacctcgactccaatctcatcatattcatccgtagaggggaagcaaagctgggattcatatatgatga

SEQ ID NO: 34666 - DNA, 313 bp, Glycine max
  Clone ID: LIB3052-001-Q1-B1-G8
gatcatacatagtagtgttggtgggttgcaaagatgcttgggggtcttctccataggggtcataagataaaagggacagtggtgttgatgcgcaagaatgtgttggacgtgaatagcgtaaccagcgttgggggaattattggtcaaggtctcgacttagttggctcaacactcgatactcttactgccttcttgggccgatccgtgtctctccagcttattagtgctaccaaagctgatgccaacggaaaagggaaacttggaaaggctacctttttggaaggtatcattacttcattgccaactttgggag

SEQ ID NO: 34667 - DNA, 260 bp, Glycine max
  Clone ID: LIB3052-001-Q1-B1-G9
gatagattccatcggtgcgtttctgctctgctagggtttcatcttcttccatcacctccgtcgcaatgaaaccaggcttcatctgaatccgattccccttcgccccttctcctccttcactttcaccttctccgaatcctctaccaattattatgatgaactccatcttcgtctctcacaaccttcgcgtctttggtcccggcttgaatcccttcgcaccttattgcatcggcaatcacaccctttcctctcgctaaata

SEQ ID NO: 34668 - DNA, 335 bp, Glycine max
  Clone ID: LIB3052-001-Q1-B1-H1
cttgcaggttcgaaagacaatgtgataagccagatacctagtcaagtgcaggagcttgcgttccctgggtctgcaaaagatattgagaacctaataaagagccaaagtgagtcctactttgtggatgctcagcctcagcagaaagaggaggggaacaagggaagaaagggtcctttgtcttcaattttgagggctttttactgaataagtatgtagtactaaaatgtatgctgtaatagctcatagtgagcgaggaaagtatcgggctatttaactatgacttgagctccatctatgaataaataaatcagcatatgatgcttttggtttgtggt

SEQ ID NO: 34669 - DNA, 83 bp, Glycine max
  Clone ID: LIB3052-001-Q1-B1-H10
acgtcgcacgcacgcttacctcagcactcggctcgagaaacaactctttctcttcttccttcgctcgttgttctccctcgcgt

SEQ ID NO: 34670 - DNA, 318 bp, Glycine max
  Clone ID: LIB3052-001-Q1-B1-H11
gaacactcatcaccatggccaagcttgttctttccctttgtttccttcttttcagtggctgcttcgctctgagagagcaggcacagcaaaatgagtgccagatccaaaagctgaatgccctcaaaccggataaccgtatagagtcggaaggtgggttcattgagacctggaaccctaacaacaagccattccagtgtgccggtgttgccctctctcgctgcacccttaaccgcaatgcccttcgtagaccttcctacaccaacggtccccaggaaatctacatacaacaaggtaatggtatttttggcatgataatcc

SEQ ID NO: 34671 - DNA, 308 bp, Glycine max
  Clone ID: LIB3052-001-Q1-B1-H12
gatcagggtcgcaaggtcgacgagtatggcaatgttgagaggcaaactgacgaatatggcaacccggttcatgccactagtgtcacttatgtagccaccaaaagtgttggtggctacaatgatgacgctaataagcaacatgatattactggtgtctatcccgagaaagacaccggtagacatcattttggtcgtggttacgacggtgacactaacaagcaacatgatgctactggtgtttatcccggaatagacattggtagagattatgggactaccggtgtttaagggctaaacaccgacagaca

SEQ ID NO: 34672 - DNA, 408 bp, Glycine max
  unsure (1)..(408): unsure at all n locations
  Clone ID: LIB3052-001-Q1-B1-H2
cggctcgagctatcagcatcctccatctcttcatcagaagatccaaaatcatcatcatcagaatcatcatcagagtggtgatgaagatgatgatgaagagacccctcccaagaaggtggatctgggaaagaagagacccaatgagtctgcatcaaaaactccagtttcttccaagaaagccaaaaatgctactcctgaaaagactgatggtaagaaaggtggacatacagcaactcctcaccctgcaaagaaaggcggaaagactcccaacagcgaagccaaagccaagactcccaacagtgaagccaaagccaagactcctaagtctggtggactctcttgcanaacctgcagcaagtctttcaacaatgaaagtggtctgcaacaacataacaaggcaaagcatgg

SEQ ID NO: 34673 - DNA, 385 bp, Glycine max
  Clone ID: LIB3052-001-Q1-B1-H3
gttagaaatataactaaagagaccatggagatagtagctaacaaggaagttattgcagttaaccaagatccacttggtgtacaaggtaaaaaggttaggatggaaggtgatgaagagatttgggcaggtcctctttcagggtacagggtagctgttgtcttgcttaatcgtggcccttggaaaatatcaattacagccaactgggatgacattggtattccaccaaaaagtgctgttgaagctagagacctttgggagcacaagacattgatgagacccttcgtggataaattgactgccacagttgatccacatgggtgtaaaatgtacgttctgaaaccaatggcttgaattttccggaaccaaatttttggattgcaccttt

SEQ ID NO: 34674 - DNA, 331 bp, Glycine max
  Clone ID: LIB3052-001-Q1-B1-H5
cagatggataggtatcagagggtagagaagcccaaggcagagactcctataaacgagaatgagatacgcgtcactactcaaggaaggatgaggaattacatcacctacgccaccactctcctccaggagaaaggatctagtgaaattgttctcaaagcaatgggacgtgcaataaataagaccgtaatgattgctgaactgatcaagagaaggattgttggtctgcatcaaaacacccaaattggatcaactgatataactgacacatgggaaccactagaagaaggccttcttcctttggagactactcgccatgtttcaatgatcacaa

SEQ ID NO: 34675 - DNA, 364 bp, Glycine max
  Clone ID: LIB3052-001-Q1-B1-H8
tataagcttagcaagggtttaagaagtcgaacgagcgagcactgagcagcggttgcaggaaaagccgtgtcagcgagcgtcgcattcacggcgatggcggagacggtgagacttcgcgtggtgttcgaggatcgtggcatgttgagcaagtcaaagaagaagcaagggctcaagcgttgctggtttctgcttaaaccccaacacaccaccaattccgatgttgcctctcatctactcaacactttccgcctccaccgcacctgtccccatggcatcgtcctatcgatggatggttttgttttgccatctttttgagtcacttgcattttgaaggataagggcattgtgtgtgtgaaaagaaaag

SEQ ID NO: 34676 - DNA, 144 bp, Glycine max
  Clone ID: LIB3052-002-Q1-B1-A1
ccaaaattaatccaaatccgtgttccgaagcaaggaatttgggaattccgaaacctacccgatttcaatgggaaaaccattgtttcactgggtggaccggcaacccaaaggaaggaggtcaaggtaccaattaatgggttaatt

SEQ ID NO: 34677 - DNA, 332 bp, Glycine max
  Clone ID: LIB3052-002-Q1-B1-A10
cgcgcttgaggcttccattgctagcaattttactgataacggatgcattgcgtgtatgtgtcacaacactgatggactttatagtgctaagcagactgctattgtgagagcttctgatgatttttaccctcgtgatcctgcttcccataccatccatatttcttctgttgcatacaactcactattccttggagaattcatgcaacctgactgggacatgtttcatagtttacacccagcagcagattatcatgctgcagctcgtgcaattggtggatgtcctatttatgttagtgacaagccaagcaatcacaattttgattctcctaaga

SEQ ID NO: 34678 - DNA, 302 bp, Glycine max
  Clone ID: LIB3052-002-Q1-B1-A11
gcaattcactctgtacaattcttcgttcgttctctgcagttatatcctttttgagcttcaatggcggacgctgaaaccttcgctttccaggctgagatcaaccagcttctaagtctcatcatcaacacattctacagcaacaaggagattttcttgcgtgaactcatcagcaatgcttctgatgctttggataagattcgattcgagagcttaaccgacaagagcaagctcgatgctcagccagagctcttcattcgtcttgtgcctgacaaggataacaagactctttccattattgacag

SEQ ID NO: 34679 - DNA, 353 bp, Glycine max
  Clone ID: LIB3052-002-Q1-B1-A12
atgcaacctccacaaaggcttatgctaccagaaccatccttttcctgaaaaatgacggaactttaaggccacttgccatagagttgagtttgccacatcctcagggagatcaatctggtgcttttagtcaagtttttctgcctgcagatgaacgtgttgaaagttctatttggctgctagcaaaggcttatgtagttgtgaatgactcgtgctatcatcaacttgtcagccattggttaaacactcatgcagttgttgagccattcatcatagcaacaaacaggcatctcagtgttgttcaacctaattataaactccttcaacctcactatcgtgacaccatgaacctaaat

SEQ ID NO: 34680 - DNA, 392 bp, Glycine max
  Clone ID: LIB3052-002-Q1-B1-A5
caacaaactaaaccaatccataccattaagaaacagcacatctatctcagtccccacaccaagaaaccctaaattaaagtcatgtgctcctccaggtctaccagtgctgcaccaacaagaccttgttacttggaacacggccacggcttggcttcctttaaacacatggatgcgtgtcataatcgtgccaacagctttgtctctaggtcgatgaccatgggttacggcacttcctaccacagaactagtttaaggaacaacaacaacaacaacacgcaacatcgtttctgtttcttcaccaagatctgcgagattctacgacgccagattcgaagattaacaccaagcccacttcctcttcgcttgtatcctctgcaataaatctctcgggg

SEQ ID NO: 34681 - DNA, 395 bp, Glycine max
  Clone ID: LIB3052-002-Q1-B1-A6
ggaagaggaatcttgagaaatggcaggggacagcaagagcaagattctgttcatcggagggactggttacatcggaaaattcatcgtggaagccagcgccaaagctggccacccaactttccttttggtgagggagtccactctctccaaccccgcaaaatcacccctcatcgacaatttcaaaggcctcggtgtcaatcttgttttaggagatctatacgatcaccaaagtttggtgagtgctataaagcaggtcgatgtggtaatttctactgtaggacacctgcagctagctgatcaagataagatcatttctgcaattaaagaagcaggaaatgttaagaagttctatccatctgagtttggaaatgatgtggaccggactcatgcagttg

SEQ ID NO: 34682 - DNA, 328 bp, Glycine max
  Clone ID: LIB3052-002-Q1-B1-A7
aatgcctcacacatagaacatcagcagtaaggtgataaacagagaggttcacattgagagacacagataagactccctccctgataagggaacggttgtgatagatagtgagaagaatgacaatgagagagagttagcttctgatacaaccaggtctggaactatacttaacgacgacatcgaggttgacgaaggaagacgaggaatagagagttgtagtggttgtggtgttcagcatgagaggaagtttgcaactaaagttgatgagaacaacggttttggggaaacagctgaactctagggaataacatcagtcgtggtgggaaga

SEQ ID NO: 34683 - DNA, 388 bp, Glycine max
  Clone ID: LIB3052-002-Q1-B1-A8
ctactacaagtacttccttacaatcaaaaccaacaacaactatggcaagttatcaaaagcactacgatgatcagggtcgcaaggttgacgagtatggcaacgttgagaagcaaaccgacgaatacggcaaccctgttcatgctgctagtgtcacctatgtagccaccagaactgctgctggtggttacagtgatgacattaataagcaacatgataccaccaatgcctacggcgtagacactggtagacagcattctagtggtggctacgatggtgacactaataaacatcatggaactactggtggctataatgatgacaccaatagacatcatggaactaccggtgtctatggtatagacaccgataggcaacaacatgggactac

SEQ ID NO: 34684 - DNA, 394 bp, Glycine max
  unsure (1)..(394): unsure at all n locations
  Clone ID: LIB3052-002-Q1-B1-B1
tccaaaatttaataacccaataaaacctaataaattattttagataacaagaataaaagcacggttccaataccggttccgggaacttttttcccgggcttcagtttctgtctcatttggcattgcttactgggaaaaagaaaaccccaaacacaacaagtgtctccagagttgcaatagcgagagagactcgtacaggaaccaagcatgccacgctcgttgcaacctccttaaggtggagaaagaagaatgtgaagaaggtgaaattccacgnacacgaacacgaccacaacacccggagaaggaaactcagcaacccggtgagaaggacgaagacgaagatgagcaaccacgtccaatcccatttccacgcccacaacctcgtcaagaagaa

SEQ ID NO: 34685 - DNA, 316 bp, Glycine max
  Clone ID: LIB3052-002-Q1-B1-B11
gtttgttattcaaagcaaaagtttgatcttttccacatttccttctaatgttactttatatttcatctgtcaatttctgtcttatatgctatgacagtatgacttaaaatatgctcaaggagaatcattttaaactgttttcatccgtaagttactgattctgcgattttcattggacagtcaatattattagggtttgtctaacttgttattgctaacaatgccgtctaaacctatgacgaatgtaacatttgattttgttatctccagagatgcttaatcttaccactcgtctctgctggaattttttgaaaaa

SEQ ID NO: 34686 - DNA, 313 bp, Glycine max
  Clone ID: LIB3052-002-Q1-B1-B12
tgctgacgctgattacctcatcgttatccttaacgggactgccattctttccttggtgaacaacgacgacagagactcctacagacttcaatctggtgatgccctgagagtcccctcaggaaccacatactatgtggtcaaccctgacaacaacgaaaatctcagattaataacactcgccatacccgttaacaagcctggtagatttgagagtttcttcctatctagcactgaagctcaacaatcctacttgcaaggattcagcaggaacattttagaggcctcctacgataccaaattccaggagattaac

SEQ ID NO: 34687 - DNA, 411 bp, Glycine max
  Clone ID: LIB3052-002-Q1-B1-B3
ctacgttaactacggaatccggtccaaccttccggtcaattcccccggtttttcctccaaaccaatggttccggggaaaccccgaaatttaacaaggcttctccgaacggcggcttcggcggcttcggcttcgtccctctccctcttaagcccaacctcggaacctctccgttcggttcccgctcgtggattggtggttcgcgccccgaaaggatccacgaaccaccgcgccctaaccggcgtgatctttgaaccgttcgaagaggtgaagaaggagctcgatctcgttcccaccgttccacaagcttctctcgcccgccaaaaatacgttgacgaatccgaagccgccgttaacgaacaaatcaatgtggagtataacgtttcctacgtttatcatgctatgtttgcgta

SEQ ID NO: 34688 - DNA, 265 bp, Glycine max
  Clone ID: LIB3052-002-Q1-B1-B4
gttaactccggattccgctccaggagaaccccaaacacaacaagtgtctccaaaattgcaataaccagagagactcgtacaggaaccaagcatgccacgctcgttgcaacctccttaaggtggagaaagaagaatgttaagaaggggaaattccacgaacacgaacacgaacacaacaaccggagaaggaacctcaacaaccccgtgagaaagaggaagacgaagattagcaaccacgttcaatcccatttccacgcccaaaacc

SEQ ID NO: 34689 - DNA, 380 bp, Glycine max
  Clone ID: LIB3052-002-Q1-B1-B5
atcatggagaagatccaaggccgcggcgatgacgatgatgatgatgacgacgacaatcacattctcaggaccatgcggggaagaatcaactacataaggaggaacgaaggaaaagacgaagacgaagaagaagaaggacacatgcagaagtgctgcacagaaatgagcgagctgagaagccccaaatgccagtgcaaagcgctgcagaagataatggagaaccagagcgaggaactggaggagaagcagaagaagaaaatggagaaggagctcattaacttggctactatgtgcaggtttggacccatgattcagtgcgacttgtcctccgatgactaagaagttaaagcaatgttgtcacttgtacgtactaacacatg

SEQ ID NO: 34690 - DNA, 392 bp, Glycine max
  Clone ID: LIB3052-002-Q1-B1-B6
atttgaagcgtggttatgttgcctcaaactcaaaggatgaccctgcaaaggaggctgctaacttcacagcccaagtcatcatcatgaaccacgctggtcagattggaaatggctatgcccctgtcctcgactgccacacttctcacattgctgtcaagtttgctgaactcatgaccaagattgacaggcgatccggcaaagagcttgagaaggagcccaagtttttgaagaacggtgatgctggttttgttaagatgattccaaccaaacccatggttgttgaaactttctccgagtatcctccacttggtacgtttgctgttagggacatgcgtcaaactgttgctgtgggagtcatcaagaacgttgagaagaacgatcctaccggagcc

SEQ ID NO: 34691 - DNA, 392 bp, Glycine max
  Clone ID: LIB3052-002-Q1-B1-B7
ctctccttctcgcagagtgagcgagcaagcgaatatcccaatcccacaccaatggcatgctcagccacctctgcttccctcttctccgcaaacccaacacccctcttctctcccaaaccctctctctccctccaccttaaccctctccccacgcgcccttctccctccctcacgcgcccttctctctccctcacgcgcccttctcactctcgccgctccttcgttgtcaaagcctcctccagcgagcttccgctggttggtaacaccgcaccggatttcgaagcagaggctgtgtttgaccaggagtttatcaacgtgaaactatctgattacattgggaagaaatatgttgtgctcttcttctacccgttggacttcacctttgtctgccc

SEQ ID NO: 34692 - DNA, 390 bp, Glycine max
  Clone ID: LIB3052-002-Q1-B1-B8
aaatcatttcgttgcagtcagtcattcgaagaatacggtttcagatatgaatcgcaatcgtatgggagatcgacatctggctgcattgtaagtgcaattctcgtattcttcatgatcttctcatcctgactctaggtgaatcctctaggtacgcaccgttatgccactggcaagcacccttctggctactgcacgcgcccatctgactctgcgggactccttcggtgtcaacagtctactccagtgagcttccgctggttggtatcaccgcaccgggatttcgacgcataggctgtgtttgacgaggagtttaacaacgtgaaactatctgattacattgggaagaaatatgttgtgctcttcttctatccgttggacttcacctttgtc

SEQ ID NO: 34693 - DNA, 329 bp, Glycine max
  Clone ID: LIB3052-002-Q1-B1-B9
atccctttccttcctgcctctctttgctttcctggctctttcagaagatgttgaacaagttgtggacataagtggcaaccccattttcccaggtggcacatattacattatgccatcaacttggggcgctgccggtggtggattgaaactaggccggacaggaaactcaaactgcccagttactgttttgcaagattactcagaaatcttccgtggcacaccagtcaaattcagcatacctgggataagccctggaatcatctttacaggtactccacttgaaatcgagttcgcagagaaaccttattgtgctgaatcctccaaatggg

SEQ ID NO: 34694 - DNA, 116 bp, Glycine max
  Clone ID: LIB3052-002-Q1-B1-C1
cttccttaactacggaatccgctccaattgaattcacaatcgggggtctccaccttgaacaagaatcaaggaaggacaatcatcaccataaccaatctcaatggtgatcataacaa

SEQ ID NO: 34695 - DNA, 313 bp, Glycine max
  Clone ID: LIB3052-002-Q1-B1-C11
ctcgtccttccttctcaccatctcccacactccaccgccatgacggacaacgaccgcgtctcccgccgcaccgaggtcctcaccaaccacctcctccgccgcacacccccaccctctcttctccgccccctcccctgcctgagctactcccccccggagctctccaacaccatctccttcgacactcgcgagatgcgaaaactgatggactgccacaaccttgaggaccgcgactggctcttctcccttatcctccagagccccctcttcaatctccgccaacgcgcctgaagattcttcgtctgccccgact

SEQ ID NO: 34696 - DNA, 309 bp, Glycine max
  unsure (1)..(309): unsure at all n locations
  Clone ID: LIB3052-002-Q1-B1-C12
tgtaaagagatacaacaacgttcaattagatgggaaaccaatgaagattgaaattgtgggaacaaacatttccacacctggtgtagctcctgctcctaacggagctattggaaattttaatggagttcctcgaagtggacaaggaagaggtggggcattaagaaggccaagaggaagagggcaaggcattcgaagggatcggggacggggaagaggtcgtggtggaggaggccgtggtgaaaaggtatctgctgatgatcttgatgctgatttggagaagtatcatgcanaagcaatgcaattgaactg

SEQ ID NO: 34697 - DNA, 421 bp, Glycine max
  Clone ID: LIB3052-002-Q1-B1-C3
ttacttaactacggaatccggtccaaaaccggaaactccaaaaacaatggctccaaaggtggccccaacttaaacaatggttcccccaacttggttcccccaagaaattttaacaacgtgaaggccccaaaggttcctgttggcggattccctgctttgcttaaagttggaattattggtgggcttgttgtatatggggctgcaaacagcttgtacaatgttgagggaggtcatcgagccattgtcttcaatcgtgttgtcggtgtcaaagataaggtctatcctgaagggacacatattatgattccttggttcgagaggcctgtgatctatgatgtacgtgcacgtcctcatttagtagagagtacatcagggagccgtgatctccaaatggtgaaaattggacttagagtccttaccc

SEQ ID NO: 34698 - DNA, 126 bp, Glycine max
  Clone ID: LIB3052-002-Q1-B1-C4
cctctctcccatactcacatttacaggcgtgagactgagaaaactcatatcttccgtgctgatattccacaggtgaagaaaaaggattttaaagggcaagtggaggagaataagattctgcagata

SEQ ID NO: 34699 - DNA, 394 bp, Glycine max
  Clone ID: LIB3052-002-Q1-B1-C5
gaaacagacaatttgcagagtttgtttattgtgaaaaatagaacaatgcatgcagcatagaaatccatagagacctttaatgaaatcgcagccaacattggcgcctctgccaattctggcttggagaaaaccaaggccactatccaagagaagattgagaatatgaatgcagaagatcagactcaaatggatatggctaccaagaggaaagatgagaagatcaaccaggctgagatggagaagcagcaggcccgtacgttacacgccgctgcaaaacactacgccatggatgagcacatggcacagggcagtcacgataccgccgggcctagaatcgagactgctacacacatcatcagtgggcccgggactgacaatgctatgtagtctaaca

SEQ ID NO: 34700 - DNA, 393 bp, Glycine max
  Clone ID: LIB3052-002-Q1-B1-C7
cttaattattaacacttccttagttcaatatggggaagcccttcactctctctctttcttccctttgcttgctactcttgtcgagtgcatgctttgctattagctccagcaagctcaacgagtgccaactcaacaacctcaacgcgttggaacccgaccaccgcgttgagtccgaaggtggtttgattcaaacatggaactctcaacaccctgagctgaaatgcgccggtgtcactgtttccaaactcaccctcaaccgcaatggcctccacttgccatcttactcaccttatccccggatgatcatcatcgcccaagggaaaggagcacttggagttgcaattccaggatgtcctgagacgtttgaggagccacaagaacaatcaaacagaa

SEQ ID NO: 34701 - DNA, 390 bp, Glycine max
  Clone ID: LIB3052-002-Q1-B1-C8
caaaaagtaatctggatcctgcaatctatggtgatcaaagcagtaagataacagcagattcccttgatctagatgggtacacaatggacgaggcacttggtagtcgaaggttatttatgttagattaccatgatatcttcatgccatatgtgaggcagataaatcagctgaattctgcgaagacttatgcgacaaggactatcctttttttgagagaagatggaactttaaagccagtggccatcgaattaagtttgccacattctgctggggatctgtcagctgccgtcagtcaagtcgtcttacctgctaaggaaggtgttgagagcacaatttggctactagccaaagcttatgtcatcgtaaatgactcttgctaccatcaactca

SEQ ID NO: 34702 - DNA, 330 bp, Glycine max
  Clone ID: LIB3052-002-Q1-B1-C9
gtatgcatcaacagctctgcagtatcttcttgggaaccaatcagaaacatgtctgtggtttcctctgcacaggagttgcagctacgagacactgttttcagggaccttgcaggatgtgttcccggctacttgcagtggagaaacagtcatgtttaatgttacctccagttcatcgaccttattggtagttttccttttcgaaaactttgttgcacatatcctcaaacgatgagaattctgatactactcatgcttagcatattgaccggctctctgaggaatcatagttgcatctaccagtgactcactgtatacccaagtgcccaattc

SEQ ID NO: 34703 - DNA, 305 bp, Glycine max
  Clone ID: LIB3052-002-Q1-B1-D10
cttggaatatcacaaatgggtagtaacagatggaattggtaggcatgttggggttcagaagtattttcaaaaatgaagctcttgttgttcttggtgcctctcgtactaggtgctggctttgcttctgtaaatggtccaagcctttgcacatggagtttcattgtggactgttctatcacatttactcatcttcctgcatcgtcagattcctcctcaaatgcacgtcatcaatctaatgagactaaagttttcaatgtcaccaagcccgggttcaatttagctgctggcaaatgaatccgatgaat

SEQ ID NO: 34704 - DNA, 307 bp, Glycine max
  Clone ID: LIB3052-002-Q1-B1-D12
attttgttggagatctcgtctttgaagtttctaagatgacttccccctacattaaatgtacagtctctttcttcatagcatttggaaatttggctgatgacaccatcaattttgaggcttttccccacaagctggtgcagtttggagagattcaggaaaaagttgtattgaaattttcacaagaggaatttcttacagcttggtcaactcaggtgcgtcctgcaacaactctgttggctgatgggtgtccatatttgtaagctatggtgcatgataattcagtttccacaataacaagttaatttgg

SEQ ID NO: 34705 - DNA, 392 bp, Glycine max
  Clone ID: LIB3052-002-Q1-B1-D2
ctttccgttatgcatatacgtagaagttgtatttgggtattcactttagttagctgtcgtaatttaatctttttcacgtgaaaataggtgttcgaaagagcttatagcagttcttagaagaacaaaatggaatgaaaaagagataaattatcagaatggtacatttagagggctatctggcaaaactgcttctttagcagattatatacattttgcttcaactgaattttacatgcttttcaatatacaacatgataatgaaggcgaacattcgccattattcatattaatcaatatcttacgagttacccaagtttaactacgtttagccaactgtgaatgctaagctaatctcaacaatttgattccgtttcaggccagaacaatgaaac

SEQ ID NO: 34706 - DNA, 301 bp, Glycine max
  Clone ID: LIB3052-002-Q1-B1-D3
ctttcggtaacgcatatacgttgaaattgtttttgggtattcactttagttaactgtcgtaagttaatcgttttcacgtgaaaatacgtgttcgggagagcatatagcagttcttagaagaacaccatggaattaaaaagagatgcattagctcaatggtatatttagatgcgcatctggaataactgcttctttatcagatgatatacattttgcttgaactgaattttacatgcttttcagtatacaacatgattatgaacgagaacattcgccattattcatatgaatcaatatctta

SEQ ID NO: 34707 - DNA, 393 bp, Glycine max
  Clone ID: LIB3052-002-Q1-B1-D5
gaagcagcaaagggaaacaaaggggaataactgcaccattgacccaattaacgatagcaagtacgagcatagccttgagagttttgcacagaagctagtgaaagaaaggccttcaacatcaacatcaacatcatttgttatggctacttccaacagttcttttctgcatgctgatgcaccggctcctgcaccagccttgcttccgtcttggctttccaattccaatggcactgcacctgtgaggccaccctcaccttctgtgactcgtagtctttctcactcgacggtggcagcgtctccgccatggatgcaaccgcacgtcagaggacaggacaatgctaatcctcttgttttggggaatgtggcgcctcacggtgccgttctagcatttgg

SEQ ID NO: 34708 - DNA, 356 bp, Glycine max
  Clone ID: LIB3052-002-Q1-B1-D6
catagaacagcatcgaacccgtcgtaccagatgaacttgtcaccatggtttcttccgacattgatccacgagaggatgtccttcatgcctggtacatggatgatgttgatgatgatcacagactcctgccatcatgtgagaacccaaggagtttgtcgcgttggaccaacttgctgaacatggagtccttagctggaaactagatgcggataaccatgagaatgatccagatctgaagaagattcgtgaagagcgtggatacacctacatggatgtttgtgacgtctgcgcagtaaaattgccacattatgaacagtaaatcaactgcttctttgaagagcagcgtcacactgatg

SEQ ID NO: 34709 - DNA, 363 bp, Glycine max
  Clone ID: LIB3052-002-Q1-B1-D8
gccgaggatctcccctttcgaaccgattatgccgatagatatgtatccgcgggaagtattgaatactggccggatccacagcgtggcatcaaggaagcttacagggttttgaaacttggagccaaggcatgtctaattggtccggtctaccctacattttggttgtcacgtttctttgctgatgtttggatgcttttccccaaggaggaagagtatattgagtggtttcagaaggcagggtttaaggacgtccaactaaaaaggattggcccaaaatggtaccgtggtgttcgccgacatggcttgattatgggttgttcagtgaccggtgttaagcctgcatctggagattctcctttgcag

SEQ ID NO: 34710 - DNA, 354 bp, Glycine max
  Clone ID: LIB3052-002-Q1-B1-D9
cttggaatatcacaaatgggtagtaacaaatggaattggtgggcttgttggggttcagaagtattttcaaaaattaaactcttgttgttcttggtgcctcacatactagttgctggctttgcttctgtaaatggtccaagcctttgcaaatggggtttcattgcggactgttctatctcatttactcctcttcctgcttcatcaaattcctcctcacaaacacttcatcaatctaatgaaactaaagttttcaatgtctccaagcccgggttcaatttaactgctgcaaatgaatcagatgaatctcatccacgatataagcagaaaagaaaactcagtttcataggataaaat

SEQ ID NO: 34711 - DNA, 349 bp, Glycine max
  unsure (1)..(349): unsure at all n locations
  Clone ID: LIB3052-002-Q1-B1-E10
ccttaataaataatttaagatactatgatgagagcacggttcccattactgttgctgggacttgttttcctggcttcagtttctgtctcatttggcattgcttactgggaaaaagagaaccccaaacacaacaagtgtctccagagttgcaatagcgagagagactcgtacaggaaccaagcatgccacgctcgttgcaacctccttaaggtggagaaagaagaatgtgaagaaggtgaaattccacgaccacgaccacgaccacaacacccggagaaggaaactcaacaatccggtgaaaaggangaagacgaactgaacaaccacgttcaaatcccattcccaagcc

SEQ ID NO: 34712 - DNA, 279 bp, Glycine max
  unsure (1)..(279): unsure at all n locations
  Clone ID: LIB3052-002-Q1-B1-E11
cccagttcanaggtaaggtangttaacaaccctcctcaacctcctcccaatgggaccttttattcgttcccaaccttagggaacaaggtccgtcctcaagtcccaaaacgcaacaacgcaaagggcctgcacacttctcgagcccctacttttcggaaagcaaaggggatctcaaaggggtttgcacccaaattttatctaaacccttgcccggggcgcccctctcccaagtcgccttccgccaccctttcagatacaagaagcacaacgagctcttca

SEQ ID NO: 34713 - DNA, 256 bp, Glycine max
  Clone ID: LIB3052-002-Q1-B1-E12
gcagatagaagagaagtgaattattaggatatacattggctttggccgtttgagggtgagtcagattgatgctgtgatgggagattataagagtttttcattttccaaaatgatgggctgctgtggttgcttcggatttgtccaaaaatcaagacgacggcgtccggatacacgtggcatcagtaatcttctctcccagaggctattattggatggagaaactgaaagcgatgagacatatactggtgacgttact

SEQ ID NO: 34714 - DNA, 438 bp, Glycine max
  Clone ID: LIB3052-002-Q1-B1-E3
cttcggacgcacccttacttaaccccggaatccggtccaaccaaaattgtccaacttgattgaaaattattgtgttaaaaacaaaacaatttttcaatggcttcaaaaaaacaagaggagcgacctgaggcagctgcgaaagttgctgccaaagaactcgaacaagtcaacagagaaagaagagaccgtgatttcggtgttgttgctgaacaacaacaacaacatcatcaggaagatcaacaaaaacgtggtgtaatcgggtccatgtttaaggcggtgcaagacacctacgagaacgccaaggaagctgtcgttggcaagaaagaagctactaataacgcgtacagtaatacagaggttattcacgatgttaacattcagcccgatgacgtgtcggcaacgggggaagtaagggacatatcagccacaaagactcat

SEQ ID NO: 34715 - DNA, 318 bp, Glycine max
  Clone ID: LIB3052-002-Q1-B1-E4
ccatacgtgatcacagagattctgggtaacacgtgcagtgtttcaaaagttactaacggacacagatccaagcagttgcgacttgcgagatgcattcgacgaagagtagcaccagcgataatatcaatatcaatatcaaatcaaaagataaagaaatccatcgatgctaccataactaccgaaagaagagaaagcgtccttgccaagacgctgtggctcccaccacggaagacgacaactgctgcaccaaggccgccgccgcatcacacggtttcatatccgttatagggcggcggcgcgtgatggaggatgcactga

SEQ ID NO: 34716 - DNA, 349 bp, Glycine max
  Clone ID: LIB3052-002-Q1-B1-E5
ctggaaccctttgatagactatacatagagacacacagagagagacagacaagaaggataaagatgcaatcttcaaaggagaagctgaaaaacatgaccagtgctgccaaggagcaagtcgacatcgagaaagcaagcatagacgataagacagagaaagcaacggcaataacacaagaggagagggtgattacccatgaacgtgcaaaggcaatcgaagctgatgcaaagatggagctgcatgaagcacaagccaggcatgcagcagagaagctaagcaccagccaatcacattatggtccccaccatggtcataaccctcccctggtaagaacaactgagactcact

SEQ ID NO: 34717 - DNA, 393 bp, Glycine max
  Clone ID: LIB3052-002-Q1-B1-E7
gaaagaacttccttataaccaaaaccaacaacaactatggcaagttatcagaagcactacgatgatcagggtcgcaaggtcgacgagtatggcaatgttgagaggcaaactgacgaatatggcaacccggttcatgccactagtgtcacttatgtagccaccaaaagtgttggtggctacaatgatgacgctaataagcaacatgatattactggtgtctatcccgagaaagacaccggtagacatcattttggtcgtggttacgacggtgacactaacaagcaacatgatgctactggtgtttatcccggaatagacattggtagagatcatgggactaccggtgtttatggcctaaacaccgacagacatcatggaacttctggggtgaat

SEQ ID NO: 34718 - DNA, 394 bp, Glycine max
  Clone ID: LIB3052-002-Q1-B1-E8
ggggatagtggaaagcactacaaacgatgaagcaacactttttgaggctttatatctcaatgacgagctgcagcagattgtttctaaatatgaggagttagatgctgctcaaagttctggggcacaacaacctcaaaatgctgacactgacaagcatgatgccaaagctgttcaaaaccccaatgaagtacccgaaaatgaagaatctgaagctgctcagaatctggatcgaaagcttccccaaaagtctaacactcttgaagtcaatgcaactgagggcgagagagatgatcttgctgaaactaaaatagtggatggtcttgctgaaactaaaatagtagatgatggcacgaacgagaagaatgctgaatctagtttcaagcgagataccgaa

SEQ ID NO: 34719 - DNA, 299 bp, Glycine max
  Clone ID: LIB3052-002-Q1-B1-E9
cggctcgagagagattgtggaatttgtgatcacacaacataagcatatatatagaaagatgtcaggggcacaaggagcacaaccaaaggagtcaaaaacagcaacaacatatgagtcagtagaaggaggagagaaccgaacaaggactgacttgctttcaagggaggatcaaggctgcattcaagtggaaaaacttcaggagaaggtccatgatcctgctggcaaaggtggtcctgtctttggtgctggcaaagatgaagacaaacaagaccttggagttactggcacaagctaattaa

SEQ ID NO: 34720 - DNA, 416 bp, Glycine max
  Clone ID: LIB3052-002-Q1-B1-F1
taactccggaatccgctccaaggaagatttccataaatgatttaatcagaaatcatccttaacgtcactacaagcatcttaagactccactaagggagatgggtatacgtcatcacgatgcagacttccttgatgacatacatggaaaattgaaggagtatgtgctggaggaactcaatgtacgatcccttgtaccatgtcatgatactttagaatatgccactttacgcgccaagcctgaatttagtgttttaggcaaaagacttggaaaatcaatgggcattgttgccaaagaaatcaaagcaatgtcacaggaaaacattttggcttttgagaatgctggagaagtcgtcattgcaaatcaatgtttgaagctgactgatattaaagttctccgtgattttaaacgacctgat

SEQ ID NO: 34721 - DNA, 308 bp, Glycine max
  Clone ID: LIB3052-002-Q1-B1-F11
cccggtgccttcactcctacttgcagcttgaagcacgttcctggcttcattgagagagcagaagagctgaaagggaagggtgtggacgaaataatctgtatcagtgtgaatgatccatttgtgatgaactcatgggccaaaacattcccagagaacaagcatgttaagttccttgctgatggtgcagccaaatacaccaatgcccttggtcttgagcttgacctcactgacaagggtctcggcgtccgctcaaagaggtttgctctgctggtggaagacctcaaggtgaaggttgcgaatgttgaaag

SEQ ID NO: 34722 - DNA, 200 bp, Glycine max
  Clone ID: LIB3052-002-Q1-B1-F12
ggctctctcacgcagtcgcagtgagtgaaaaggaaaatcctaattgcggtagtcacagtgccttcgagagaaagaaaagatggcagataatcttgttctccgtggcaccatgcgcgcccataccgacgttgtgacggcgattgccactcacatcgacaactccgacatgatcgtcaccgcctcacgcgacaaatccatca

SEQ ID NO: 34723 - DNA, 392 bp, Glycine max
  Clone ID: LIB3052-002-Q1-B1-F2
attgcatttcgttactttcatttgttgtgcaatcttacaagttccaaacttctctattttgttattatttgttctcacttctcacacatacagatttgagccttttatattatcatggcttctaaggtggtttcggttttggttatagcgatgatgttgtttgccatgaactgtaactgcactagtgttggccacatgccttcaaccaaagaggaaggtcacgattttcaggagtctaaagccaagaccacacaaactgcgaacaaggccatggaaactggtaaagagggacaagaagccgcagagtcatggacagaatgggctaaagagaaactcagtgaaggtcttggcttcaaacatgatcaggaatccaaagaatccaccactaacaa

SEQ ID NO: 34724 - DNA, 360 bp, Glycine max
  Clone ID: LIB3052-002-Q1-B1-F4
gagaagtaaaagatcttagtgcaagtaattaacatggaatctcagcaagcaaaccgtgaagaacttgatgagaaggcaaggcaaggtgaaactgttgttcctggaggaactggtgggaagagtcttgaggctcaagaacatcttgctgaaggaaggagccgtggagggcagacgaggaagcagcagctagggtcagaggggtatcatgaaatggggaccaaaggagggcagacaaggaaggaacagatggggagagaagggtaccaagagatgggacgcaaaggaggactcagcaccatggacaagtctggtggagaacgtgctgaagaggaaggcatagaaatagatgagtctaagttt

SEQ ID NO: 34725 - DNA, 394 bp, Glycine max
  Clone ID: LIB3052-002-Q1-B1-F5
ctcgagccgattcggctcgagcggctcgagttactaactaaacaatttttcaatggcgtccaagaaacaagacgagcgagctgaagcagctgcgaaagttgctgccaaagaactcgaacaagtcaacagagaaagaagagaccgtgatttcggtgttgttgctgaacaacaacaacaacatcatcaggaagatcaacatacacgtggtgtaagcgggtccatgattaaggcggtgcacgacacctacgagaacgccaatgaagctgtcgttggcaagagagaagctactaataacgcgtacagtaatacagaggtgattcacgatgttaagattcagcccgatgacgtgtcggcaacgggggaagtaagggacatatcagccacaaagactcat

SEQ ID NO: 34726 - DNA, 389 bp, Glycine max
  Clone ID: LIB3052-002-Q1-B1-F6
caaaaccaacaacaactatggcaagttatcaaaagcactacgatgatcagggtcgcaaggttgacgagtatggcaacgttgagaagcaaaccgacgaatacggcaaccctgttcatgctgctagtgtcacctatgtagccaccagaactgctgctggtggttacagtgatgacattaataagcaacatgataccaccaatgcctacggcgtagacactggtagacagcattctagtggtggctacgatggtgacactaataaacatcatggaactactggtggctataatgatgacaccaatagacatcatggaactaccggtgtctatggtatagacaccgataggcaacaacatgggactactggtggctatgccggtgacactggt

SEQ ID NO: 34727 - DNA, 394 bp, Glycine max
  Clone ID: LIB3052-002-Q1-B1-F7
gtaagatggcaagtggaggccattgcggttgaggggccacaagaacaatcaaacagaagaggctcaaggtcgcagaagcagcagctacaggacagtcaccagaagattcgtcacttcaatgaaggagacgtactcgtgattcctcctggtgttccttactggacctataacactggcgatgaaccagttgttgccatcagtcttcttgacacctctaacttcaataaccagcttgatcaaacccctagggtattttaccttgctgggaacccagatatagagtacccagagaccatgcaacaacaacaacagcagaaaagtcatggtggacgcaagcaggggcaacaccagcaggaggaagaggaagaaggtggcagcgtgctcagtggcttca

SEQ ID NO: 34728 - DNA, 391 bp, Glycine max
  Clone ID: LIB3052-002-Q1-B1-F8
atgagtttgaagaacaacatggtggtgctaaaggtgtgtttgttgcttcttttccttgtgggggttagagctgcacgcatggaactgagcttcttcaaaagtgatcagtcatcaagttatgatgatgatgagtattcaaaaccatgctgtgatctctgcatgtgcacacgctcaatgcctcctcaatgcagctgtgaagatattaggctgaattcatgccactcagattgtaagagctgtatgtgcacacgctcacagccaggacagtgtcgttgtcttgacaccaacgacttctgctacaaaccttgcaagtccagagatgactagaaaaactaatagctctctcaaatggacgaagcccctttaggctttgtttgttatgttaggggag

SEQ ID NO: 34729 - DNA, 288 bp, Glycine max
  Clone ID: LIB3052-002-Q1-B1-F9
atgagtttgaagaacaacatggtggtgctaaaggtgtgtttgttgcttcttttccttgtgggggttacagctgcacgcatggaactgagcttcttcaaaagtgatcagtcatcaagttatgatgatgatgagtattcaaaaccatgctgtgatctctgcatgtgcacacgctcaatgcctcctcaatgcagctgtgaagatattaggctgaattcatgccactcagattgtaagagctgtatgtgcacacgctcacagccaggacaatgtccttgtcttgacaccaac

SEQ ID NO: 34730 - DNA, 254 bp, Glycine max
  Clone ID: LIB3052-002-Q1-B1-G10
ctcgagccgattcggctcgagctcgtctttgaagtttctaagatgacttctccctacattaaatgtacagtctctttcttcatagcatttggaaatttggctgatgacaccatcaattttgaggcttttccccacaagctggtacagtttggagagattcaggaaaaagttgtattgaaattttcacaagaggaatttcttacagcttggtcaacccaagtgcgtcctgcaacaactctgttggctgatgggtg

SEQ ID NO: 34731 - DNA, 323 bp, Glycine max
  Clone ID: LIB3052-002-Q1-B1-G11
attctctccattgtctttgaacactcatcaccatggccaagcttgttctttccctttgtttccttcttttcagtggctgcttcgctctgagagagcaggcacagcaaaatgagtgccagatccaaaagctgaatgccctcaaaccggataaccgtatagagtcggaaggtgggttcattgagacctggaaccctaacaacaagccattccagtgtgccggtgttgccctctctcgctgcacccttaaccgcaatgcccttcgtagaccttcctacaccaacggtccccaggaaatctacatacaacaaggtaatggtaatttt

SEQ ID NO: 34732 - DNA, 177 bp, Glycine max
  Clone ID: LIB3052-002-Q1-B1-G12
agggtcgcaaggttgacgagtatggcaacgttgagaagcaaaccgacgaatacggcaaccctgttcatgctgctagtgtcacctatgtagccaccagaactgctgctggtggttacagtgatgacattaataagcaacatgataccagcaatgcctacggcgtagacactggtatac

SEQ ID NO: 34733 - DNA, 383 bp, Glycine max
  Clone ID: LIB3052-002-Q1-B1-G2
ttcgatgcagaggatgatgaatgctcctgattcaaatgataatattgatctactgttgagcattgatttgttgggtttacaaggagcaggtaaagcttttccaaacaagattgtttttgatgataagcttgtgttggctaacacacaagaattctttgatggaaattttccagtggattcttggttaccaatttttgtgaattgtctttatcctgtaagtcaattaccttcagaagctgtcgttgtaaatgttacatgtggtagtggacgtggtggtttacccaccactgcttggattagttctgcagttaacaatcgctcctcagatatcaacaaaaagattcgcacagcacttgggaaaggtaagaaaattgtttttctta

SEQ ID NO: 34734 - DNA, 397 bp, Glycine max
  Clone ID: LIB3052-002-Q1-B1-G4
ccaacaatgaagaaaaagcaggttagggcagttatagatgattttgcgtggagaattccagggaaaccacttaaacgtgttaaaagttcttgctctgttctttcattttgagtccgatgtatttctacaacgggtgcccaatatagagaagcttgaggtgtgtgatggttccttcaaagagattttctgctttgatagtcttaatgtggatgaggatggattggtttcacagctgaaagtgatatgcccggactcccttccagagcttgtttccattgggccagagaactctgggattgtgccctttctcagaaatctagaaacattgcaagtaatcagctgtttcagttcaataaatctggtaccatgcacagtgtctttttccaatctgacatat

SEQ ID NO: 34735 - DNA, 388 bp, Glycine max
  Clone ID: LIB3052-002-Q1-B1-G5
gctataaagttgagtttgccacatcctcagggagatcaatctggtgcttttaatcaagtttttctgcctgcagataaaggtgttgaaagttctatttggctgctagcaaaggcttatgtagttgtgaatgactcatgcaatcatcaacgtgtcaaccaatggttaaccacacatgcagttgttgagccattcatcatagcatcaatcacgcatcacagtgttgttcaccctatttataaactccttcaccctcactatcgtgacaccatgaacataaatggacgtgcccggttatcactggtcaacgacggtggcgttatacaacaaacatttttgtggggaacgtattctgtggaaatgtctgctgtagtttacaatgattgcgttt

SEQ ID NO: 34736 - DNA, 390 bp, Glycine max
  Clone ID: LIB3052-002-Q1-B1-G7
caccaattcattctcatacattccttcttcttcttcttcttcttcttcttctttcacaatcacaatggcgcgagtggatctggatggtaaccccatcaagccacttacgatctgcatgatcggcgctggcgggttcatcgggtcgcacctctgcgagaagctcatgtccgaaacccctcacaccgtcctcgccctcgacgtctacagcgacaagatcaaacacctcctggattccgccgattcccccctcccttgggctggccgcatcaccttccaccgcctcaacatcaaacacgactctcgcctcgaaggcctcatcaagatggcagatctcactattaatctggctgcgatttgcactccccccgattacaacactcgccctctcga

SEQ ID NO: 34737 - DNA, 387 bp, Glycine max
  Clone ID: LIB3052-002-Q1-B1-G8
tagcctcacaaaagcaaagatcaaacaaaccaaggacgagaacacgatgttgcttgaacttgcacttggtttattggttttggctctgtttctgcacttgcgtcccacacccactgcaaaatcaaaagcacttcgccatctcccaaacccaccaagcccaaagcctcgtcttcccttcataggacaccttcatctcttaaaagacaaacttctccactacgcactcatcgacctctccaaaaaacatggtcccttattctctctctactttggctccatgccaaccgttgttgcctccacaccagaattgttcaagctcttcctccaaacgcacgaggcaacttccttcaacacaaagttccaaacctcagccataagacgcctcac

SEQ ID NO: 34738 - DNA, 324 bp, Glycine max
  Clone ID: LIB3052-002-Q1-B1-G9
acttataccactccgattgcatcacgccgtggctcgaactccacgcctcgtgtccgctatgcaggtttcggttggaagaagaggaggaagaaggcggtgacggcgttatgacgaagatcaggagggagattattgccaggctgacggtgctgacggaagaggatttctacgggctgaggaccacgctcaaccacattgcctcgcgccacgcgctcatccaagagaacgagaatcgcggcgcccagattggggaaactcaaggtggcgattcggcttgctgatcatattggttcataacgtatatagtgtattaaaataatgctg

SEQ ID NO: 34739 - DNA, 377 bp, Glycine max
  Clone ID: LIB3052-002-Q1-B1-H1
gtgcctgatcggtgggagttctcgaacgattatttccgccgaggcgagaagcggcttctttgcgaaattcagcggcggaagatctcatcgccggcgccgtctccgactgcgccgacgacggttacggtgccgatgccgttgaccgcgataccgatcatatcgccgtcgaactctggcgaggagcaggtgatatcgtcgaactcgtcgccgttgcgagcgccggcggagcttctcgacgagaacgagcggcttaggaaagagaacgttcagttaacgaaagaactcgccgagatgagatcgctctgcaacaacatatattctctcatgtcaagctacggaaacaaaaacggaaacagcaacggcagttaccaaactga

SEQ ID NO: 34740 - DNA, 309 bp, Glycine max
  Clone ID: LIB3052-002-Q1-B1-H10
gcgactgagaagtgcgacgctgctgcaaagtgcaagcggatttggtcttcttctttactcccaatcatttctctgtgcaaggataagtgtgttatctatctaaaaacacaagatgtcagctgggcctggacttgaatctctagtagatcagacaatttcagtcattacaaatgatggacgaaatatagtgggagtcctgaaaagttttgaccaggcaacaaatattattcttgatgagtcccatgaacgggtttattccacaaaggaaagtgttcaacaacttggtcctggtttgtacaacaacaaggg

SEQ ID NO: 34741 - DNA, 274 bp, Glycine max
  Clone ID: LIB3052-002-Q1-B1-H11
ggagaatgtgagtctgtctcttccggcgagcatgcccatcagatgtattctgcattggcaaccgaaccaaggaagcgttgtgaacagccaagtcctgaatgagatctcgcagtgcgtcgaaagcctcaacggcgtcaaagaaggaagatgcaaagcctccctcactttctacagacccaatttacgagaccagtcggtgaccatcgatttcccgcgcgattttctggggatatcgatgctggagcagccgaacaaatactacttcatcattcgc

SEQ ID NO: 34742 - DNA, 395 bp, Glycine max
  Clone ID: LIB3052-002-Q1-B1-H3
atcagtcatcaccatggccaagctagttttttccctttgttttctgcttttcagtggctgctgcttcgctttcagttccagagagcagcctcagcaaaacgagtgccagatccaaaaactcaatgccctcaaaccggataaccgtatagagtcagaaggagggctcattgagacatggaaccctaacaacaagccattccagtgtgccggtgttgccctctctcgctgcaccctcaaccgcaacgcccttcgtagaccttcctacaccaacggtccccaggaaatctacatccaacaaggtaacggtatttttggcatgatatacccgggttgtcctagcacatttgaagagcctcaacaacctcaacaaagaggacaaagcagcagaccacaag

SEQ ID NO: 34743 - DNA, 78 bp, Glycine max
  Clone ID: LIB3052-002-Q1-B1-H4
ggcttatggtggatacctaggcacccagagacgaagaagggcgtagtaagcgacgaaatgcttccgggaattgaaaat

SEQ ID NO: 34744 - DNA, 390 bp, Glycine max
  Clone ID: LIB3052-002-Q1-B1-H5
gtttggcatcagctatcctgaagggaaatgggagatccgtggtgatccagcatacgtgagggatgcttgtgagggcagtttaaagaggcttggtatcgattgcatcgatctctattaccaacatcgtattgatactcgtgtgcctattgaagtcacgattggggagcttaaaaaacttgttgaggaaggcaaaataaaatacattggtctgtctgaggcctcggcttcaacaatcagaagagcacatgcagttcatccgataacagctgtgcagttggagtggtcactatggtcaagagatgtggaggaggaaatagttccaacatgcagggaacttggtattggaattgttgcatatagtcctcttgggcgaggattcttgtcattggg

SEQ ID NO: 34745 - DNA, 341 bp, Glycine max
  Clone ID: LIB3052-002-Q1-B1-H7
ggagagaaagagagagagagagagaaaaatggctgatacaagtggaggagatgcagtgagaccggtggtaatatgtgataacaagtgtggctgcacagttccatgcactggtggttccacttgcaggtgcacaagtgtcggcatgacaactggaggcggtgatcacgtgacatgctcgtgcggagagtactgtgggtgcaatccatgctcatgtcccaagactgcggcttctggaactggttgcagatgtggcacagattgctcatgtgcctcttgccgcacttaacatcataccttaattaagtctcaaacttcacaaatcttgaatgtgctttaaatct

SEQ ID NO: 34746 - DNA, 375 bp, Glycine max
  Clone ID: LIB3052-002-Q1-B1-H8
tggaaaggttcctgttttggaaacgcccgatggtccagtctttgagagcaatgcaatcgctcgttacgttgctcgactaaagggtgacaacgctttgttctcatcttctgccattgataatgcccacattgaccagtggattgaattttcatccttggagatcgatgctaatcccatgaaattgcccctaacaagacttggatttgccccaaaacctcctccagtttaggagggtgcaaaatcctgcgttaaagagagcatttgaggcccttgaacactcatcctgcctcaaatacttaccttgttggccattctgttacccttgctgacatcataacaacatgcaacttgtatttacgattcagccaactctta

SEQ ID NO: 34747 - DNA, 307 bp, Glycine max
  Clone ID: LIB3052-002-Q1-B1-H9
ttgaacactcatcaccatggccaagcttgttctttccctttgtttccttcttttcagtggctgcttcgctctgagagagcaggcacagcaaaatgagtgccagatccaaaagctgaatgccctcaaaccggataaccgtatagagtcggaaggtgggttcattgagacctggaaccctaacaacaagccattccagtgtgccggtgttgccctctctcgctgcacccttaaccgcaatgcccttcgtagaccttcctacaccaacggtccccaggaaatctacatacaacaaggtaatggtaatttt

SEQ ID NO: 34748 - DNA, 334 bp, Glycine max
  unsure (1)..(334): unsure at all n locations
  Clone ID: LIB3052-007-Q1-B1-G6
ctcgagccgctcgagccgtacagtgtttccttgctggacttgtaattagaagtttgagtatcagtacctctaactggagatgtaagaagcctctgggggattacctagctgaaaggaatatcatgggaatttatgatgttgatactcgtgcaatcacgcggcgattgcggcaagatggcagtcttattggtgttttgagcactgacaattccaaaaaggatgaggaactgcttcacatgtctaagtcatggaacattgttggtaaggatctaataagtggagtatcatgcaaaactccacatgaatgggttganttaaacaaacaacaatggga

SEQ ID NO: 34749 - DNA, 216 bp, Glycine max
  Clone ID: LIB3052-007-Q1-N1-G4
ctctagcctctcgagccgtacagtgtttccttggtggagttgtaattagaagttggagtgatcagtacctctaactggagatgtaagaagcctctgggggattacctagctgaaaggaatatcatgggaatttatgatgttgatactcgtgcaatcacgcggcgattgctgcatgatggcagtcttattggtgtttttatctctgtctattttaaa

SEQ ID NO: 34750 - DNA, 374 bp, Glycine max
  Clone ID: LIB3052-002-Q1-B1-A2
ggaattcggccgctcgagggaacaggaagctgtagcaacagttgggaacatccctaccctgttcgtattgcagcagtacgacaatccactatcaaagaagttaaatgaagtggtaaatgagatacggcggcaaagatgttcctacttccggttcaagctctgcaggaaaggagatccatcaggaatgctattcttctcgtatatgatagaagacaagagcgcaggtggcttctcctatgtagagtttcttatccatgttcataggcaaattcacaataaaatgtcatcataacgagtatatggcagcttcatttttgcaagcttttagacctaaatgatagagcaagccccaagtatacgtgagattctgcata

SEQ ID NO: 34751 - DNA, 180 bp, Glycine max
  Clone ID: LIB3052-007-Q1-N1-A5
cagaacattgtcagagcggcggagcatcaggcgctggagcccaccgccgtccacggggtggcgcagttctccgatctcaccgatgacgagtttgatatgctgtgcaatggcgataatagtggttatttgtaataataattattcttctttaatattaatatttataaaattatattattt

SEQ ID NO: 34752 - DNA, 334 bp, Glycine max
  Clone ID: LIB3052-007-Q1-B1-B1
ctcttcgcaatttgcgcgcactccgtcgccgttgccgacacctcctccgcgtatccttccatccccggcacggaaaccggtgagtgctccctccgcggcgtgggcgtgggcgacggtgttctggttcctccacggcgagaagtacacgaggaggggcgaatcttcgacatcactcacacatatgtcgccgagatgccggtgtgggactcgacggaggggctcgggcaacacttcctgtggctcgatacgagcatgaagaatggctcgctcgccaacagctctaacatgaagctcggtgttcacagcggcacccaggtcaacccgcccggtccct

SEQ ID NO: 34753 - DNA, 343 bp, Glycine max
  Clone ID: LIB3052-001-Q1-B1-F9
ctacactcatctgcgattcttgttggaatgaggtgagcgttgtgtttgagttagcttgactatggaagcaaaagataagtggtgcgtggtgaccggaggtcgcggcttcgctgctcggtctttggtggaaatgctaattcgtcacaaggagtactgcgttcgcatcgccgatttggaagtcagcattgttctcaagcccgccgagcatttaggccttctcggcaaggccctgcactctggccgagcccaatatgtctccctcgatcttcgcaacaaggcccaagttctaaaagcgttggagggagttgaggtggtgttccacatgggtgctccaaactcttcc

SEQ ID NO: 34754 - DNA, 319 bp, Glycine max
  Clone ID: LIB3052-001-Q1-B1-C9
cgtgaatagcgtaaccagcgttgggggaattattggtcaaggtctcgacttagttggctcaacactcgatactcttactgccttcttgggccgatccgtgtctctccagcttattagtgctaccaaagctgatgccaacggaaaagggaaacttggaaaggctacctttttggaaggtatcattacttcattgccaactttgggagcaggccaatctgcattcagaattaattttgaatgggatgatgggagtggaattcctggagcattttatatcaggaattttatgcgaactgagtttttccttgtgaatttgact

SEQ ID NO: 34755 - DNA, 224 bp, Glycine max
  Clone ID: LIB3052-001-Q1-B1-E9
ctcaagtatcaaggaaactccggccctttggtcaacccataaataacaacaagcatatatgaaggtgtggtgaggccatcttatatgaaataatatcaaaatatattttgtgtaataataaaactatggcctatgtatttaccaccctccgacccagcctatgttaatatctgagtggcgttgtacctttgaatcgccttaataaaatgtcaatcttcaagttt

SEQ ID NO: 34756 - DNA, 364 bp, Glycine max
  Clone ID: LIB3052-002-Q1-B1-D4
ccaacaatgccgttcaaagtggtcctaattgaaaaacacctgggcgttggtgcaaatgtttgcctcaatcattttccctggagacaacaagctcactgagaaaacaatttttacttgcagagatttggacatcttggttgtttattatacaatagcaactcaatttagaaaatttctaccgcattacattaggtggcatctgtataccttgttgatttacattctcccatcttttctcactgctgaaattaaatataagcggaatctgagtaatattcatatttccggcttattttacgacggcagatacaaattctggactaaacacgagaaaaatcttgctttgacagaagaggaaaagatg

SEQ ID NO: 34757 - DNA, 311 bp, Glycine max
  unsure (1)..(311): unsure at all n locations
  Clone ID: LIB3052-007-Q1-B1-E3
ccaacaacaactaagggcagttaacaaaacactacgatgatcagggtcccaaggttgacgagtatggcaacgttgagaagcanaccgacgaatacggcaaccctgttcatgctgctagtgtcacctatgtagcccacagaactgctgctggtggttacagtgatgacattaataagcaacatgataccaccaatgcctacggcgtagacactggtagacagcattctagtggtggctacgatggtgacaccaataaacatcatggaactactggtggctataatgatgacaccaatagacatcatggaact

SEQ ID NO: 34758 - DNA, 309 bp, Glycine max
  Clone ID: LIB3052-001-Q1-B1-A10
ctgccgccaaagtttccgtcattacagtcagatgcacatcttcgggtgatggagacaggccgtggcacaaatcagatactctacgtgtgcatgaatatggttcacattggcaagcacaatcctctggcacgtcaaggagtcaagttgataacggtggcttcaatagatcactgacacggaatcatgacagggtggctgctcataggtacggtgaccagtttgttcacaggaaacactcatcttgtgagcatcatggccaaccttgtgactactacgtatgaacagattctgtccgtgccgggctttttg

SEQ ID NO: 34759 - DNA, 346 bp, Glycine max
  unsure (1)..(346): unsure at all n locations
  Clone ID: LIB3052-001-Q1-B1-A4
cgtcggacgcacgcgtacgtaagctccngaattcggctcaagagcgtactggatttcattgcgatatcatttgtgtcactggatggactgccaccccaatgcaggatgttcaggttacaattgattggtttatttcctctcaggaatgtgttcccaggacctattgtgttttaaatccacaaaatccttttgtgttaaatangtggatgggaaaattgactttcccccagggcacttcccgaagtgttaagagaatgcctctttctatagggggaggagctggtgcaaagaatgctattctcatgaatatgccaaatgctgttctttcaatgtggagatattttgt

SEQ ID NO: 34760 - DNA, 293 bp, Glycine max
  unsure (1)..(293): unsure at all n locations
  Clone ID: LIB3052-001-Q1-B1-B12
cacccgtacgtaaactcagaattcggctcganggatgcaatcaangaaatgcatggacgggaaattggtgatcgtatcatctcagtcaacanagcacagcccaagatggggggtgatgatgcagaccaaggttacagangtggctactcatcangtggtangggaagctatggtgctggagatanggtangacaggatgactgcttcaaatgtgggcgtccagggcattgggcccgagattgtcctttggcaagaagtggtcgtggtcggggtggtagttcatttccttcacg

SEQ ID NO: 34761 - DNA, 90 bp, Glycine max
  Clone ID: LIB3052-002-Q1-B1-A3
gacgtcgcacgcattcgtaactcaggaattccggccgggtactggcaggcttacaacctttcccaaaagtgagtcgtattaaagcttggg

SEQ ID NO: 34762 - DNA, 429 bp, Glycine max
  Clone ID: LIB3052-002-Q1-B1-A4
gtcggacgacgccttacttaagtacggaattcggctcaaggtggccatcagaacaccaaattcccaatatcaccagaacaacctacgcatgctaatcttaaagatcccatttgcgacgcctatggaaaatgcaagcacacaatcgtggatgcaatggagaagtctcacgaggtcatccatgagaagaatgacgagaaaatcaacgagagagtgtatgataaagcccgtcaagtccacgaatacgcccaaaacactgtagaaacagccaagaaccatattgcctgtaacgtgtcaaacgccaaagatgcattcaagcgtctaatagcaggatctttggagaggcagagccttaattcattgatgggggtggccaacatgttggggttttccacggcttatgggatgtgtgtgtgggttacgttcatctcc

SEQ ID NO: 34763 - DNA, 422 bp, Glycine max
  Clone ID: LIB3052-002-Q1-B1-B2
gtcgacgcacgcgtacgtcagctacggaattcggcccaaggaaaattaacaaatttcaaaaccctcctcatctcccttctcttctgcatcgcccacacttgcagcgcctccaaatggcagcaccagcaagatagctgccgcaagcagctccagggggtgaacctcacgccctgcgagaagcacatcatggagaagatccaaggccgcggcgatgacgatgatgatgatgacgacgacaatcacattctcaggaccatgcggggaagaatcaactacataaggaggaacgaaggaaaagacgaagacgaagaagaagaaggacacatgcagaagtgctgcacagaaatgagcgagctgagaagccccaaatgccagtgcaaagcgctgcacaagataatggagaaccagagccaggaactgga

SEQ ID NO: 34764 - DNA, 53 bp, Glycine max
  Clone ID: LIB3052-002-Q1-B1-C10
aaaaacataaaaaaaaaaaaactaaacaaaaataaaaaaaaaaaaaaaaaaat

SEQ ID NO: 34765 - DNA, 342 bp, Glycine max
  unsure (1)..(342): unsure at all n locations
  Clone ID: LIB3052-002-Q1-B1-C2
tcgacggacgcgtacgtaagctaagaattcggtccaacaccaattgataacaagcaacccaattgcatggaaccctaaaaggaggaaaagacaaaaaggacaagggtaactgaatcgccgcttctgcagcttcgttctttcgtttttgtttcatctttttagcttcagagggtaaataaaaaatggaggttttggtgggtcncgctttcaccatcgacgttccctcgtctccgccgcagcatgccggttccgatgatcggatctttcttaacgtgttacccgaagaaggtgatgggtcgaactttcgtatttcgggcccacccaagttcttcgccggcggcg

SEQ ID NO: 34766 - DNA, 438 bp, Glycine max
  Clone ID: LIB3052-002-Q1-B1-E2
cgtcgcacgcacgcgtacgtaacctccggaattcggctcaaggaaacatttagggctcgttataactccggtgaagggtgcaaaagttgtcattgataggctaactggccggaccaacggatatggctttgtaaggttttcagatgagagtgagcaagtgagggctatgactgagatgcaaggggttctttgctcaacaagacccatgaggattggacccgcctctaataaaacccccaccactcagtcccagcccaaagcttcatatcagaattctcaacctcaaggttcacagaatgagaatgatccaaataatacaactatttttgttggtaatttggattctaatgtcactgatgatcatctgaggcaagttttcagccactatggagaattagtgcatgtgaagattccagcaagcaagcgatgtgggtttgt

SEQ ID NO: 34767 - DNA, 434 bp, Glycine max
  Clone ID: LIB3052-002-Q1-B1-F3
cttcggacgcacccttacttaacctcggaattcggctcaaccaaaaggaccagaattggcattgatgaaacaatttgcacaatgagacttcgccaaaacattggtcagaattcatcacctgacatctacaaccctcaagctggtagcatcacaaccgccaccagccttgacttcccagccctctggcttctcaaactcagtgcccagtatggatcactccgcaagaatgctatgttcgtgccacactacaccctgaacgcgaacagcataatatacgcattgaatgggcgggcattggtacaagtggtgaattgcaatggtgagagagtgtttgatggagagctgcaagagggacgggtgctgatcgttccacaaaactttgcggtggctgcaaaatcccagagcgataactttgagtatgtgtcattcaagac

SEQ ID NO: 34768 - DNA, 424 bp, Glycine max
  unsure (1)..(424): unsure at all n locations
  Clone ID: LIB3052-002-Q1-B1-G3
cggacgcacccttacttaagctcggaattcggctcaagatacatagtattgttggtgggttgcaaagatgcttgggggtcttctccatangggtcataagataaaagggacagtggtgttgatgcgcaagaatgtgttggacgtgaatagcgtaaccagcgttgggggaattattggtcaaggtctcgacttagttggctcaacactcgatactcttactgccttcttgggccgatccgtgtctctccagcttattagtgctaccaaagctgatgccaacggaaaagggaaacttggaaaggctacctttttggaaggtatcattacttcattgccaactttgggagcaggccaatctgcattcaaaattaattttgaatgggatgatgggagtggaattcctggagcattttatatcaagaat

SEQ ID NO: 34769 - DNA, 70 bp, Glycine max
  Clone ID: LIB3052-003-Q1-N1-A11
cacccgtacgtaagctcggaattcggctctaggaagagctttttattttggctcccaatggtttaatctt

SEQ ID NO: 34770 - DNA, 120 bp, Glycine max
  Clone ID: LIB3052-003-Q1-N1-A2
tcggggaattccaattcctcattttcaagaaataatgaggctagaatggtcatatatgaattggggttatttgctttcttattatgcctatccttaacccatttgaaatcatatcataat

SEQ ID NO: 34771 - DNA, 179 bp, Glycine max
  Clone ID: LIB3052-003-Q1-N1-B10
tacgtaagctcggaatgctgctctagattactacttcattttcactagccactactaccctctcgcaaagactccaaaaatcatagggccatatcatcgatatttatcttcttaaccatcatcatcccaagtgtccaaccttaatatcttctatctctcttactaactcatactctgtt

SEQ ID NO: 34772 - DNA, 315 bp, Glycine max
  Clone ID: LIB3052-003-Q1-N1-D9
tcggggaattccaattccacattttcaagaaataaggaggcaaaaatgggcatatatgaattggaattatttgttttcttattaggcctatcctgaagccaaaggaaatgagatcggaattcctcggggaattccaattccacattttcaagaaataaggaggcaaaaatgttcatatatgaattggaattatttgttttcttattaggcctatcctgaagccaaaggaaatgagatcggaattcctcggggaattccaattccacattttcaaaaaataaagatgcaaaaatgttcatatatgaattggaatta

SEQ ID NO: 34773 - DNA, 250 bp, Glycine max
  Clone ID: LIB3052-004-Q1-N1-B6
acgcgtacgtaactcggaattcggctcgacaagccttactgatattggttggtcactataccggctctcgtcagtcttcattatcacactcatcattctctaatttctctaacatggcttcaaccgcttctgatgttagccaacaagtccaatccaacaacaactgaccaattttcaaaagcgtgaaagcactaactgaatcaccataactcacttccctcccaccctcttacacctacaccaccaactc

SEQ ID NO: 34774 - DNA, 242 bp, Glycine max
  unsure (1)..(242): unsure at all n locations
  Clone ID: LIB3052-004-Q1-N1-B7
cgtacgtaagctcggaattcggcttcgagggtatactcaaatttgattgaaatcaatacctcagcagccactagggtcaagccttctgtcgtcagtcacgtgtttctccggtcctcgtcttcttctctcagaattcatgatactcaagnttcggtttcttgctgaactcaaactttggttttgaagaatattcgagcctgttaatttttctcataggcctaatcaattccattcactagctt

SEQ ID NO: 34775 - DNA, 293 bp, Glycine max
  Clone ID: LIB3052-004-Q1-N1-B8
accaactattgacctcttcaacccggaaattaatcccggaccgtaccctgcatgcttaccaactttccctatagtgattcattttaaaccttggcttaatcttggtcatacctgtttccattataaaattgttatccattcacaatttcacacaactatacaaaccttaaccttaatatttaaatctcttgttgcttaattttttatcttataacttataattgattataccttatagctataatttattactataatactatattttttattattttaaattaatttatatt

SEQ ID NO: 34776 - DNA, 113 bp, Glycine max
  Clone ID: LIB3052-004-Q1-N1-D6
cacgcgtacgtaagctcggaattcggctctagggaactcattttgattgaaatcaaacctcatcaccactacgtcaagcttctttcttagtcggggtatctccatcctttctt

SEQ ID NO: 34777 - DNA, 240 bp, Glycine max
  Clone ID: LIB3052-004-Q1-N1-E4
cacgcgtcacgtaagctcggaattctgctcgagcctactatgctaatggctttaaagcctattggcttatgtacgcttccgctgatccttaccagataaacgaaatctcatctgtatttccacaagcttcaaatcatgaactccacattgccaaaactttatccttcagtgattgtttatctcaacccctacaatactctactggatcctacaatgacctaattatttcatgtcttatat

SEQ ID NO: 34778 - DNA, 88 bp, Glycine max
  Clone ID: LIB3052-004-Q1-N1-E8
cacgcgtacgtaagctcggaattcggctctaacttaaggaattcatcgtagcctacactgactaggctcctagcaccttcttcacggt

SEQ ID NO: 34779 - DNA, 367 bp, Glycine max
  Clone ID: LIB3052-007-Q1-B1-A2
cactaccaccaccacgccctctgcataaattctctttattccttcgttgctgccgccgccgccactagctaggtttcccctctcacctttctcagcttctcctcaccaccccaacatagtttcttatttttaagtgaacaaaaccatcatcacgtcacccttggtaagacctatatatccttcactattcttccgacaaatgtttcagtgattcacactaatccacccctgcagctaaacaaaaaacatcctaactatctgtcttattgttctttatatttttagtagagaacaaaagcgaagagaaaaccctattcactctgaaagtggcgaagatgagtttgggaaccgctgaggatgaatcggg

SEQ ID NO: 34780 - DNA, 358 bp, Glycine max
  unsure (1)..(358): unsure at all n locations
  Clone ID: LIB3052-007-Q1-B1-A3
tacgtaaactcagaactcggctcgagcatcttttgatcaatttncaacattttaactggcatccttcagttttaatcccaaggccatcaactttaatcatcctcccttctgatttctagattccccgttctgctcagatagttaaacataaagcaaattgtcccatcaaactatttcatcatcacttcttccttccattcacacattttcttagtatagtacttgcacaaaatgtcacgtggtgttggtccaactggcagtgacattagcctcccacaagaacaagaagttgatcacaaagagcagcangaacaacattcactcaggaatctccacaaaaccatcaccaccacgcctc

SEQ ID NO: 34781 - DNA, 198 bp, Glycine max
  Clone ID: LIB3052-007-Q1-B1-A7
acgcgtaagtctactcggaattcgggtcgagcacatcgtggtctcatcccgttcccatcaatcactcgtcttccacgttggcgtcgtcctccggatctgagtctctctgagtggtgccagtgcggcctgagtctacgctactgtctacgggggcgtcccatcatctaagtatccgacgatgggtaatgcgtcgccgtt

SEQ ID NO: 34782 - DNA, 126 bp, Glycine max
  Clone ID: LIB3052-007-Q1-B1-D11
acgcgtacgaatactcgggccgccgattgagctcatcgaaccgggaattaagtcgggacaggaacctgcacgcgttacaactttccctatcatggggtcgtattaggaactgtgacgataatcgtg

SEQ ID NO: 34783 - DNA, 177 bp, Glycine max
  Clone ID: LIB3052-007-Q1-B1-D7
gcgtacatcactcggaagtcggctcgagcacaacatcagatcgcaatacagtgtctttgagtacgagagagagagagcgatacaatcagcacaatggcatctgagctaatgcctcgcagagagatcaacagcgatacggtgctagagagagaggtgcacgttgagactgccacatga

SEQ ID NO: 34784 - DNA, 235 bp, Glycine max
  Clone ID: LIB3052-007-Q1-B1-E1
cggctccagatgaagatcaacctcgcaagagccgcgaatggagatcgaaaaagacacaacccagaagacctagacaagaagaaccacgtgaaagaggatgcgagacaagaaacggggttgaggaaaatatctgcaccttgaagcttcacgagaacattgctcgcccttcacgcgctgacttctacaaccctaaagctggtcgcaatagtaccctcaacagcctcaccctcccaac

SEQ ID NO: 34785 - DNA, 89 bp, Glycine max
  Clone ID: LIB3052-007-Q1-B1-F3
gtacgtacactcagaattccgctcgaaggcttgttggtcaagggagggcactttgtcggaatgatcttgagacacttaaagttggaatc

SEQ ID NO: 34786 - DNA, 88 bp, Glycine max
  Clone ID: LIB3052-007-Q1-N1-C6
cactcgtacgtaagctcggaattcagctcgaggcgcgctttttcgtttttcaaagtctctaccttatgcccgttgagtctaccttaaa

SEQ ID NO: 34787 - DNA, 232 bp, Glycine max
  Clone ID: LIB3052-007-Q1-N1-D6
gtcgtaagctcggattcggctcgagtggtggagatcgatggagtgaagctgttggaggagcacggccagcgtgttatggtgaggagggccacacccgattggcttcccttcctccccggttcctccttctgggtcccacctcctccttccccgtttcttcacaagttctccatcccctctcatcccttcttccttcatgattactaatctgggaatgctatttccacctctc

SEQ ID NO: 34788 - DNA, 216 bp, Glycine max
  Clone ID: LIB3052-007-Q1-N1-E5
ctatgacatcacctgcacgcgtacgtaaactcggaattcagctcgaggcgacttttttcataaaacatacgctcttcgatagccagggtaatatggttcacaggtatggcaacgctgataatcatacctactaatactgcaaccctgttcatgctactattgtcacctatttatccaccaaaactgcttctattttatacaattattacattaata

SEQ ID NO: 34789 - DNA, 65 bp, Glycine max
  Clone ID: LIB3052-008-Q1-N1-A4
acgcgtacgtaagctcggaattctgctctaggttttttttttttttctccttatttttttctttt

SEQ ID NO: 34790 - DNA, 232 bp, Glycine max
  Clone ID: LIB3052-008-Q1-N1-B8
acgtaacctcggaattctgctctaggcaaagtgttatactcattcttcacttgcttacaacattttgggcgagatataaatgaacacagcttgaaccaatattgtggtatgttaaatatactacttcatccattaattatttttatttttcatattttcttatattttatttttttctttatttttatttttttttattttttttttatttttattttttatttttttttat

SEQ ID NO: 34791 - DNA, 177 bp, Glycine max
  Clone ID: LIB3052-008-Q1-N1-C7
taaactcggaattcagctctaaacataatacatacatacatagaagaataacataataacaagtatgcaatcctcaaacgataggatgaatcacatgtccattcctaccaaagaacaagtccacatctataaatccaaaataaactagaacgcagacaaatcaactgcaataacata

SEQ ID NO: 34792 - DNA, 312 bp, Glycine max
  Clone ID: LIB3052-008-Q1-N1-C9
acgcgtacgtaagctcggaattcggctctagctcgagccgtattttctcgagggctgaagcacaactactagaccgtcatatcaaccctgtcgcacgcaccgatcaatacagtaatcctgttatcttaactgactatcgctgtaatcccatccaactcactgatgtcactaccacctctaccttcacatcatattctgtatttattatcttatttatactctttcataactttatttattttttttttaatactttatataatttatatacaattttttattttatatttaatttaaattaaatatttattt

SEQ ID NO: 34793 - DNA, 168 bp, Glycine max
  Clone ID: LIB3052-008-Q1-N1-D11
acgcgtacgtaagctcggaattcagctcgagaggtaatggtatttttggcatgatattcccgggttgtcctagcagttatcaagagccgcaagaatggcaacaactatgactaatccaaatgccccaataccgtcaccaaaatgtacatctcttcagagaaggttatt

SEQ ID NO: 34794 - DNA, 107 bp, Glycine max
  Clone ID: LIB3052-008-Q1-N1-D2
acgcgtacgtaagctcggaattcagctctagcgaaacattttttccagtatatacaatttcatgtaaatgctatacttaatttgaatggatgatttattatcattac

SEQ ID NO: 34795 - DNA, 65 bp, Glycine max
  Clone ID: LIB3052-008-Q1-N1-E3
acgcgtacgtaagctcgtaattctgctctaggttcattgtttacaataccaagttattttaacat

SEQ ID NO: 34796 - DNA, 171 bp, Glycine max
  Clone ID: LIB3052-008-Q1-N1-E7
acgcgtacgtaagctcggaattctgctctagatttgcccgtgtctctcactcaatcactcactcattctctcgtcaaattctaatcttcgcggatcgacaacatctctcttctatactcttaaaacttactttcaatttactttaactatctactcaattcttatttcatt

SEQ ID NO: 34797 - DNA, 427 bp, Glycine max
  Clone ID: LIB3052-008-Q1-N1-E8
acgtaagctcggaattcggctctagaaaacctaatcttacaattagaaacatataattgaataatgtagggatttgatcgttgaaagtgcgtctaagaaataaagccgtatagtctatttatttaacattttcaaacattttttcttttttccaatgctttcattgatattaccattcctcttttactaaattttattttatataatttcatattttttttttcatattattatattatttatttttattatttttttatattttttttttatttttattatttttttatttatattttattattattttttttttatttattttattatttataatttttttttttaatttattttaattttttttttatatattttttattttattttattttattttattaattttttatatttttttttttta

SEQ ID NO: 34798 - DNA, 389 bp, Glycine max
  Clone ID: LIB3052-008-Q1-N1-F2
tcggggaattccaattccacattttcaagaaataaggaggcaaaagatgttcatatatgaattggaattatgttgttttcttattaggcctatcctgaagccaaaggaaatgagatcggaattcctcggggaattccaattccacattttcaagaaataaggaggcaaaaatgttcatatatgaattggaattatttgttttcttattaggcctatcctgaagccaaaggaaatgagatcggaattcctcggggaattccaattccacattttcaagaaataaggaggcaaatatgttcatatatgaattggaattatttgttttcttattaggcctatcctgaagccaaaagaaatgagatcggaattcctcgggggtaccgagctcg

SEQ ID NO: 34799 - DNA, 210 bp, Glycine max
  Clone ID: LIB3052-008-Q1-N1-F6
cacgcgtacgtaagctcggaattcagctctagctgatgcactagtctctgccactgatgccattaacagtagggtggtcccttaattattcagacttgctagaatatatcgttcctttgctaataataaatcgttttcttaatttgtggtgtcgtttattaaatttcttaacatcttaacttatattatatatatttacatacactttat

SEQ ID NO: 34800 - DNA, 288 bp, Glycine max
  unsure (1)..(288): unsure at all n locations
  Clone ID: LIB3052-008-Q1-N1-H2
acgcgtacgtaagctcggaattctgctcgagatcttcctcaattcgaaccttcgcctttttcccatgcnagttctcatcttccaattcgtcgctcgaatccgcgagtctcgatttccttctctgcaagcggattggtcgcttgtgaaggaggaacatgtattcaagaggtagcggcggttacggccaatcgtacactggtcaatccgcatatggcctgaacctgtgtgccaattattctgggagttcctgttgagggcattatgtctgtcacttattcagtttctttt

SEQ ID NO: 34801 - DNA, 119 bp, Glycine max
  Clone ID: LIB3052-009-Q1-N1-A12
gcgtacgtagagctcggaattctgctcgtagcttctacccttttaacaaagatgcttttgtgtcacgtatgtatacacccttcttcgggccggactcaccatccacatattctctcttc

SEQ ID NO: 34802 - DNA, 186 bp, Glycine max
  Clone ID: LIB3052-009-Q1-N1-A2
acgcgtacgtaagctcggacaacgtcctcttcactatacattctggtcttccataatggaagcacaacaatgaatagactcctattattgccggttctattattcacaccaacatcttatacaaccatctctaccatattcctatgatattctatcttactattaaccataatcaatattttctaa

SEQ ID NO: 34803 - DNA, 216 bp, Glycine max
  Clone ID: LIB3052-009-Q1-N1-A7
acgtaagctcggaattcgtctcgtatcacaataccttctggttttccatcgttgatatacaacaatgaatagactccaattattgccggatggattattcacaccaacatctttaaaaaccatctcaaccatattcctattaaattctatctttcttttaaccaatatcaacaatttctaaaatatcatcaaaatcaattaattcattaaaaccat

SEQ ID NO: 34804 - DNA, 264 bp, Glycine max
  Clone ID: LIB3052-009-Q1-N1-A8
caccacgcataaccccgtcgttcccttcattgcgcgaaccgtggttctcagcaacaccgcgagccgctctagaggtgatgaaaaggattgctgaagaggtgatgtcacagaaccatgagaaggcatctgttcaacgaaaaaaaagggaaaagtacagttgaagagatcgaaatataatgaaaaagttactggttgaccgtggtgcaattagatttgtcttggcgggtgcaaacataatgtgtcccgggcttacattctctgggg

SEQ ID NO: 34805 - DNA, 197 bp, Glycine max
  Clone ID: LIB3052-009-Q1-N1-B6
cacgcgtactaactcggaattcggctctaaatattatacctaatatcatattaactaattaatagtaaagatttaaaattggccgtgagacataatagcaagttattgaaaggcttatcatttaaatttaaacattaaacataatataaaaatgctgactataaattattagaatattatattttatttaatttatt

SEQ ID NO: 34806 - DNA, 288 bp, Glycine max
  unsure (1)..(288): unsure at all n locations
  Clone ID: LIB3052-009-Q1-N1-B7
cacccgtacgtaagctcggaattcngctctagattccactatatgataaagttctaataatctcgatgaaaggcaaggatataaacatttgtggcttgaatgcgaaaattgttatggattaaattataaaaaattttttaaatcaaaaatgaatatttgtgaatactgtggatatcatttgaaaattggcagttcagatataatctaactttttattgattctagtacttgtaatcctatggattaatacattgattatctttatcctattaaattttaattactaaa

SEQ ID NO: 34807 - DNA, 156 bp, Glycine max
  Clone ID: LIB3052-009-Q1-N1-B9
acgcatacataagctcggaattcagctctaagagatattctttaaaaagttatattgaaatttacacgatagaaatttcttacagcttggtcgactcacctccatactacaacatctctttaatcatattcatatccatataaatatactataaaa

SEQ ID NO: 34808 - DNA, 428 bp, Glycine max
  unsure (1)..(428): unsure at all n locations
  Clone ID: LIB3052-009-Q1-N1-D1
tacgtaagctcggaattcngctcgagctcattaatttcaataatggcacttcgttgcttggttatcgccgtgtctgatctcttgactcgttggtcttgcgagagaaagccatgccagagacgaagatttttggcatgctgtttggccaaacactcccattccaagttcattgccagatcttctaaagcctggccctgcaagtgttgaaatcgatgatcaccctatgcaaattgaagaaacacagtacccgaaaaccttcttctataaagaagaccttcatccaagcaaaacaatgaaagtacaattcatcaagcctccctttcaacaaccatggggtgttggtacatggttaaaggaaattaaagaccctacttaataatgatatattttttaagagctttgcatcaagaaagaagccattgatggat

SEQ ID NO: 34809 - DNA, 278 bp, Glycine max
  Clone ID: LIB3052-009-Q1-N1-D7
atgacgtcgcatcgcacgcgtactaagctcggaattcgctcgagcacgtggacggaatcagatgcagccatacaggagcgggcacgcagcagcacgagtgttgaatgctgctctatttgagcacaatgagattggagaaatgctggttttgctcttcaaccgtataccctggacatggaatccagtttgttcgtaatgatgcaaagatttttcggtgctgtagatcaaaatgccacattaactattctatgatgagatatcctggtaaggtatagtgg

SEQ ID NO: 34810 - DNA, 218 bp, Glycine max
  Clone ID: LIB3052-009-Q1-N1-D8
ttatgacctcgcacgcacgcgtacttaagctcggaattctgctcgaggcatcttattacttgaatcagagtgcaaccatatcagggacagcatcatcatcaacagcggtcgttgaactgctgctctaatttgaggcacaatgatattgtacaaattctagctttgctcttaaaccttataccctgtacatagaatccaaattcatcataattatgcat

SEQ ID NO: 34811 - DNA, 79 bp, Glycine max
  Clone ID: LIB3052-009-Q1-N1-E11
acttaaactcggaattcatctcaacccaaatccctttatcttctctctcttgcaaaacctagtaggatctcttccctca

SEQ ID NO: 34812 - DNA, 333 bp, Glycine max
  Clone ID: LIB3052-009-Q1-N1-E9
cacgcgtacttaagctcggaattcagctctagaaaataaaatttaacaaaaaaaaaaaaaaaaaaaaagaaaagaaaaaataaaaaaaatagaaagaaaaaaaaaaaaaaaaaaaaaaaaaaaaaaaaaaaaaaaaaaaaaaaaaaaaaaaaaaaggccctcccccaactatgaacccttttaacccgaaatttatttcaaaacctttacctttatccttacaattttcccttatattaattcttttaaaaccttgccatactcatggctaaaccttttcccttaataaaattttatcctattcaaatttccccaaactatataaccctaaac

SEQ ID NO: 34813 - DNA, 166 bp, Glycine max
  Clone ID: LIB3052-009-Q1-N1-F1
acccgtacgtaatctctgaattcgctctatcacactttttaatttataactccactatatcctttctttgcctggtccaaatcacaaaatggaaagacaaacctttttatataatttctttaatacactttacttttttacaccacactaatccatattaaacatt

SEQ ID NO: 34814 - DNA, 234 bp, Glycine max
  unsure (1)..(234): unsure at all n locations
  Clone ID: LIB3052-009-Q1-N1-F7
atagattatgactccatcgcgnctcgtaactcggaattcgctcgagtgaatacatttattgaaacgcctgaaaatgccgaaagtggtgttgaacccgtgtgggcacaaacagaacgcctccagaaagcaaaagagatctgaaatcattgcaagtaaatgggatgagtatttgatcaaatgcattcaagtgatccctctaaaagggcaattaccaatgaagtatttcagataaaa

SEQ ID NO: 34815 - DNA, 206 bp, Glycine max
  Clone ID: LIB3052-009-Q1-N1-F8
actcggaattctgctcgagcacacaactactacaagtacttccttacaatcaaagcgcaagaacaactatggcaagtgatcgaaagcactacgatgatcagggtcgcaaggttgacgagtatggcaacgttgataagcaaaccgacgaatactgcaaccctgttcatgctgctagtgtcacctatgtatccaccataactgcttct

SEQ ID NO: 34816 - DNA, 61 bp, Glycine max
  Clone ID: LIB3052-009-Q1-N1-G1
acgcgtacgtaagctcggaaaccctaggagagccaccgacttcaactaccgtccatgtacg

SEQ ID NO: 34817 - DNA, 87 bp, Glycine max
  Clone ID: LIB3052-009-Q1-N1-H10
cacgcatacgtaagctctgaattcttctctagtgttaataaatatatctacaaattttcatcattctagatgcattaaaaaaataat

SEQ ID NO: 34818 - DNA, 133 bp, Glycine max
  unsure (1)..(133): unsure at all n locations
  Clone ID: LIB3052-009-Q1-N1-H4
gtaagcctcgnaattcatgctcgagcgcaccagtcttcacctcacgaatatttcttgttgtttggagcggatccgtataaaaactnctgtaagacatggttggtattaccaggaccctctcttacagtgtgat

SEQ ID NO: 34819 - DNA, 430 bp, Glycine max
  unsure (1)..(430): unsure at all n locations
  Clone ID: LIB3052-011-Q1-N1-D3
aaagacctattaccatgcatgcacgcgtactttagctcatcatntcggtcaatgcccaattcacattttcaagaaataaggaggcaaaagtgttcatatatgaattggaattattagttttcttattaggcctatcctgaagccaaaggaaatgagatcggaattcctcggggaattccaattccacattttcaagaaataaggaggcaaaaatgttcatatatgaattggaattatttgttttcttattaggcctatcctgaagcccanaaaaaggaaatgagatcggaattcctcgtggaattccaattccacattttcaagaaataaggacgcaaaaatgttcatatatgaattggaattatttgctttctttattaggcctatcctgaagccaaaggacatgagatcggaattctcgggggtaccg

SEQ ID NO: 34820 - DNA, 65 bp, Glycine max
  Clone ID: LIB3052-011-Q1-N1-F1
aaaaaaaaaaaaaaaaaaaaaaaaaaaaaaaaaaaaaagaaaaaagaaaaaaaaaaaaaaaaaaa

SEQ ID NO: 34821 - DNA, 137 bp, Glycine max
  Clone ID: LIB3052-012-Q1-N1-A1
aatgaataaaagaaacaaaggcttaaatgccctttgttaagtgtagaataacgggtatagtaactatgtacccttgtgtaatgagtcactcaagtacctatgcgggaaaagcataaataaaagaagaaattccaata

SEQ ID NO: 34822 - DNA, 380 bp, Glycine max
  Clone ID: LIB3052-012-Q1-N1-F5
tcggggaattccaattccacattttcaagaaataaggaggcaaaagggttcatatatgaattggaattatttgttttcttattaggcctatcctgaagccaaaggaaatgagatcggaattcctcggggaattccaattccacattttcaagaaataaggaggcaaaaatgttcatatatgaattggaattatttgttttcttattaggcctatcctgaagccaaaggaaatgagatcggaattcctcggggaattccaattccacattttcaagaaataaggaggcaaaaatgttcatatatgaattggaattatttggtttcttattaggcctattctgaagccaaaagaaatgagatcggaatttctcgggggttcc

SEQ ID NO: 34823 - DNA, 355 bp, Glycine max
  Clone ID: LIB3052-012-Q1-N1-G4
tatgcacgctactaagctcggaatcggtcggctttaacatcaccttcccaaaacctccctccaacgaaccctacgctattttctccaactcaatcgcatggccgaggctgcacgaaccgcgcataaacccgcgccgcacccgatccaacccaaacccgacgataaaaccccgaatccggcgaaggagattccgccgtcgtcggagaagccggagcccggcgattgctgcggcagcgggtgcgttcgatgcgtctgggatgtgtactacgacgaactcgaagaatacaataagcgatacaaacagggctaaaatgtacgatttatataatcccgaagattaattcggagatttact

SEQ ID NO: 34824 - DNA, 303 bp, Glycine max
  Clone ID: LIB3052-012-Q1-N1-H11
tttgattcgagttcatatgatctatgttgtcgcttaagcaggcgagagttttttatctggtttctcgctggcatacatggtgtcgatataacatttcaagtgctttgatattactacttgagtcttccattatacctagcagtagcatttccttacttttttctttttcttttttgctatctattgttcattcacctattccagaatggtctcatgaagattgaagagtattccctcttcgctgttgtactatatcacaagatgtaaatgacgaagtcaatgcacataatgttgtaacgaaaa

SEQ ID NO: 34825 - DNA, 435 bp, Glycine max
  unsure (1)..(435): unsure at all n locations
  Clone ID: LIB3052-013-Q1-N1-B10
aagagctatgacgtcgcatgccccccttccttaacctcggattccggttcaggcaattccttctttacattcaaacccaccaccacctttggcaggttttcaaaggcactacaatgatcagggtcgcagggttgacaagtttggcaccgttgaaaagcaaaccgacgaatacggcaaccctgttcatgctgctagtgtcacctatgtagccaccaaaactgctgctggtggttacagtgatgacattaataagcaacatgataccaccaatgcctacngcgtagacactggtagacagcattctagtggtggctacgatggtgacactaataaacatcatggaactactggtggctataatgatgacaccaatagacatcatggaaactaccgtgtctatggtatagacaccgataggcaacaacatgggactac

SEQ ID NO: 34826 - DNA, 104 bp, Glycine max
  Clone ID: LIB3052-013-Q1-N1-B3
gctatgacgtcgatgcacgctacgtaagctggaattccggttgaggatggattgatatcctaggcataattggtaaatcttcacacggtggaaacttgcttcct

SEQ ID NO: 34827 - DNA, 270 bp, Glycine max
  Clone ID: LIB3052-013-Q1-N1-C8
cacgcgtacgtaagctgggaattcggctctagttcacattatatctatagagaatcatgacaacaagcgggggggttatcacacctctgactgcaacactcaactcctctactctcccgagtctaagattcgccgagttgactcatccgattccagtattaactcgtccaagtctcaactctaatctgtcctagactcctctcatgcacacttacaatactacattgctatcatgcttgaccacacccactatttgccctagcgtaactt

SEQ ID NO: 34828 - DNA, 278 bp, Glycine max
  Clone ID: LIB3052-013-Q1-N1-F6
gtccgtaggctgggaattcggttggggctcaagccgattgggttggggcactttttttttaataattggtggcttttaacaaggccggcgaatccttaattctaataatccttctttggttttttccaaattcggattttttcgacagaatccgggaaaccaacccaaccaaaccttgggccacccaatcctggagcttgggttaagggggacccagggccgtggttctaaggaccttaaaatggttgaggaacttggacctggtggaaaagggattg

SEQ ID NO: 34829 - DNA, 418 bp, Glycine max
  Clone ID: LIB3052-014-Q1-N1-C8
atgacatcacacggacgcatacataagcttggaattcagatcttgtgactctgtttacgtatatatgatgtattcacatgcgtgagtgtttctgaacttttgggaagtctacaacttttgattttgggacctgataagttgtatatgatgtattcttggggcttaaaatagacattgacataagtgattttaccatggtccagtcccttagatcttatgtataaaggaccctgaatctggctgaaaacccccaaattttttacttcttttgaatagtattttgctagagagaacccaatgatcttcaatagtagaagtactcaagaacttttgtgaaaatttctgcactataatgtgttctctatttagcatatagtttatattaactgctctaaactatccatcctaatagttcata

SEQ ID NO: 34830 - DNA, 367 bp, Glycine max
  unsure (1)..(367): unsure at all n locations
  Clone ID: LIB3052-014-Q1-N1-E6
ttaatactgagaatggacatattcttattcattataagatagttttcaagtacaaaacgggcataacagcatgttatacctattccacataaagaaaggcctctacatatagagtagtagactaatattagaaatcacatccacaatttgaacactaacattgaacgagactatctagtacatagctagatttaaagcacattcaagatttgtgaagtttgagacttaattaaggtatgatgttaagtgcggcaagaggcacatgagcaatctgtgccacatctgcaaccagttccagaagccggagtcttgggacatgagcatggatngcacccacagtactcttcgcacgagcatgtcacgtgat

SEQ ID NO: 34831 - DNA, 307 bp, Glycine max
  Clone ID: LIB3052-014-Q1-N1-F5
gcagttaacaatcgctcctcagatatcaataagaaagattcggacagcgcttgggaaaggtaagaaaattgtctttttgactagagttgatccttttcctgtggccttgttagctgttctttttggtgttaagaacgaaattctgagttctaatgccacaaatccaatgttgacaaggcttcttgagaactgcaagagtcttaaatatttggttgatgagtgtcctttcgcatttgttaactagtttgtaatattttgttcacttaaataaagcgcattactatgtgcaataagtgtgtttaaatat

SEQ ID NO: 34832 - DNA, 254 bp, Glycine max
  Clone ID: LIB3052-014-Q1-N1-G7
caacaatggaccatttgtttttctcggcttcagcagttcagcaaagaaaaaccaccctgagtttttggcgggaaagggatcagtgcttcatattctagacaaaaagatactggccaggtctttgggtgtgagtaacagaaccattgatgagcttctgcgttctcccgaggactccatcattttcagatgcagttcctgcgcagaggaagaggagaagataatgaaggaagaggaggaggaagaggagagcaaga

SEQ ID NO: 34833 - DNA, 367 bp, Glycine max
  Clone ID: LIB3052-014-Q1-N1-H12
ctatgacatgcactcgtcacctaagctcggaattaattcccggttcaggtaattgaataatcattgaattcggcatatattgagagagttcactatcaatggtgtgaaggatagattcagacttagctatcatgttcgaatcaagcaattctccatagaatacactacactttccaatctatcactgactaaggtccatgatattatgagctaccattatgctatataccatagcaccattaccaatcaagttattagctagatcacctacatgatcctcagcctttgtggtgacgaccaacaatacatgcatgaatccacgcacctactgtaggattgaagaacacagatggcaatacttaacaac

SEQ ID NO: 34834 - DNA, 341 bp, Glycine max
  Clone ID: LIB3052-015-Q1-N1-A2
ctctgctgcaaatccaaaaaccaccaaatcgcggttccaaattgcaatttctcgagcgaactttgcgagttctagggttcccccactgccatggaccaggccgaattaacctccgaacaggttctgaggagggacatcccatgggagacctacatgtccaccaagctcatctcaggcaccagccttcagctcttaaggcgctacgatcaccggccagagagtcacagagcacagttgctcgatgatgatggtccctcttatgttcgcgtgtttgttcgtgttttgcgtgacattttcaaggaagataccgtggagtatgttttggcactgatagatgaaat

SEQ ID NO: 34835 - DNA, 262 bp, Glycine max
  Clone ID: LIB3052-015-Q1-N1-B4
gagaatcctactttgtggatgctcagcctaagaagaaagaggaggggaataagggaagaaagggtcctttgtcttcaattttgagggctttttactgaataagtatgtactaaaatgtatgctgtaatagctcatagtgagcgaggaaagtatcgggctatgtaactatgactagagcttcaactatgaataaataaatcgacagcatatgatgcttttgttttgtgtcaaaaaaaaaaaaaaaaaataaaaaaaataaaaa

SEQ ID NO: 34836 - DNA, 380 bp, Glycine max
  Clone ID: LIB3052-015-Q1-N1-C3
gtccagcagcagtgccagttccattgcctgatatggccatgccagcatcctttgacagtgagaatccagcctatagataccgtttcttagagccaacttcacaactcctgacaaggccagtcttagacaaccatggatgggatcacgattgtggttatgatggtgtaaacattgaacagagtctagctatcatcaataaattcccagcagctgtcactgttcacgtaacaaaggataagaaagacttcaccatccagttggattcctcagttgctgcaaaacttggagagaatggatcagccatggcaggctttgacattcaaagcgttggaaagcagctatcttacagtgttagaggagagacaaaattgaaaaatttc

SEQ ID NO: 34837 - DNA, 326 bp, Glycine max
  Clone ID: LIB3052-015-Q1-N1-E7
aaaaaaaaaaaaaaaaaaaaaaaaaaaaaaaaaaaaggaaaggaaaaaaaaaaaagaggaaaaaaaaaaaaaaaaaaaaaaaaaaaaaaaaaaaaaaaaaaaaaaaaaaaaaaaaaaaaaaaaaaaaggggcggcccccaccttatgactttttcaacccggaaattaattccggcccggtccttgaaggcttcccaattttccctaaatggagcccttttaaaccttgcctaaatcatggaaatagctttcccctgggtaaaatttttatccgttaaaatttccacacaatttacgacccgaaagcttaacgtgtaaaccctggg

SEQ ID NO: 34838 - DNA, 189 bp, Glycine max
  Clone ID: LIB3052-015-Q1-N1-F11
cgcataaatgacaagcatgatggtgtgaggatgaggccatgttatgaaataataacaaataaataaattttgtatgataataaaaagtatggcccatgtaccatcccagcgagcctatgtttatatctgagtggcgttgtacctttcaatcgccttaataaaatgtcagtcttcacgttttgtctttaa

SEQ ID NO: 34839 - DNA, 198 bp, Glycine max
  Clone ID: LIB3052-016-Q1-N1-A12
atgacttctcatccgcgcgtacctaatctcggaattcggctctagtattacaccgttttaaataatagacgatattctatgatgaggtcgcggttcccatgactgttgcccggagtagttatcctggcattacattctgtctcatatgtcattgcgtatactgaaaatcatatacccgatcacatcaagagcctccta

SEQ ID NO: 34840 - DNA, 306 bp, Glycine max
  Clone ID: LIB3052-016-Q1-N1-C6
tcggtgaattccaattccacattttcaagaattaaggaggcaaagaatgtgcatatatgaattggaattattggttttcttattaggcctatcctgaagccaaaggaaatgagatcggaattcctcggggaattccaattccacattttcaagaaataaggaggcaaaaatgtacatatatgaatgggaattattggtttcctaattaggcctatcctgaagccaatggaattgagatcggaattctctcggggaatcccaattacacattctcgagatatagggacgcaaatgtgcacatatgtg

SEQ ID NO: 34841 - DNA, 264 bp, Glycine max
  Clone ID: LIB3052-016-Q1-N1-D4
gacgtcgatgcacgcgtacgtagctggaatcggtcggggcaccggtgagaggcatgcggaagcttctcgcggttcggctgccgagatgccacccccaaccgaacaactgaccgctcaaaaccggggtgctgaacgtaaccgtgcccaaggtggaaaaaaacccgaagaccaggaccttaaggcaaatggaggtggttggataataatggaccatcatgaggactggaaaggttggaaggagtttggggtaaggggggggtcccc

SEQ ID NO: 34842 - DNA, 137 bp, Glycine max
  Clone ID: LIB3052-016-Q1-N1-D8
ttatgacgtaggacgcacgcatacttaagctcggaattcggctccaccattttatatttataatccaagctaacatcatcgcgtccgggtaaactatgatgccagctccgaccatatcatatacacactccaaaact

SEQ ID NO: 34843 - DNA, 270 bp, Glycine max
  Clone ID: LIB3052-016-Q1-N1-E11
tacctaagctcggaattcggctctagtatgacccgtttacagacaacagcccatatttgaggtaagtgtacacgtcattccaggagctagcaacatttatggctcacggtaacactgctcagctctcgaatgaaggcggtgatccagtgctggcgcgcctatgctggaccatcgcatcgtacgagatgccgcacgataacacgttcttaagaatcgtggaaaaacttctggaaatagaccccaccggtgcaattgtggccataaggaaca

SEQ ID NO: 34844 - DNA, 355 bp, Glycine max
  Clone ID: LIB3052-016-Q1-N1-E3
tagctatgacgtatgcatgcacgctgtcacgtcatgctcgggcttcggctcgagagtagactaacaagtcagatgaagagaaggggactacgcagagaatagaagaggaagatagatcaagatcttccttgcgttagtctcagctgaagaaattcaggagcagaacgagactaactcaacggtatcagacgtttcaaggtttcagcacttgcattatttttttccggatttgagttggaagacgatcaatgaggttcctagttgcttggattgttcctctgggtggtggagactttgtgtatttttaaaatattgacaattcacaatgccaaaggagatacgggttaggtctttg

SEQ ID NO: 34845 - DNA, 456 bp, Glycine max
  Clone ID: LIB3052-016-Q1-N1-E8
atgacgctcgcacgcacgcgtacgtaacctcggaattcgcctcgagcttctaccatttacactagcacgctagctccaaggtgatcggatcctgagttaatggccgatacaatttgcatcagtgctttcatcaccaggactgcattgatcacagacttaactgacgactgcatgctcgacgccttgcatactgtcaagagctaatggaacttaacactaacatcgacgagccaactattgactgagtaactccagaagcatcactaaccgagacagcacgaccctacacacgtgtaaaaaagacaccttacgattcaggtacatgatgcataactcatttatggcgcataagatgcaccatctgacgatatacctggatcttgcttctgatatctacatgtgagtatcacaatacatttgtaatgtcgtatatacggacttttcaaatgctactga

SEQ ID NO: 34846 - DNA, 401 bp, Glycine max
  Clone ID: LIB3052-016-Q1-N1-H1
tcggggaattccaattccacattttcaagaaataaggaggcaaaaatgttgatatatgaattggaattatttgttttcttattaggcctatcctgaagccaaaggaaatgagatcggaattcctcggggaattccaattccacattttcaagaaataaggaggcaaaaatgttcatatatgaattggaattatttgttttcttattaggcctatcctgaagccaaaggaaatgagatcggaattcctcggggaattccaattccacattttcaagaaataaggaggcaaaaatgttcatatatgaattggaattatttgttttcttattaggcctatcctgaagccaaaagaaatgagatcggaattcctcggggaattccaattccacattttcaagaaa

SEQ ID NO: 34847 - DNA, 232 bp, Glycine max
  Clone ID: LIB3052-017-Q1-N1-F11
ctggaataaattctggaaagatggagagacattgtgtagcatacactctggcctttcaaaatcctgtggcctaagtttgattttgatttgtctataccttattgtgtcacaacttttgagatagaaagtttatgcgattatttgaacgcaggatgctcatttgcttgagctaccaattctgttagactatgttttgtgcgttgtgaaataattaatagaacttgacgattaa

SEQ ID NO: 34848 - DNA, 591 bp, Glycine max
  unsure (1)..(591): unsure at all n locations
  Clone ID: LIB3052-001-Q1-B1-H2.F1
cggctcgagtantcagcatcctccatctcttcatcagaagatccaaaatcatcatcatcagaatcatcatcagagtggtgatgaagatgatgatgaagagacccctcccaagaaggtggatctgggaaagaagagacccaatgagtctgcatcaaaaactccagtttcttccaagaaagccaaaaatgctactcctgaaaagactgatggtaagaaaggtggacatacagcaactcctcaccctgcaaagaaaggcggaaagactcccaacagcgaagcaaagccaagactcccaacagtgaagccaaagccaagactcctaagtctggtggactctcttgcaaaacctgcagcaagtctttcaccaatgaaagtggtctgcaacaacataacaaggcaaagcgatggtggtcagtgatatttttgctgttggttatgactcattcatgtattatttttggcttatgtaatagagtgagtttcctaaggacgttaggcatctgtccttgtttttcggcccagtaaaccgtggtattgtggtagtgttgaaggtgaatgcatgtttgataagtttttgtttgaaattttaat

SEQ ID NO: 34849 - DNA, 595 bp, Glycine max
  Clone ID: LIB3052-001-Q1-B1-H2.F2
cggctcgagctatcagcatcctccatctcttcatcagaagatccaaaatcatcatcatcagaatcatcatcagagtggtgatgaagatgatgatgaagagacccctcccaagaaggtggatctgggaaagaagagacccaatgagtctgcatcaaaaactccagtttcttccaagaaagccaaaaatgctactcctgaaaagactgatggtaagaaaggtggacatacagcaactcctcaccctgcaaagaaaggcggaaagactcccaacagcgaagccaaagccaagactcccaacagtgaagccaaagccaagactcctaagtctggtggactctcttgcaaaacctgcagcaagtctttcaccaatgaaagtggtctgcaacaacataacaaggcaaagcatggtggtcagtgatatttttgctgttggttatgactcattcatgtattatttttggcttatgtaatagagtgagtttcctaaggacgttaggcatctgtccttgtttttcggcccagtaaaccgtggtattgtggtagtgttgaaggtgaatgcatgtttgataagtttttgtttgaaattttatgggaa

SEQ ID NO: 34850 - DNA, 534 bp, Glycine max
  Clone ID: LIB3052-001-Q1-B1-H2.R1
tttttagacaataattgaagttcccattaaaatttcaaacaaaaacttatcaaacatgcattcaccttcaacactaccacaataccacggtttactgggccgaaaaacaaggacagatgcctaacgtccttaggaaactcactctattacataagccaaaaataatacatgaatgagtcataaccaacagcaaaaatatcactgaccaccatgctttgccttgttatgttgttgcagaccactttcattggtgaaagacttgctgcaggttttgcaagagagtccaccagacttaggagtcttggctttggcttcactgttgggagtcttggctttggcttcgctgttgggagtctttccgcctttctttgcagggtgaggagttgctgtatgtccacctttcttaccatcagtcttttcaggagtagcatttttggctttcttggaagaaactggagtttttgatgcagactcattgggtctcttctttcccagatccaccttcttgggaggggtctcttcaacatcatcttc

SEQ ID NO: 34851 - DNA, 531 bp, Glycine max
  Clone ID: LIB3052-001-Q1-B1-H2.R2
tttttagacaataattgaagttcccattaaaatttcaaacaaaaacttatcaaacatgcattcaccttcaacactaccacaataccacggtttactgggccgaaaaacaaggacagatgcctaacgtccttaggaaactcactctattacataagccaaaaataatacatgaatgagtcataaccaacagcaaaaatatcactgaccaccatgctttgccttgttatgttgttgcagaccactttcattggtgaaagacttgctgcaggttttgcaagagagtccaccagacttaggagtcttggctttggcttcactgttgggagtcttggctttggcttcgctgttgggagtctttccgcctttctttgcagggtgaggagttgctgtatgtccacctttcttaccatcagtcttttcaggagtagcatttttggctttcttggaagaaactggagtttttgatgcagactcattgggtctcttctttcccagatccaccttcttgggaggggtctcttcatcatcatc

SEQ ID NO: 34852 - DNA, 537 bp, Glycine max
  Clone ID: LIB3052-012-Q1-N1-B3-F2B
gtggagagagaaatagagagagaggggaaacagatgggttaggctgaaaagggagttggtataacattgttggtttggtttagtttagtttcctcggtagagagggctcttttttttattttggtggtgatggaagtgggaaaattgaatggcaggaactttttcaagaggctgaagcaagtttcagagtggtggcagttgcacaagcaacaagaagagaagaagagtggaaagaaacaaagctgggagtgcaaggaatcaacaacccattaggaataagtgcaaagcttcattaaaagctggaagaggaaaatcacaacaggggtctgactctggatcctcacaggaatcatcatcatcatcatcatcttctgcagcaacaacaacaaccacctcatcatcctcatcctcaaaatctgattctaaattcaataagacatgtaacagaccaagaaggagaaaacccaagagaccaagaatctcattctcatcctcaccaattccatatccaattccaacctcttcatcatcaaccag

SEQ ID NO: 34853 - DNA, 450 bp, Glycine max
  Clone ID: LIB3052-012-Q1-N1-B3-R2B
ttatacaataactagagcaaactagctcttttattgaatttgcatgtttttcagatcactacaagaaactcgaaactgaagaagtacaaagaagacacaatcacttaacaaagggaaacatagcactccaatacagaagaaacaaaagaaacatagcactccaatacagaagaaacaaaagaaacacaatactcctagtcctagttaaattaagcatgaaaaacataagttgaacataaaaagcataacaaaccgagggattggaaaacctgaatatccacctcagattttcttgaattcccggtggagcttgaaaatccattcatcatgatcttccaaaatcatgtgtctctccatcaattgaaccatcttcaatgcaaccccacaaaccctgagggagaacaaagttgggggttttgatgtgtgtttttcaaatcaatggcgagaatc

SEQ ID NO: 34854 - DNA, 386 bp, Glycine max
  Clone ID: LIB3053-011-Q1-N1-E3
caagcataagcacaagcacaagcacaagcacttctctaatgtccgtttcacactctattacagatttcacaagtgcttacacttcaaatggctttggaagctcttcaatcacccaccacagccactccatcgtttagtccctttgaagaaaccagtctcagttacttagagacaccgtggacgaaaggaaagcgttctaagcgtagccgcacggagcaacaactgcaacacccttcatgcaccgaggaagagtacctcgctctttgtctcatcatgctcgctcgcggcggcgccggcagtgtctccaccgccaaacccgctgtctccgacaacaattctgcgccgctatccgccgccaaactgagctacaaatgttcggtttgcaa

SEQ ID NO: 34855 - DNA, 351 bp, Glycine max
  Clone ID: LIB3053-011-Q1-N1-E7
caagcataagcacaatcacaagcacaagctcttctctaaggccggctcacactctattacagatttcacaagtgcttacacttcaaatggctttggaagctcttcaatcacccaccacagccactccatcgtttagtccctttgaagaaaccagtctcagttacttatagacaccgtggacgaaatgaaagcgttctaagcgtagccgcacggatcaacaactgcaacacccttcatgcaccgtataatagtacctcgctctttgtctcatcaatgctcgctcgcggcggcgcccacagtgtcttcaccgtcaaaccctctgtctacgacaacaattcttctccgatatcc

SEQ ID NO: 34856 - DNA, 374 bp, Glycine max
  unsure (1)..(374): unsure at all n locations
  Clone ID: LIB3053-010-Q1-N1-B1
aaaccagtctcagttacttagagacaccgtggacgaaaggaaagggttctaagcgtagcccgacggagcaacaactgcaacacccttcatgcaccgaggaagagtacctcgctctttgtctcatcatgctcgctcgcggcggcgccggcagtgtctccaccgncaaacccgctgtctccgacaacaattctgcgccgctatccgccgccaaactgagctacaaatgttcggtttgcaacaaagccttctcctcttaccaagcactcggaggacacaaggccagccaccggaagctcgccggagaaaaccacccgacctcctccgccgtgacgacgagttcggcgtcgaacggtggtggtaggacccacgagtgc

SEQ ID NO: 34857 - DNA, 353 bp, Glycine max
  Clone ID: LIB3053-001-Q1-B1-D9
cgctatcaaaaaccactggaactccaccttgaagcgcaagtgctcttcaaccatgatcgacgacaacacccaaccgctgaaaagatccgtgagtgccggcgcggctattccagtctctactggactctacatgaacccgcccacaccgggtagtccctccggatccgatgtgagcgagtccagcttaccggttgcatcctcttcgcacgtgttccgtcccgtgcctagaactgtcaaggttctaccacccgtagaaaccacgtcgtcctccaatgaccctccaacttcactttctctatcactccccggtgttggtgttgttgactcatccgaagtctccaatcgggcaactg

SEQ ID NO: 34858 - DNA, 343 bp, Glycine max
  unsure (1)..(343): unsure at all n locations
  Clone ID: LIB3053-001-Q1-B1-A11
gagaaaaaggaaaagaatgatatcaaaccgcaaatctgcacggcaatctcgcatgaggaagcagaagcacttggacgatcttgtttcccaagtggctcagctcagaaaagagaaccaacaaatactcacaagcgtcagcatcancacgcaacagtacctgagcgttgaggctgagaactcggtgcttaaggctcaagtgggtgaacttaatcacaagttaaagtctctgaatgagatcgttgacgtgttgaatgccaccactgtggcgggttttggagcagcagcaacatcgagcaccttcgttgagccaattaataataatagcttcttcaacccgttgaat

SEQ ID NO: 34859 - DNA, 377 bp, Glycine max
  Clone ID: LIB3053-005-Q1-N1-F9
ctttctctttctctgtctgcttcttcactttctctcgttggaatcgaaaaaaatcatgggcagaaaattcttcgtcggtggcaactggaaatgcaatgggaccactgaggaggtgaagaagattgttactactttaaatgaagctaaagtccctggagaagatgttgtagaagttgttgtgagccctccttttgtgttccttccttttgtaaaaagtttgctgcgccctgatttccatgtctcggcccaaaattgttgggttcgcaaaggtggtgcttatactggagaggttagtgctgaaatgcttgttaatttgggaattccttgggttattattggtcactctgaacggaggcagcttttgaatgaatcaaatg

SEQ ID NO: 34860 - DNA, 400 bp, Glycine max
  Clone ID: LIB3053-008-Q1-N1-C6
ggggatagatagagtgatacgcgtcacgttttcataataataaaaaaatggcagcggcggcggcagtgacggtgctactcccacctaggattccgaccaccaccaacgttacccgctgctctgctttgccttctctccctcctcgcgtctccaacaccaaaaccactttgttctcaccttccctcaacaacttttcagtgtcccgaaaatcttctctgcttcagaccatagcttcttcagaggaatcatcctcagtagatgccaatgaggtgttcacagatttgaaggaaaagtgggatgctcttgaaaacaagtccacagtacttctttatggtggaagggctatagttgctatttggctatcgtcaattcttgtgagcgccatcaactcagttccctt

SEQ ID NO: 34861 - DNA, 406 bp, Glycine max
  Clone ID: LIB3053-010-Q1-N1-D8
aaagttccaaattttttggtttggggatagatagagtggtacgcgtcacattttcataataataaaaaaatggcagcggcggcggcagtgacggtgctactcccacctaggattccgaccaccaccaacgttacccgctgctctgctttgccttctctccctcctcgcgtctccaacaccaaaaccactttgttctcaccttccctcaacaacttttcagtgtcccgaaaatcttctctgcttcagaccagagcttcttcagaggaatcatcctcagtagatgccaatgaggtgttcacagatttgaaggaaaagtgggatgctcttgaaaacaagtccacagtacttctttatggtggaggggctatagttgctatttggctatcgtcaattcttgtgagcgcca

SEQ ID NO: 34862 - DNA, 389 bp, Glycine max
  Clone ID: LIB3053-006-Q1-N1-E1
gttagagccatgtgtattaatattcccggatttgcataccacaaagcattcaaggcaaggaaaaatctagtggccatatttcaatctattgtggacgagagaagaaacttaaggaagggctatctgcctggaaaagccaaagatatgatggatgctctgatagatcttgaagatgatgaaagaaagttgagtgacgaggacatcattgacatcatgttgatgtacttgaatgcgggccacgagtcttcaggacatattaccatgtgggcaaccttcttcctgcaaaagcacccagaatatctccaaaaggctaaggcagaacaagaagaaataataaggagaaggccttcaacacagaaagggttgacacttaaggaagttcgggagat

SEQ ID NO: 34863 - DNA, 397 bp, Glycine max
  unsure (1)..(397): unsure at all n locations
  Clone ID: LIB3053-006-Q1-N1-B2
gaaacaggcatagcatgctacactcgcgggcctttcctgcctagtgtttcttccaagcactctccaccctccatctctccatcttttggcttgaggagtctgaaatcgagctctttatttggagaatctctaagagtggcatccaaatcaacactaaaggtttcaaagacaaagaatacttcactcgtgaccagatgtgaaattggtgacagtctggaagaattcctcacaaaagcaacaccagataaggggttgatcaggttgttggtgtccatgggagaagcattaagaacaatttccttcaaagtgaagacggcttcttgtggtggaacacaatgtgttaatacttttggngacgagcagcttgcagtggatttgctagctaatcagcttcttt

SEQ ID NO: 34864 - DNA, 385 bp, Glycine max
  unsure (1)..(385): unsure at all n locations
  Clone ID: LIB3053-010-Q1-N1-B4
ggcttttcatacagtggtcagaagtgcactgctggtaaggttggcctggtaatggagtccggtggcgatgctttggttgaaaaagtgaaagctaaagtggcaaaactaactgttggaccaccagaggatgactgtgatatcaccccggttgtgtcagaatcatctgccaatttcattgaaggcctggtcttggatgctaaggagaaaggagcaacattctgccaggagtacaaaagagaaggcaatcttatntggcctttgctactggacaatgttaggccagacatgagaatcgcatgggaagagccatttggaccagttntaccagtaattaggatcaattcaatttgaggagggaattcaatcattgcaatgctagcaactt

SEQ ID NO: 34865 - DNA, 353 bp, Glycine max
  unsure (1)..(353): unsure at all n locations
  Clone ID: LIB3053-009-Q1-N1-D11
caacaaagcaataatgatcagtgatgcaatggaaacgggaacagttcagataaattctgccccagctcgtgggccagatcattttccctttcagggtataaaggacagtggcattggatctcaagggattaccaacagcataaacatgatgaccaaggtcaaaacgactgtgatcaacttacccagcccttcctatactatgggctagtagtgtaatacacacatgcatgggggaacatcattatatagcatgttccataaatcatagtgnaacgtnaacaaccgtgtgagttcagcattgcattgtcttttgcagctgggattacagagatgaataacgagtttgattgata

SEQ ID NO: 34866 - DNA, 412 bp, Glycine max
  unsure (1)..(412): unsure at all n locations
  Clone ID: LIB3053-014-Q1-N1-D3
ggccacccacgcggttctagcttctacaaggatccccactaacaccaagttcccatccaaggcttcacactctttcccaacccaatgcgcctcaaagagacttgaggtgacagaattctctgggctaagatccacttcatgtgtgacatatgctaacgatgctagagaatcttccttttttgatcttgtagcttcccaactcactcccaagaccaatggatcatcaactcctgtgaggggagagacagtggccaagttgaaggtggcaatcaatggtttcggacgcattggtagaaacttccttcgctgctggcacggccgaaaagactcaccccttgaggtcgttgttgtcaacgacagtngtggtgtcaagaatgcttcgcacctgcttaaatatgattccatgctggga

SEQ ID NO: 34867 - DNA, 417 bp, Glycine max
  Clone ID: LIB3053-005-Q1-N1-D9
ggcaaactcaatggcattgcactccgtgtgccaacaccaggcgtctcagtggtggacctcgttgttcaggtctcaaagaagacctttgcagaagaagtgaatgcagcattcagagagagtgcagacaatgagctccagggaatcctctctgtgtgtgatgagccacttgtgtctgttgacttcaggtgcactgatgtgtcctcaaccgttgactcatcgttgaccatggtcatgggagatgacatggttaaggtgattgcttggtatgacaatgagtggggctactcccaaagggttgtggatttggctgacattgttgccaacaagtggaagtgagagccatcaaattctgaattggtaattcaattattatatgtatgtaccatgccattgtagttttgtatgcttactactact

SEQ ID NO: 34868 - DNA, 360 bp, Glycine max
  Clone ID: LIB3053-006-Q1-N1-E5
gcctctactatactgcttcaccttctgctctaggaaagggagtgctgaaacatggcttcggctactctctctgtagccaaaccagcccttcaggcaaatgggaaaggcttctctgaattctctggcctacgaagctcatcaggcttccttcccttttctagaaaatcttcagaggatttccattctgtcattgccttacagacctatgcagttggaagcagtggaggatacaagaagggtgtgacagaagcaaaactgaaggttgccataaacgggttaggaaggattggaaggaacttcttgaggtgctgacacggtcgcaaagactcccctctagatgacattgccatcaacgacacc

SEQ ID NO: 34869 - DNA, 329 bp, Glycine max
  Clone ID: LIB3053-006-Q1-N1-C11
ggcaaactctttggcattgcactccgtgtgccaactcctgacgtctcagtggtggacctcgttgttcaggtctcaaagaagacctttgcagaagaagtgaatgcagcattcagagagagtgcagacaatgagctccagggaatcctctctgtgtgtgatgagccacttgtgtctgttgacttcaggtgcactgatgtgtcctcaaccgttgactcatcgttgaccatggtcatgggagatgacatggttaaggtgattgcttggtatgacaatgagtggggctacttcccaaagggttgtggatttggcttgcattgttgccaacaatt

SEQ ID NO: 34870 - DNA, 307 bp, Glycine max
  Clone ID: LIB3053-014-Q1-N1-A3
agctatgacgtcgcctgccctaactcctgaactcggtattagcgacctgtttaccagttgccacactacaccgagattcccgctaaagccgtttgcgttgttgcttgcgaagaaatggcgactcagaggagcgtgcgaacgttgaaggatggtgatttgaaagggaagagggtgttcgtgagggtcgatctgaacgtgcctttggatgacaaccttaacatcaccgatgacactagagtccgtgctgctgatcccaccatcaagtacttaactggtcatggagccaaactgatcctttctagccact

SEQ ID NO: 34871 - DNA, 392 bp, Glycine max
  Clone ID: LIB3053-010-Q1-N1-A2
agaagtttgagactctttcctacctgccagaccttgatgatgcgcaattggcaaaagaagtagaataccttcttaagaagggatggattccttgcttggaattcgagttggagcacggtttcgtgtaccgtgagcacaacaggtcaccaggatactacgatggacgctactggaccatgtggaagctgcctatgtttggttgcactgatgcttctcaggtgttgaaggagcttcaagaggctaagactgcataccccaacggcttcatccgtatcatcggattcgacaacgttcgccaagtgcagtgcatcagcttcatcgcctacaagcccccaggcttttaagtgtgaaaaaattgcaaagcatttgtaagccgcaccccaatttggttg

SEQ ID NO: 34872 - DNA, 398 bp, Glycine max
  Clone ID: LIB3053-006-Q1-N1-D9
agaagaacaagtagttgagaactaagaaggagaagcaaagggcttcctcaatgatctcttccccagctgttaccactgtcaaccgtgccggtgccggcatggttgctccattcactggcctcaagtccatggctggcttccccaccagaaagaccaacaatgacattacctccattgctagcaacggtggaagagtgcaatgcatgcaggtgtggccaccagttggcaagaagaagtttgagactctttcctacctgccagaccttgatgatgcacaattggcaaaggaagtagaataccttcttaggaagggatggattccttgcttggaattcgagttggagcacggtttcgtgtaccgtgagcacaacaggtcaccaggatactacgatggacgc

SEQ ID NO: 34873 - DNA, 380 bp, Glycine max
  Clone ID: LIB3053-001-Q1-B1-D4
agaaggaaatggcttcctcaatgatctcctccccagctgttaccaccgtcaaccgtgccggtgccggcatggttgctccattcaccggcctcaaatccatggctggcttccccacgaggaagaccaacaatgacattacctccattgctagcaacggtggaagagtacaatgcatgcaggtgtggccaccaattggcaagaagaagttcgagactctttcctacttgccagacctcgatgatgcccaattggcaaaggaagtcgaataccttctaaggaaaggatggattccttgcttggaattcgagttggagcacggtttcgtgtaccgtgagcacaacaggtcacctggatactatgatggacgctactggaccatg

SEQ ID NO: 34874 - DNA, 364 bp, Glycine max
  Clone ID: LIB3053-014-Q1-N1-F9
gaacaagtagttgagaactaagaaggagaagcaaatgggttcctcaatgatctcttccccagctgttaccactgtcaaccgtgccggtgccggcatggttgctccattcactggcctcaagtccatggctggcttccccaccagaaagaccaacaatgacattacctccattgctagcaacggtggaagagtgcaatgcatgcaggtgtggccaccagttggcaagaagaagtttgagactctttcctacctgccagaccttgatgatgcacaattggcaaaagaagtagaataccttcttaggaagggatggattcctttgcttggaattcgagttggagcacggtttcgtgtaccgtgagca

SEQ ID NO: 34875 - DNA, 408 bp, Glycine max
  Clone ID: LIB3053-001-Q1-B1-B3
agaagaacaagtagttgagaactaagaaggagaagcaaatggcttcctcaatgatctcttccccagctgttaccactgtcaaccgtgccggtgccggcatggttgctccattcactggcctcaagtccatggctggcttccccaccaggaagaccaacaatgacattacctccattgctagcaacggtggaagagtgcaatgcatgcaggtgtggccaccagttggcaagaagaagtttgagactctttcctacctgccagaccttgatgatgcacaattggcaaaggaagtagaataccttcttaggaagggatggattccttgcttggaattcgagttggagcacggtttcgtgtaccgtgagcacaacaggtcaccaggatactacgatggacgctttaacccct

SEQ ID NO: 34876 - DNA, 372 bp, Glycine max
  Clone ID: LIB3053-009-Q1-N1-C6
gatctcttccccagctgttaccactgtcaaccgtgccggtgccggcatggttgctccattcactggcctcaagtccatggctggcttccccaccaggaagaccaacaatgacattacctccattgttagcaacggtggaagagtgcaatgcatgcaggtgtggccaccagttggcaagaagaagtttgagactctttcctacctgccagaccttgatgatgcacaattggcaaaggaagtagaataccttcttaggaagggatggattccttgcttggaattcgagttggagcacggtttcgtgtaccgtgagcacaacaggtcaccaggatactacgatggacgctactggaccatgtggaagctgcctat

SEQ ID NO: 34877 - DNA, 406 bp, Glycine max
  Clone ID: LIB3053-010-Q1-N1-E7
aacaagtagttgagaactaagaaggagaagcaaatggcgtcctcaatgatctcttccccagctgttaccactgtcaaccgtgccggtgccggcatggttgctccattcactggcctcaagtccatggctggcttccccaccaggaagaccaacaatgacattacctccattgctagcaacggtggaagagtgcaatgcatgcaggtgtggccaccagttggcaagaagaagtttgagactctttcctacctgccagaccttgatgatgcacaattggcaaaggaagtagaataccttcttaggaagggatggattccttgcttggaattcgagttggagcacggtttcgtgtaccgtgagcacaacaggtcaccaggatactacgatggacgctactggaccatgt

SEQ ID NO: 34878 - DNA, 323 bp, Glycine max
  Clone ID: LIB3053-014-Q1-N1-E9
atctaatacacgccttgcacacctacgtaatctcctacatatctactatagcttaccgtttgctccccaatgaaacaatcatgatctttgttttcttatcagctagcaaatatctctagcgaatacctagcttttacaactgatacacctgcttcctcaattccacttgagcccactaacatcatcactgctccacatcttgctctgacaaaatccttttcctattgtcttcattcacaaagtctttatttaatcttcttatgtttatccataatcattcttcacaacttttttattctaacaaaatatttttcacccaatct

SEQ ID NO: 34879 - DNA, 409 bp, Glycine max
  Clone ID: LIB3053-014-Q1-N1-F1
cggctcgagaaacaaaggagcctctcggtttccaatgtggagagagcgaacatggctctaatcgctgccaggattctcggttccaattcgaggccggcggtcgcgctccaccgctggcagtggctggcgtactcctccgcctccgcggcggtggcggagccggagaccacggaggtgaaggactacgccgattaccggcgctccctgtacggacagatcacgcacaaggcgctcctcgtcgacgccgttggcacgctcgtcctcccttcgcagcccatggctcagatatatagaaagattggggagaagtatggagtggagtattcggaggatgagatactgttcagatacagaagagcgtatggtcagccttggggaaaatctcgtctcagatatgttaatgatggta

SEQ ID NO: 34880 - DNA, 315 bp, Glycine max
  Clone ID: LIB3053-014-Q1-N1-F10
ctcgagcgattcggctcgagaatcagtctctaatattggtctcactgtcttgtctctccagagaactgtatagagagagatggcagctgcaacatctggtgctgcgttaaatgggttgggatcttccttcttgagtggaggaaacaggagccaaacccttatggccactgctattggaggcaaagttggtgctgctgctggtactgctagtcctagaagactcattgtggatgctactgctgcaccaaagaagtcatggctccctggtgtcagatgtggtcgcaacctagtcgacccagaatggctggatggatc

SEQ ID NO: 34881 - DNA, 318 bp, Glycine max
  Clone ID: LIB3053-014-Q1-N1-F12
cattcttcggtttctccgaatctgatttctgatttgggaaaatgctcctgggattctcaacgttagcgttgttggtgtgtttctcatgttgttggttattagtgttgggcgagggtgaaacggcgtcgtgctcgaacatagtggcgttggggcaccgcaccgacaacatatccataacggagtttgggggcgtgggtgatggacgcaccctcaacaccaaggccttcagagaggccatatatagggttcagcacttgccacgagaaggaggcacgctcctttatgtgccttccggggtgtacttaacggagcccttta

SEQ ID NO: 34882 - DNA, 412 bp, Glycine max
  Clone ID: LIB3053-014-Q1-N1-F2
ctccaatatgctatgcgcacttggctgctactcagttggggcagttcatgaaatttgaggacaaatctgaaacatcttcaagccatggtggattgagcggtgcaggtgctgttcccgtccctcagttgcctcccttgcaggagaatgtccgcaacacaatgttcttttgttgaggccttaatgctctgccctgtctcctcaagtggtgaaaatgctgtacataaaactatgtttctaatcttgcaagttatgcggacgaagtttatattgtggtagacttggtcttcttagccatatttagtctttctagcacaagccttttcaaatgttcggggaccttaccttactttttgtagcaagactctctttagcgcaacgtctttttgtagcaaggcttgatcttcagcacgtc

SEQ ID NO: 34883 - DNA, 391 bp, Glycine max
  Clone ID: LIB3053-014-Q1-N1-F3
gagaaagggagaaagggtgtgagaatggagagcaaagaggaagatgtaagggttggagcaactaagttctcagaaaggcaaccaattggtacagcagctcagggtgacaaggactacaaagaaccacccccagcacctttgtttgagcctggtgagctaaagtcatggtccttctacagagctggaattgctgagtttgtggccactttcttgttcctctacattaccatcttaactgtcatgggtgtcaacaggtcaccctccaagtgtgcctctgttggcattcaaggcattgcttgggcctttggtggcatgatctttgcccttgtctactgcactgctggaatttcagggggacacatcaacccagctgtgacctttggtctctttt

SEQ ID NO: 34884 - DNA, 406 bp, Glycine max
  unsure (1)..(406): unsure at all n locations
  Clone ID: LIB3053-014-Q1-N1-F5
gctcgactacttgggcaacccaagcctgatccacgcccagagcatcctcgccatctgggccacacaagttatcctaatgggtgccgttgaaggttaccgtattgctggtggccccctcggtgaggtcactgacccaatctacccaggtggcagcttcgacccattgggccttgctgatgacccagaggcttttgctgagcttaaggtgaaggaactcaagaacggacgattggccatgttctctatgtttggcttctttgttcaggccattgtcaccggaaagggtccattggagaacctcgccgatcaccttgctgaccctgtcaacaacaacgcctgggcctatgccaccaacttcgtccncggaaagtgagcgtcaaagaacgaaatgactnttgagagtttt

SEQ ID NO: 34885 - DNA, 408 bp, Glycine max
  unsure (1)..(408): unsure at all n locations
  Clone ID: LIB3053-014-Q1-N1-F7
atttggggaacccaaaccttgtccatgcacaaagcatcctggcagtgctgggcttccaagttatcctaatgggccttgttgaagggtaccgcatcaatgggcttgatggggtgggagagggcaatgacctctaccctgggggccagtactttgacccactgggccttgctgatgacccagtcacttttgctgagctcaaagtcaaggagatcaagaatggaaggctggccatgttctctatgtttggattctttgttcaagctattgtcactggaaaaggcccattggagaacctcttggaccaccttgacaaccctgtggctaacaatgctngggtctatgccactaagtttgccccaggatcttaaatgtatatgacttcttcttccctaatccctatgatcatat

SEQ ID NO: 34886 - DNA, 348 bp, Glycine max
  Clone ID: LIB3053-014-Q1-N1-F8
gcatatagagtagaggaagaagacgatggctgtggtttcggtgtaaagcttggactcgctgacgtcgttctgatactgcctcgtccattttcaatgaactgccttagctcactcttgaagatccacctcatagtgtagctgattatgcctcatttgctactacacatgatggtgctgaacggatgtgtcgaatcagcgtattgagtacgctactaatactaagatagagcagctgctaaaagctactggattttcctctcttcttctaatatacgctaacacttattcattgctctttgtaaatttattttgtttctggcacttatatgcatgcatcggatagatttt

SEQ ID NO: 34887 - DNA, 401 bp, Glycine max
  unsure (1)..(401): unsure at all n locations
  Clone ID: LIB3053-014-Q1-N1-G10
ctccaatctccatttggcttctcaagaaaagcctcctgtcttgttaaggcagctgctactccccctgtcaagcaaggatcagacagacctttgtggtttgcatcaaagcaaagtctttcctacttggatggcagccttccgggtgactatggatttgaccctctgggactttcggaccctgaaggaacaggagggttcattgagccgaaatggctagcatatggtgagataatcaatggtcgttatgcaatgttgggtgcagttggtgcaatagcacctgaaattctaggcaaggctggtctgatccctcaggagacagcactcccatggttcagaaccggtgtgttcccacctgcangaacctacaactacttggcagactcctacacactngttcgtgt

SEQ ID NO: 34888 - DNA, 384 bp, Glycine max
  unsure (1)..(384): unsure at all n locations
  Clone ID: LIB3053-014-Q1-N1-G11
tgcagatcatgcacatgcagttaaagttctcaacagattgggtttggaagattgttttgagggcatcatatgctttgaaacgcttaatcctcccaaacaaatcaattgcatggatgtaccaaatgataatcatgtgctcacagatttaacagaaaatggatgtttcaattcccacccacaaatcctctgtaaaccatctgtggaagcctttgaagctgctattcggattgctaatgtggatccaaagaaaacaattttctttgatgacagtgttagaaatgttgaaagtgcaaaaataactggacttaacactgttttagtgggccattcagatttggtccctggagctgatcatgcnctgaacagcattcataatatcaaaga

SEQ ID NO: 34889 - DNA, 352 bp, Glycine max
  Clone ID: LIB3053-014-Q1-N1-G12
accagctatagcttcaacgaatgcaattatatcggctgcatgtgcactagaaacattaaagattgcaacagagtgcagcaaaattttgtcgaactatttaacgtataatggatcagaaggcctccatactgaagtggcaagatttgaaagggacaaggactgtcttgtgtgtggtcctggtatacgtattgaattggatacttcaatcacattgcaaaagttcatggatcttctggaagaacatcctaagttgcgattatcaaaagctagtattacgcatcaaggaaagaatctgtacatgcaagctccccctgtattggaagaaatgactcgatcaaacctgagtctctct

SEQ ID NO: 34890 - DNA, 415 bp, Glycine max
  Clone ID: LIB3053-014-Q1-N1-G2
aaatcaaagccatggccacctccaacttctctattgttctctccgtctccctagccttctttttggtgctacttaccaaggcacactcgaccgataccgtttctttcaccttcaacaagttcaacccagtccaaccaaacattatgctccaaaaagatgctagtatttcatcctctggggtgttacaactcaccaaagttggcagcaacggcgtgcccacctcgggatctctcggtcgtgccctttacgctgccccaatccagatttgggacagcgaaaccggcaaggtagccagctgggctacatcctttaaattcaacattttcgcacccaacaaatcaaactcagctgacgggcttgccttcttcttggcacccgtcgggtctcagccccaatccgacgatggatttcttgg

SEQ ID NO: 34891 - DNA, 416 bp, Glycine max
  Clone ID: LIB3053-014-Q1-N1-G4
ccttccttaacttgggatttcggttgaggcttaacctaatttttccttcctcttttgcactggtttaataaaaggccggaccaagatattttcagttgcattagtgaacctcgtcttgtagccagaaagttcttggccagacctcagcatgagggtgttggagccgttgttagaagaagcatagggagatttgaactcaagtactttgatcctttccttgtcttggatgaattctcagtgactgctcctgctgggtttcctgatcatccacatagaggatttgagacggtcacatacatgttgcagggagctgtaacgcacgaagattttgaaggacataagggaacaattgaagctggtgacttgcaatggatgactgcagggagagggttagttcactcagaaatgcctgcagc

SEQ ID NO: 34892 - DNA, 204 bp, Glycine max
  Clone ID: LIB3053-014-Q1-N1-G7
aagactttgtaattgaggtgctgcaatggcttcaagtcaggaagaggtgactcttttgggagtaattggaagcccatttgcttgcagggtgaagattgcccttaagttgaagggagttgaatacaaatatgtggaagaaaatttggccaacaagagtgatttgcttctcaaatccaacccagttcacaagttagttccagtttt

SEQ ID NO: 34893 - DNA, 388 bp, Glycine max
  Clone ID: LIB3053-014-Q1-N1-G8
ctcttccatccctgtgatcttttcgcctctctgttcaggggtcaaatataacaaaacattaagtgaaaatgacgcagaatgcaatagtgtccaagacaaaatccgggatcaagggggacatagccgtggcacagaagccactggcggcgccggggtacattcccattccgaggaggagggttttgaagaacctcgaaatcaatggaggacaaagaattaatgcatgggtcgattccatgagagcctcttctccaaccaattccaaatccacctcttctgtcgcagaagaacacagctcttggattcttggccacccttcagcattagacatgtttgagcaaattatggatgcatccagaggaaagcaaattgtcatgttccttgacta

SEQ ID NO: 34894 - DNA, 363 bp, Glycine max
  Clone ID: LIB3053-014-Q1-N1-G9
gtagaaagagtaagaaggatttggaattgagaatttccgtggcggcggcgacgaacttgttagcaacactgggggatctggagagggactccttcgtggctcttctttcgaagctgatcgctgaatcgaagtacgtccagaacaacccgccggagctcattccccaagaggacagagtggtgaagcacgtcttggacgttctgttaccgttcagcaccaccaccggcggtggacccttgctcgtaaaccacgtcacctaccacgccggcagagggaacctcatcgtggagtaccccggcaccgttcccggcaaaatcctctcgttcgtcggatgccacatggacgttgtgaccggcaatccca

SEQ ID NO: 34895 - DNA, 289 bp, Glycine max
  Clone ID: LIB3053-014-Q1-N1-H1
cgaagatggaagaattcactggtcgatccgctccaacagtcattacatgaacacatacaggtggaaggtggttagatcctgaagtttctcccagtcatttcttctttgttcagtttcttacggatggccgaacactagtgttggttgtttgcagcctttgctatgggcacttgagtggaatttgatcagttactttatcaaaattttgatgtgctgaataagttgcaactgccgagtgctaattctattatatagtcttaatatgatggctcctcttgtattggcgttt

SEQ ID NO: 34896 - DNA, 330 bp, Glycine max
  Clone ID: LIB3053-014-Q1-N1-H11
ttacaaggccgagaaccggaatttcactgttgcaactatggctcttagtgtgcttaacgtatctatctagtacgttgtactcaacatcatcgagccggctccctaagcagagccaagaactttaggagcctttacaactccatgatgcaaaactatccaaaacctgaagggtgctcacaggggacatgatgctatcggagatggcgaactcataagctaccttcacatatatggctacctaacaaagggtagactttccaacgacaacttcgacgaaagcgtctagtacgccctaaagcactgagaagcattccatcactaacgcgacac

SEQ ID NO: 34897 - DNA, 349 bp, Glycine max
  unsure (1)..(349): unsure at all n locations
  Clone ID: LIB3053-014-Q1-N1-H12
cgtgaatgcgtataaaaggaaaataaagaaattagcggcaaaatgttgggtgtgttcagcagctccatagtgtcgccgccggacgagctcgtggccgncggcagccgtactccgtcgccgaagatgacggcggcggcgctgcggaagcggttcgaggagaagaacccctccggcgtgtcggtggaagtcggagagcatgtccagctcgcttatacccaccacaacgagtcgtcgtttcagcccagatcctttgctgtcaaggatgaagtgttctgcttgtttgagggagcccttgacaatttgggaaacttgagacaacaatatggactgtccaagtcagtcaatgaag

SEQ ID NO: 34898 - DNA, 401 bp, Glycine max
  Clone ID: LIB3053-014-Q1-N1-H2
gtttaaacctttcaccttcctccatactttcttcatctgggttttgcgttgctataaaaatctagctaaaatttgtcgtttgctttcagcaagagctttagcttaattatcaccaggaatttatttggcagtcatggattattcatcatggatgattaacacttccttggatctcaacattaatccccacaggcttcatgaagaacttcccaaaaaggaggtggaaaacaactttttgtcattgaatttggaggtgaagaaatcttctgtaaaacaagagtctgctggtgccttggcggaggagctgaagcgggtgagtgcagaaaacaagaagttaaccgaaatgctcacagagatgtgtgagaattacaacactttgcgaggcaatttgatggaataca

SEQ ID NO: 34899 - DNA, 391 bp, Glycine max
  Clone ID: LIB3053-014-Q1-N1-H3
gccatatccaacattccacctagctccccaatcacatcttgaccacaccataaaccttcttaatttctctcttcattttctcctctattgtcataatcatggggaccttccctcgcttcgacccaatcaccacccaagaccggtccaaccagaccgtggcctccgaccttgacggcaccctcctcgtctcccggagcgccttcccctactacctcctcgttgccctcgaagccggcagcgtcctccgcgccctcctcctcctaacctccgccccctttgtctactttacctacctcgtcctctccgaaaccctcgccatcaagacgttaatcttcataaccttcgcaggtctcaaactaaaagacgtcgagctcgtgtcccgctcggtgct

SEQ ID NO: 34900 - DNA, 116 bp, Glycine max
  Clone ID: LIB3053-014-Q1-N1-H8
gacatgttatacatccatagtaatagtagctgtgatcaatgtatatggggaaaacccgaggttgacacttcacctgttcagaacagaatcttgattatgaaacctgtgaacctgtt

SEQ ID NO: 34901 - DNA, 408 bp, Glycine max
  unsure (1)..(408): unsure at all n locations
  Clone ID: LIB3053-014-Q1-N1-H9
ggagactatggttatgacccatttggtcttagcaagaagccagaagactttgccaaatatcaggcatttgagttgattcatgccagatgggcaatgcttggtgctgctggattcatcattcctgaggccttcaacaaatatggagcaaactgtggtccagaagctgtttggttcaagactggagctctgcttcttgatgggggtacgctgaactactttgggaaacccatccccatcaatcttattgtggctgtcattgctgagattgttcttgtgggaggtgcagagtactacagaattattaatggcctgaacttcgaagacaaacttcatccaggtggtccatttgacccattgnggcttgcaaatgatccagaccaagctgcactgctaaaggtgaaggaaata

SEQ ID NO: 34902 - DNA, 388 bp, Glycine max
  Clone ID: LIB3053-011-Q1-N1-H12
gctgacactaattcatcaacaatgccattagcggattgtggtttccagggttctctatatggttgcatggattcatcggagttgttgcaaagcgcagggcatgttgacccagaaaaccagagtcaaacctttgtcaaggtttacaaatcagggtcagttgggcgctcacttgacatatccaggttcagcagctatcatgaactacgcgaggagttggctcagatgtttggaattgaagggaagttagaagaccctcttagatcaggctggcagcttgtgttcgttgacagggagaatgatgttcttctccttggagatgatccgtgggaatcattcgtcaataatgtttggtatatcaaaatactttcacctgaagacattcagaaaa

SEQ ID NO: 34903 - DNA, 419 bp, Glycine max
  Clone ID: LIB3053-011-Q1-N1-H2
ctcgagccgcccgtaagtaactgtgcaggaagaagatcctgctgacccaaaccaaatgccgcagcagcagcagcagcagcgcgctgtttggtaccaacgcaaaatctaacccgcattcctctgtgtcatccaaacaacccctccgcctcagatctcgcctcgagaacatggatcagttgtcggcgatcagcgaggacctggccgagatcgacggacacatcgccgacaatttccgcgccctatcaaatggatttcagaagttggagaaaattaaggattccaatagacagaccaggcagttggaagacctcaccgagaaattgcgagaatgtaaacggcttattaaggagttcgataaagaagtcaaaacattggagaatagctttgatagagaaaccaacaaaatgttgaatgagaaa

SEQ ID NO: 34904 - DNA, 396 bp, Glycine max
  unsure (1)..(396): unsure at all n locations
  Clone ID: LIB3053-011-Q1-N1-H3
attacacaaggcgcagggtggtctctgtgatggcaacctgggtggtctccgacagcctctgtcggctccatcatcttccaaaaccctcccaaaggccttcttcttctctcccagcagcagcaacaacgctccttcgcctcttctgcaagctatgcaactctcaagctccctcgcgccttcgcactttctccaagacccctcctttccaaagggagaacaacacttgtgagggctgctactatcgaagaaattgaagccgaaaaagccgcaattgaaaaagatgctaaaaccaggatggataggactattgataatgtccgtacaaatttcagttccataaggacagggagagcaaacccatccatgcttgacaaaattcangtggaatactatgga

SEQ ID NO: 34905 - DNA, 341 bp, Glycine max
  Clone ID: LIB3053-011-Q1-N1-H4
ttccggatacagagaagctggaaagattgaaattggctgagatgaagcatgccaggattgctatgttggccatgctgattttctactttgaggctggacaagggaagaccccccttggtgctcttggcttgtaaattaaacatttcatgtagataattgaattgagaggctagacagttgcaaatcaacctttgtttgtcccgtctgtgttacttcatgacaaattcaaattctatgatctaaaattggatgcattcactttatgtctgcactctaatgtaaccatcgtatcaatacttgtatttttacttttctctttcaaaccaggagtagttgaagtc

SEQ ID NO: 34906 - DNA, 408 bp, Glycine max
  Clone ID: LIB3053-011-Q1-N1-H8
cccatactctctctgtgttcttctgttctctctgtttcttgagattttctccctcctcagcgcctgtgaagtttgattgcttcattctttgaagtgaatttgacaattaagtaaattggttgagaagggttcattcctcttcattggaagaataaaacaaatattgcaggtggattttttctgatggcaactaatgaaaatcttccaccaaatgtaataaagcaactagccaaggaattaaaaaatattgatgaatcacctcctgaggggattaaagttgtggtaaatgatgatgatttttcaataatatatgctgacattgaaggcccagctggaactccttatgataatggagttttccgcatgaagttgttattgtctcgtgatttccctcactctcctcctaaa

SEQ ID NO: 34907 - DNA, 232 bp, Glycine max
  Clone ID: LIB3053-012-Q1-N1-A11
catcactcccatctttataacctatatttcccacctacattaacctacaactactttacatactcctaacacttttcttatttaatatatcacttattttatttgcttatcacatattattccaatactcttccaaaccatactctatatacaaacaatacttacaattactaaataattttctttgatattcttattatccatcttactcatttataccttactttaatct

SEQ ID NO: 34908 - DNA, 373 bp, Glycine max
  Clone ID: LIB3053-012-Q1-N1-A12
tttttttttttttttttttttttttttttttttttttttttttttttttgtttttttttttttttttttttttttgttttttttttttttttgttttgtttttttgttgttttttttttttttttgtttttttttttttttttttttttgttgtttttttttgtttttttttttttttttttttgttttttttttttttttttttttttttttttttgttggttttttttttttttttttttttgtgtttttttttttttttttttttttttttttttttttttgtttttgttttttttttttttttttttttttttttttttttttttttttttttttttttttttttttttttttgttttttttttttttt

SEQ ID NO: 34909 - DNA, 408 bp, Glycine max
  Clone ID: LIB3053-012-Q1-N1-A3
atgagttggaatgactgcaaaaagttaccttggaacctcattttgcttctgggagctggttttgccatagctgatggagtacaatctagtggcctagcagatgttttgtcaagagccttggatttcttggaagatgctccatacttggcaattgttcctgctgttagtctaatatgtagcattatcactgagttcatcacctccaatgatgctactgccacccttcttgtcccacttctgtatcacatagccagaactatgcatgtgcaccctcttcttcttatggtccctggaggaatagcaactgagtttgccttctggcttccaacttcaacaccatcaaatgtagttggctttgccacttgacacatagaaattaaagacatgcttcaagttggtgtgccactc

SEQ ID NO: 34910 - DNA, 417 bp, Glycine max
  unsure (1)..(417): unsure at all n locations
  Clone ID: LIB3053-012-Q1-N1-A4
cccgaagaccaatacattactagccctgatggattgaaatactatgatttggttgagggcaaaggtccagtcgctgaaaaaggaacaactgttcaggtacactttgattgcttatatcgcggaatcacagctgtctccagtcgagaatctaaactcctagctggaaatcgtatcattgctcagccatatgaattcaaagtgggagctccaccgggaaaggaaaggaagcgcgaatttgttgacaacccaaatggtttattctctgctcaagcagcaccaaaacctccccctgctgtgtatataatagttgaaggaatgcgagttggtggaaagcgaactgtgattgttcctccttgaaatggctatggtcaataaggaatgaatgagattccgnctggagctacatttgaactaaat

SEQ ID NO: 34911 - DNA, 422 bp, Glycine max
  Clone ID: LIB3053-012-Q1-N1-A8
atgagtgggaatgactgctaaaagttaccttggaacctggttttgcttctgggagctggttttgccatatctgatggagtacaatctagtggcctagcagatgttttgtcaagagccttggatttcttggaagatgctccatacttggcaattgttcctgctgttagtctaatatgtagcattatcactgagttcatcacctccaatgatgctactgccacccttcttgtcccacttctgtatcacatagccagaactatgcatgtgcaccctcttcttcttatggtccctggaggaatagcaactgagtttgccttctggcttccaacttcaacaccatcaaatgtagttggctttgccactggacacatagaaattaaagacatgctcaaagttggtgtgccactcaaggttgctgggat

SEQ ID NO: 34912 - DNA, 373 bp, Glycine max
  Clone ID: LIB3053-012-Q1-N1-A9
gaactatccatacatagccactttacactcagtcttgtgttgttgccttcatggccaagccagtgtccattgaggtatggaacccaagtggcaaatacagagttgttagcaccaaaccaatgcctggaactcgttggatcaatcttctcgttcaaaatgatgttcgccttgaaatatgtaccgagaagaaaacgattctgtcagttgaagacatcattgctttgattggtgataagtgtgatggagttattggacagctgactgaagactggggagaacagttgttctctactttgagcaaagccggaggcaaagctttcagtaacatggctgttggttataacaacgtggatgttgatgctgcaaacaagta

SEQ ID NO: 34913 - DNA, 377 bp, Glycine max
  Clone ID: LIB3053-012-Q1-N1-B1
cggcaatggcagcctcatcctccttctccaccctcttctccttcctgctccctccaaagccacaccctcctcccatcactcgcttgccactccagaagctacgcgcccagcagcaggacggccagggccaccaccaccactcgttggcggaagtgtccgccgtggcaaacccgtcccacgcgcacgcgaagacgctgttctttcggtcggcgtacaacgtgcaggtggtggtggaagagaacgagccggaggagaggctgctcaaccgcttccggagagaggtcatgagagccggagtcattcaggagtgcaagaggagacggttcttcgagaacaagcaagaggagaagaagcgcaagacccgcgaagctggcaag

SEQ ID NO: 34914 - DNA, 310 bp, Glycine max
  unsure (1)..(310): unsure at all n locations
  Clone ID: LIB3053-012-Q1-N1-B12
atccaccaaaaaagaggaggttagaggaaaagcangttgggatacctagtggaaaaaaaattgttcaaggcttgcaaagaacagggccaccccagagtgcgggttggatgcagcaagctcttgatgaatctgtgcgtaatgtgcttacttctgcgacttccaccatttcctaccaacctatttcttctgtgacttcccctgtttcctatcaacttcctgttcctatttctagtaccaatgttaaggtgaatccagggacaactttacatttttgcttaaatgcaggagcttttggacattcttaataacc

SEQ ID NO: 34915 - DNA, 389 bp, Glycine max
  Clone ID: LIB3053-012-Q1-N1-B2
gaaataagtgctaaaggtcagccagagccatctggatggttaattggtggtttacagaacctttggtttgaccattttcatcttggagttctgtgcttgatagggaactgcatttgcatggctgcatttctagccattcagggaggctgggatcactgggatcactgactctaaacgttcttgcttattaggaattatccttttcacttaaattcctatgatataaagcttgtgcatcataggaggatcttttatcattaccggtctatatatggtgacttgggcatcttctagagaaagacaagcaactgttggagttactcctcatagctcttgggtctctgaaccacttattcatgacagaagtgcacaccagagaggtctccgtt

SEQ ID NO: 34916 - DNA, 401 bp, Glycine max
  Clone ID: LIB3053-012-Q1-N1-B5
aaccctctcagtcacatatggttagcactctcttctaaagccaactactactattagtatttagtgccctttcactcgtaacaagtgttcactgatataaatgtctttgtctgtggaagacaactactatggcatgagcagcagtgtgagtgagatagaggaagagaattcttcacacttgcacttgaataatgatggtcctaatcctatggtcaccattggtgaagaagagaacgaggatgatgatgacactgtttatgtggctgttggtaagagccagagtagcacggaggccttggcatggaccctcaacaacttggccactccttctaccatgctctttatcatacacgttttccctgagatcaagctcctttcgaatccattgggggtgggaatga

SEQ ID NO: 34917 - DNA, 432 bp, Glycine max
  Clone ID: LIB3053-012-Q1-N1-B8
ctctccattttggcattggagagattggaacacccccccaaaacaagccccaattatggctctgaatctttgtatctcacctaactgtaaatgggtttcatctcctgcttccttagatagtgcatcttctttgagatcttcacttggttcttgttttggtaacataaacattgctagtgtgagtttaagcactagtagaagtttgagtttgaggaggagtgggagtgttagtgtaagatctagtttggaaactgcggggcccacagttacagtgggacaggtcactgaggttaacaaggataccttctggccgatcgttaaggctgccggggataaaaccgttgtccttgacatgtacacacaatggtctgtgcctaagaggggaaggttctagatgaatctctgccaaggttacaccccgaacaaaacttc

SEQ ID NO: 34918 - DNA, 285 bp, Glycine max
  Clone ID: LIB3053-012-Q1-N1-B9
gcacttggttcaatatctcctgaaattctaggcaaggctgatctgagccctcatgagacagcactcccatggttcagaaccggtgtgttcccacctgcaggaacctacaactactgtgcatactcctacacactgttcgtgtttgagatggcactgatgggatttgcagagcacagaatattccaagactggtccaaaccagtctctatgggcaaacaatacttcctaggactagataatggtcttggaggttctggtgagccagcttacccagtatgacctttc

SEQ ID NO: 34919 - DNA, 414 bp, Glycine max
  unsure (1)..(414): unsure at all n locations
  Clone ID: LIB3053-012-Q1-N1-C12
gttacgtgcagtttttcagttataaactcccggaatcctcacaagggacgacggataagcgttgctgttccacccaagtttccaaacttccggagggaagcatctctgcaggggaatttggaggctattagagtcccaacttcggtgcctgtgcgtgtagcatacgagcttcttctagctggtcatcgatatttggatgtaaggaccccggaagagttcgatgctggacacgctcctggcgcaattaacattccttatatgttcagagttggatcagggatgacaaagaacagcaactttattagagaagtgtcttcacaagttaaggaagatgatgaaattattggccggtggtaacctggtaaaaagatctatgatggccgcaagtgactngctagctgctgggttcactgg

SEQ ID NO: 34920 - DNA, 424 bp, Glycine max
  Clone ID: LIB3053-012-Q1-N1-C3
agcaagcgcaagtatgagcaaatcccaagcagcccaagtggcgttattgatgctgcattttgctctgatggttccaacgattcgtgggcagtggggtcatcattatattcaccaccagagcctctcttcaagaagagcagaacccaaggacaacaaatgaaattgtcaccacttaaccgggtcattgtcggaattgttggcacctctccttaattaaatacccctttcacaaaccaaaaaagaagtcttatattttatttactgtggtaattagtcttccatgcatgttgctgaacttcagagccttcccctctatatgtatctcttcatttccaacaatgtccctcattcatttaacatttcttgaagaggcaaggtggtggtggttcaagaatgagtggtctatctctgagggaagaggagg

SEQ ID NO: 34921 - DNA, 416 bp, Glycine max
  Clone ID: LIB3053-012-Q1-N1-D1
caaagatgaagtttttcttggttttggtgattgccatgttggcgatggtagcaactggggtttcagctgctgaggcacctgccccaggtccttcatccgatgccaccgccttctttgtacccactgctcttgcttctctctttgttcttgcatttggccttctcttctaattaattcttcaacaacctttggttatttgttacattacatatatggaattcactttgttcagaggtggttgtgttttgtgtttcgttcttctctttttttccaactcagcttgagtagtggttgctcactactctcttgtgagtagaagggtttatttttttgaggatgcattgaattggagatttggagtgagggaggaagagaagtagatgatacaatatagggctcttttgttgggttttctg

SEQ ID NO: 34922 - DNA, 242 bp, Glycine max
  Clone ID: LIB3053-012-Q1-N1-D11
cacgtggcatcggctattccgcagacccgcgtgagtccggtcacgtgttaatttcgcctggtccagcaagaaggccttgctgccttgttctccggcgtctcctccactgtcctccgccagacgctctactccaccacccgtatgggcctctacgacgtcctcaagaccaagtggaccgactccgtcaccggcaccatgccgctcagccgcatgatcgaggccggtctcatcgccggtggcat

SEQ ID NO: 34923 - DNA, 409 bp, Glycine max
  unsure (1)..(409): unsure at all n locations
  Clone ID: LIB3053-012-Q1-N1-D12
cgcttaacctctctcattccccatttcctcggctccttgaaccgctgctaaattctagggttccgaaatggacgctggcggaaagatcaagaagggcgccggaggtagaaagggcggcggcccaaagaagaagccggtttcaaggtccgtcaaagccggtctccaattccccgtcggaagaattggccgttatttgaagaaaggaaggtacgctcagcgtgtcggtaccggtgctcccgtatacttggctgcagttctcgaatacctagctgccgaggtgcttgagttggcttggaatgccgcacgtgacaactagaagaacaggattattccaagacacgtgcttttggcagtgaggaacgatgaanagttggggaaattgcttgctggagtgacaattgcacatggt

SEQ ID NO: 34924 - DNA, 408 bp, Glycine max
  Clone ID: LIB3053-012-Q1-N1-D3
ttcaccatgacagcttccatccttggctgcccagccgtcaccaaccggtcggcagcgacgcagaggagatcagtggtagtgaatgcagccagcaaatctgttgaaggggaaaaggtcagttatgacaacaatggtagcaatgcaaggaggaacttgatgttcgccacggcggcggctgctgtttgctcttttgctgcagggatggcattggcagatgagcctaaaccaggaacctcagaagccaagaaaaagtatgccccggtttgtgtcaccaatcctacagctaggatttgtcgcaattgaggaacttttttggttcacttttggaatttggaaatgtacaatgaatttgttgtaaggctttgatgatttcatttcatcctcactgtactagatgttcataaaagt

SEQ ID NO: 34925 - DNA, 402 bp, Glycine max
  unsure (1)..(402): unsure at all n locations
  Clone ID: LIB3053-012-Q1-N1-D6
cccgtgtgcccatcatcgtcaccggtaacgatttctccacactctatgcgcctctcatccgtgatgggcgtatggagaagttctactgggcaccaacaagggatgaccgcattggtgtctgcactggaatttttcgcaccgattcaattcctgaacaggacgttgtcaagattgttgacaccttccctggccaatccattgatttctttggtgcactganggccagagtatatgatgacgaagtgaggaagtggatntctggtgttggtgttgacggcattgggaagaagcttgtgaactcaaaagatggacctncaacctttgagcagcccaagatgactctggagaagctcttgacgtatggtaacatgcttgtccaagaacaagagaatgtcaagagag

SEQ ID NO: 34926 - DNA, 417 bp, Glycine max
  unsure (1)..(417): unsure at all n locations
  Clone ID: LIB3053-012-Q1-N1-D9
gagatagctaaaatgggacttgggactctgccactgaccgcttcttgcagcggtttctcttcaaactcaggacttatacatgacaccaccaatcacagaaaggtcaatagaagcatgaaattcagagtttcagcaaaacaagagaagcaagaagagaagaaaaagcaatctttgttcagcagtgtgactgaagctcttgatttttctcaagtgagatccgctgaggatgctcagcttatagaagaggctagagaagccacaaaatcaggagaaagaatgagtagggaacagtatggagctcttagaaggaaaattggtggtacatacaangaatttttcaaatcttacgtttgaatggacggngcatatgttgaagagggctgggttgacaaaacatgcaaggtgtgcaaaaaggac

SEQ ID NO: 34927 - DNA, 335 bp, Glycine max
  Clone ID: LIB3053-012-Q1-N1-E5
aaaaaggagagatggcagctgcaacatctagtgctgtgttaaacgggtttggatctcacttcttgtgtggaggaaagaggagccatgcccttcttgctgctagcattggagggaaagttggtgcttctgttagtcctaaaagagttattgtggcagttgctgctgcaccaaagaagtcatggatccccgctgtaaaaggtggtgggagtttcatagacccagaatggcttgatggctcgctaccaggtgactatggttttgacccactaggactaggaaaggacccggcattcctgaaatggtatagagaagctgaactcattcatgggaggtgg

SEQ ID NO: 34928 - DNA, 437 bp, Glycine max
  Clone ID: LIB3053-012-Q1-N1-E6
cgatattgagattgttattcatcctcaatctatcatacattccttggttgaaacgcaggattcatctgttattgcacagttggggatacctgacatgcgcttaccgctcctttatacattatcttggccagaaagaatctattgctctgaagtaacttggcctcgtcttgatcttagcaagtatggttctctaacattttatgcaccggatgacaagaagtttccatcggtgaatctttgctatgctgcgggacgtgctggaggcaccatgacaggagttcttagtgcagcaaatgagaaagctatagaaatgtttgttgaagaaaaaattagttatctggatatattcaaggttgtggaactaacttgtcaggaacatcaaaaggaattagtagcatcttcgtcactcgaagaaattattcactatgacccatggg

SEQ ID NO: 34929 - DNA, 388 bp, Glycine max
  Clone ID: LIB3053-012-Q1-N1-E9
cttgagccgaatatgctagaggaagcttccctgtgaaagttgtgagcttaacgggctagactcctgcgatgagagctgtttcgaaccgcccgacgaggccaaggtcttggttgtgaacttgctttacgacgttgatcgcctgaaatcggccatgcttatagaacatgtcgtaactgttgtaatcgcttaagttatttataacacgtaaactgactagagtcgcggtttatgcgcatgtgacgatgagtactgatgaagaagctgaacgtgctctggagcaattcaaccgttatgatatctatggaagactgctcactgatgataaggcttctgcatgcggagctcgacatgaacgctgaccaggtactagttcctttgaatgttgctt

SEQ ID NO: 34930 - DNA, 389 bp, Glycine max
  Clone ID: LIB3053-012-Q1-N1-F1
tctctctttccctctctatctctatctctctttctctgtctcttttctggttgaagtttgaaagacaaatacaccatggcagatatcctgagtgaagaacagattgttgattttaaagaggcctttggcttgtttgacaaagatggagatggtgagcaagctttcttattcagttgaattcctctttagattgatgcaattctctcatctctatcatatatatatatatatatatatgtatgtatgtatatgcatgttggtggttgtttatgaatattgtgtgcatcttcttaggttgcattactgtggaagaacttgccactgtcattcggtcattggatcagaaccccactgaagaagagctccaagatatgataagcgaagtcgat

SEQ ID NO: 34931 - DNA, 386 bp, Glycine max
  Clone ID: LIB3053-012-Q1-N1-F2
gagtgctattgaattcaattcgattattgcaaagcatcaaaatattaggtctacacttgtagaaaggatgccagttttggatgaggcaacttccattggtaggagggctgggtctctaccaggtgcagcttcaactccaactgcaccttcatttaatcttccaaatggaacagccaaacctgtggctcctcttgtagatctacttgatctaagttcagatgatgctcctgcacctagctcttctagtggaggagatattcttcaggaccttcttggtgttgatctttcaccagcgtcacaacaatctgttgctggccaagcttcaaaaagtggcaacgatgttcttttggatcttttgtctattggatcaccttctgtcgaaagca

SEQ ID NO: 34932 - DNA, 356 bp, Glycine max
  Clone ID: LIB3053-012-Q1-N1-F6
tctctctgtttttatctatctctatctctctatttttgggtctggtctggttgaagtttgaaagacaaatacaccatggcagatatcctgagtgaagaacagattgttgattttaaagaggcctttggcttgtttgacaaagatggagatggtgagcaagctttcttattcagttgaattcctctttagattgatgcaattctctcatctctatcatatatatatatatatatatgtgtatgtatgtatatgcatagttgtggttgtttatgaatattgggtgcgtcttcttaggttgcattactggggaagaacttgccactgtcattcggtcattggatcaaaaccccactgaa

SEQ ID NO: 34933 - DNA, 200 bp, Glycine max
  Clone ID: LIB3053-012-Q1-N1-G1
tccaaattctccagccatggcagtttcttctgcgtctgcttcctccaaacttatactattcccccatgcttcatcttcttcccttatcttcacacccttccgttcctccaccaacacccacaaactatcccctctctcctgcttcttccttcaccctatcatcgttcttcgccgcaccctctcctccaccactaccacca

SEQ ID NO: 34934 - DNA, 393 bp, Glycine max
  Clone ID: LIB3053-012-Q1-N1-H3
accccatcaacttcagtggtgccacaaggccagctccatctgcttctagtcctgcctccttcaagactgtggctcttttctccaaaaagaaggctacaccaacacctccaaaaaaagctgctgctgctgctcctgccaatgatgagcttgccaagtggtatggtcctgacagaaggatcttcttgcctgagggtctcttggaccgatccgaaatcccagagtacttgaccggagaagtccctggagactatggttatgacccatttggtcttagcaagaagccagaagactttgccaaatatcaagcatttgagttgattcatgccagatgggcaatgcttggtgctgctggattcatcattcctgaggcccttaacaaatatggagcaaact

SEQ ID NO: 34935 - DNA, 171 bp, Glycine max
  Clone ID: LIB3053-012-Q1-N1-H4
cccccttcattaccctcgtaactcgtaacggcgtcatagccctttcgttttccttcgttcaagttagaatcttttgcttcactaagtgagccatggatgacgctgagttggacgccgcgttcgggtttccgtctgagttcccctacgagtttgacttacgtggggccgaac

SEQ ID NO: 34936 - DNA, 434 bp, Glycine max
  unsure (1)..(434): unsure at all n locations
  Clone ID: LIB3053-012-Q1-N1-H5
cactctcacaaacggaaactaaactacgttttttatttgttccagacaataatactttaatatttgagcgtgatcgatggcatacccaaacccttatacggcgcagccctatccctccgcatccgcgccgatgccggcggttccctccgccgtgatcggcccccagttctgcgcgccgtacccggtggatctggcggtggtgaagaaggtgatgaccatctccgacaacttcgttgtcaccgacgtcaacggcaacatcgtattcaaagttaagggatcgctcgcgacccttcgtgaccgccgcgtcctcctcgacgccgncggcaaccccctcgtcacccttcgccggaagataatgacggcacatgatcgatggcaagctttcaggggtgaaagcacagatgccaaagatctaatctttaatctgaagcggg

SEQ ID NO: 34937 - DNA, 383 bp, Glycine max
  Clone ID: LIB3053-012-Q1-N1-H6
caactgcactgacgaattccaggttcgccgcgtttgcagagcgagaccaaagtctcatcgatcgtggacctgatgcatcccatcaccatctcgtggtgctgtgcacccctatcaatccttattggcggccgtgccgtacgtttcctgcggcagatcggtaccagttatctgcaccgtaccctatatatctatcagctgtgcaagctgtgatgaccatcttcgacagcttcgatgaacccgacgttaactgcatcatcgtattcaaagttaatggatcggtcgggatcctgcacgaccgacgatttctcctcgactcattcatcgaccaacgagtcacccttcgacagatgatagtgactgcacatgatccatggcaagcttta

SEQ ID NO: 34938 - DNA, 214 bp, Glycine max
  Clone ID: LIB3053-012-Q1-N1-H7
cttgaaaccttaccaatattaaccctcgcttcgtagtgggctctggctatcttatgcatcgactttgcatattcttgatcctatcgcagcatcgttatactctccattccatggctttgcccaatcagcaaaccgtggattacccttgtgtcatactcgttatctacagtgatggacgcacacgaatgactacttctgtgctaatgcatctgac

SEQ ID NO: 34939 - DNA, 414 bp, Glycine max
  unsure (1)..(414): unsure at all n locations
  Clone ID: LIB3053-012-Q1-N1-H8
cccccttcattaccctcgtaactcgtaacggcgttatacgcctttcttttccttcgttcaagttagaatcttttgcttcactcagtgagccatggatgacgctgagttggacgccgcgttcgggtttccgtctgagttcccctacgagtttgactcggttggggccgaaccggctgattccggttcgaccggaaccgagagcagcgacgaggaagacttcttcgccgggttgactcgccggctgagtcacacctcactcaatgaaacaaggaaggaacaacaaaaactcaatgttcccatctgcaacagcgacaaaaccgagaatcagaagatgatggctcgcgttttggccggtcggctcagtctatactgagcggaatcngaagctggtcgggtcggagcggagggtccggc

SEQ ID NO: 34940 - DNA, 311 bp, Glycine max
  Clone ID: LIB3053-013-Q1-N1-A1
gttgataaggagggaaggcctgtttacatcgagagactcgggaaagtggatccgaacaaacttatgcaggttacgaccatggatagatatgtaaaataccatgtacaggagtttgagaaagcttttaagataaagtttcctgcttgcacgattgccgtcaaaaggcacattgattcaagcaccacgatactagatgttcaaggcgtgggccttaagaactttacaaagtctgcccgggaccttattatgcggttacaaaagattgatggtgataattaccctgagactttctgtcaaatgtttatcataaa

SEQ ID NO: 34941 - DNA, 415 bp, Glycine max
  Clone ID: LIB3053-013-Q1-N1-A10
cagcaaccaattccatttccagtttctgattcgtcaaagggacaagggaagtgaaagggtttagggtgtgacctgagatcaacatgttgcggaggcttctctcttctcacctcaaaaccctagccgccaccgcttcttcttccactccccgatctgcttccgccgccgacagattcgccgctctctctcgctcctaccgctacttctcaacccagtccgaggatgctactgccatcaaaaagaaagctgaagatgtaatgccaatcgctactggtcacgagcgcgaggagcttcaggctgagctcgagggaaagaatattcttgaaatagaccatcccgaacgtccattcggcacgaaggaagcacctgctgttgtcaaatcttactatgataaaaggatagtccgatgcccaac

SEQ ID NO: 34942 - DNA, 400 bp, Glycine max
  Clone ID: LIB3053-013-Q1-N1-A3
gttgtctctatccttaaggttccgccaccgcaccaagtcggagcacccaaccaggtcttctttcattcatggcggaggaacttatttctcaattaaacaatatgctagaagaaaatggaacaccaagtcatgtagaaagggctgctgatgctgatgctgatgctgatgctgatgctgagctttctccaccatcacaaaaaggagatgacactaaagaagtttcaaagaagaaaaagaagaaatctaaaagcaagaaaaagaaagaactcttgcaacaggctgatccaccatcaatttctggtattgaccttttcccatctggagattttcctgaaggtgaaattcagcagtacaaagacgattacctatggagaactacatcagaggagaagagagaact

SEQ ID NO: 34943 - DNA, 407 bp, Glycine max
  Clone ID: LIB3053-013-Q1-N1-A5
gttgataaggagggaaggcctgtttacatcgagagactcgggaaagtggatccgaacaaacttatgcaggttacgaccatggatagatatgtaaaataccatgtacaggagtttgagaaagcttttaagataaagtttcctgcttgcacgattgccggcaaaaggcacattgattcaagcaccacgatactagatgttcaaggcgtgggccttaagaactttacaaagtctgcccgggaacctcatatgcggttacagaagattgatggtgataattaacctgagactctatgccaaaatgttatcataaatgcttgaccgggatttatgttgctatggaacactgtcaagtctttccttgatcccaaaacaacttaaaagattcatgttcttcgaaacaagttcca

SEQ ID NO: 34944 - DNA, 388 bp, Glycine max
  Clone ID: LIB3053-013-Q1-N1-A6
gttgataaggtagagaagccagtttacatcgagagactcagcaaagtggatccggacaaacttatgcaggttacgaccatggatagatatgtgcaataccatgtacatgactttgagaaagcttttaacataaagtttaatgcttgcacgattgaccacaaaaggcacattgattcaagcaccacgatactagatgttcaaggcctacaccttaataactttacaaagtctgaccgggacctcattatgcggatacaaaagattgatggtgataattaccctgagactctctgccaaatttttatcataaatgctataccagtatttacgttgctatggaacactgtcaaatcttttctagatcccaacacaacttcaaaaattcatg

SEQ ID NO: 34945 - DNA, 409 bp, Glycine max
  Clone ID: LIB3053-013-Q1-N1-A7
ttttcttctatagagacacacggagagagtctcagagcagtaaacgcccttcaatggctaccactaaagtttacattgtttactattctacgtacggacatgttgagaagttagctgaagagattaaaaagggagctggttccggtgaaggtgtgcaagcaaagctatggcaggtacctgaaacactttctgaagaggtccttgggaagatgggtgcacctacaaagagtgatgtaccgattattacacccaacgagctacctgaagctgatggcttattggttgatttacccacaagatttggactgatggctgctcaattcagagatttcatggatgcaactggaggcctgtggcgcacacaggcactagctggacagcctgcaagaatattttacagctctggttc

SEQ ID NO: 34946 - DNA, 422 bp, Glycine max
  unsure (1)..(422): unsure at all n locations
  Clone ID: LIB3053-013-Q1-N1-A8
ctacaagggaagaaaaacttagctactaaggaaggatcaaagagaatggctcaagcaatggcatcaatggctggcttgcgtggttcctctcaggctgtgttggaaggtagccttcaggtgagtggctccacacgcttgaatgtggggagtggaagcagggtggcctcagtcacacgtgcagggttcacagttagagcacaacaacaacaagtgagtggtgaggtacaaagcagccgtagggcagtgctttcaactggttgctgcttgtttggccactggctcttttgttcaagctgtgcttgctgatgccaaatctatcaaagttggaccaccttccccaccttctggtggattgcctggaacgttgaactcagatgaagcangagaccttcagctgccattgaaagataggttcttccttc

SEQ ID NO: 34947 - DNA, 140 bp, Glycine max
  Clone ID: LIB3053-013-Q1-N1-B1
gcaccatatggggtggacatagcaactggtggaattgctgactcatttgctaactttgtctgggagcctgcaggtgtgaagatcaatgctataaatgctgcaacagatgctgcctgccttatcttaagtgtggatgaaac

SEQ ID NO: 34948 - DNA, 174 bp, Glycine max
  Clone ID: LIB3053-013-Q1-N1-B11
tttatgcctacaagatcatcatcaaaacctgtggtactgctaagctgattgcttgcaatcccacccatattgaagttcgctgaaatgctttcccttaatgttaagtctgtgaattacaccaggggaagtttcattttccccagtgctcagccatatccccatcgcatcttttct

SEQ ID NO: 34949 - DNA, 357 bp, Glycine max
  Clone ID: LIB3053-013-Q1-N1-B12
ctccgccacttctgaatctattgaatcaacaatcatgtgcggcggagagcaccatttcgagtccaaggccgacgccggagcctccaaaacctaccctcagcaagccggtaccatccgcaagaacggctacatcgtcatcaaaggccgtccctgcaaggctgtggaagtttcgacttccaaaactggaaagcacggtcacgctaagtgtcactttgttggaattgatattttcactgccaagaaacttgaggatattgcgcactcttctcacaactgcgatgttcctcatgtgaatcgtactgattaccagctcattgatattgctgaggatggatttttgagtctgcttactgaaaa

SEQ ID NO: 34950 - DNA, 415 bp, Glycine max
  unsure (1)..(415): unsure at all n locations
  Clone ID: LIB3053-013-Q1-N1-B2
gttctttctttcctaccccaaatttgtttttcgccttgtagctctcaattcctctgtttccttcttccttcatctttgcgtcatggccagaggttcctctcagtctcagtcctccacttcaacagccacgcgaccaggaccagcaggcatggctccccgcggttccgccgccgccaccgctggcatgcgccgccgccgtctcggcggaggaaacagctccgccagcaccggcgtcggaggcggcagcagcaacatgctgaggttctacacggacgatgctccggngctgaagatttcgccgacggtggtgctggtgatgagcctctgcttcatcggcttcgtcaccgcgctccacgtgttcngcanactctaccgctccaaatcttgcggcaccgtttgatcttacgatcctctt

SEQ ID NO: 34951 - DNA, 415 bp, Glycine max
  Clone ID: LIB3053-013-Q1-N1-B4
atttcctgaacacctaagtgcttttactcatttgactgcaggtgccatagggggcattgctgcttcattgattcgtgttccaacagaggttatcaagcaacgaatgcaaactgggcagtttgcttcagcttctggtgctgttcgctttattgcttctaaggaaggcttcaaaggattttatgctggatatggatcttttttgttgagggatttaccctttgatgctattcagttttgcatctatgagcagattcgaataggttatatgcttgcggcacaaagaaatctgaatgatccagaaaatgcaattattggtgcttttgcaagtgcactaactggagctataactaccccccttgatgtcatcaagacaaggttaatggttcaaggatctgcaaaccaatataagggaatc

SEQ ID NO: 34952 - DNA, 262 bp, Glycine max
  Clone ID: LIB3053-013-Q1-N1-B5
gcacgcctgcggaatctgggaattgggctctaggttcataactatggatttcctgtttacatcgatagactcgggaaaggttatctttacaaacttattcacgttactaccatggatagatatgtaaaataccatgtacaggattttgataaagcttttaatataaattttcctgctttcactatttcctccaaaaggcacattcattcaagcaccactatactagatgttcaaagcattttccttaataactttacaaaat

SEQ ID NO: 34953 - DNA, 419 bp, Glycine max
  unsure (1)..(419): unsure at all n locations
  Clone ID: LIB3053-013-Q1-N1-B6
gctcgtctcgcgatcgctgtcgccgccgtgctcctcgtgggcctcgccgcctccaccgcgacggcgcgtccctgcaggaccttcataatctcctcctactcgttccgcaaccctaactccaacaccttcgccaccatcaccgagatccgatccttcacccctctctacatcaccgacaaacccaccggcaaaccctcctcctcctacgacctcttcttcccccacgcgactcacctccctgagcccgagcgcgtgaacccacgcgctcccctaaggttcgcctccgcgtacgatttctcctccctccgcgaccgcaccaaggacatcctcagcgtcgccctcgccctcctcttcggtgtcggctgcggcgccctcaccgncgncaccatgtacctcgtctggtccgtcttctccacgcg

SEQ ID NO: 34954 - DNA, 403 bp, Glycine max
  unsure (1)..(403): unsure at all n locations
  Clone ID: LIB3053-013-Q1-N1-B7
ggtgattcctggtgaatatggtttcgttgcccagcttaatgagggtggtcacctcaagaagagaccaactgagttccgagttgacaaggtccttcaaccctttgatgaaaacaaattcaactttaccaaagttgggcaagaagaggtcctcttccaatttgaagctagcgaggatggacaagtccagttctttccaaatgctccagttgatgttgacaattctcccagctttgttgccatcaatgtcagtcctattgagtatgggcatgttttgctgatttcgggcattttcgagtgtttgccttaaaggattgaccgtgagagctttctncttgcacttcacatggcaatggaagctgataatccatattttcgattgggtacaacagtttgggtgcttttg

SEQ ID NO: 34955 - DNA, 334 bp, Glycine max
  Clone ID: LIB3053-013-Q1-N1-B8
ctctcttcctctttctctgtctctctctatatctctctcggcaattctcagagacgaattcataggacaagtctctcactccagagattccattcaatcgctgatcttaatcactcttttacctttcagtctcacacctaaaagaaaaaaaatataatgttttggtttcagaagggttggttctgacttgagaattaggttttgattcaaagagaggaatggagggtgacacattcaatggtgctcagattgatgccaagatcatgcagacatttaaagaagaactttgttcaagttcaagacatttttgatcagaacaggctactcatcaatg

SEQ ID NO: 34956 - DNA, 371 bp, Glycine max
  unsure (1)..(371): unsure at all n locations
  Clone ID: LIB3053-013-Q1-N1-C10
ctttttcttcccatttcacccctcgtctttccttgtttgcggtgagggccaaccacaacatatgttaaacaaggaacaacctccaaaacataacatcctacgccaaacaaaactttgacctncttcagatctatacccttctctctctctctctctcttctattttcaaattctacatcatgggcacggaggttctacggccacaagattggttcacccaacgcatcggtgttccaccgnctgggctttcccggctaaggacctatggtacccaccacaacaacaaatacaataacgttaacaattatttcaggggtataccggaagccgacaacccgacccgaacaaagaaaacgggttgtggacaaaag

SEQ ID NO: 34957 - DNA, 333 bp, Glycine max
  Clone ID: LIB3053-013-Q1-N1-C11
agccactactgattcagaaactcttaggcatagcgaaagtgacaaggaccttcgcgaccgtcgcaggactcggtggtgcatcactgtcatccacctcatctcgtctcacctcagggtttgtgaaatcgccagtgagtgctaggaatcccttgaggaaagctgtggcaatgggaaatgggagggttacatgcttcgagaggaattggctgcgggcagattacagtgtcattgggtttggattgattggttggctagcaccctcaagcgtaccggctatcaacggtaaaagtctgactggcctcttctttgagagcattggagctgagctagctc

SEQ ID NO: 34958 - DNA, 418 bp, Glycine max
  Clone ID: LIB3053-013-Q1-N1-C2
ttctgattgccttcaaatcacacactctcttcaatttctagggttttgctattgctttgcctccgttccccctttctcacaaaaacaacgccttttctcttctccttcgtatctattctttgcgtttggtttttggttgattgaaggcattcacagcgtaattcgttgctgcattttaatcgatttatctaaccaggactgaatgacctaatggagtctaaaggtgggaaaaagaagtctagtagtagtagtagtaaatcaattttttacgaagctcccctcggatacagcattgaagacgttagaccaaacggtggaatcaagaaattcagatctgctgcttactctaactgttctcgcaaaccatcctgatacacatccggattgataagttcgtgcatgcaaccatagttttatt

SEQ ID NO: 34959 - DNA, 425 bp, Glycine max
  Clone ID: LIB3053-013-Q1-N1-C5
gcgagcagtttcaaagagaggatttgggattgggaaggcgagggattgcgctgcgtctcttcctcttctctttcgattcatccctcattcataatcttccaatccaacaacctcagcctcacactcacacatacacacatctgaacgcgtatcgtccctcccatggcttcaaagcgcatcctcaaggagctcaaggacttgcagaaagacccaccaacttcttgcagcgctggtccagtagctgaggacatgttccattggcaagcaacgattatgggtcctgctgatagtccttatgctggaagtgtattcctagtcactattcactttcctccggattatcctttcaaaccttccaaggttgcctttaggactaaggtgtttcatccgaacatcaacagcaatggtagcatttgtcttgatat

SEQ ID NO: 34960 - DNA, 320 bp, Glycine max
  Clone ID: LIB3053-013-Q1-N1-C6
acacctgacggaatctcagaattcgtcttctatacttattgccttcgattcacacactctcttcaatttctatgttaaggctatttctttgcctccgttccccctttctcacaaaaacaactccttttctcttctccttcttatctattctttgcatattattttttgttgattgaatgcattcacatcctaattcattactacattttaatccatttatctaaccattactgaattacctaatctaatctaaacgtttaaaaaataaatctattattattattattaaatcaaatttttactaaacttacctcccatac

SEQ ID NO: 34961 - DNA, 416 bp, Glycine max
  Clone ID: LIB3053-013-Q1-N1-C7
tcctgattgccttcaaatcacacactctcttcaatttctagggttgtgctattgctctgtctccgttccccctttctcacaaaaacaacgccttttctcttctccttcatatctattctttgcctctcgctttcgctcaattgaacgcattcacagcgtaattcgttgctgcattttaatctatttatctaaccagcactgaatgacctaatggagtctaaaggtgggaaaaagaagtctattagtacttgtagtaaatcaattctttactaatctcccctgggatacagcattaaacacgttataccaaactgtgcaatcaagaaattcatatctgctgcttactctaactgttctcgcaaaccattctgattcacatccggaatgatagctcgatgcatgcaaccataatttta

SEQ ID NO: 34962 - DNA, 406 bp, Glycine max
  Clone ID: LIB3053-013-Q1-N1-C8
ccgaaaaactcgttaaagaaagtcccattcccactgccgagtcaaattaagaagatgaagcagcagatagtggagtttatgggcctgggccttttggtggtgatgatggcatgtgggtcggcgagtggtgcggatgatttggcaaccaagtgttcagcggtgattcagaaggtaataccgtgttttgatttctcgaaagtgaatgaagaaacgccgaaaaagcaatgttgcgactcatcttcttccattaaggatagcaacccataattcctttgctacatgattgaagatacctatcatggtagcctacaagttaaaagcttgggcattcaaaaagccaatctgcttcatcttccttctgtttgtaacgtctaaaacgcttgctttattaactgttctaagcttt

SEQ ID NO: 34963 - DNA, 367 bp, Glycine max
  Clone ID: LIB3053-013-Q1-N1-C9
aacaggtcacctggatactatgatggacgctactggacgatgtggaagctgcctatgtttggctgcactgatgcttctcaggtgttgaaggagcttcaagaggctaagactgcataccccaatggcttcatccgtatcattggatttgacaacgttcgccaagtgcagtgcatcagcttcatcgcctacaagcccccaggcttctaagtcattgaaaaatttgcaaagcatctgtagccaccccactttgtttgttgtacttaaactacattcccatttgtttttgctttatgagatttcatcatcctgtatttttggtttctgttttcggacttcaatggaaattaatggatgagaactaatgaat

SEQ ID NO: 34964 - DNA, 417 bp, Glycine max
  Clone ID: LIB3053-013-Q1-N1-D1
ccgaaaaacacgttaaagaaagtcccattcccactaccgagagcaaattaagaagatgaagcagcagagagtggagtttatgggcctgggccttttggtggtgatgatggcatgtgggtcggcgagtggtgcggatgatttggcaaccaagtgttcagcggtgattcagaaggtaataccgtgtttggatttcgcgaaggggaaggaagaaacgccgaaaaagcaatgttgcgacgcagcaacgtccataaaggagagcaacccagagtgcctctgctacatcattgaagagacccacaagggtagcccacaggttaaaagcttgggcattcaagaggccaagctgcttcagctcccttctgtttgtaacgtcaaaaacgccagcatcaccaactgtcctaagcttttgggtctatc

SEQ ID NO: 34965 - DNA, 342 bp, Glycine max
  unsure (1)..(342): unsure at all n locations
  Clone ID: LIB3053-013-Q1-N1-D10
agcttacaaggatggttctcttcgtgtcgttcgtaatggaatagggattaatgaacaggcatcggtagaacttcaaggtatcaaaggaatgtggtcactgagatcctcaacagatgatccttttgatacttttctggttgtgagttttataagtgaaacaagaatcttagcaatgaatcttgaggatgagctggaagaaactgagattgagggattctgttctcaagtgcagactttattttgccatgatgcagttcataatcaacttgttcaagttacttcaagctctgtcagactggtcagctncacaactagagatcttcggaataatggcatgcacca

SEQ ID NO: 34966 - DNA, 410 bp, Glycine max
  unsure (1)..(410): unsure at all n locations
  Clone ID: LIB3053-013-Q1-N1-D12
gcgatgtcaccaaatcgccggtgacaagtgcgtttgacgttgaatctgtggcagtgcccgagatcgggcacttgctcggattaggccactcgtcggacctaagagccatcatgtatccttctataccacctcgaactaggaaggtgaatctagcgcaagatgatatagacgggattcgaaagctctatggtatcaacccctaattattatagctaggtgttgtttgtactagaactagagttttatttcggtaatttgcattaaaggattttgaaagttatcgaggtgaaattattctaattcaagaacaacaaanatagcatgtaagatattgtatnntagttttctctaaattaagaataaaccagctgatactaagtgatgcatatatgattatgaataaatgtgac

SEQ ID NO: 34967 - DNA, 422 bp, Glycine max
  Clone ID: LIB3053-013-Q1-N1-D5
gaagcagcagagggaggagcggcattaaaaatgcagatcttcgtgaaaaccctaacggggaagaccataaccctcgaggtcgaaagcagcgacaccattgacaatgtcaaggctaagattcaagacaaggaaggcatccctccggatcagcagcgtttgattttcgccggaaagcaacttgaagatggaaggaccttggccgattacaacatccagaaggaatcaacccttcaccttgtcctcaagcttcgtggtggcatcatcgagccttccctcatggctttggctcgcaaatacaaccaggacaagatgatttgccgcaaatgctatgctcgtctgcaccctagggctgtgaactgccgtaagaagaagtgcggtcatagtaaccagttgaggcctaagaagaagatcaagtaaattct

SEQ ID NO: 34968 - DNA, 419 bp, Glycine max
  Clone ID: LIB3053-013-Q1-N1-D7
aaaaaagcaaaaatgcaatctatgtccctgacgctgagcaagaggctctccaattcaaagcctctcttcagaatctcttccaacctcgtcgctcacgcatcctccgccacaacctctccgccgccaccttcgccgccagtcccctctccatccgccctcaacagcctcctcaccgctccgtggtccgccactcagtcacgcggaatcacgctctctggatctgatgttcgagtcgggaatctcattggaaaccgaggacgcgctcacgaggttctcaaactgtatcgccctcttgaaggaacgggcaaagccactcttgaggttccgcctcaaagtgtagctggttatgccacagttgctactacagaggatggcgccgaaaggaaggaacgaaacagtggattgagtaaggcaacgaa

SEQ ID NO: 34969 - DNA, 331 bp, Glycine max
  Clone ID: LIB3053-013-Q1-N1-D8
aataggtgctaacatcgcctggccaaattcagatgtcattgacaagtaatatccattcattgtgggcggtttaatggtccgtttcaacttgattagatttgttatctagtattccttttttaatttcattttcacatttttttgtttatattttttctttcttgtttatatatttttttgttatatttctttttcttattatgtctttttttttattctatttattattttttctttttttctattttatattttattttttttattttatatatttttattttttgggggtgtttttattttcttttatttttatatttttttttttttt

SEQ ID NO: 34970 - DNA, 394 bp, Glycine max
  Clone ID: LIB3053-013-Q1-N1-E10
caaaatttccagtacgacagtttggaaagcgaacattgaaattcagatagggttcattgattgatacgaataaaaattgaacacgacttatcgtctgaagcatctggcaggttgattagttagtcccttttgtgacaatgatttggtgattttgaatcttcgggtgcagcgagataatcgtgaaaattgggtctccaaaatttgtttgaggggattttgtttcttgagctaaaccaaaacatgaatgaaaatactgtgaggtctgctggtgcagatctgacagctgctatagtaccattgttgaagctgctatgcctaacagtcattggactacttcttgcaaacccaacaatgcaattcattcccaaagctacatttaaagcttttagtaaac

SEQ ID NO: 34971 - DNA, 241 bp, Glycine max
  Clone ID: LIB3053-013-Q1-N1-E11
ctaggatttcggccgtttgctccccaaggaaagaagcagagtgttgcttttgaaatcagctagaaaagatgtcaggtgaagaggtagctgttgcagctgaggcacctgctgcttcaattccaggtgagccaatggacatcatgactgctctacagcttgtgctgagaaaatctctggcctatggtggtcttgcacgaggtcttcatgaaagtgctaaagtgatcgagaagcatgctgcaca

SEQ ID NO: 34972 - DNA, 413 bp, Glycine max
  unsure (1)..(413): unsure at all n locations
  Clone ID: LIB3053-013-Q1-N1-E12
gagaattgtgatggggggaggacagggtcacggcacaacctacaaaggtgttaccattcatcagccaaagcgctggcacactatcaccggcaagggtttgtgcgcggtcatgtggttttgggtattctacagggcaaagcaagatggtcctgttgtattgggctggagacatccttgggagggtcaccatgatgatcantggcagggccattagcattccttaagcatgagctccaagaacaggaagaacagaaattgaagtgtcttgtgctgtggatgtgttgntcaaatgtttactttgatcaattcaatanatntggcttgtaaataagagatttccttttgcatgatttcatgagcattagatatgtctgtgcaccttacctgctaactgggatgaaagtcatgctatg

SEQ ID NO: 34973 - DNA, 410 bp, Glycine max
  Clone ID: LIB3053-013-Q1-N1-E2
ttggggttgattcaaaagacatagttacactcgagaagtagttgcgtgactacttcactaacatattaaagaaattgaaggatctcaaggcccagtcaaagcagacagatattatcttctgaaagatgttttgaaattaaaaacttgttaacggatgtagatatctagaaatctcattaagatgctcccacgatgtatattgttttcttttttatatatatatatatatatatatatatatatatatataatttattttcgggtatagttgatgtgcctaagaatgatgaggctgcaccaacacatttaaacatattatttatttacttgagtgggagaaaagtctccgatttgtgcatctgggacatatgagtattctatgatattttcaatttctaatgaatgttaag

SEQ ID NO: 34974 - DNA, 419 bp, Glycine max
  Clone ID: LIB3053-013-Q1-N1-E3
gaaagtcatttatgatactggcttgtttctgagcttctagcttgtacagctcaagtgactctcctctctcggaggtttttaactgaggttgtgatgattgtatgtcactcgtatagctgtaagctgtgtcattgtccagtgagatattctttgggaattaattaatttcagataaattctttgatcttgggggaattctgtatataatttagagctggactttcattcaaggggagcaacatctctactgatgaggactgaaactgctgttttgagaacgggcttgccttcatgaaatgtgtttatttagtattagggtgattgatccccggatatacgagactagtttaaaattccccactttttcctgtttgggaagttttgttctgcagaccaatttattttctaattattcttta

SEQ ID NO: 34975 - DNA, 419 bp, Glycine max
  Clone ID: LIB3053-013-Q1-N1-E5
gatcctaatgcaattgctcctttctcatttggctctctcggaggtacccagttgctcctaatggggtgggttgagagcaagagatgggtggacttcttcaacccagattctcagtcagtggagtgggccactccatggtcaaaaactgctgagaactttggcaactctactggtgaacaaggctaccctggaggaaaattctttgaccctttgggatttgctggagctatcaaggatggcgtttacattccggatgccgacaagctagagagactgaaattggctgagattaagcatgctaggattgctatgttggctatgctgattttctactttgaggctggccagggcaagacaccccttggtgctcttggcttgtaagcaaaataatgtacactagggagacaacttgaatcatt

SEQ ID NO: 34976 - DNA, 422 bp, Glycine max
  Clone ID: LIB3053-013-Q1-N1-E6
caacccataaccattaattcttaattagtttcctgttgcggtcttctccttctatattattactattactagtacaacttatcatacacatatacctctggttatagcagcaaactaggctatagcttgcactttgaagatatttatacacagaccaagtacaacaccaagctctagctagctagggacatgtctagccgaagatccagacaacattcagggtctacaaggatctccgatgaccaaatcatcgaacttgtttccaaattgcgccaacttgttcctgagattcgcaataggcgatctgataaggtttcagcgtcaaaggtcctacaagagacctgcaactacatcagaggcttgcacagagaggtgagtgacttgagcgagcgactgtctcagttgttgaccacaattgatgc

SEQ ID NO: 34977 - DNA, 378 bp, Glycine max
  Clone ID: LIB3053-013-Q1-N1-E9
tactaccttgcctgcacgcccagtctagatgatcccctcgctcaattccaatgccacatttttaagaaataaggatgcaaaaattgtcatatgtgaattggaattatttgctctcttattaggcctatcctgaagccaaaggaaatgagatcggaattcctcagggaattccaattccacattttcaagaaataaggaggcaaaaatgttcatatatgaattggaattatttgttttcttattaagcctatcctgaagccaaaggaaatgatatcggaattcctcggggaattccaattccacattttcaaagaaataatgaggcagaaatgttcatatatgaattgcaattatttgttttctttattaagcctatcc

SEQ ID NO: 34978 - DNA, 309 bp, Glycine max
  Clone ID: LIB3053-013-Q1-N1-F1
caacccagattcataaactctcaattagcttaccgtctctgtcttatacctcaattttattactattactagtacaacttatcatacacatataccactggatataactccaatctatgctatctctgtcactatgaagatatatatacacagaccaagtacaacaccaagctctatctagctatctacatgtctagccgtatatccatacaacattcactttctacaaagatctccgacgaccaaatcatctaacttcttaacaaattgctccaacttcttcctgacattcataatatgcaatcatat

SEQ ID NO: 34979 - DNA, 365 bp, Glycine max
  Clone ID: LIB3053-013-Q1-N1-F11
gcgcctcagagtattcataacatattctattaaattaatgagctggtgatgtaattaatattaatatgtagttttggcaatcttattggcagaagatgctaggtggagttcatcaatattctggtaggtataatatcttcatgaatctaatataacgttattcatagtgaaaataaatcgagccaaggaatttattaataattgtcttcatttcatattagctgcctgctgcgacttccttatgcataattttactgtttatagaaattgtgaagctatactgttgtaattgtcatgtaaattgttccctttttcatcttacttgatttggtaaactccggttacttgtatccaaattagatggg

SEQ ID NO: 34980 - DNA, 374 bp, Glycine max
  unsure (1)..(374): unsure at all n locations
  Clone ID: LIB3053-013-Q1-N1-F2
gaagaaaatggcaaccatctctgctgctatcacaaccccagcnatgtcccgcgcaactcttgtgcaaaagcgggtctcatctcccgttcttggtttgccagcaatgggtaaggtgggaagagtgagttgctccatggaggaaaaaccttattctgtgaaggaaagcagctctagcatgttggggatgggggcatctctgatggcagctgccagcgctgcagccatgtcaggcccagccatggccttggtagatgagagactgagcactgaaggaaccggacttccctttggcctcagcaacaatcttcttggttggatccttttcggcgtctttggtcttatctggactctctattttgtctacactttccact

SEQ ID NO: 34981 - DNA, 420 bp, Glycine max
  Clone ID: LIB3053-013-Q1-N1-F3
ggagctccactgagcttgaacagctctggagctggagcttcagttcccagttcagccttctttggcaccagcttgaagaaggttattgcctcaagggtccctaacgtcaagatttcttctggaagtttcaaaatcgttgccgcggaaaaagagattgatgagaaacaacagacagacaaggacagatggaaaggtcttgcctatgatgtttcagacgaccagcaagacatcacaagagggaagggtttggttgattccctcttccaagctccacaggatactggaactcactatgcaatcatgagctcttatgagtaccttagcactggacttaaacagtacaacttggataacaacatggacggtttttacattgctcctgcttttatggacaagcttgttgttcacatcagcaagaac

SEQ ID NO: 34982 - DNA, 413 bp, Glycine max
  Clone ID: LIB3053-013-Q1-N1-F6
ctcaaagttcttaacccccgaagctctctcaattgcaatggaccatacatcggatcctaaattatcacatagttatattatctcactgcctctcttttacctatcttctatattcttctttcatgtctcaaaattcctaactggatttaagtgattattgctaatcatcatccttacattagacagatataaaggtctttcctatgatgttacatacttccatcattacatcacattactgaatatttttgtattattacctctttcatagcttcttactatggctggttcttactattcattcattgatcttttattagttcctttatctctttactttaacatttcaatttttatatcatcatttttcttttttactattgttacttcttttatttattttctattttttt

SEQ ID NO: 34983 - DNA, 418 bp, Glycine max
  Clone ID: LIB3053-013-Q1-N1-F7
ggtcattgatgtttattcggagtttttcccggatatagctgttggttacgaggatccccgagtgcatgttcatatcagcgatggagttgcgtttatcaattctgttcctgagggcacttacgatgtcattatatcggatgcttttccagcaatggggcatagtgctgatgttcttgctgatgaatgcttcttagaatcagtagcaaaggctcttcgacccggaggagtgttctctgctccagcagacagcctgtggcataagaactttgtggttgcagacaccatagcaaattgcaagaagatattcaaaggctccgttaactatgcttggaccacggttcctacatatgcaagtggggtgattggattcatgctttgctctacggagggtccaccagtgaacttcaaacatccaata

SEQ ID NO: 34984 - DNA, 215 bp, Glycine max
  Clone ID: LIB3053-013-Q1-N1-G1
ctcgagccgatcatacagatcaatcaaactcgttattcatgtctatgataccctgctgcaaaagagaagaataacgagtttgattgatctgtcacgtagctacttcacgtgaccacttgtcgtactcatatttagcatgatatgaatctgaatttttatcttgtgccttatcattaagtaaggaatataattgtgttccagttaaattgaatgtc

SEQ ID NO: 34985 - DNA, 316 bp, Glycine max
  unsure (1)..(316): unsure at all n locations
  Clone ID: LIB3053-013-Q1-N1-G11
ttcacatcatgtcttttaagaaaaattgttcatcttctgtagggtttagggttaatgattgatttttcattgtgatactgctatgattggtttgcactactatttttctcaaatggacacccccctgttcatgatataaacatgaattaaagcaatgctattttaattgtgtagggttttttttatcagatcgtaaacaatgtttacattgttcccctctagatttcagattttttagaagggaaggtgttagactctctggtttagaggaccagaaacctnccaagaagaagaggattaagaaaactcaagtaat

SEQ ID NO: 34986 - DNA, 429 bp, Glycine max
  Clone ID: LIB3053-013-Q1-N1-G2
tagaagtagagaagaaaatgaaagtcattgttttcttcggtgctagaataattttaggtgcagaatggcaatgcaatgggtcagagcatgagcatgagcatgagcatgagcatggccacagctaccaaattttccctctgcgaatgaaaaccggccccggtggccactacattccggaggtatcgtgcaaaagttggaggcttggtgtggaagcacacaacgtcattgactggagaaccattcctcaagattgcgagggatatataggaaactacatgcttggccaccaatatagatcagactccaaaacagtttgccgtgaagcttatttttatgctaaaaccatcaacatcactgccaaaaccacatgggtgtttgatgtagatgagactacgctctctaaatctccttactttgctgatcatggat

SEQ ID NO: 34987 - DNA, 424 bp, Glycine max
  Clone ID: LIB3053-013-Q1-N1-G7
atttttcttcctcagtagtgtcatttacgcttctcttctcggcaggaactatgcctaaccctaaggtcttcttcgacatgaccatcggcggtcaatctgctggccgcatcgtgatggagctctacgccgacgtcactccccgcaccgccgagaacttccgcgcgctttgcaccggcgagaagggcgtacggcggagcggcaagcccctccactacaagggctcgtccttccaccgcgtgatcccgagtttcatgtgtcatggtggcgacttcaccgccggaaacggaaccggcggcgagtcgatttatggcgccaagttcgccgacgagaacttcgtgaagaagcacaccggtcccggcatcctctccatggcgaacgccggtcccggaaccaacggatctcagttcttcatttgcacggagaa

SEQ ID NO: 34988 - DNA, 381 bp, Glycine max
  Clone ID: LIB3053-013-Q1-N1-G9
cataaacttattttttctttctcttttgcacttgtttcgtaaaatggcggaccaagatattttcagttgcattagtgaacctcgtcttgtagccagaaagttcttggccagacctcagcatgagggtgttggagccgttgttagaagaagcatagggagatttgaactcaagtactttgatcctttccttgtcttggatgaattctcagtgactgctcctgctgggtttcctgatcatccacatagaggatttgagacggtcacatacatgttgcagggagctgtaacgcacgaagattttgaaggacataacggaacaattgaagcttgtgacttgcaatggatgactgcagggagagggttagttcactcagaaatgcc

SEQ ID NO: 34989 - DNA, 388 bp, Glycine max
  Clone ID: LIB3053-013-Q1-N1-H1
aaaacataatcttcgttacaatgtcaacgacttacttgaaaaggttggcatttctcattgtctatttgctcttcatcctgcatctccacttgtccactgcacaactaaatcttaacgcatctgttcgcactatcaatgacaattacctcgtgtactttgaacttctttataacacatacacttatcaagaatctatcgttaatgtctacctcaacaactacaattacaatcacacatctaattaaacttttatttaatcttatctcacaattacttttaaccactgaacctgacacttaattaccttatgaatcttctttctaatttactaattaccttaatgctgactcttacactgatacttacccttacacttatctaccttatt

SEQ ID NO: 34990 - DNA, 357 bp, Glycine max
  unsure (1)..(357): unsure at all n locations
  Clone ID: LIB3053-013-Q1-N1-H10
cttctcaatctctctctctccaatggccaaagacctcgaaacggagattcaaagtgggttgcctcacaaggactaccacgacccaccccccgccccattctacgaccccgccgagctccgaaagtggtccttcttccgagccctcatcgccgagttcgtcgccaccctcctcttcctctacgtcaccatcctcaccgtcatcggctacaaccaccagacagccaccgccgncgagccctgcagcggcgtcggcgtcctcggcatcgcttgggcctttggaggcatgatttttgtcctcgtctattgcaccgnncgcatatcanggggacacataaaacccgcngtgacgttcgggtg

SEQ ID NO: 34991 - DNA, 394 bp, Glycine max
  unsure (1)..(394): unsure at all n locations
  Clone ID: LIB3053-013-Q1-N1-H11
ttgatggctggcttgcgtggttcctctcaggctgtgttggaaggtagccttcaggtgagtggctccacacgcttgaatgtggggagtggaagcagggtggcctcagtcacacgtgcagggttcacagttagagcacaacaacaacaagtgagtggtgaggtacaaagcagccgtagggcagtgctttcacttgttgctgctggtttggccactggctcttttgttcaagctgtgcttgctgatgccaaatctatcaaagttggaccaccttccccaccttctggtggattgcctggaacgttgaactcagatgaagcaagagaccttcagctgccattgaaagataggttcttncttcaaccattgtctcctactgaggctgcacanagggcaa

SEQ ID NO: 34992 - DNA, 419 bp, Glycine max
  unsure (1)..(419): unsure at all n locations
  Clone ID: LIB3053-013-Q1-N1-H12
ctcgagccgaaaggactcaccgatgcatcaaagatagccattttgaatgcaaactacatggcaaaacgattggagaattattacccggttcttttccgtggagtcaatggaacagttgctcatgaattcatcattgacttgagaggctttaagaatactgctggaattgagcctgaagatgttgcaaagcgcctcatggactacggttttcatgcaccaacaatgtcatggcctgtgcctggcacactcatgattgagcctactgagagtgaaagcaaggccgagttagacaggttctgtgatgctcttatttccattagacaagaaattgctgagattgagaaaggaaaggtngacattaacaancatgtacttaanggcgcccctcattcaccatcactgctcatggctgatgcatg

SEQ ID NO: 34993 - DNA, 416 bp, Glycine max
  Clone ID: LIB3053-013-Q1-N1-H3
tatcacgcacgctgcccgcatacgtgaactcggcttgagactacatcatctactttacaatgtcaatgacttacttgaaagagttgtcatttctcattgtcggtttgcttttcatcctgcatgtccacttgtccactgcacaagtaaatcttaacgctggtgttggcactagcaatgacaatggggtcgtggttgttgaacttggtgatgacacagacacgtctcaagaagctgtcgttagtgttgaggtcaacgtcgactatgacaatggcacatctaatgaagctggtgttgaatctgatgtcacaattactgttaacgttgagcctgacacttaagtaccctgtgaagctcctgtcgaagttactattaacgtttatgctgactctgacactgatgctgaccctgacacttat

SEQ ID NO: 34994 - DNA, 424 bp, Glycine max
  Clone ID: LIB3053-013-Q1-N1-H5
aaaacataatcttctttacaatgtcaatgacttacttgaaaaagttgtcatttctcattttcgttttgcttttcatcctgcatgtccacttgtccactgcacaagtaaatcttaacgctggtgttggcactagcaatgacaatggggtcgtggttgttgaacttggtgatgacacagacacgtctcaagaagctgtcgttagtgttgaggtcaacgtcgacaatgacaatggcacatctaatgaagctggtgttgaagctgatgtcacaattactgttaacgttgagcctgacactgaggtacctgatgaagctcctgtcgaagttactattaacgttgatgctgactctgacactgatgctgaccctgacactgatgtacctgatgaagctcctgtcgaagttactattaacgttgatgttga

SEQ ID NO: 34995 - DNA, 429 bp, Glycine max
  Clone ID: LIB3053-013-Q1-N1-H8
gcagatcaatctctctctctctctcaaccataatagtcatgggtttggaggaggattttgagcagtatgctgagaaagcaaaaactttgccaccgactcaatcaaacgaagacttgcttatcctttatggattgtacaaacaggccaccgttggacctgtcaacaccagccgtcctggaatgttcaacatgagggacagagctaaatgggatgcatggaaggctgttgaagggaaatccaaggacgaagcaatgggtgattacatcattaaagtgaaacagctgctggaagcagctggcttgcctgcttgataacattgtcatgccttgctttctgattctgtgctagaagttcacaacagtttggaaataaacaattgcagtgtttgaagcttttattatcataatcatatttatttctaatgattta

SEQ ID NO: 34996 - DNA, 407 bp, Glycine max
  unsure (1)..(407): unsure at all n locations
  Clone ID: LIB3053-013-Q1-N1-H9
cttgagcagacttaacaacagcacaaagcgggttactgtctgttcaagctaccatctctctctctctttcttagtgcctccttgccagaagttaaaatggcccaagaaactttcctattcacatctgaatcagtgaacgaggggcaccctgacaagctctgtgaccagatctccgatgctgtgctcgatgcatgcttggagcaggaccctgacagcaaggttgcctgtgaaacctgcaccaagaccaacatggtgatggttttcggagagatcacaaccaaggccaacgtggactatgagaagattgtgcgtgacacatgcaggaacattggttntgtctctgatgatgttggtcttgatgcctgacaactgcaggtcctcgtcaacattgagcaacagagtcctga

SEQ ID NO: 34997 - DNA, 414 bp, Glycine max
  Clone ID: LIB3053-014-Q1-N1-A1
tgttgttttgggacaactatccagtggggacttcggttgatgttttgcttcaaaggcataatacacaggagaaatacttgaagaagaaatcagattatgtgcagcaaccaatttccaaaactggccttgaaggtatatggaacaagatgatggagctagaaaaacctgctcttgcattgaatccctatggtgggaaaatgggtgagatttctgaggtggaaacaccgtttccacatagagctggtaacatttataaaattcaatactctgtgacttggaaagaagaaggtgaagatgttgctaacagatatctagatcggattcggaagctctatgaatatatgacaccttatgtgtcaagttcaccctagagttcatatatcaactatagagacgttgatataggtgtcaatg

SEQ ID NO: 34998 - DNA, 327 bp, Glycine max
  Clone ID: LIB3053-014-Q1-N1-A10
tgcaattgaagttaaaagccttagccttccctacaacggcaaacacaaagacatcatcatccatggctgcctccgtctccactgtcggagctgtcaacagagctcttttgaacctgaatggttctggagctggagcttcagctcccagttcagccttctttgggaccagcttgaagaaggttattgcctcaagggtccccaacagcaaggtttccggtggaagcttcaagattgttgctgtagaagagaagaaagagattgaagagacccagcagaccgacaaggacagatggaagggtcttgcctatgatatctcagacgaccaac

SEQ ID NO: 34999 - DNA, 386 bp, Glycine max
  unsure (1)..(386): unsure at all n locations
  Clone ID: LIB3053-014-Q1-N1-A11
ggtttaaagagaggttgaagaattggcagaggcttccttacgccaagccttacgagaggaaagaggttgttcgggtgaggacgtgtggaggaatcgaacggtacgagaagagggctgtggctgttcttcatgagctgttgagtttgactgtggagaagatggtcgaggttgatcagctggctcattttcggagggactttggtgtcgaagttaatgtgcgtgaattgctgctgaggcaccctggtatattttacttatctactaaagggaagactctaactgtttttcttagggaagcttataggaaaggggggttggttgagccaaatcccgtgtatgagacgcgtangaatatgttggatcttgtgttgttagggtgtaggaaa

SEQ ID NO: 35000 - DNA, 413 bp, Glycine max
  Clone ID: LIB3053-014-Q1-N1-A2
ggacatcacaagaggaaagggtttggttgactcccttttgcaagctccacaggatgctggaactcactatgctgtcatgagctcctacgagtaccttagcactggacttcgccagtacttggacaacaacatggatggattttacattgctccagcttttatggacaaacttgttgttcacattaccaagaacttcatgaccctgcccaacatcaaggttcctctcattcttggtatctggggaggcaagggacaaggaaaatctttccaatgtgagcttgtctttgccaagatgggaatcaaccccatcatgatgagtgctggagagttggaaagtggaaatgcatgagagccagcaaaactgatcaggcagagataccgtgaagccgcagacttgatcaagaagggaaaga

SEQ ID NO: 35001 - DNA, 409 bp, Glycine max
  Clone ID: LIB3053-014-Q1-N1-A4
cagcaaccaattccatttccagtttctgattcgtcaaacggacaaaggaagtgaaagggtttagggtgtgacctgagatcaacatgttgcggaggcttctctcttctcacctcaaaaccctagccgccaccgcttcttcttccactccccgatctgcttccgccgccgccagattcgccgctctctctcgctcctcccgctacttctcaacccagtccgaggatgctactgccatcaaaaagaaggttgaggatgtaatgccaatcgctactggtcacgagcgcgaggagcttcaggctgagctcgagggaaggaatattcttgaaatagaccatcccgaaggtccattcggcacgaaggaagcacctgctgttgtcaaatcttactatgataaaaggatagtcggatg

SEQ ID NO: 35002 - DNA, 409 bp, Glycine max
  Clone ID: LIB3053-014-Q1-N1-A5
gctttgtttacaagtcctcctttctcacagctaggtggtggtgattagtgtacatatatatatggttgaagtgggtatttatcagatccctacgagcactttcgacccatttgcggaggcaaaagaaacagatgctcccggggcaaaagagtatgtgcatatccgcatacaacagaggaatgggaagaagagtctgaccacagtgcaagggctgaagaaagagttcagctacgagaagatcctcaaagacctcaagaaagagttctgctgcaatggcaatgttgtgcatgacaaggagcttggcaagattatccaactccagggtgatcagcgcaagaacgtttctcacttcctcattcatgctcgccttgttaggaaggaccagatcaagattcatggtttttaaccc

SEQ ID NO: 35003 - DNA, 406 bp, Glycine max
  Clone ID: LIB3053-014-Q1-N1-A6
cacaaagagaagcattagcactaggagcagcaacaactagtctcagctgaaatggcctcttcagtgatggcatctgtggccctcaaacctgcccctttcactgttgagaagtcctcagtgagaggccttccctctctctcaaggaactcttcttcattcagagttgtggccagtggcaagaagatcaagactgacaaaccttatggaattaatggtggcatggctttgagggatggaactgatgcatctggcaggaaaggaaagggaaagggtgtttaccagtttgtagacaaatacggtgctaatgtcgatggttacagtcctatctacgacaccaaggactggtctccaaccggtgatgtctacgctggcggtacgactggcttggctatctgggctgtgactc

SEQ ID NO: 35004 - DNA, 393 bp, Glycine max
  Clone ID: LIB3053-014-Q1-N1-A7
cacaaagagaagcattagcactaggagcagcaagaactggtctcagctgaaatggcctcttcagtgatggcatctgtggccctcaaacctgcccctttcactgttgagaagtcctcagtgagaggccttccctctctctcaaggaactcttcttcattcatagttgtggccagtggcaagaagatcaagactgacaaaccttatggaattaatggtggcatggctttgagggatggaactgatgcatctggcaggaaaggaaagggaaagggtgtatactcagttgtagacaaatactgtgctaatgtcgatggttacagtcctatctactacaccatagactggtctccaaccggtgatgtctactctggctgtacgactggcttggctatc

SEQ ID NO: 35005 - DNA, 404 bp, Glycine max
  Clone ID: LIB3053-014-Q1-N1-A8
aatggctgccaacacattgatgagttctgccatctcagccgtcccatctctcctttcctcctcaaaatccagatttgccgcagcagttcctctttccagctttgttgtcaccaatgcctcttcttctcgcttttccatgagtgctgactggatgcctggccagcctagacccccctaccttgatggttcagcacctggtgactttggattcgaccctcttcgtcttggtgaagtaccagagaatcttgagaggttcaaagagtcagaactcattcactgcagatgggccatgcttgctgttccagggattttggttccagaggcattgggcttaggcaactgggtaaaggctcaggaatgggctgcagttcctggtggccaagcaacctacctaggcaacccag

SEQ ID NO: 35006 - DNA, 396 bp, Glycine max
  unsure (1)..(396): unsure at all n locations
  Clone ID: LIB3053-014-Q1-N1-B1
gaacatttaagtccaattctctcaaacactacaatcaaacaatggcgaaggtttaccctcagatcatacccacatctncagatcagactcagtgtctcacctccaaaagagaaacatacactctatggttgaaatcacttgtcttccactccaatggatgcactgtctatgactctaatggtgacatcgtttaccgagttgacaactatgacagaaagggtagaagagaagttaatctcatggatctacgaggcaaagttctctgcaccataaagaagaggttactagctcttggatgctgggaaggccacaggtgcatgagttccgattttggtacacaggaacaaccatggtttcaagttaaaagatgtaatcaaatgatcaaagggaaagtag

SEQ ID NO: 35007 - DNA, 376 bp, Glycine max
  Clone ID: LIB3053-014-Q1-N1-B10
gtcgttcgagatggcccgtacgaagcaaactgctcgtaagtccacaggaggaaaggctcctaggaagcagcttgcaaccaaggctgcacgtaagtctgcaccaactactggtggtgtgaagaagccacatcgttaccgtcctggtaccgttgctcttcgtgagattaggaaataccagaagagtaccgagcttttgatcaggaagctccccttccagaggctggttcgtgaaattgctcaggacttcaagactgatctgcgtttccagagccacgccgtgcttgcattgcaagaagctgctgaggcataccttgttgggctctttgaggacactaacctgtgtgccattcacgctaagcgggtaaccattatgccc

SEQ ID NO: 35008 - DNA, 322 bp, Glycine max
  Clone ID: LIB3053-014-Q1-N1-B11
aaacaaaagccatagattgttacttctcttcgccttttgctttgcaattgtcaccaaacaattcttgcttagctctcacaagcaagcattatcaacaatgaagaaaattgtgttaaaggtggacttacatgatgacaggatcaagcgaaaagctatgaagacagcatctggcctttcgggggttcaatcagtttctgttgacattaatgacaagaaaatgaccttattgggggatgttgatccagtgagtgcagtgtcaaagctacgaaagtggtgtcacactgaaatagtctcagttggacccgcaaaagaggaaaaagag

SEQ ID NO: 35009 - DNA, 362 bp, Glycine max
  Clone ID: LIB3053-014-Q1-N1-B12
caaaccgttcccaaacagaaaaacgaaagaaagataaggttctcaaaaatggctgcgacttcgatccccatccgagtcgccggaatccaagcgtgcgccacctcgggccgccgaagggccgatcccgatcgccggagagcctcctccgccaactggtggaccccgctgttcggctggtcctccgagccggactacattgactccaacaacaaagcatcgagtcttcaaccggcaaagccggaaccggttacggcggagacggagtcgaaagcgccgagaccgcgcttcgccggcggcttcacggaggagaaggcgaagcagctccggatgatgaccagcgagtcttttcacgacaccatgta

SEQ ID NO: 35010 - DNA, 404 bp, Glycine max
  unsure (1)..(404): unsure at all n locations
  Clone ID: LIB3053-014-Q1-N1-B2
ggaaactcacctccgttcacctcttctccggcaaggccatgaatggatttagacacttgcgtcaggaagaggtagctagattgacatgcaacttggcaagttcagacacaaaagcagtgaatttgggacaattattgaatgtatgcaccaccaacgcattagcgagggcaatgattggacgaagagtgtttaacgatggcaatggagggtgtgatcctagggctgatgagtttaaggctatggtgatggaggtgatggtgttggctggagttttcaacattggtgactttattccttccttggagtggctagaccttcaaggggtgcaagctaagatgaaaaaattacacanaagatttgatgcatttttaaccagcattattgaagagcacaataacagttct

SEQ ID NO: 35011 - DNA, 413 bp, Glycine max
  unsure (1)..(413): unsure at all n locations
  Clone ID: LIB3053-014-Q1-N1-B4
agcgaatatcccaatcccacaccaatggcatgctcagccagctctgcttccctcttctccgcaaacccaacacccctcttctctcccaaaccctctctctccctccaccttaaccctctccccacgcgcccttctccctccctcacgcgcccttctctctccctcacgcgcccttctcactctcgccgctccttcgttgtcaaagcctcctccagcgagcttccgctggttggtaacaccgcaccggatttcgaagcagaggctgtgtttgaccaggagtntatcaacgtgaaactatctgattacattgggaagaaatatgttgtgctcttcttctacccgttggacttcacctttgtctgccccacagaaatcactgctttcagtgaccgacatgcatagttcgaggcact

SEQ ID NO: 35012 - DNA, 278 bp, Glycine max
  Clone ID: LIB3053-014-Q1-N1-B5
cttttgagttattagaccattctctatatagtgatcctcgaacttaaagtttttttgttgatcattttgtcttgaagaaatggcatctagctcaatgtcatccactggttcatggagtgccaaggacaacaaggcctttgaaagggctctagctgtgtatgacaaggacacgccggaccgttggtacaatgttgctaaggctgttggtggtgggaagactccagaggaagtcaagaggcactatgaactccttcttagggatgttagtcacattgaat

SEQ ID NO: 35013 - DNA, 365 bp, Glycine max
  Clone ID: LIB3053-014-Q1-N1-B9
ttgaggacggccgtacccttgctgactacaacattcagaaggagagtactcttcacctcgtcctccgtctccgtggtggcatgcagatcttcgttaagacactcaccggcaagaccataaccctagaggttgaaagctccgacaccatcgataacgtcaaggccaagatccaggacaaggagggtatccccccggaccagcaacgtctcatcttcgccggaaagcagctcgaggacggccgcaccctcgccgactacaacatccagaaggaatcaacccttcacctcgtcctccgtctccgtggtggcatgcagatcttcgttaagaccctcaccggcaagactattaccctagaagtcgaaagc

SEQ ID NO: 35014 - DNA, 409 bp, Glycine max
  Clone ID: LIB3053-014-Q1-N1-C1
ctcgagccgctcgagccggtgaaatcactgtcaagctcagtgtgttggtactgttggggagatatcaacatggccaagtgccagtaatgtcattccaggccaggttacatataccgtggatatacgagcgatagatgaccttggacgtgaagctgttatctatgatttatcgaaacaaatttaccaaatatgtgacaagcgttcagtttcctgcattattgagcacaagcatgatgcaggtgctgtgatttgtgattcggatctaagttcacagctcaagtcagcagcttattctgcactcaagaagatggagggtgacattcaggatgaagtgccaacattaatgagcggagcaaggcatgatgcaatggcaatatctcacttaacaaaggtgggaatgctgtttgtg

SEQ ID NO: 35015 - DNA, 367 bp, Glycine max
  Clone ID: LIB3053-014-Q1-N1-C10
tagcatgcctgcacgcctactttagctgatcctttcgctcaagatcaattccacattttcaagatataaagctgggacaatgttcatatatgaatcaggaattatttgtcttattattagtgcattatcctgtagcctaacgcacatagatccatatccctcgaactatcctaattccacaacacctacacatattcatgcattactgttcacatattgctatgcattaatctgcttttaacatcaggccaatcttgaactcatagcatatcactacttcttcaactcagacttctgcttcctcattgactaagcttccactagcatgtttggtaatatactatatatttcttatcctccatttact

SEQ ID NO: 35016 - DNA, 377 bp, Glycine max
  unsure (1)..(377): unsure at all n locations
  Clone ID: LIB3053-014-Q1-N1-C11
cttttggctacagaaagtagtttctttagtcgggtttcgttcaaaaaatggtgcagagtctctgtttgatggcttctcatggttaccctcctggccttgtcttgcatccacaagtactgggcttgccctgcagtaccatgaagggctaccaaacattctttccttctccagtagcaaaagcagacctgatcagatatcagtctccttgtcttgatccaagtccatgtgaggagtcaacgaaatctcaaaatgaatggtttgattataagaagtttgtcaatgttgacttctcagttgaaaggcccatgcttattaatgaccaagctaactgctcaaatgcagttctttttgctttggcattgnttgacaatgctcta

SEQ ID NO: 35017 - DNA, 371 bp, Glycine max
  Clone ID: LIB3053-014-Q1-N1-C3
gaacaactcaaaagctacacctgacagacagcagtctggagactgtgaaatgtttgaaccaccatctttcatgaccttggttgatcctagtcaggttagccccaaagcttctgcttctgaagtccagaaggggcagaacacacaacatacagattccacttcacaggctgcttggtttcccactctcacgcaggttgtcaacgagtctcaagggaggaagaagaatgaagaaataattgccaaggtgacaaactggagcaccagtaaggagcacactcctctgaagagcctcttaggtgaggctgcccatagtagcaagccaagatctccaaaaatggaaaactctgtgaatcagaagagtggtaaagttc

SEQ ID NO: 35018 - DNA, 410 bp, Glycine max
  Clone ID: LIB3053-014-Q1-N1-C4
gaagcattagcaaaagcaagaagaactagtctaagcagaagtggcctcttcagtgatggcatctgtggccctcaaacctgcccctttcactgttgagaagtcctcagttagaggccttccctccctctcaaggaactcctcttcattcagagttgtggccagtggtggcaagaagatcaagactgacaagccttatggaattaatggtggcatggctttgagggaaggagttgatgcatctggcaggaaaggaaagggaaagggcgtttaccagtttgtagacaaatacggtgctaatgtcgatggttacagtcctatctacgacaccaaggactggtctccaaccggtgatgtctacgctggcggtacgactggcttggctatctgggctgtgactctacttggtcttc

SEQ ID NO: 35019 - DNA, 404 bp, Glycine max
  Clone ID: LIB3053-014-Q1-N1-C6
ctggaattcagtttataaacataatccgaatcagcaggcgattacagtactttgagcagtatcaacaaagggtgagtgcactaattggaccagagcagactcaacgactggtcaaccaagcactagtactcataaccttaggtggcaatgattttgtcaacaactattacttggtgccattctctgcaagatcacgccaatttgcacttccaaactatgttgtataccttatttccgagtatcgcaaaattcttgtgaggctttatgagttgggagcaaggcgagttttggtgactggaacgggacctttaggttgcgtgcctgcagaactggcgcagcgtagcagaaatggggagtgtgcagcagagctgcaagaagcttctgctttgttcaatccacaactc

SEQ ID NO: 35020 - DNA, 404 bp, Glycine max
  Clone ID: LIB3053-014-Q1-N1-C7
aacaaaaatattattaagatgatcaacattattggagcacttgttctactctttgcatttctcttcctcagttgtgtgtatgcacaagacacaacaacccttgtgcctgcaatcataacttttggtgattctgctgtggatgtagggaacaatgactatcttcccacccttttcaaggctgattaccctccttatgggagggactttgttaaccaccaacctactgggaggttttgcaatggcaaattagctactgatttcactgctgacacattgggtttcaagacctatgctccagcatatcttagcccacatgcatcagggaaaaacctccttattggagcaaactttgcttcagctgcatctggttatgatgaaaatgctgctactttgaatcacgcgat

SEQ ID NO: 35021 - DNA, 406 bp, Glycine max
  unsure (1)..(406): unsure at all n locations
  Clone ID: LIB3053-014-Q1-N1-C8
caaattgctaactatggaggattggagactatgtctatggtaattgctggtcatttcccttctttcagttcatcgtcatcctttgctcaaataaaggaaaatggtgcaggaacgacaaaagatcatcaatccgataggcatctgactgatcatgagttagatttccttgttgctattctgggcctgcttgtaaacctggtcgagaaggatggtcataacagatcacgacttgcagcagccagtgttctgctaccttcctcagtaagcttgcaccaggaggttcggaaggatgttattcaattattatgctccattttcttggctaacctgngtgaaagtgaaggagctggggaagataaacatttgcaactgaatgatgaggcagctgttctacaaggtgaaaaag

SEQ ID NO: 35022 - DNA, 374 bp, Glycine max
  unsure (1)..(374): unsure at all n locations
  Clone ID: LIB3053-014-Q1-N1-C9
atctgttacaagttgtatcaaggagaagcatagacatggagaagcgaggatcaggcaggcgtttcctgatgtgggttatggtgatttggctccacgcacatctcagcattgcagctgaactgtccaagtccaatgacacggacactgcttctgagagttctgtgtgcgatggctccgtagaagactgcctcaacaacgtccaccgcttggactcagagcttcttcccaccatctgcagctcccacttccgcagaatcctcgctggaggagccaataaagtcgtttttgatacactcaaatctgcagccttcttgtgtacgactatcaatggttatcgtcggtgtggggccagagttcctnccggtggtataccc

SEQ ID NO: 35023 - DNA, 400 bp, Glycine max
  Clone ID: LIB3053-014-Q1-N1-D1
aaaaaacgtcgtagtcgcaaaccctaatcagaagaagcgcagcgtcaagcgagtgacagccaccagccatgggtcgtatgcacagccgcggtaagggtatatcctcttctgctttgccctacaaaaggacacctcctagctggctcaagatctcttcgcaagatgtcgaagaaaatatctgcaagtttgcgaagaaaggtttgaccccgtctcagattggtgtcattctcagagattctcacggtattgctcaggtcaatagcgtcactggcagcaaaatccttcgcatcctcaaagctcacggacttgcgcctgaaattccagaggacctgtaccatttgattaagaaggcagtttcaattaggaagcatcttgagaggaacaggaaggacaaggactc

SEQ ID NO: 35024 - DNA, 215 bp, Glycine max
  Clone ID: LIB3053-014-Q1-N1-D11
ctcaaatctttcaaactagaagatatatcatgcacaatagttaatttgaatgtgttggttcataccttcacatatatacttattactgattcatttcatgctcaaatgtacattaaacactatatcattcacacataattacattaattacaactatataactacatcttaattaataactacaaaataaaataacaaatgccatccacttacta

SEQ ID NO: 35025 - DNA, 417 bp, Glycine max
  unsure (1)..(417): unsure at all n locations
  Clone ID: LIB3053-014-Q1-N1-D12
ctgtttcgtgttgtagctagctcctcgaaaatgctggcacgcctcgccgcgagtcgcttcaacgagatccgtcagattttccgtcagccttctagggctttctcaaccgctctgaactaccaccttgacacaccggacaacaaccctaaacttccatgggaattcaccgaggccaatcaagcaaaggttaaggagattttgtctcactatccatccaactataagcaatctgctacaattcctcttttagatcttgcccagcagcagcatggaggttggctacctgtttctgcaatggatgcggtagctaagattgtagaggttcctcccatacgggtgtatgaggttgccacattntactccatgttcaatcgagctaagggtgggaagtaccatctgntggtttgtggaacaaca

SEQ ID NO: 35026 - DNA, 411 bp, Glycine max
  unsure (1)..(411): unsure at all n locations
  Clone ID: LIB3053-014-Q1-N1-D2
gcctcctttccatttttcttctcctctctctggtaaccttcctctgctttttaatccaaatcatcgttcttattttttcaaggatatttttgctgtgattgcgtgaatttcgatcaacctttgaagcatcctttgctgcaacttttaggtctcaattttaaggtcaactttctgtgccgggtcgttcaacttgcatctttatcatttgatctattgtttgagttgacgagtgaacttgtgtgacatcatagtttctgtgagagattgcatatctctcaagcttctttatttgataagaagcttgttgcataatagaatcaagagtgaaatcactggtattaaactntctaanttttcttctttcccgttatcactgatggattttcctgtgattattgtgtagattatgat

SEQ ID NO: 35027 - DNA, 399 bp, Glycine max
  Clone ID: LIB3053-014-Q1-N1-D7
gaaaacgcagttctcaccatttccctctcgattgtgagacttgttgttgttaactgaacttttctgagcaagaatgtctgggcgtggaaagggaggcaagggtttgggaaagggaggagcgaaacgacaccgtaaggtgctgcgcgataacattcagggaatcaccaagcccgcgattcggcgtttggctcgtaggggtggcgtgaagcgtatcagtggtctcatctacgaagagacacgtggcgtgctcaagatctttttggagaacgtgattcgtgacgccgttacctacactgagcatgctaggagaaagaccgttacggcaatggacgtggtttatgctctcaagagacagggaaggaccctctacggatttgggggctaggtttttttatttta

SEQ ID NO: 35028 - DNA, 404 bp, Glycine max
  Clone ID: LIB3053-014-Q1-N1-D8
ggaatttgacaagtacttgaagggtgagcatttgaaaaacggagaggacccttttgcgcctccgctcacatacaccactctctttgtatctgagtgggggaagttgggattcaaccacgtggactacctgtggggcccacccgtccacgtggttcccattcaaggatccagcatcatacctgtggccattgtggggtccctgccccttcccaacagagggattcgtttgatgacgtggtgcgtggaggaggcacatcgccttccttttcttcatcacatgcatggtgtcgtgaatcatgtaagcggaagaataattaaatgaagattctactttgccttcttttatgaacctgaaattgctatttcctgttccttttaatccctgatcttaccatttgagatag

SEQ ID NO: 35029 - DNA, 377 bp, Glycine max
  Clone ID: LIB3053-014-Q1-N1-D9
ctcttcttgtatgatggagaagatccagcacagtgaggtggaagtgaagggactgaagcttcacgtggcagagattggaagtggctccaaaattgtggtattcttgcatggattcccagagatctggtacacatggaggcaccaaatgatttctgtggcaaacgctggttatagggctattgcctttgatttcagaggctatggactttctcagcaaccagcagagcctgaaaaggaaaccatgtttgatctggttcatgaaattgtaggccttttggatgctttgaacatctccaaggccttccttgttggaaaggattttggtgccattccaggacatcttactactgcagtgcacccagaaagagtaactggta

SEQ ID NO: 35030 - DNA, 70 bp, Glycine max
  Clone ID: LIB3053-014-Q1-N1-E1
ctcgagccgattttttttaatcttcttgtacaacaccctggtatatatatataaatgtgattcttactct

SEQ ID NO: 35031 - DNA, 413 bp, Glycine max
  Clone ID: LIB3053-014-Q1-N1-E10
aagaggaatcaaaaccagcaaaagacctgaagtagttgctgtgtgaaatgcctgtgtggttccatattcaccgtacgctccaatgtaagctgtattttttgccccatagaggtttatccattaaattttggcatatcgttttactgattgggtggttgaatataagcaaaattgactgccagtatgagaaacaatcaagtaaaataatggcagacattgcttatgcgccagtttcaaagtcaactatattatataattaagttatgcttgtggctcaatcatcacatgtatctgactgataattactcaatactagtagaaattttacatttggttgtgttaaaaatgctccattggagttacaaaatgtagaaggtattgtcctggctctgagcatgatctcaatctaattc

SEQ ID NO: 35032 - DNA, 364 bp, Glycine max
  unsure (1)..(364): unsure at all n locations
  Clone ID: LIB3053-014-Q1-N1-E11
ctcgagccgattcggctcgagagattcctctctttcgagtcatttgcttctcgctgatcaaagctgtttattaggtaacttggtatgggagttgtgactgtttctagctcggctgctcggactccattgggattgaatacaaagttttgcaataatcgtctgaagagacctttaattgtagcatttaagggggataagcacaatgactcagctttggttgcaacacangagaaaattcctgtgccggttgaaacggcgaagaagacgcagaaaaagaggataggaaaaactaacaaactacctaagagagagaagtctncatcttccatggatgtggactacaatgaagctgctgccatgcttg

SEQ ID NO: 35033 - DNA, 281 bp, Glycine max
  Clone ID: LIB3053-014-Q1-N1-E12
gtgagagctgaggacatcacagcaatccaaacagaatgaggtgtcagaatcaagacagcagtagggagaggagggtatgtgaaggacatatatgtgaagagaatgaccttgcatactatgaaatgggcatttaagatgactggtgattataactcacatgctgatggccactatgaccctaatgccttgcctgagatcaaaaacatcaactatagagatgttgtggctgaaaatgtgaccatagctgctaggtttcaaggaatctccaatgatccctttac

SEQ ID NO: 35034 - DNA, 403 bp, Glycine max
  Clone ID: LIB3053-014-Q1-N1-E2
gacacccacctaaaccatggcttcccacttcctcaaatcgctcctgctcctctgcacctatgccctcaccatctcagcagaatacacaggcttcgtgggaacactagacccaaagtccataggcatacaccacaagaaaaccctaagccacttcaggttctactggcacgaagtcttcagcggagaaaaccccacatcggttagaatcattccctcactccccaaatacaacgcaaccacaaccttcggctccgttggaatctttgacacccctttaaccgtgggacctgaggtgtactccaaggttgttggaaaaacctatggcttgtttgccttcacgttatcaacccaatttgacctgttacttgattacaacttcgcgtttaccccaaggaagtacaac

SEQ ID NO: 35035 - DNA, 290 bp, Glycine max
  Clone ID: LIB3053-014-Q1-N1-E3
gtcttctcttctcttctcttctctaggagtgtaattttgttgttgtggttagtgcttccgtgacactcacttgtttgtaacaagtggaggggagtgttataggaacataatttggagggagacatttcagtttcagaaacgttacaaaatatctgttgtgtgtgtgactgtgaaagttaatataactaacaaaatggatacacgaagtgaaatgaggcattcaaagttcaagaggatttgtgtgttctgtgggagtagccccggcaagaaaagtacctaccaagatgctg

SEQ ID NO: 35036 - DNA, 408 bp, Glycine max
  Clone ID: LIB3053-014-Q1-N1-E6
caatccttgttcactctatttcttagctccaacaacatcgctaaaaaaatggcctctctccgttttctcttctttgtttctttcttcattgttttgtcactttccatcaacattggtgaggtccaaggtgcaaatagaaaacttttggcaccaacatttcctgatataggcaacattcctggcgtgcaatatcctcctttccccccagtaaccgattggccagagtacaggttgccatcattcttaagacctaattaccccgcaattcctgcaaattattaccgctacactccccctgccaaaacaaccacaaccacagcttccaagccttgatatgagcacgatatgcatgcaacttggtatatacattattgttatgactgttagcatttcaaataagaggttcat

SEQ ID NO: 35037 - DNA, 406 bp, Glycine max
  unsure (1)..(406): unsure at all n locations
  Clone ID: LIB3053-014-Q1-N1-E7
cgaaaattagggtttgtagtgtagcaggaagaagcagcaatggcgccgaagataacacgtaaggttagcagaaaccctgaattgataaggggaatcggaaagtactcgaggtcgcagatgtaccacaagaggggcatttgggctatcaaggccaaaaacggtggcgttttacctcgccacgaccctaaacccaagcctgaagctcctgctgaaaaaccacccaaattttaccctgctgatgatatcaagaagccccttgtcaacaagcacaaaccgaaaccagctaagctcagggctagcattactcccgggacagtgttgattcttcttgccggtagatttaagggaaagagggtagtctntttgaagcagcttccttctgggttgcttcttgtgactggtcctt

SEQ ID NO: 35038 - DNA, 404 bp, Glycine max
  Clone ID: LIB3053-011-Q1-N1-H11
gcggtcatgaacgaagtggccgaagaggacccgaagagagtgattgaactccacagctactgcaccagcgtctacgaagagggtgatgctcgctctgctcttattgctatgttgcagtccctaaaccatgcaaagaatggagtggacattgtctctggcacacgcgtcatgtctcactttgccaaacccaattggcgcagtgtctacaagcgcattgcgcttaatcatccagatgcccgagttggggtattttactgtgggccatcagccctcacccatgagcttcgtcagctagcattggatttctctcacaacacatccaccaagtacgacttccataaagaaaatttctgacaagataggggaattatcggagatcatgtgaaggatgatgtggcacgagc

SEQ ID NO: 35039 - DNA, 419 bp, Glycine max
  Clone ID: LIB3053-009-Q1-N1-F3
attctctctgtgtatgtccctaactgtcccttcaagatgcagatcgtcgtcaagaccctcagcggcaagaccatcacccttgaggtggaaagctatgacaccatcgacaacgtcaaggccaagatccaggacaaggaaggaatccctccggaccagcaacgtctcattttcgccggaaagcaacttgaggacggccgtacccttgctgactacaacattcagaaggagagtactcttcacctcgtcctccgtctccgtggtggcatgcagatcttcgttaagacactcaccggcaagaccataaccctagaggttgaaagctccgacaccatcgataacgtcaaggccaagatgcaggacaaggagggtatccccccggaccagcaacgtctcatcttcgacggaaagcagctcgagga

SEQ ID NO: 35040 - DNA, 428 bp, Glycine max
  Clone ID: LIB3053-009-Q1-N1-F5
gaagccattgaggtgggttaccgtcattttgacactgctgcagtgtatggaacagaggaagccataggcctagccgtggccaaagccatagacaaaggccttataaagagtagagatgaagttttcatcacttcaaagccttggaacacagatgcacaccgtgaccttattgtcccagctcttaagaccacattaaagaagctggggacggagtatgtggatctttatctgattcattggccagtgaggctgagacatgatcttgaaaatcctactgtttttaccaaggaagatgtgctgccctttgatatagaagggacatggaaagctatggaagagtgttacaagttgggaatagcaaagtccattggcatatgcaattatggtatcaaaaaactcactaaactcttggaaatagccaccattcc

SEQ ID NO: 35041 - DNA, 359 bp, Glycine max
  Clone ID: LIB3053-009-Q1-N1-F7
catgacttgcatagactattgattgctaacgctattgtcggtgattcgctagctccaacaatgggctctagcaaattatcagtcattatagaccttgagcgtgtaaccatctcatacgtgatcattgactaacgggttgctaaagcacgtgctctgccagaaccatccgtattgcctggcaaaggagatatgcctactgacgatcctcatgcactggtggcactactgacatattaggctgttacttttcctgcagagcatgatctaccagcagtatccaaagcaccagttgctgtagtaatagacaataacctccaagtaatccctagagtacctatgatcgatccagacactactac

SEQ ID NO: 35042 - DNA, 358 bp, Glycine max
  unsure (1)..(358): unsure at all n locations
  Clone ID: LIB3053-009-Q1-N1-G10
ctttaggctgtgaatttccctgtggccgtgtttatagcgtctctgctgctttgagtaaaatcatctctaaacttccttctaaggaaaaacaaaaaaaatatggagaaaaggttgtttttggtggtttcaaccctctatttccacatctcttctaggattgagtggcattgaagcttttggcttcaagactagatgaacaatccacattttttttgttctcttcttaaaaggagcaaattctctcaaccttatttgttgtagctacgcttgtnccattcttttagttcctcaattgcttctcgggttggatctatgagcacaaaagcccgcgtggtatatatttatgaattctttttag

SEQ ID NO: 35043 - DNA, 337 bp, Glycine max
  Clone ID: LIB3053-009-Q1-N1-G11
atgttggctaggtaagcgtcctgtagtaagaggagtagtgtatgaaccccgtagaccatccgcatgggggtggtgaagggagggccccaattggtagaaaaaaacccgcaactccttggggttttcctgcacttggaagaagaagtagaaaaaggaagaaatatagtgataatttgattcttcgtcgtcgtactaaatagtagagaaaatagaaattgtttcttcgtctttacaagaaaaaggagtaattaactgtgacacgttcactaaaaaaaaatccttttttgtagcgaatattattagaaaataataacttacacaaagcggaaagattaat

SEQ ID NO: 35044 - DNA, 218 bp, Glycine max
  Clone ID: LIB3053-009-Q1-N1-G12
attagtttggagaacaagtggttggtatcaataaccccttttgtagcatggtgattcccttttttaatgacgttttgggactttttggaacactggggttttggcctttaaagtgttttcttccagtgcagatgagtatcaaacaaaagaggaccccaaggtggaatgggaaaatggattggtatgcaaatcctaagtggtggttggttcatagtatc

SEQ ID NO: 35045 - DNA, 418 bp, Glycine max
  Clone ID: LIB3053-009-Q1-N1-G2
ctcactttgttccgttcagtgcagagaataaaatggctgggatggccggtcaccaattcgcgcaatgcatcacttgccacgcttggagccccgatcaatccatggtggctttatgtccaaacaataatgaagtgcacatctataggttggttgaagacaaatgggaaaaggtgcatgttcttcaaaagcatgaccaggtaatttctgggatagactggagcacaagatcaaatagaatagttactgcatcccatgatcggaattcatatgtctggaaccttgaaggatcagaatgggtgcctactcttgttatccttagactaaaccgtgctgctctatgtgttcaatggagtccaaaagaaaacagatttgcagtgggaagtggagccaaaactgtttgtatatgctactatgagca

SEQ ID NO: 35046 - DNA, 422 bp, Glycine max
  Clone ID: LIB3053-009-Q1-N1-G4
aaattgtagattttttttttgtgatttttgaagatgatccacatggaattgttttcccaatttgaagctcttcccgtattgttaaagtgttggtatatccacaggttaagagggatgtaaatcttttagcacattagttgcagctgcattgtgatttgaaggtcataggttcaatttaaatcctagaaacagtctgttgggacttaggaagttaggatccagttgcaaggcatgagacttgagtcacatattggaagtatggcatgttagtgtgggatttacaacaacagctagtttttgtggtgtggttcttctaaagtttctcatcaatttgtatcagagcctttcactatgtctcccagctgcaaacaagtggtgctggttgcgatgatggcatcactgtgtttgaccggagctagtgc

SEQ ID NO: 35047 - DNA, 422 bp, Glycine max
  Clone ID: LIB3053-009-Q1-N1-G5
aagcaatatagtttgtttaattgttgcttcatttctattgtgtgaatggcatttgggaagttcattatgaatataggggtagtggcaatggttctgggtttatggattcgggttggatttgcacaacaagtaccttgctactttatttttggagactctttggtggataatgggaacaacaaccagcttaactcactggctaaggctaattatctcccttatgggattgacttcgctggtggcccaactggaaggttttccaatggaaaaaccactgttgatgtagtcgctgagcttttgggattcaacggttacattcgtccatatgcaagggctagaggccgagatatacttagtggagtcaattatgcttctgcagctgccggaattagagaagaaactggacagcaactgggaggccg

SEQ ID NO: 35048 - DNA, 399 bp, Glycine max
  Clone ID: LIB3053-009-Q1-N1-G6
tttttcaaaacaaacgccacttcgctggcaagactgttttggatgtggggactggaagtggcattcttgctatatggtcggcacaagcgggtgcgaggaaggtgtatgcagtggaagcaaccaagatgtcagaacatgcgcgtgcacttgtcaaagcgaataatctccaggatgtagttgaggtcattgagggatcgatggaggaaattaccttgccagagaaagttgatgtgatcatctctgaatggatgggttattttcttctgcgtgaatctatgtttgattcagttataaatgctcgtgaccgctggctcaaaccaacaggagtgatgtatcctagtcatgctcgcatgtggatggcacctatccggactgggatagtagatcacaaattgggcg

SEQ ID NO: 35049 - DNA, 422 bp, Glycine max
  Clone ID: LIB3053-009-Q1-N1-G7
cggctcgagaagaaagaaagtgcaacttcctctgttttgctcccctgtttaagccttatcataagcttagaatggcacacaaggaattttccattgccctagtgactctcattgttctctttgtcaacacgaacctccaaggtgccacggctgactatggtggtggttggcagagtgctcatgccactttctatggtgggggtgatgcttctggcacaatgggtggagcatgtgggtatggaaatttgtatagccagggatatggaactgacactgtggctctaagcactgctttgttcaacaatggcttaagctgtggatcttgctatgaaatgagatgtgatgatgacccaagatggtgcaaacctggctctattaccgtcactgctactaacttctgcccaccaaacccatctttgcct

SEQ ID NO: 35050 - DNA, 328 bp, Glycine max
  Clone ID: LIB3053-009-Q1-N1-G8
gctgattcttcttctagtttcaatgaaccatcaacaagcagagtcggagaaccaaaacataagttcttctcatttggtggtaatgaatcctcatgcacacaaatcaaaatgagccaagttgatctacatcaatcaactcaactgcaaccaggtgcacaagagctcatgcctaataataagtttgcaacaaatgaagtggaactgaagaccttgaaaagaaaggcttcagatattgaccttgatttgaatctgtcacttaagttaaattcaaaggtcaatgctgagaaccaaggaagcatggtggaccatgaagttgttgatagcaatc

SEQ ID NO: 35051 - DNA, 317 bp, Glycine max
  Clone ID: LIB3053-009-Q1-N1-G9
gaagttttcaagaaggcaggaacgtatgatgagaagagattgttgggtgttaccacccttgatgttgttagggcaaaaactttctatgctgggaaagccaatgttccagttgctggtgttaatgtacctgttgtgggtggccatgcaggcattactattctgccattattttctcaagccacaccaaaagccaatcttgatgatgatgtcattaaggctcttacaaagaggacacatgatggaggaacagaagttgctagaagcttaaggctggaaaacggttttcctgcaactttgtcaatggcctatgctggtgc

SEQ ID NO: 35052 - DNA, 410 bp, Glycine max
  Clone ID: LIB3053-009-Q1-N1-H1
tcaaaacactcataacacaaagcacaaagcaaagctcatccttgagtgtaaaaaatggcagcagcttcttccatggctctctcatccccatccttggctggcaaggccgtgaagctgggcccatcagccccagaagtgggaagggtgagcatgaggaagaccgtcaccaagcaggtctcctcaggaagcccatggtacggcccagaccgagtcaagtacttgggcccattctctggcgagcccccgtcctacctaaccggtgagttcccaggcgactacggctgggacactgctgggctttccgcagacccagaaaccttcgccaagaaccgtgaactcgaagtgatccactccaggtgggccatgctcggagccttgggctgcgtcttcccggagttgctgtcccgcaa

SEQ ID NO: 35053 - DNA, 197 bp, Glycine max
  Clone ID: LIB3053-009-Q1-N1-H10
cacaatcttattggaccaaatttctccacatgaattctcatctacgttcttccaaagtgtagttaatagacgtgccaagttcctctgtgttctctttgcctcgacactctgcattcaagttccataatggcagcaaccatagcaacaacaatggctatgatcaactcaaagtgcattaacacaacagggtcattaca

SEQ ID NO: 35054 - DNA, 322 bp, Glycine max
  unsure (1)..(322): unsure at all n locations
  Clone ID: LIB3053-009-Q1-N1-H12
cttgcattatagagaaactggccatatcaatttaggaaaattgaggaacttgtaagtgaattggatgttaaagatgttaaagattcaggagaccatgaggcaatggcagctacatctgatggtgttggtgggatggagttgccgcagctggttcaggcaatcctaatgttggattgtaattaaaattaacccctaccctaataaaaaaaagaagaaataaagcaggattgatgaaattcattcaacctttcatttcagcttnttattaatgtcagntgtaaaaanaatatttttaattagtcaatgtcaatcatgtttcagc

SEQ ID NO: 35055 - DNA, 306 bp, Glycine max
  Clone ID: LIB3053-009-Q1-N1-H2
gttgatcaagttgttgggagctcatgttgaagcagtagagggaaggttcacagatgcagcatcagaggcgtttcggtattgggcaggggatttggaaaacaggtaccacttgagtggctcaacggtgggaccacacccgtgtccaaccatggttcgggagtttcagtcagtgatagggaaagaaacgaagatgcaagcattggaaaaatggggtgggaagccaaatgttcttgttgccagcgtaaggacctggtcaaacgctttggggctggttcatgagtttattgcagaccaagattttaaggt

SEQ ID NO: 35056 - DNA, 411 bp, Glycine max
  unsure (1)..(411): unsure at all n locations
  Clone ID: LIB3053-009-Q1-N1-H3
aatagagtaatatccccttctttgcttttctttgaatggaacaagctgggaagcaaggaattatggtgacgtctcagagtcagaaccctatagagcaaatccaagcgcgcttcaaggagttggagactggcttccgcctctggctctccaagcagtccctccccgtcgaggccgccgtcgtcaccaccaccagcgccgcccagggcgccgctatcggcgccttcatgggcaccctcaccgncgacgcctnctccaccttccccacccctccgcccaacgcctctctcaacccccaagccatggcctctcttaaacaagctcaggctctagctggaggccctttagttcaggcgcgaaactttgctgtgatgacgggagtgaacgctgggattntctgtgtcttgaaaagga

SEQ ID NO: 35057 - DNA, 336 bp, Glycine max
  Clone ID: LIB3053-009-Q1-N1-H4
cgaattttcaaattgatccaaaatccttaaagtttatgaagaacaattatggcaagcctgagttggactggcaatatgctgatgattggagcctaccgcatctgcattttaatatctcacacacttcttctttgatagcttgtggagtgactgtgggttcacctattggtattgatgtggaagagaaacaaaggaggttaaagaatgatattttagcctttgcacaacgattcttttctccccatgaaatagaaatgctgactcacattgcaaaccctgaacttcggcttcaggagtttattaaattatggactctgaaggagtcttatgtgaaag

SEQ ID NO: 35058 - DNA, 337 bp, Glycine max
  Clone ID: LIB3053-009-Q1-N1-H6
gcttaatcgaactattcagattctaaaaaatgagttggtggtgggctggagcaatcggtgctgccaagaagaaattcgaggaagaggaaccggcgcgaagcttccagagcgtgggcctggtgatcggcgtgacgggcatagtgggcaacaaccttggcgagatccttcctttcggcgacacccccggcggtccatgggaaggctacggagtcatacgccggccccgtacgtcgtggaacggcgaccattctgtctgggtccatccatggcgacgtttccgatccggccgacgccgaagccaaactttcggccttaaccgacgtaattaacgttttct

SEQ ID NO: 35059 - DNA, 426 bp, Glycine max
  Clone ID: LIB3053-009-Q1-N1-H7
ttcctccctttcactctcgtagacatcacaaaccttcccggcattcatcccacgcatggctgccatgaactctagcgtattggcctgtagctatgccatatcaggtgcagcgtgttcggagctcaatgggaaggtcacttccgtggcctatgttgcatgctctggctacaagttgccattgatcaaagctgaggccagagttcctaaagccaaagaatctgaaggaggaaggagaggtgcccttgttctcttggcagctacccttttcacctctgcagcttccaattcttctgccaatgctgggatcattgaagattaccttgagaggagcaaggccaacaaggaattgaatgacatgaagaggttagctactactggagcaaactatgcaagagcatacaccgtggaattcggtagttgcaagtt

SEQ ID NO: 35060 - DNA, 359 bp, Glycine max
  unsure (1)..(359): unsure at all n locations
  Clone ID: LIB3053-009-Q1-N1-H9
agaagccagtgctaggatttgttagtgaagcaatggctgagaccatgttgctcatgtctagtgtctctagcagttattccgtggatttgaagaaagaccttttcctccaattgcagagtcaaagtttaaggcctaagttctctcagctctcattcaacccacttccatcatcaacttcttccttttcttcaccccgtacattcacaactctggccctcttcaaatctaagaccaaagccgctcctgctaagactaaggttacaaaagccaaagccanaagggggttgaagatggtatctttggcacttctggaggatttggttntactaagcagaacgagctctttgtgggtcgtgttg

SEQ ID NO: 35061 - DNA, 290 bp, Glycine max
  unsure (1)..(290): unsure at all n locations
  Clone ID: LIB3053-010-Q1-N1-A1
gaagcaagtgctggagagttgcgtcttcacanagatataagtgagctgaatctaccaaaatcatgtaccatgcaattccccaatggcaaagatgatctgatgaactttgaagtttcaattcgacctgatgatggatattacttaagtggcacatttttgttttcctttcaagtgtctcccatctatccacacgaagcaccaaaggttaagtgtaagacaaaggtctatcatccaaatattgacttggaaggaaatgtttgtctcaacatcttacgagaagaatggaaacc

SEQ ID NO: 35062 - DNA, 340 bp, Glycine max
  unsure (1)..(340): unsure at all n locations
  Clone ID: LIB3053-010-Q1-N1-A10
agaagaacttgttgcccttctgagttagattttgtgcgggcccttagtcgttgtaagaagtggggagctcagggaggaaagagcaatgttttctttgcaaaaaccctggacgatagatttatcatcaaacaggttacaaaaacagagcttgagtcgtttactaagtttgcaccagcttattttaagtatttatctgagtcaatcagtacaggaagtccaacttgtcttgcgaagatcttggggatttatcnaggtaacatcaaaagcaccttcaaaaggggagggaaggaaacaaagatggatgttttggttatggaaaatcttctttacaagcgtaaca

SEQ ID NO: 35063 - DNA, 338 bp, Glycine max
  Clone ID: LIB3053-010-Q1-N1-A11
ctatgacgccggatgcacgcatccgtgaactcggctcgagcaacacttgtctgggccattgcgtataagtgtaaggcgggcttacgattttggaggactcttataatcagctaaggatgcgtcctactcaggatctgaaggggcgattaaatgtgcaatttcaaggtgaagagggtattgatgctggtggtctcaccagagaatggtatcagctgttgtcgagggtcatatttgataaaagtgctttacttttcacaacagtgggcaacaatgcaactttccaaccaaaccctaattcagtataccagactgaacatctcttcaatacttcaagttgt

SEQ ID NO: 35064 - DNA, 353 bp, Glycine max
  Clone ID: LIB3053-010-Q1-N1-A12
aacaactagtctcagctgaaatggcctcttcagtgatggcatctgtggccctcaaacctgcccctttcactgttgagaagtcctcagtgagaggccttccctctctctcaaggaactcttcttcattcagagttgtggccagtggcaagaagatcaagactgacaaaccttatggaattaatggtggcatggctttgagggatggaactgatgcatctggcaggaaaggaaagggaaagggtgtttaccagtttgtagaccaaatacggtgcctaaaatgtcgatggttacagtcctatctacgacaccaaggactggtctccaaccggtgatgtctacgctggcggtacgac

SEQ ID NO: 35065 - DNA, 409 bp, Glycine max
  Clone ID: LIB3053-010-Q1-N1-A3
aagaaaaattaaatcaacacaataatacatgagcttatggacagagtctaagagtgcattttccacagttgtttgtttaactagaatttacacataaaagcatagctagcatgggcatggagaactgtttacgagtgaccacagtaggcacagccacaccccaatgcctttctccattctttccatcttcaagggataagcttgtcttcccaactcacagaggtttcaagaaatccttgcaaaactcaacactgtcatgcccttctctttactcaaccggtgctgcctatagaaagtcccgttttgtttgcaatgctcgtgaagcagtaaatgaagttaaagtggtgactgactcaagctggaataaccttgtgattgcaagtgagacccctgtgctggtagagttttg

SEQ ID NO: 35066 - DNA, 351 bp, Glycine max
  Clone ID: LIB3053-010-Q1-N1-A4
ctccatttcacactcctccactcacaaacccatcaccggggctgtccaccatttccctttctttccttcttcttcccatggagatccaacaacaactggtgaagttcaagtaccacatcggagtggcactcctcgtgtccctctcggtcttctccgggctccacttcgctccgaggttcctcaacatcctcgcctatttctggccactggttctctccactgcgctttttctcgccctcgttctcttcttcgccaagacgcaaacttcgctcaactccgacgctttccttcccaaacccgccgaggagctcctcgacttcgtcgccggccaccaccacgacccttctctcg

SEQ ID NO: 35067 - DNA, 406 bp, Glycine max
  Clone ID: LIB3053-010-Q1-N1-A7
ctaccatacctgcacgcctactgtagatgatcctctcgctcaataccatattccacattttcaagaaatactgatgcaggaatgttcatatatgaattggaattattccttttcttattaggcctatcctgaagccaaacgaaatgatatcgtaattcctctctgaattccaattccacattttcaagaaataaagaagcaaaaatgttcatatatgaattgtaattatttgttttcttattaagcctatcctgaatccaaaggaaatgagatcggaattcctcggggaattccaattccacattttcaagaaataatgatgcaaaaatgtacatatatgaatcggaattatttgacttcttattatgcctatcctgaaacccaatgaaatgacatccgaattcct

SEQ ID NO: 35068 - DNA, 365 bp, Glycine max
  Clone ID: LIB3053-010-Q1-N1-A9
ctcatgtttgacaggcctaaatttcatgatgaattgaaattatgaatataattacggttaaaattatttcctatcagttttgtgtttatgtttattcctaatttttctgcagacatgtttcttgctcttgataaagatacaaatgggacattaagcaagcaggagctgcgagaatatgcagatgcgactctggctgatatttttattgagagagtatatgatgaacatgttcgacgtggaaagagtggtggtgtggaacgcctcgagagaatggcatttcgagagttttttcctggactttgttttggctttagaaaacatagacacccctgaaggcttgacatactttgttcgatgccttgatc

SEQ ID NO: 35069 - DNA, 353 bp, Glycine max
  Clone ID: LIB3053-010-Q1-N1-B10
atcactttcaaaattccaacttcactcaaaatcagtctgagccagatgcagaaagtgctggcttttgcctttggccattataaagttgtggctccagggattgcgacttcaggagccaaaacatctggcatcatgaaggcagcagtatctgctgaaaagatttgagctgttgctcacggtgttatagcctcagctgaaaaaaccagtatttcagtcatgagaaacagctttctatgaaataatgaggaagcgaaaggtgcaacctgttgggttccccttgccttgggctacatttgcaggcagtattggaacttgtacaagcttgcttttgtatggtgatgggattgagtgtg

SEQ ID NO: 35070 - DNA, 406 bp, Glycine max
  unsure (1)..(406): unsure at all n locations
  Clone ID: LIB3053-010-Q1-N1-B2
cgttgaaacactttcccccttaccattcgtctcctcaatgcctgtcttgtttctcgtcactttgcagcctgagtgttttatctcacaaacaaccataatggaatttcaccaccaggtcctatcaagctggagctcaaggtgggtctgaaacggtgttggtggcttgagagcttaggaagcagtgcagtcagaaagcattctatggactgaaatttattggcagtgaatccaatggccttgttgtctggatcaagagatctattcagcctctttggatgcccgtcggaacctgcaacgtgtctcccgtctcatgtcttaaagatttatgttctttttggagcaatctttaaagatttatgtccactaatntattattacaagtatcttctttgattctagttgcatg

SEQ ID NO: 35071 - DNA, 409 bp, Glycine max
  Clone ID: LIB3053-010-Q1-N1-B3
aatgaccgaatgctattcacttctaaatcttcgatttccgatcggtcccgtcattgatttccgcgcaaaaatcttccccaaacgtttccccaaatccatttcattctcacacccttcatcgaagtttcaactttgtggaatttcccgagctatggaagtggtcgaaggaagtgaagagagtaaagggtcgtcatcccctctaatgaagctcttgttcgtggaaatgggtgtcggctacgatcaacatggacaggacataacggttgcagcaatgagggcttgcagggatgcaatctcttctaattcaatccctgctttccgcagaggttccattcctggtgtcagttttgatcagatgaaattgcagattaaactaggggttcctcattccctccagaattccttggat

SEQ ID NO: 35072 - DNA, 401 bp, Glycine max
  unsure (1)..(401): unsure at all n locations
  Clone ID: LIB3053-010-Q1-N1-B5
gcccaagccctatacaaccaaaccctaacacacacgcaggtgattcagtttccatggctagcctcaaggttgcatttttggctgcagtgctctgcatggttgtggtgagtgcacccatggcacatgcagctatcacgtgcgggcaggtgacgagtagcctggccaattgcatcggttacctccagaagggaggaacgccgtcgtcgggatgctgcaacggagtgaagagcctcaatgccgccgccaagaccaccgccgaccgccagacggcgtgcaactgcctcaagtcggccgccagccaaatctccggcttcaacgccaacaacgccgnctcgctccccggcaaatgcggagtctccatcccctacaagatcagcaccttcaccaactgcgctaccatc

SEQ ID NO: 35073 - DNA, 392 bp, Glycine max
  unsure (1)..(392): unsure at all n locations
  Clone ID: LIB3053-010-Q1-N1-B6
ctgaaagcgaagaagtagagaacaaagaaagagagagagaattgaatgtgaatggggaatcagaagcagaagtggacgcaggacgaagaagatgctctcatcgccggcgttgaaaagcacggccccggaaagtggaagaacattctcaaggatccccaattcgcccctttcctcacttcccgttccaacatcgacctcaaggataaatggcgcaatttgagcgtcagcaacggtgctcagggctccaaagaaaaatctagggttcccaagcttaaagccctccctgctcctcctgctcctaccgncactcctcagaacgccgctcctgctctgcaaaacgcagcatctgatgtcacttccccagatgcttctcagaatgacccagatgccaa

SEQ ID NO: 35074 - DNA, 397 bp, Glycine max
  Clone ID: LIB3053-010-Q1-N1-B7
gagccccaatctcttgagcagcagaatcttcaggccaagccaggtaagcaagcacaacacaaccccgaaatggcttctgcttctgttcccatggctttctcgctgagctctgttatcaacaacaacaagccttcatccgaagccttcttcaggccactacccctacggcaaccaaagaggaccctcttcaccacaaaggcagtgtcaaactccaaggctcaaatcaatgcatctttgaaggagaaggcagttgcaggactcacagcagcttctgtgacagcatctatggtggttccggaggtggctcatgctgctggatatgagttctccccttccctcaagaactttctgctaagcatctttgctggtgggtttgttctagtagccatatttggag

SEQ ID NO: 35075 - DNA, 346 bp, Glycine max
  unsure (1)..(346): unsure at all n locations
  Clone ID: LIB3053-010-Q1-N1-B9
cttaagctctctttgcttgatgagattggatggacacatttggctgcatatgagagacaatggatgcatgtgcgtttccctccaagcttacctcttttctaggacctgcccatcgggaagatgctggacagcaatgttaggactttggaaccatgtccttttcctcaatatttatgtaacactagaccctttacgtgacctatcctttctttttgtgaacatcttggccttggtatttcgaacatggcatgggaactttgccatgccttcagtgtggcttggnccacatcagtggcttcgtaatcccatttatattaattaataataacaaaataaagagtttttc

SEQ ID NO: 35076 - DNA, 350 bp, Glycine max
  unsure (1)..(350): unsure at all n locations
  Clone ID: LIB3053-010-Q1-N1-C10
cttcacctccttagtttcgaaagcatggcttccgtggcggcttccaccgcggctatgtcagaaatccttggaaaccccgttaacctcagatgcgcaaccaggtctgctccatcaccaactacacctgccaccttcaagaccgtcgcacttttctccaagaagaagccagctccacctccaaagaaaaagcctgccgctgtatcccccgccaatgaggaactcgccaagtggtatggtcctgacagaaggatcttcttgcctgagggtctcttggnnaaccgatctgagatccccgagtacttgaccgagaagtgcctggagatatggttatgatccgttggtcttacaag

SEQ ID NO: 35077 - DNA, 361 bp, Glycine max
  unsure (1)..(361): unsure at all n locations
  Clone ID: LIB3053-010-Q1-N1-C11
attccatccattttcaccatctaggccatgttctaatggcaagaaaatgaattcgtttgctccaactaaggcttccatgagaggatcagcggatcagaacttcagtggaaggttggtggatgagagcatgataatactgaggaagaggatccatgagatgaacatgatagagaggaactatgagcctccttcagattggatggattgggagaagcgctattataacaagtatgactccatcatatgtgaagcagtgggagttttgcagtnncccaattgatggnnaacaccaggccaagtttggctcttggggccatggctttggttgcaatcagtgttccaacttcttctgctgtgcttt

SEQ ID NO: 35078 - DNA, 396 bp, Glycine max
  Clone ID: LIB3053-010-Q1-N1-C2
aaaaaccttcccttctcttctcacccccacactcccatcgcacacacccctcgcatccaacaatgtctctcaccattccctccaacctctccaagcccgccgccctccgccccaaactaagcccaaagctaaggtccgccgccacaaccaccatcgtctgcagcaccaccaacaacaacaacaacaacaacgtgtcctccgacctgaaggcgttctccgccgcgctggccctctcctccatcctcctctccgcccctctccccgccggcgccgacatctcggggctcaccccatgcaaggagtcgaagcagttcgcgaagcgtgagaagcagtcgataaagaagctggagtcgtcgctgaagctctacgaggcgggcagcgcccccgcactggcca

SEQ ID NO: 35079 - DNA, 407 bp, Glycine max
  unsure (1)..(407): unsure at all n locations
  Clone ID: LIB3053-010-Q1-N1-C4
attggccaattcggccactctcctctgagaaagcctccagccgctcctccaaagtcccctgcggttcgttcggttattcttcgaaccgttgtctgaagtttacaactcaaaacttcaccgaacgcatttcattcaccaattcgtccaagtctcgtatcaatcaatcagcctatccgtcttgcggttggagagatcggaggggagagcagccatggcgcatcgagtagaccacgagtatgactatctgttcaagatcgttttgatcggagactcaggtgtaggcaaatccaacatcctctccaggttcactcgaaacgagttctgtttggagtccaaatccactatcggagttgagttcgccaccagaactcttcangtagagggtaaaactgtgaaagcacagatct

SEQ ID NO: 35080 - DNA, 400 bp, Glycine max
  Clone ID: LIB3053-010-Q1-N1-C5
ggtgagttcccaggcgactacggctgggacactgctgggctttccgcagacccagaaaccttcgccaagaaccgtgaactcgaagtgatccactccaggtgggccatgctcggagccttgggctgcgtcttcccggagttgctgtcccgcaacggggtgaagttcggagaagccgtgtggttcaaggccgggtcccagatcttcagcgagggtgggctcgactacttgggcaacccaagcctgatccacgcccagagcatcctcgccatctgggccacacaagttatcctaatgggtgccgttgaaggttaccgtattgctggtggccccctcggtgaggtcactgacccaatctacccaggtggcagcttcgacccattgggccttgctgatgacccag

SEQ ID NO: 35081 - DNA, 400 bp, Glycine max
  Clone ID: LIB3053-010-Q1-N1-C7
gatctcttgcgaaaaatgatctgtagggattcttgtagggggttctccgcagaacaagccttgagacatccttggatcttgagtgcgggtgacacggcggaactcacttgagaatgtagctagagagagacatgacctaagttacatggtgcagtgtagctaattttgctccttttgtcttttctctctactgtctcaataaggtggtctactcgtggtggcagaggaaggaacggaacagagcacgcttctgtagatttttgttttgttttaggaatcttatatctgagactctgtatgagtcgagagaatcttgtttttccactctcggtgattttctctctgtgtagtagaaagtgagaaagtgggtgatctcccagactctctcccccctagtaga

SEQ ID NO: 35082 - DNA, 405 bp, Glycine max
  unsure (1)..(405): unsure at all n locations
  Clone ID: LIB3053-010-Q1-N1-C8
aacgtatgatgcattggactcagtagatgaagattggggatttagttcggaaccgacagaggcaaggcccgtctcaaagaaacagaagtttgattctgatgtctttcagctttcaaattctatgtggcctcgtgcacaatacttgcctgaggtcgaaatatacgcgttgccatacgcagttccattttgattcttttggattttttttgtcaataggtggtagctttgaaagtagccgcgagctgtgttctaactgagaaccggtgcttattgcttttttgagagaaaaacaattacatggcatatgggcaaaaagatttcgttatatcttccaaacatgattcatgtaattnttttgtcttccatatcggacgttaatagcanttgtagaatgtacatacatat

SEQ ID NO: 35083 - DNA, 366 bp, Glycine max
  unsure (1)..(366): unsure at all n locations
  Clone ID: LIB3053-010-Q1-N1-C9
tctgtttctcttgctctacttttaccctgtttccagtggaacagatcttcatccaaattaggttttgttttggagaaatgtatgcagagactggtcttttcttcccatatttgcacaacgtctctcacggccttcaccagcttgaggagtactgcaaaacccagaagtccaatgcttcaatggatgaccttgttcagtcttctgccatgtcagagtatgatttggcagctgagggagatctgttcaaagctttcctgaacctatnntattgaagaagcnncaatcattttggacatgtcagcggccatctcaatgatgtcttgtggggaagatgtctcgtcacagggactaaagtccactgatatt

SEQ ID NO: 35084 - DNA, 326 bp, Glycine max
  Clone ID: LIB3053-010-Q1-N1-D1
gcacctactaactcgaattcgctcagcctaccaacttatcattctcacacaaaaacaatggaaggatcttcaagctcttttcctttactgctcaacaaatttcagtgcaaaagatccattaaagcataatcccatctgtgcattctcattccaacacccttacaaacaatcacctttaatatcatttcaaaattatatccttgacgaccataaaacctacatttaaatctcctttaccagaactgttgtcacacactagccctgctcattcatcttcattctcatttcaactaatgccttgacccttgtccatcttcaatcagata

SEQ ID NO: 35085 - DNA, 339 bp, Glycine max
  unsure (1)..(339): unsure at all n locations
  Clone ID: LIB3053-010-Q1-N1-D10
attctttcagcttggctatgatgactcataaacgtcttgattcacccaacagcagcaaaagcccctcccacaaagaccaagatttcccttccaactgatacacaaaatacaaagtatgtctcaattctcctctcgcaatttgcatggatcatgaagactgtgagaaagattcttcagttacaagatattccacggttaccacgggtttgaataatcattttgtttgtgaatgcatgtttggatttccttttatttttttgaattatataggtaagnnccttaaatttccctcagtttttgagttatatatgattcctgatcgatctacatgaatagctt

SEQ ID NO: 35086 - DNA, 351 bp, Glycine max
  unsure (1)..(351): unsure at all n locations
  Clone ID: LIB3053-010-Q1-N1-D11
gttagttgatgagcgggagcgcatgaagaaacaactggagaaaactaaaaatcagaaagaaaaactggaatcattatgccggtcacttcaggcagaaaggaagcaaaattcttcagagaacaagagcaataactcggttcaaacatgaagaagaatcggttccttcttccatctggatggaaatgtatttttctaatagtggcattaatgtgattcttttgcttttttatccatttcaagatttaattgtgtaccttttcttgctttttcacgacaaatntncctgtattggaaagtttgtggaatcttctgcgtcgtcggattatgaaccttcacgaaaaatatgacttt

SEQ ID NO: 35087 - DNA, 310 bp, Glycine max
  Clone ID: LIB3053-010-Q1-N1-D12
cactgaggtaacgtgttattgttccgtttctctgcatgggtgtgaacaatggctacatacgctgtgatgaatcccacaaagcccgggttggaggagtaccaagaacagatccacatgataaggatcaccctttcctccaagcacgtcaaaaacctctagaaggtttgcgcggatttggttcgcggtgcaacggataagagactcagggcgaagggacctgttaagatgcccactaaggttcttaacatcactatccaagaaatcactcctgtcggtcgttatggtaccaacacatgggacagatatgaac

SEQ ID NO: 35088 - DNA, 397 bp, Glycine max
  Clone ID: LIB3053-010-Q1-N1-D3
gaacagcagagaaaccaagttagaagtaaagaaaatcatgggtgctttagccacccttgcttgtggtcaaaccagttccaaccaatggccttgttgaaagttccttctctggaactaacctctctttaaagccctttcgccacagtgtcaaatccaagaacttcaggagtggtgccgtggtagcaaagtatggtgacaagagtgtgtactttgatttggaggatctgggcaacactacagggcagtgggacttgtatggctcagatgcaccttcaccctacaaccctcttcagagcaagttcttcgagacatttgctgctccattcacaaagaggggattgttactcaagtttctgatattgggaggtggttccacccttgcatacttcagtgcaac

SEQ ID NO: 35089 - DNA, 403 bp, Glycine max
  Clone ID: LIB3053-010-Q1-N1-D5
gaagttctactgggcaccaacaagggatgaccgcattggtgtctgcactggaatttttcgcaccgattcaattcctgaacaggacgttgtcaagattgttgacaccttccctggccaatccattgatttctttggtgcactgagggccagagtatatgatgacgaagtgaggaagtggatttctggtgttggtgttgacggcattgggaagaagcttgtgaactcaaaagatggacctccaacctttgagcagcccaagatgactctggagaagctcttgacgtatggtaacatgcttgtccaagaacaagagaatgtcaagagagtccaattggctgacaagtacttgaacgaggctgcacttggaaatgctaacgaggatgctattaacaggggaactttc

SEQ ID NO: 35090 - DNA, 401 bp, Glycine max
  Clone ID: LIB3053-010-Q1-N1-D7
atggaattatcgtatatgccatgatgggattcgattgggccacatcaaagttcttgtggtatcttttcttcatgtacttcactttcttatactacaccttttatggtatgatgaccatggccattacccccaacgcacacgttgctgccatattgtccagtgcattctatgcaatatggagccttttctcaggcttcgttattcccttgtctagaatacctatatggtggaagtggtactattggatctgccctgtggcgtggaccttgaatggattggtggcttcccaatatggagacaacagggacaaacttgagaatggtcaaagggttgaagaatttgtgaagagttattttgggtttgaacatgattttctaggggtagtggcatctgtggtggct

SEQ ID NO: 35091 - DNA, 358 bp, Glycine max
  unsure (1)..(358): unsure at all n locations
  Clone ID: LIB3053-010-Q1-N1-D9
cacaaggcagaaagcaagctcatcctagagttttaaaaatggcagcagcctcctccatggctctctcttccccatccttggctggcaaggccgtgaagctgggcccatcagcccccgaagtcgggagggtcagcatgaggaagaccgtcaccaagcaggcctcctccggaagcccatggtacggcccagaccgcgtcaagtacttgggcccattctctggcgagcccccgtcctacctcactggcgagttcccaggtgaactaccggctgggaccactgctggnggctttcggccgacccagaaaccttcgccagaaaccgtgagctcgaagtgatccactccaggtgggccatgctc

SEQ ID NO: 35092 - DNA, 405 bp, Glycine max
  Clone ID: LIB3053-010-Q1-N1-E1
aacgaaatttcttagacaaaaaacaaggatcagaaccggggaatcaaggtgagggagatggcactagtctctggaggaagatcaacactgaaccctaacgcccctctttacattcctgccgcgtttcgccaagtggaagatttctctccggaatggtggcagctggtgacgacgctgacatggtaccatgactactggctaagccagcagcacgatgagggagccttctacggcgaggacgacgggtttgatggcaatgatgtcgttgatttgcttcctgattcgtttgatcttgatgctggcgaggatctttttgaagagtttataagatcttctgaatcccaagaagaaactggacccaaagtaactgcatgaggcttagagatgaacccatttaaagatcta

SEQ ID NO: 35093 - DNA, 353 bp, Glycine max
  Clone ID: LIB3053-010-Q1-N1-E11
ctgacaagaaatccatcactgactatggttcacctgaggagttcctatctcaggtggattacttgcttggaaaacaagccttctttggccaaactgatgctgagggtggttttgattccaatgctgtggcaactgcaaatatcttggagagttcaacgcctgtcgttgatgggaaacagtactacagtttgactgtgttgacaaggacagctgatggagatgaaggtggcaagcaccagctgattacaagcaacagtgaaagaattggcaaacttatttacatttgcaaggctcaagctggagacaagaggtggtttaagggagcaagaagatttgtggagagcacagcaagt

SEQ ID NO: 35094 - DNA, 63 bp, Glycine max
  Clone ID: LIB3053-010-Q1-N1-E3
gagtaaccaaaaagcttgatctggttacaaaggtgaaaaagtagttaaccccctttaatggac

SEQ ID NO: 35095 - DNA, 404 bp, Glycine max
  Clone ID: LIB3053-010-Q1-N1-E5
tccaagagcaatgttgttgacgatatggtcaacagcaaggccatcctctatgagcccggtgaacatccagaccatgtggttgtcattaagtacgtgccttatgtaggggacagcaagagggccatggatgagtacacttctgagatattcatgggtggaaagaacacaattgtgttgcacaacacatgtgaggattcactgttagctgctcctattatcttggacttggtccttcttgctgagctcagcactcgaatcgagtttaaagctgaaaatgagggaaaattccactcattccacccagttgcgaccatccttagttacctgaccaaggcccctctggttccaccgggtacaccagtggtgaatgcgttgtcaaagcagcgagctatgctggaaaacat

SEQ ID NO: 35096 - DNA, 143 bp, Glycine max
  Clone ID: LIB3053-010-Q1-N1-E6
atttttttatagcaataatagctagttttaagagcaaggtatcactagtcactttcaatttgtacagttttagtatgatttaggatattaagcttgacttgaattggtcaaattttaatttaaaaaagaacaaaattgtcttt

SEQ ID NO: 35097 - DNA, 356 bp, Glycine max
  unsure (1)..(356): unsure at all n locations
  Clone ID: LIB3053-010-Q1-N1-E9
aacaaacaaagcggcttccaatggccactctgcgattcgccttcaccgactcaaccacattgttcaggccttctctaccttccacgcgaaccttctctcgaaaccgaagcctcattgtcaaagcctcttcttcttcttctgacgacttctccaaaagcaggcgacgcttcatcgccgaaaccgccgcactctcggtctcgctccctcagttagcggcgcgtgccgaagacgcgctttcggagtgggaagagagtatancctccctaaatcgaccccgggncgtcgtgcttctcgacatcgcttttgtccccgacgatcccaaccacggttttcttctcgggacgaggcaaaccatt

SEQ ID NO: 35098 - DNA, 370 bp, Glycine max
  Clone ID: LIB3053-010-Q1-N1-F1
ggaaattcagctttcctctaatttgcctatgatggaggcagctgccatgccatggtactgcttggataatgccttcttcttccttcacatgaagcaagaaatgcaaaacctgaatttagctgaaaggtggctttgtaacaccacttttgatcttgaagcttgagcattctccacatcacaaaagctcctaccaattggtccattgatggcaaatgagcacaacataatatcaatattgcaagaagacagaacctgcctagagtggttggatcagcaaccacctcaatctgtcatatatgcttcatttggcagcatggtgtcaacgaaaccaaaccaattcaatgagttagcccttggacttgatctcctc

SEQ ID NO: 35099 - DNA, 405 bp, Glycine max
  Clone ID: LIB3053-010-Q1-N1-F2
ccccgcacttggtctgcttccgcgcgaatgccatcgttggcactcccgccgctgatgggtttctcaaaggaacagcttcttgcgcggttaaaggagcttcaggttccattttcccagtatgagcatcctgttgttttgaccgtcgacgctcaggctcaatatgttggacatttggggggtggcctcagcaagaatttgtttctcaaggacaagaaaagcaggttgtatattgtttctgctttagctggtaccaaagtagatctcaaagtgttatctcagcggcttggtttgggaaaaggtggtctcagaatggcacctgaggaggctttaggtgaagtacttcaggtacccttgggttgtgtcactccatttgcacttgtgaatgaatcagcacgagatgtttca

SEQ ID NO: 35100 - DNA, 165 bp, Glycine max
  Clone ID: LIB3053-010-Q1-N1-F3
gctatgacgtctgcacgctcgtagctgattatcgccggcctgagctccattcttggggggaactggtatatgctatgtctgggaatgttcctccatcccccttcacccgactaaggtaccggggctataatactactactatgctggctactgccgtttcaccgg

SEQ ID NO: 35101 - DNA, 396 bp, Glycine max
  Clone ID: LIB3053-010-Q1-N1-F5
tgtgtactttctattctcataagataactaactcacttggtgtgatagagttctcattctcatggctattaccggcgatattttccggcagagcataacggaaatgcttgcggagtccccttccggtgcgccagaacttcacgttctcgccgtcgatgacagcctcgttgatcgcaaggtgatcgaacggttgctgaagatttcttcctgcaaagtgacggttgtggagagtggaacgcgcgctcttcagtatcttgggttggagggagagaacggttctcttgggtttgatagtgttaaggttaatctcataatgacggattattccatgccggggatgacaggatatgaattactcaagaaaatcaaggagtcttctgtggttagagagattcc

SEQ ID NO: 35102 - DNA, 405 bp, Glycine max
  Clone ID: LIB3053-010-Q1-N1-F6
ttcagcatggaaatctccttggttcatgaacactgttttgtccagccccaggattgatactgaaattacaattgaggattttgggtatttcatgagccctggtgacagaagctatgatgcaatcgggttgatgaaacagatcagtgaacaaactgcggctcaatatgccagcgctcaagagattctgggaaatgagactcctaaggcattaccaaaagatgcttccagaaacgacagggatgaagatcaggaacatatcgatgctcataatcagcatgggaaccattgtcagttggcttcaagtgctctggtggagcgacgtgtacttgacttcagcgaatgtggaactccggtccgaggtgatagcagcaaatcctcagctaagaacttttcaagcccttcttt

SEQ ID NO: 35103 - DNA, 354 bp, Glycine max
  Clone ID: LIB3053-010-Q1-N1-F9
cgccttacctcactttccgaccacaaccatgtcagcgtgcatttcccacaaccttaaacccggcggcatcatggtgtccccttctctgcaccaccgttcctcattccctttgcaactttctttgaaagcacccttctctgcttcccatcctttagtcctcacccgaagactcttccttccttcggtttccggcatctgggacgctctcaccggcggcaacaacaacaatgcccgcgaagccgttctcgcaattcgacgcggaatgcttctttgtccccgccagggtgatgtttcggggtctcttgcggagtttgaccagggcatttcagttggaccctcgtcaaaaggcgtatc

SEQ ID NO: 35104 - DNA, 379 bp, Glycine max
  unsure (1)..(379): unsure at all n locations
  Clone ID: LIB3053-010-Q1-N1-G1
ctcataacacaaagcacaaagcaaagctcatccttgagttaaaaaatggcagcagcttcttccatggctctctcatccccatccttggctggcaaggccgtgaagctgggcccatcagccccagaagtgggaagggtgagcatgaggaagaccgtcaccaagcaggtctcctcaggaagcccatggtacggcccagaccgagtcaagtacttgggcccattctctggcgagcccccgtcctacctaaccggtgagttcccaggcgactacggctgggacactgctgggctttccgcagacccagaaaccttcgccaagaaccgtgaactcgaagtgatccactccaggtgggccatgctncgagccttgggctgcgtct

SEQ ID NO: 35105 - DNA, 356 bp, Glycine max
  unsure (1)..(356): unsure at all n locations
  Clone ID: LIB3053-010-Q1-N1-G11
catttgatgaggaagaattctccaagaagcccacaattgtgaagaagactgtaacagctcctgcaaatgtgaaatcatattctattgctgaactgcagattgctactggcagcttcagtgtggatcaccttgttggtgaggggtcttttgggcgtgtataccatgctcaatttgatggacaggttcttgctgtgaagaagatagattcatctgtccttcccaatgatttgacagatgattttatagnnaaataatttcaaaccattctccaatttacaattcatccaaatgtgacagagcttgtaggttattgctcagagtatggacaacacctcttggtctatgagtttcataaa

SEQ ID NO: 35106 - DNA, 348 bp, Glycine max
  Clone ID: LIB3053-010-Q1-N1-G3
ctcaagcaaccatggcaatggcaacccaagcctctctctgaacgccaaccctctccggtctcaaagccagcgaccgcgccttcgtgccatggaagcaaaactccagcctctccttctccagcccgaagcccctcaagttctccagaacaatcagagcagcagccgccgacgagaccacagaggcaccagcaaaagtagaggctgcaccggtcgggttcaccccaccagaacttgacccaaacaccccttccccgatcttcgggggcagcaccggcgggctcctgcgcaaggcacaggtggaggagttttatgtcattacgtgggactcacccaaagaacagatctttg

SEQ ID NO: 35107 - DNA, 404 bp, Glycine max
  Clone ID: LIB3053-010-Q1-N1-G4
cgaaatttcttagaccaaaaacaagggtcaaaaccgggggattgagttgaggaaagagggcactagtctctggaggaagatcaacactgaaccctaacgcccctctttacattcctgccgcgtttcgccaagtggaggatttctctccggaatggtggcagctggtgacgacgctgacatggtaccatgactactggctaagccagcagcacgatgagggagccttctacggcgaggacgacgggtttgatggcaatgatgtcgttgatttgcttcctgattcgtttgatcttgatgctggcgaggatctttttgaagagtttataagatcttctgaatcccaagaagaaactggacccaaagtaactgcatgaggcttagagatgaacccatttaaagaatct

SEQ ID NO: 35108 - DNA, 382 bp, Glycine max
  unsure (1)..(382): unsure at all n locations
  Clone ID: LIB3053-010-Q1-N1-G7
gtgccaaaatgaaagcccatttggtccttttcttgctcatgattcttgtcaccttcactagcaatgttaacactctctcgattaatcccaaatctaactcttcaattcctcaattgacccaacagaaaaggcctgacaatgagaccatatatagggtgtcaaagcagctatgttggggttgcattgcggagtcactagagtttttgttcaggcacaacttggtgagagcagccaagtgggaacttccactgatgtgggacttccagctggagcaatacgcgaggtggtgggctggtgaaaggaaagcagattgcaagctcgaacattctttcccagaagatggtttcaagcttggagagaacatttattgnggtagtggctc

SEQ ID NO: 35109 - DNA, 407 bp, Glycine max
  Clone ID: LIB3053-010-Q1-N1-G8
ccgaccttctgcatcttcttcttcttcgccggcgaagaagaagaagcccgcacctgctaagccccaacccaagcccaagcctaagcctaagcccaagcccgctgctaaagccaaggacactaaggcaactaagtcaaaggcaccagctaagcccaaggcagctgctaagcctaaagccaaagctccagccaagcccaagcccgcccctaaaccaaaggctgctgctgctgctgcttccaagcccaagcctgctgccgccaagcccaaagggactaagccagctgccaagcccaagcccaagcccgctgctaaaacaaaggctgctgctgccaagcccgcggcaaagcccaaagcgaagcccgccaaggcttcaaggacgtcgacacggacttcaccagggaagaaag

SEQ ID NO: 35110 - DNA, 353 bp, Glycine max
  unsure (1)..(353): unsure at all n locations
  Clone ID: LIB3053-010-Q1-N1-G9
tcactcttgtgttgttgccttcatggccaagccagtgtgcattgaggtatggaacccaagtggcaaatacagagttgttagcaccaaaccaatgcctggaactcgttggatcaatcttctcgttcaaaatgatgttcgccttgaaatatgtaccgagaagaaaacgattctgtcagttgaagacatcattgcttttgattggtgataagtgtgatggagttattggacagnctgactgaagaactggggagaaaaacagttgttcttctactttnntgagcaaaaaggccggaggcaaagctttcagtaacatggctgttggttataacaacgtggatgttgatgctgcaaac

SEQ ID NO: 35111 - DNA, 317 bp, Glycine max
  Clone ID: LIB3053-010-Q1-N1-H1
tcagtgcttgccaaaaaactgttcctgctggcttccaatgtgcatagaactccatcacatgctaggttcattccatcacctgtgtcctcaaattgttgttttgttttagttcttctttgtgctatgacacgtttcattttaataataagctaggtaaacacgtgtttgccttagttagtaaccttttctcttttctagtaaatttggggaactttgattattgtaatttttacttttggggtatattggaggtggaaaatgttaagtagagaaagagagtgacttcctttagggatgattaaacctctgatggcatt

SEQ ID NO: 35112 - DNA, 343 bp, Glycine max
  Clone ID: LIB3053-010-Q1-N1-H12
atcctgtgacagaaatgatttcctcaacagatgtgatagaagagcaaattcgtgtagctatgggagaaaaacttcgatacaaacaggaggatattgtcctcagaggacattctattgaatgccgtatcaatgcagaagatgcttttaagggatttagaccagggccaggtagaattacagcatacttgccatctggaggtccatttgttagaatggatagccatgtttatcctgattatgtggttcctccaagctatgactcccttcttggaaagctttgattgatggctccaacagagaaaagcattgaacgcatgaagggccttgagacactatatcacag

SEQ ID NO: 35113 - DNA, 219 bp, Glycine max
  Clone ID: LIB3053-010-Q1-N1-H3
gctcgtgcctctagggttatcatatctccatttccatttgctcgctctcagtttccaagaatcttaagctatgggaaagtcttacccaaccgtgagcgctgattaccagaaagccggtgagaaagcgaagaagaagctcaaaagcttcatcgctgaaaagagatgcgctcctctaatgctccgtttggcatggcactctgctggaacttacgacgtgag

SEQ ID NO: 35114 - DNA, 404 bp, Glycine max
  Clone ID: LIB3053-010-Q1-N1-H6
agagaagaagatgacagaagcttgtaaaacactggatgagttcatacatgcacgcatagcatctaagagagaggagctaagcaagtacaacgaaaatgaaatgggtgaagctcatcatgttgacttgttaacagctttgatgagagaaggaaaagcacatgacgataaatttctaagggatgctgtgttcaatctatttgtggctggaagagataccataacttcagctctcacgtggttcttttggcttgttgctacaaacccctcagttgaagccaagattctcgaagagatgaaagagaagcttgggaccaaagaaaagtcgcttggggttttaagcgtggaggaagtgaaaaggctggtttatctgcatggtgctatatgtgaagcgttgcgtctctttc

SEQ ID NO: 35115 - DNA, 390 bp, Glycine max
  Clone ID: LIB3053-010-Q1-N1-H8
cgggatagacctgtgccaattcctggctcgggagctgcgctcagtaacatagctcatgttagggacttatcttcaatgcttactcttgctgttgagaatccagaagctgcaaatcagaccattttcaactgtgtgagtgaccgtgcagtgactctaaacggaatagccaaactatgtgctcaagctgcagggcgcccggttaacattgtgcattatgatccaaaagctgttggagttgatgcaaagaaggctttccctttccgcacctatcacttctatgcagaacctagagcagccaaagctaaattgggatggcaatcaaccacaaaccttcctgaagacctaaaagaacggtttgaggagtacgtaaagattgggagagataagaaa

SEQ ID NO: 35116 - DNA, 374 bp, Glycine max
  unsure (1)..(374): unsure at all n locations
  Clone ID: LIB3053-011-Q1-N1-A1
cgcaatactttgcaaatatggagagcagcttatgagacatgttggttaaggttgtggtgttcattctagttcaagccttggtttaccttatcctctccaattcatcaaacgtgttcaacaagaacatgaagaaatctaacagcttcaggccggcacgttcggtgagcattcgccggatgctcgctttgatctctgattttcctccagaagaagaaccctctccttcaccgaagggtgctaaaacaacatcacttcatcaaagtgatcaataattgtaaggatttaattaaattgtggctgcaattacaaattggagacaatttcagcttatcgggtggccatattaaggctcagaaacctncaaatgttgcggc

SEQ ID NO: 35117 - DNA, 401 bp, Glycine max
  Clone ID: LIB3053-011-Q1-N1-A10
ttctggaacaagtagccagtctctctggttgggatatcggaaataggaacacttgttaagctttccaatgaattaggatatcttggttgggaaaagtatccttttgagtgtttgccaccaagttttgagcccgacaaacttgttgagttgattctacctaaaagcaacatcaaacaactttgggaaggcacaaagcctctacctaatttgaggcgtttggatctctctggctccaaaaatctaattaaaatgccatatattggagatgccctatatcttgagagtcttgatctcgaaggatgtatacaactcgaagagatcggtctgtccattgttctttcaccaaaacttacttctctgaatttgagaaattgcaaaagtcttatcaagctgccacagtt

SEQ ID NO: 35118 - DNA, 384 bp, Glycine max
  unsure (1)..(384): unsure at all n locations
  Clone ID: LIB3053-011-Q1-N1-A11
gtgagatacactaagttatcctcataaatacactctaagtaggtggcaagataagtgtctaaccttagtaacattgccacatattgtgttcattttggaattgtgccactaaaattctattcaattcatctatggctgcctcttcttatgctatgcaatcaatcctggcaaaccctttgatccgcatttccagcgggtctagggtgaaccaatttggcgttcctgctttgcacatgagaaggaatgttggcctgagagttaggtccatggctaaggaagaacaaccaagtgagcctgcaaccccagttacaccgncaccatcagtagaacccaagccacagccagtctctgctccttcaccaaaggtgagcactaagttttctg

SEQ ID NO: 35119 - DNA, 395 bp, Glycine max
  Clone ID: LIB3053-011-Q1-N1-A12
gtgagatacactaagttatcctcataaatacactctaatgaggtggcaagataagtgtctaaccttagtaacattgccacatattgtgttcattttggaattgtgccactaaaattctattcaattcatctatggctgcctcttcttatgctatgcaatcaatcctggcaaaccctttgatccgcatttccagcgggtctagggtgaaccaatttggcgttcctgctttgcacatgagaaggaatgttggcctgagagttaggtccatggctaaagaagaacaaccaagtgagcctgcaaccccagttacaccgtcaccatcagtagaacccaagccacagccagtctttgcttcttcaccaaaggtgaacactaaattttctgatgtgttggca

SEQ ID NO: 35120 - DNA, 409 bp, Glycine max
  Clone ID: LIB3053-011-Q1-N1-A2
cactcataacacaaagcacaaagcaaagctcatccttgaggtagaaaatggcagcagcttcttccatggctctctcatccccatccttggctggcaaggccgtgaagctgggcccatcagccccagaagtgggaagggtgagcatgaggaagaccgtcaccaagcaggtctcctcaggaagcccatggtacggcccagaccgagtcaagtacttgggcccattctctggcgagcccccgtcctacctaaccggtgagttcccaggcgactacggctgggacactgctgggctttccgcagacccagaaaccttcggcaagaaccgtgaactcgaaatgatccactccaggtgggccatgctcggagccttgggctgcgtctttccggattgctgtcccgcaacggggtg

SEQ ID NO: 35121 - DNA, 384 bp, Glycine max
  Clone ID: LIB3053-011-Q1-N1-A3
caaccccgcattaaaccctcaccttctttctttcttcctggtcgtcacaaagacacaagctttcttcctcaactaccctacccaacttcttattccactcatcacttcctttgaaattgaaaccaccaaaattgtgttttttttttctccttcactcgtagtaatattttgaaaagtgttgtgctttgggttgagaattgtggcagggcctaatgggtaactgcctagattcttctgccaaggttgatgcagctcagagctccaaatccacttctgcatcaggaatctcaaaaactactccttccagtttatctattccatcatacagtgaaaaaagcaatgcctcaagtcttcccacaccaaggtctgagggtgaaatcttgc

SEQ ID NO: 35122 - DNA, 303 bp, Glycine max
  Clone ID: LIB3053-011-Q1-N1-A4
gtctcatttaatttactggaccacctctttctctttctacttggtcacccataaatcccatatcatatctgccaacccccaaatggctacttcttctcgccactcccctcaattcacccccattctagaggagcgtgaatctgacgacttgagtggccatgacattataagccactccagaagcttacaccctacaacccgcattgtccacaatcacactaaatccaatcacaacaaccacaagaaaaagagatcagattccgaggaagatggcttcggctgttgcaacaagtgcagacctca

SEQ ID NO: 35123 - DNA, 410 bp, Glycine max
  Clone ID: LIB3053-011-Q1-N1-A5
ggcagcagtgcgaagagaaagaaagagaagaagcgcttatgcgaactcggacggaagcactgagttaactcagagcgagtgaaagtgttgctgcgtgatgtctggtggtatcgcccgtggacgcctcaccgaggagcgcaagtcgtggcggaagaaccatccccatggttttgttgcgaagccggagacgctgcccgatggaaccgtgaacttgatggtgtggcattgcactattcccgggaagactgggactgattgggagggtggctacttcccgcttacgctgcactttagtgaagactacccaagcaagccttcaaagtgtaaattcccacaaggtttcttccaccctaatgtttatccttctgggactgtttgcttgtctatacttaatgaggatagtgggtgga

SEQ ID NO: 35124 - DNA, 399 bp, Glycine max
  Clone ID: LIB3053-011-Q1-N1-A7
gaggatgaattggaagcagaacttgaagagttggagggtgctgaattggaagaacagcttcttcagcctgcaactacagctccagctgctccagtgcatgttcccgctgggcggcaacccactcaccctgtgtcttcgaagctcactgctgaggaagatgaattggcggctttgcaggctgagatggcactttgagcaagtccattttctcagctgtgacactattgatttatgctatctattcattaatctggtctaatttggtggtattgcaattaaggtggcagttgaatgaatggtttgtgtgtgcaccaatttcttgttaaatatcaacctttgcacagttgagttcacttgtataataatagtttggaatgaattccctaaagttgcttgtca

SEQ ID NO: 35125 - DNA, 400 bp, Glycine max
  unsure (1)..(400): unsure at all n locations
  Clone ID: LIB3053-011-Q1-N1-A8
caactaaggaataccctttcaaaatggcttcttctgtgtcatccatggtttctaccaccctcctcctaattaccatctgcacactgtcctcacttctgtcagttgcatctgcagcaacagaggagggacgaacaaggccattcaaaagggtctatgcctttggagactctttcacagacactggcaacacccaaaatgcagaaggtccaagtggctttggccatgtttcaaactctccctatggaaccactttctttaaccactccaccaataggtactcagatggtaggcttgtgattgattttgtggctgaagcactttcactgccttacttgcccccctaccgtcatagcaaaggcaatgacancttttgtgttaactttgctgttgctggttccac

SEQ ID NO: 35126 - DNA, 261 bp, Glycine max
  Clone ID: LIB3053-011-Q1-N1-A9
ttctggaacaagtagccagtctctctggttgggatatcagaaataagaacacttgttaagctttccaatgaattaggatatcttggttgggaaaagtatccttttgagtgtttgccaccaagttttgagcccgacaaacttgttgagttgattctacctaaaagcaacatcaaacaactttgggaaggcacaaagcctctacctaatttgaggcgtttggatctctctggctccaaaaatctaaattaaatgccatatatt

SEQ ID NO: 35127 - DNA, 239 bp, Glycine max
  Clone ID: LIB3053-011-Q1-N1-B11
tgcacgcttacattagctgataatttcactcaattccaattcttcattatcaccatataattcataccaaaactgaaatatatccaattttaaacatctctcctcttattacacacaatccttaatccaaactacatgaactcacaactactctacaaactccaactccatattttcaatatataattcaccaaaaatattcatatatcactagaaattatctatacttcttattaacc

SEQ ID NO: 35128 - DNA, 415 bp, Glycine max
  Clone ID: LIB3053-011-Q1-N1-B8
atcaaaagtattgaatgatcgaagcaattgctcatctgatgcatctttattatcctgccatattaaaagactttgttaaacttggtttcattccatatcgtttcaatttttatcctatcttgtcatttctttctattttattttatctttttttttttattttatattttttttataatttttcttttttcttaatattttttaatttttttttttttttttttttttttttttttttttttttttttattttttttcttcttatttttttttatttattttttctttttttgttttttactctttttttttaactttttttttttattattttttttttatttttatttttttttttttattgattttttttttttattatttttttatatttttatttttttttttatttttt

SEQ ID NO: 35129 - DNA, 380 bp, Glycine max
  Clone ID: LIB3053-011-Q1-N1-B9
gcagttggtgcaatagcacctgaaattctaggcaaggctggtctgatccctcaggagacagcactcccatggttcagaaccggtgtgttcccacctgcaggaacctacaactactgggcagactcctacacactgttcgtgtttgagatggcactgatgggatttgcagagcacagaagattccaagactgggccaaaccaggctctatgggcaaacaatacttcctaggactagagaagggtcttggaggttctggtgagccagcttacccaggaggacctttcttcaacccacttggctttggtaaggatgagaagtccttgaaggatttgaagctcaaggaagtgaagaatggaaggttggctatgttggcaatctt

SEQ ID NO: 35130 - DNA, 419 bp, Glycine max
  Clone ID: LIB3053-011-Q1-N1-C10
ctgcagtgcacccagaaagagtagctggtatcataactgtaggcattcctttcatgcttccgggtccctctgctgtggagagccaccttcagcttcccaaagggttttatattactagatggcgggagcctgggagggcagaagcagattttggccgctttcctgtgaaatcagtgataaggaacatctacactctcttctctaaaagtgaggttccaatagcagctgatgatcaagaaatcatggacttgtttgacccatctattcccctacctccttggttctccgaggaagaccttgcaacctatgcatctttatatgaaaaatctggattcagatatgcattgcaggttccttacaggagtatcaatgcggatgctggcttaagtgatgtaaaagttactattccatcacttttg

SEQ ID NO: 35131 - DNA, 116 bp, Glycine max
  Clone ID: LIB3053-011-Q1-N1-C11
cttcactatttccattacgagtatcttatatcataactgtatacatgccttttattctttcgggtccctctactatttatagccaccttcatcttcccaaatgttattatattact

SEQ ID NO: 35132 - DNA, 408 bp, Glycine max
  Clone ID: LIB3053-011-Q1-N1-C12
gtgaatcttataggggtctgaaggtgctaacagagtcggattctctccatatttagtggaatttgcttactctttatcagcaacttaagttactcattgctgtcacgaaaaaaagaaaagaaaaggaaaacatcactttggaaatgtgtcaatccaatgaaggtatgatgcatggccatataagtagggagttatacgcctgcaacttgaaattgtttgttctctactttgactatgcatcaattataccacaaaagattgagaaggtagatattctctattgcaaatcaatctttaacttcaacacaatgtaagctacttccccaactgaaaaataatgatgatagttttattcatgaatcgagatcaaatactgttgctgagttcctctgtgaagatgtgtccgta

SEQ ID NO: 35133 - DNA, 417 bp, Glycine max
  Clone ID: LIB3053-011-Q1-N1-C4
cagaaccacatccccacaagcatgaatgactcagtggacaaactggtaatcttcctagcaaagagagatggcatagacaagctggtgaagacgttccagtacgtgtcaaagctcgtaaactggcacgtggaagccacgcaccccgacacatccaagaggttcaagcaatgggaagtggcctccggcctcagcagaaaagccttcagaaccggaaggttcctcaccggcttcaacgttcttcgcagaaacccaggctccaccctttctctgaggctactagcagtgctctctaatgctggcgagatggtgtatttcttcttcgaccactttctttggttggccagaatcggtaccatagacgcgagcttggcgaagaagatgagcttcatatccgcctttggtgagtctgttgggtat

SEQ ID NO: 35134 - DNA, 335 bp, Glycine max
  Clone ID: LIB3053-011-Q1-N1-C6
tctcattcacgcctgcctaaactctcaatttctttccagcacaaccacattctcacaaacattaattactcaatttacagacgtgttatcttcctatcaaaaagagattgcataaacaaaccttttaaaaccttccaatacctttcaaaactcgtaaacttgcaccttgaaaccactcacccctacacattcaatatgttcaatcaattttaaatttccttctgccttaacataaaatcctttataaccttaaattttccttatccgctttaacatttctttcaaaaacccatgcttcaccctttctttaaactactaacaatccttttaattct

SEQ ID NO: 35135 - DNA, 228 bp, Glycine max
  Clone ID: LIB3053-011-Q1-N1-C8
tccagatcttgcaaaaaaaaaaaaaacacaatggcagggagcgctcccactccacgcgaagagttcgtgtacatggcgaagctggcggagcaggccgagcgctacgaggagatggtggagttcatggagaaggactacgcctacgcctagagctaggagctgaccgtggaagagcgcatcctcctctgcgtaaactacttgaacgccttcagggctcgtagcgccttc

SEQ ID NO: 35136 - DNA, 458 bp, Glycine max
  unsure (1)..(458): unsure at all n locations
  Clone ID: LIB3053-011-Q1-N1-C9
gatcgcgattttccgcccttttttttcctatntaatncgtntaatttgtaattttttgttgtcttttatttatttttttgttatttttatatatttttttttattttttattatattatattatattttattatatatatattttttttattttttttaattttattttttattatttattttattatttatattttatttttttttatattttattatcttatatttttatttttttttattattttatattttattattttttattttaattttttattttttattttattatttttttattattgtttttttttttttttaattttattattttttttttatttatttttattttttattttttttttattatttttatctaatttttttattattatatttttatttatattattatttttatcttatttatatttttattctattttaatttt

SEQ ID NO: 35137 - DNA, 355 bp, Glycine max
  Clone ID: LIB3053-011-Q1-N1-D1
cggctcgagctcgagccgaatcggctcgagttctcattcgctctctactcgttcagaagatgtttctcacaaggactgagtatgaccgaggagtcaacaccttttctcccgaaggccgtttgtttcaggttgagtatgcaatcgaagccatcaagctgggatcaactgcgattgggttgaagaccaaagaaggagttgtccttgcagttgaaaagcgcatcacatcgccgctcctggagcctagtagtgttgagaaaattatggaaattgatgagcacatcggttgtgcaatgagtgggttgattgcagatgctcgaacacttgttgagcatgcacgggtggaaactcagaatca

SEQ ID NO: 35138 - DNA, 398 bp, Glycine max
  unsure (1)..(398): unsure at all n locations
  Clone ID: LIB3053-011-Q1-N1-D10
gagatagctaaaatgggacttgggactctgccactgaggccttctgacagcggtttctcttcaaactcaggacttatacatgacaccaccaatcacagaaaggtcaatagaagcatgaaattcagagtttcagcaaaacaagagaagcaagaagagaagaaaaagcaatctttgttcagcagtgtgactgaagctcttgatttttctcaagtgagatccgctgaggatgctcagcttatagaagaggctagagaagccacaaaatcaggagaaagaatgagtagggaacagtatggagctcttaaaaagaaaattggtggtacatacaaggattttttcaaatcttacgttgaagtggacggtgcatatgttgaagagggctgggttgacanaacatg

SEQ ID NO: 35139 - DNA, 406 bp, Glycine max
  unsure (1)..(406): unsure at all n locations
  Clone ID: LIB3053-011-Q1-N1-D11
gagatagctaaaatgggacttgggactctgccactgacgccttcttacagcggtttctcttcaaactcaggacttatacatgacaccaccaatcacagaaaggtcaatagaagcatgaaattcagagtttcagcaaaacaagagaagcaagaagagaagaaaaagcaatctttgttcagcagtgtgactgaagctcttgatttttctcaagtgagatccgctgaggatgctcagcttatagaagaggctagagaagccacaaaatcaggagaaagaatgagtaaggaacagtatggagctcttagaaggaaaattggtggtacatacaaggattttttcaaatcttacgttgaagtggacggngcatatgttgaagaaggctgggttgacaaaacatgcaaggtgt

SEQ ID NO: 35140 - DNA, 271 bp, Glycine max
  Clone ID: LIB3053-011-Q1-N1-D12
gaggatgacatgtgttgctgagtgaagtgtgaaaggatgaccaattttgttggactaaggttgcacacgaggttgccattgccagtgttgggtgatgtttctgccactgccactttcactactctggcaagagcagtattaaagaagtgggattggagagttaagggtcctcgtcgtatgctattgctccttgtggtgaccttcttgactatagatgctatcaaattcttcattgccttggctaggataacggctggtccctatgtggatg

SEQ ID NO: 35141 - DNA, 441 bp, Glycine max
  Clone ID: LIB3053-011-Q1-N1-D4
ctattaccttgcatgcactcctacattagctcttaatttttctctaacactttctatttttcaccactatttccaccttcacagccggaacctttatcttttttttccttccattttcctttaaatctatttttatgactttcttttcttttaaactcaacctatttattaactattattccatattttttctactttcttttttcttttttaaatttttaacttttattttttaatttttacttttcttatattattctacttatttctaatttcttttttctttttcaatttttttttttccttttattttactaattacctctttatttttttattttttacttttttattataatttttttttaacatttttttttccatttttatttattatatttatttctattttctttataatttttataattttttttttaa

SEQ ID NO: 35142 - DNA, 415 bp, Glycine max
  Clone ID: LIB3053-011-Q1-N1-D6
cactgccagtgtgtcaccaccatggccaccgtcacaaccgagagcctccgccgcgattttccggccatgtgcctcgaaatcgaggtttctgaccggctcttccggtaaactcaaccgggaagtgactatgaggccaatggggtgccctccttctgcctctttcaaggttgaagccaagaagggagagtggttacctggcttggcctccccaacttacctcaatggcactcttcctggtgacaatggatttgaccctctgggactagctgaggacccagagaacttgaggtggtacgttcaagccgagcttgtgaatggacgttgggccatgttgggtgttgcaggaatgctactttctgaggttttcaccaagattggaatcatcaatgcccctcaatggtatgatgcttgggaa

SEQ ID NO: 35143 - DNA, 418 bp, Glycine max
  unsure (1)..(418): unsure at all n locations
  Clone ID: LIB3053-011-Q1-N1-D7
tacaaacgcaagagacataacaatactctaattgacaaattgcagatctaagcactgtaacaagacagtgtctgattcaaaggtcaaccttcgctaatggctagggacagaaactcccgaattggaacgactgtggtgttgttgttatgcttcgtcgctcacttttatgtgctgccactggcagaggccgtgtggttaacactccccacttcggggactaagtgtttgtctgaagaaatccattcaaatgtggtcgttttagccgattactatgttgtcactcaagaaggtgggcttcaaacagtttctgtcaaggtaacgtctccttatggaaataaccttcaccacaatgaaaatgccacgccaggtcaatttgcatttacaacagccganagtgggaactatgtggcatgctttt

SEQ ID NO: 35144 - DNA, 407 bp, Glycine max
  Clone ID: LIB3053-011-Q1-N1-D8
gaacataccaatctacaataaacgatgattctcattatctccctcattttttctcttctctctttctcccatgcttctgtcctagatttctgtgttgcagattatgcaggtcctattggacctgcaggatattcctgcaagaagccttcaaaggtcacagcagatgattttgcttacagtggccttggcattgctggtaacacctcaaacattatcaaagctgcagtgacccctgcatttgatgctcagtttgctggtctcaacggtcttggcatttccgcagcacgtttggacttagcagcaggtggagttataccacttcacactcatcctggagcttcagaattacttgttgtaattgaagggagcatcctagctggattcatttcttctgccaacattgtcta

SEQ ID NO: 35145 - DNA, 396 bp, Glycine max
  unsure (1)..(396): unsure at all n locations
  Clone ID: LIB3053-011-Q1-N1-D9
gagatagctaaaatgggacttgggactctgccactgacgccttcttacagcggtttctcttcaaactcaggacttatacatgacaccaccaatcacagaaaggtcaatagaagcatgaaattcagagtttcagcaaaacaagagaagcaagaagagaagaaaaagcaatctttgttcagcagtgtgactgaagctcttgatttttctcaagtgagatccgctgaggatgctcagcttatagaagaggctagagaagccacaaaatcaggagaaagaatgagtaaggaacagtatggagctcttagaaggaaaatnggtggtacatacaangattntttcaaatcttacgttgaagtggacggngcatatgttgaagagggctgggttgacaaaaca

SEQ ID NO: 35146 - DNA, 165 bp, Glycine max
  Clone ID: LIB3053-011-Q1-N1-E1
attttacttcccttcatcgaagaagtaaattctctgttgtgttaaaattcttaagggcgttaatgaaacatgggcaagggttttgcagaaatagggagccttcctcctcccctttcactagaaagatatctcttcccaacctattgaagcactacatttcagcct

SEQ ID NO: 35147 - DNA, 352 bp, Glycine max
  Clone ID: LIB3053-011-Q1-N1-E10
cacgtggcttcggctattccgcagacccgcatgggtccgatcgcggttgcggttcgcctcgtccagcaagaaggccttgcggccttgttctccggcatctccgccactgtcctccgccagacgctctactccaccacccgtatgggcctctacgacgtcctcaagaccaagtggaccgactccgtcaccggcaccatgccgctcagccgcaagatcgaggccggtctcatcgccggtggcatcggcgccgccgtggggaaccccgccgacgtggccatggtccgaatgcatgcatactggcgcctccctccggcacagcggcgcatctacaaattcttcgtggacgccatca

SEQ ID NO: 35148 - DNA, 416 bp, Glycine max
  Clone ID: LIB3053-011-Q1-N1-E12
caacttattcaggatacatctttgtccagtggttctaagtatcgtatacagcctttggacctcaatattctaaaggaggcttttcaactcaaggaaactgttcccattgatttgcctgctgccgagaaggggattctgactgttgcaggaaaatcaaaaggtgaatctaaagatgaggagaagaagcataaaaaacacaaagacagggacaaagataaggacaaggagcataagaagcacaagcatcgtcaaaaagatcgaagcaaagacaaggaaaaggagaaaaagaaagacaaaaacaggcatcgtgattctagtgctgatccttcaaagaaacacaatgagaagaaaaggaagcatgaatgagatgatgatcttaatgttgtgcacaaacacaaaaaaagtaggttctcatt

SEQ ID NO: 35149 - DNA, 189 bp, Glycine max
  Clone ID: LIB3053-011-Q1-N1-E2
ctcgagccgctcgagccgctcatttgagccaagtttgtataatgtggtgcagaacaatggaggaaacagttctatatgtgtttcatgaacctcctttcttttcctttttggagaactcatttaaggttgtatttggaaaactctatgcttaatttcttttaagcattatatgatgatacttgtgtgact

SEQ ID NO: 35150 - DNA, 409 bp, Glycine max
  Clone ID: LIB3053-011-Q1-N1-E6
cggcgccgcagcgttgatcatcggatcagaccccgacccagcagtggagcggccgatattcgagatgatatcggccgcccagacaatcctgcccgactctgacggtgctatagatgggcaccttcgggaggtgggactcacgttccacctcttgaaagatgtgcccgggatcatctcgaagaacattgagaagagtcttgttgaagcttttgagcccatcgggatcagcgactggaactctatcttctggatcgcacatcccggtggtcccgcgatcctcgatcaagtcgaggagaagctccggctcaagccggagaaactccagtccacccggcatgtgctgagtgagtacggaaacatgtcaagcgcgtgtgttttgttcattctggatgaaatgagggaagaagtc

SEQ ID NO: 35151 - DNA, 397 bp, Glycine max
  unsure (1)..(397): unsure at all n locations
  Clone ID: LIB3053-011-Q1-N1-E9
cacgtggcagcggctattccgcagacccgcgtgggtccgatcgcggttggggttcgcctcgtccagcaagaaggccttgcggccttgttctccggcgtctccgccactgtcctccgccagacgctctactccaccacccgtatgggcctctacgacgtcctcaagaccaagtggaccgactccgtcaccggcaccatgccgctcagccgcaagatcgaagccggtctcatcgccggtggcatcggcgccgccgtggggaaccccggcgacgtggccatggtccgaatgcaagcagactggcgcctnccttcggcacagcggcgcaactacaagtccgtcgtggacgccatcacgcgaatggcgaagcaagaaggcgtcactagcctttggagaggct

SEQ ID NO: 35152 - DNA, 357 bp, Glycine max
  Clone ID: LIB3053-011-Q1-N1-F1
ctttcctaaagaaaattggaacctgcctctgttgttaaagtttgtatttttttttgagtgggtggattgagagaactgtgcaagctttggaacttcttcaaagtctggtacttcaatggctactgaagaggttaataaacttcaatcacttcctccttaccctgagatgatagtgaaagcacttgaagccctgaatgaggctgatggatcgagtaaatcagcgatatcaaagtacatagaaaccacctacggtgagttgccagatgaaactgttttggggagtcacctgaacaagatgaaagagagtggagagcttgcgttcaaacagaacaattacatgaaagctgatccaaatgc

SEQ ID NO: 35153 - DNA, 420 bp, Glycine max
  Clone ID: LIB3053-011-Q1-N1-F10
gttttctcccatccctctcgcgcgctctctctcccatggaatcctgcgctgccattcgatcttttcactatcccataggcactatgtcccatgtgcgagcctcccttgagaagcaggctgtagttcccattcataatgccggatggaactctaaaagtaggcttttcatccagcatttggcatatggtcagaagcacattaattcccacacgaaggggaaaaacacactaatttcatgtggaaaaacagctgaagctatcaacgcatccaaatctgatgcttcttcagataacactccacaaggctcattggagaaaaagcctctgcaaactgctacttttcctaatggatttgaggctttggtattagaggtctgtgatgagactgaaattgctgaactgaaagtaaaggttggagatt

SEQ ID NO: 35154 - DNA, 429 bp, Glycine max
  Clone ID: LIB3053-011-Q1-N1-F12
tacgaccatgcatgcacgcctactctagctgctaattccgctcaatgccaactcctcatcctcaagaactcactatctacaatgggacacagatcaattataatatcttgtcactatatcatacccactatgaaccatatgcaaacctgatttgaaaaccacgctggaactgctattcattatcccatattgaactctattaaattgcttatcatccaatatctgacatatgatcagaatcacattaatttcaacactacacgcaaaatcacactaatttcctttagataaacagctcaagctatcaactcatccaaatctgatgcttcttcagataacactccacatggctcatttcagaaaaagccttttcaaactcctactttttctaatgtattttaagctttcgtatttaaagtctttgattat

SEQ ID NO: 35155 - DNA, 237 bp, Glycine max
  Clone ID: LIB3053-011-Q1-N1-F3
gaaacttatcctaagtttgttttggtgactacatctctgggtggcttacagaagttccttccaaggaaccaaatccaagctgttaccccatgtgagaaaagcaacttgctttcgtatagaaaatgctcacacgcttagacctattgttgttttgatgatcatatatgcttcatctttaactgtgttctaatgatatcgatactatagcacatgcttgttagatcaaaagtattccat

SEQ ID NO: 35156 - DNA, 278 bp, Glycine max
  unsure (1)..(278): unsure at all n locations
  Clone ID: LIB3053-011-Q1-N1-F4
agaaaagttagggttcacaacttttccttttccttttgcttgcnaatctgaatcaaataatcaatcatccattcattattcatcatgtcgtcggcgaagaaaatcacgctgaagagttcggacggcgaggctttcgaggtggaggaggcggtggcgctggagtcgcagactataaagcacatgatcgaggactactgcgccgacagcggcatccctctgccgaacgtgacgagcaagatcctggctaaggttatcgagtactgcaagaagcacgtcta

SEQ ID NO: 35157 - DNA, 328 bp, Glycine max
  Clone ID: LIB3053-011-Q1-N1-G10
gcttgaggtttatgttaatagtccttcacttgaaggagggctaatttaagtgatgtactgattgatcaagagatttggctttgctgcattatcatcaaacgattgtgctatgccctgtgctgtaataatctacttcgatagtctagggtagatgttactgtagacttgatcgtcgttattgaaattcatagtgattttctgtagtatatgtgaacatagtattaatcactggtttgggatgttgtctactttatactttgataatgtcgcaacagtttccgtgaacagtctctctgcatatgcaagggtaactgtgtgtacaatatca

SEQ ID NO: 35158 - DNA, 405 bp, Glycine max
  unsure (1)..(405): unsure at all n locations
  Clone ID: LIB3053-011-Q1-N1-G12
gaatggcatangtaccattcttccacccaacaataagggcacgccattggaggtcggtaaaggaagggtattaaaggagggaagtagggttgctcttgttggttatggaacaatggtccaaagttgtatggaagcagctaaggttcttgaagctcatggcatctcaacaactgtggttgatgcaagattttgtaagcctctagatggagatttgatgaggagactcgctagagagcatgagattcttatcacagttgaagagggatccattggaggatttggttctcatgtttctcattttctaggcttgaatggtcttctagatggtaatctcaagtggcgagccttgacattgcctgacagatatataaaccatgggtctcagacagatcaaattcaaatggc

SEQ ID NO: 35159 - DNA, 422 bp, Glycine max
  Clone ID: LIB3053-011-Q1-N1-G2
cattgcaaaaatggcatcattcaccatgacagcttccatgcttggctgcccagccgtcaccaaccggtcggcagcgacgcagaggagatcagtggtagtgaatgcagccagcaaatctgttgaaggggaaaaggtcagttatgacaacaatggtagcaatgcaaggaggaacttgatgttcgccacggcggcggctgctgtttgctcttttgctgcagggatggcattggcagatgagcctaaaccaggaacctcagaagccaagaaaaagtatgccccggtttgtgtcaccaatcctacagctaggatttgtcgcaattgaggaacttttttggttcacttttggaatttggaaatgtacaatgaatttggtgtaaggctttgatgatttcatttcatcctcactgtactagatgttcata

SEQ ID NO: 35160 - DNA, 416 bp, Glycine max
  unsure (1)..(416): unsure at all n locations
  Clone ID: LIB3053-011-Q1-N1-G3
ctcgctgagctctgttatcaacaacaacaagccttcatccgaagccttcttcaggccactacccctacggcaaccaaagaggaccctcttcaccacaaaggcagtgtcaaactccaaggctcaaatcaatgcatctttgaaggagaaggcagttgcaggactcacagcagcttctgtgacagcatctatggtggttccggaggtggctcatgctgctggatatgagttctccccttccctcaagaactttctgctaagcatctttgctggtgggtttgttctagtagccatatttggagccgttattggggtttccaactttgatccggttaagagaacttaaagcccgcatgctccaatgctntttaatttcatatgtctttttcactactcttctatcctcttctttcatgtat

SEQ ID NO: 35161 - DNA, 166 bp, Glycine max
  Clone ID: LIB3053-011-Q1-N1-G5
gctgaagaagattcagcaagcaagacccctcatttccgtggttaacaaggctgcctctctatcttcccccgagacagcacccagcgtctgcgttcggcttcggctggacaatctggggccgcaaccgggttcgaggaagagggctatgagaaaggctagaggaata

SEQ ID NO: 35162 - DNA, 313 bp, Glycine max
  Clone ID: LIB3053-011-Q1-N1-G6
cggctcgagattctctacattcaacttgcacatgttggattatcaatctagccttgttcgttgtgtgcttggctctttaattatgcttcagtacgtggagtgtcccctattcgacatttatggctttcagtgaacattacccatagattttaaaccacgcatagtactataattactttcgcgagataaaccgctgagtatatagtaggtaaatgggtacaacatgatgcatatccatatccattgtcgctatataatttccacttgtctcttaagtatactgactaatctatttcacctggttatattattc

SEQ ID NO: 35163 - DNA, 138 bp, Glycine max
  Clone ID: LIB3053-011-Q1-N1-G8
tatagcccaagccctatacaaccaaaccctaacacagatgcattttattcagtttccatggctagcctcaaggttgcatttttgtctgcagtgctctgcatggttctggtgagttcacccattgcacatgctgctttt

SEQ ID NO: 35164 - DNA, 314 bp, Glycine max
  Clone ID: LIB3053-011-Q1-N1-H1
ttgcatgcatgcatgcagactctagatgatcgattccctcaatgacaatcacacactcataagaaataaagaatgtttcatgtgtgtgtatgatttagaaggaattagtttgtcttattaatgacgatcctgctgccaccagaagtgatgtcagcggaactccagggggactaacaacaccacattaagaagtaatgaggaggcaaagatcatcaattattaataggtattagttgtcttattatgactattatgctgccacctgatgtgatgtcagcgttactccttggagaattactacacctcattatgaa

SEQ ID NO: 35165 - DNA, 240 bp, Glycine max
  Clone ID: LIB3053-009-Q1-N1-F2
gtatggtagtgtggggcaactcggagtatgaaatgctatgctcatcattatccagcttttgttttcgggtataattgggaaaaggccaaaataaccttttcaaaaagggttttggctggggtcttgaattttccttttcattggaacctatatttgggaaaacctttttttggaaggctttaattccacccctttttacaagtgaacttgaacctaattttaaagggccggtaatggtcc

SEQ ID NO: 35166 - DNA, 210 bp, Glycine max
  Clone ID: LIB3053-007-Q1-N1-E12
gttgtagtggggtttcaggaaccctatgatgtcatattttgtttttttagggtccttttactagagacactgtggaagaaaagtatcttatatatttttcttctggctttatatgtacctctcaagaaatcctatatgctgcttatggatgacttgttattgtgttgtatttacatgatgaatacatactctgcatttgaatgctttcgt

SEQ ID NO: 35167 - DNA, 427 bp, Glycine max
  Clone ID: LIB3053-007-Q1-N1-E2
catgattgccccaacagcctttcagaaaatggctcatcctgagggagaatatgcaacagcaagagctgcatctgctgctggaacaatcatgactttgtcctcatgggctacttccagtgttgaagaggtggcttcaacaggacctggcattcgctttttccagctatatgtgtacaaggacaggaatgtggttgctcagcttgtgagaagagctgaaagggctggattcaaagccattgcccttactgttgataccccaatactaggacgcagagaagctgatatcaagaacagattcacattgccgccatttttgacattgaagaactttgaaggattggaccttggaaagatggacaaagctgatgactctggacttgcttcatatgtttctggtcaaattgatcgtactttaaactgaaggatg

SEQ ID NO: 35168 - DNA, 403 bp, Glycine max
  Clone ID: LIB3053-007-Q1-N1-E3
aaagtgcttaatgaactgtgaagtttcattgattcttgagcacaagtatgagcagcttcaacagacatctgatgatcccatgaatcaaatttctcaggtatttgaaaagtcactgcagtatgtgaaacgtttcagtcgctataaaaatcctgatgctgtcagacaagttcgagaaattctcgcatgatatcaattggctgaatttgagtcgtgtgtccttggcaacctttgcccagaaactgtgtaggaagctattgctatggttccatctatcaagtcaataggactagctcaggatgatgaagcactcgacaaaatgttaaatgacctgtcgttgattaagaaatttgaataaatacgtcaaaatttgtgatggaatggtggtaccgtttaacaacttatc

SEQ ID NO: 35169 - DNA, 421 bp, Glycine max
  Clone ID: LIB3053-007-Q1-N1-E4
ttggtactatgggaacggcattaatgattatctggttcccagagatcaggatttattggacaggcatccttcaccagactattggtcaaactggggaataagtgcaactgaaggttttaattcacctaaaaatctttttatcatggatttctttgaagaaagattcaataatcaaattgagcttgaaccatctctgcatgataaagatcattctagcagttcaagtgtatgtgggggattgcctgagcaatcttttcaacagacagcattttcatgcgatcagcctaattaccagcttcaagatctaccgagattcgaaccgatgaatgacactttcttggattctgtacctgaaggtcttccatgtgttgacgttgaaaacctagacaaatccatcaacatttctcctgaaaaccaatgc

SEQ ID NO: 35170 - DNA, 346 bp, Glycine max
  Clone ID: LIB3053-007-Q1-N1-E5
tgcggagcggcgatcctagcactctcttctgcaggtatcgccgacagcttcattcaccatggctgagcaaaccgagaaggcttttttgaaacaaccaaaagtgtttctcagctcgaagaaaactgggaagggaaagagacccggaaagggtgggaaccgcttttggaaatgcattgggcttggatttaagactcccagggaagccatcgaaggaacctacattgacaagaagtgccccttcactggcaatgtttccatccgtggccgtatcttggctggaacatgtcacagtgctaagatgaacaggactattattgttaggaggaattatcttcattttattaag

SEQ ID NO: 35171 - DNA, 417 bp, Glycine max
  Clone ID: LIB3053-007-Q1-N1-E6
ttggtactatgggaacggcattaatgattatctggttccgagagatcaagatctattagccaggtatgctgcaccaacatatatgactatctgctcaagggctacttccaatggtgaaaaggtggcttcaacaggacctgtcattcacttttttcagctatgtgtgtacaatgacaggaatcttgaaccatcatcttgatgagaagagctcatagggctggattcgaagccattgggcatactgctgataccccaatactaggacgcacagaagctgctatcaagaccagattcacattgccgacatttttgacattgaagaactttgaaggattggaccttggaaagatggacaaagctgatgactctggacttgcttcatatgtttctgggtcaaatggatcgtactttaaactg

SEQ ID NO: 35172 - DNA, 374 bp, Glycine max
  Clone ID: LIB3053-007-Q1-N1-E7
attccattctctctgagtatttccctacctctcccttcaagagcagggcttcgtcaagaccctcaccggcaagaccatcacccttgaggtggaaagctctgacaccatcgacaacgtcaaggccaagatccaggacaaggaaggaatccccccggaccagcaacgtctcattttcgccggaaagcaacttgaggacggccgtacccttgctgactacaacattcagaaggagagtactcttcacctcgtcctccgtctccgtggtggcatgcaaatcttcgctaagacactcaccggccagaccataaccctagaggttgaaagctccgacaccatcgattacgtcaaagccaaaatccaagacaaggaaggta

SEQ ID NO: 35173 - DNA, 164 bp, Glycine max
  Clone ID: LIB3053-007-Q1-N1-E8
cattgctctgttatgcctgcactgtttaaccaagatactggcaacggctccacatgcatcgtctgatgctctcgatctggcaattttgctctatcctgaaatgcacttcaccggggccactgctgactatggcagttgcccggtaggggttgctacctcttttg

SEQ ID NO: 35174 - DNA, 244 bp, Glycine max
  Clone ID: LIB3053-007-Q1-N1-E9
agaaggggcaactaaatcggagaataagattctgtctgggaaattaaatgccaacagattggcaaatgcaggtgcagttactggcagttaaggtggcagttatgagagtcctccacctggtgccaaatgggccttgttgttgcagtttgataaagtccaaggttttgaatgtgtcaggaaactgcattccggggcttcctaaccaaaagtcttcccaaagaatgctcccagttttacaaaacaa

SEQ ID NO: 35175 - DNA, 394 bp, Glycine max
  Clone ID: LIB3053-007-Q1-N1-F1
attccattctctctgtgtatttccctacctctcccttcaagatgcagatcttcgtcaagaccctcaccggcaagaccatcacccttgaggtggaaagctctgacaccatcgacaacgtcaaggccaagatccaggacaaggaaggaatccccccggaccagcaacgtctcattttcgccggaaagcaacttgaggacggccgtacccttgctgactacaacattcagaaggagagtactcttcacctcgtcctccgtctccgtggtggcatgcagatcttcgttaagacactcaccggcaagaccataaccctagaggttgaaagctccgacaccatcgataacgtcaaggccaagatccaagacaaggagggtatccccccggaccagcaacg

SEQ ID NO: 35176 - DNA, 337 bp, Glycine max
  Clone ID: LIB3053-007-Q1-N1-F10
ccctttttgtgaaacaaggtactactcttgacagacacctgcggaagcttcaaaattcccccatcaagtttggctgcatttgttactgtgtccttgcttgtttgcattgtgctctatgaccgtttctttgtgaagatcatgcaaaggtttaccaagaaccccataggcattacccttcttcagaggatgggaattggccttgtaatccacacactgatcatgatcattgcatctgggactgaaagctatagactcaaggttgcaagagaacatggagtagttgaaagtggacggcatgtccctttgagcatattcattttgcttgcttaagttatac

SEQ ID NO: 35177 - DNA, 371 bp, Glycine max
  unsure (1)..(371): unsure at all n locations
  Clone ID: LIB3053-007-Q1-N1-F11
ggttcacgaggaattgaagaagccttattgaaacacttgggagtgaagcgcaatgaagtaacaccagatggtttgttttctgttggagaaatggaatgcatgggatgctgtgtgaatgctcctatgattacagtggctgattattcaaatggatcagagggatatacttataattactttgaagatgtaaccccagagaaagtagttgagatagtagaaaagctgagaaagggtgagaagccaccgcacggcacccaaaatccccgccgaattaagagtggacctgaaggagggaacactactttgttaagtgagcccaagccttctncctgccgtgacctggattcctgctgaagtgtgatatacttttt

SEQ ID NO: 35178 - DNA, 377 bp, Glycine max
  Clone ID: LIB3053-007-Q1-N1-F12
ccgcagaaaaataaaaaaagagtagctagcactagctagctgaacacagtacgagtagtgatcataggcaagcaaaagcatattcataatatggcaaccatggaagacatgaacaacatgagtggtgaaattacacttccaggcttccgattccacccaactgaagaagagcttcttgatttctaccttaaaaacatggttgttggcaagaaacttcgttacgatgtcattggtttcctcaacatctatcagcatgatccatgggacttgcctggtttggcaaaggttggggaaagagagtggtacttcttcgtgccaagggacaaaaagcacggaagcggaggaaggccaaaccgcacaactgaaaaaggttctgg

SEQ ID NO: 35179 - DNA, 423 bp, Glycine max
  Clone ID: LIB3053-007-Q1-N1-F5
ctgaaatagttgtagcaactacaactggaacaggcacaaatgcaactgctgttgctgctaatatagttgttgatgagaggcagatgaatgcactctttcttgatgtggttcgggttagtgaatcatatggattgaagtttcctagagaatttgctcttctcctgaaacagctcttgtactttgaccggtacacacggttgctggctcccaacttgaacatgcttcaggatcagaggatttccattgcttccaatagcagaagcagggtatagagacaatttttaaggagttggtacacaaaatctagatgtaccccatcttagttcaaaatattttatttgtatgattactttggtatataaataaaataatccatagttgtcatgtgagaaccaagctcatttggttgggacatttctttgc

SEQ ID NO: 35180 - DNA, 425 bp, Glycine max
  unsure (1)..(425): unsure at all n locations
  Clone ID: LIB3053-007-Q1-N1-F6
gttcatggctgctccaccggcaagggctcgtgccgattacgattatctcataaagcttctcttgatcggtgacagcggtgttggaaaaagttgcctcctcctgcgtttctccgatgggtctttcaccactagtttcatcacaactataggcattgattttaagataagaaccattgagcttgatggaaaacggatcaagctccaaatttgggatactgcggggcaggagcggtttcggacaattacaactgcttactatcgcggtgctatgggcatattgctagtctatgatgttacagatgaagcatcatttaataatatcaggaattggattcgcaatattgagcaacatgcttcagacaatgttaacaaaatactggtggngaacaaagctgatatggatgaaagcaaaagggctgtgccta

SEQ ID NO: 35181 - DNA, 412 bp, Glycine max
  Clone ID: LIB3053-007-Q1-N1-F7
caaatggaaacattagtgaggtccaatcctggttgccccctcacagtggatcagcagtttgtttgtggagctggagccggagttgctgtttccattcttgcctgcccaactgaattgatcaaatgcaggttacaagcacaaagtgcgcttgccggctccgaaacagctaccgtggctgttaagtatggaggacctatggatgtggccaggcatgttcttaggtcagaagggggcgtgagaggtcttttcaagggcttggttcccactatgggacgtgagatacctggaaatgctataatgtttggtgtatatgaagcattaaagcaaaagtttgcaggaggtactgatacttctggcctaagtagaggttctctgattgttgctggaggcttggctggagcttccttctggt

SEQ ID NO: 35182 - DNA, 427 bp, Glycine max
  Clone ID: LIB3053-007-Q1-N1-F8
gtataaccgggagaaatccccccatgggcgggagaagtccgcatatatgaggaactgggatagaagtcgtcagcatgatcataaattgagaagtccaatgcgtgctgagcagtcgccaccagatcgaagttcgcatcatgatcgcagggattgtaccccaaatttggcagaagcatctccccttcaacgagcgaggaaagactgtcgacaggaatcaagtagtaaaaccttatcaagtgaaaaacatgattcccaaaatagttgcaaggatcgtgaagataagcagattcaaagggagtcaaattgttcaagtacagaatctcaaaatgaaaaaagtgtgcaagttaccattaagtctgttgagaaagacatctgcagtgaacctctaaaggaacagcatagttgcagcccaactgtcagccacaaa

SEQ ID NO: 35183 - DNA, 209 bp, Glycine max
  Clone ID: LIB3053-007-Q1-N1-G1
tgcagttcatttgcctcaatttacaacggcaatgctgagaggattattgaggcaaatgaactgcatatattctcagcattgccgttgtaaattgatttgtatgtattattccaagaatagaactaattctctatttttggtgtaaataatatttgtatttcctttcaataaaataaagaagatgtaaactatggaagacctatagatgt

SEQ ID NO: 35184 - DNA, 334 bp, Glycine max
  Clone ID: LIB3053-007-Q1-N1-G10
gttatttaaggggttaagcagttgaaaatgaatgatgcggctattcaattgactgataatattagtgaagcaaatgctttacttgccttacaatccaagcttaaaaagaatccagggatccaggctgccgctaaatctcatgatattcccatttatgtgacaaagacaagttctttggagcatgtagcaaaagccatacgggcattagtaagtgatcatgaagatggtataaaggattctgaactaacggacaagataaaatcctcagagatgattgatgctttggaagaagcgcgaatggctatagagcatacagtgattctaaagggagaac

SEQ ID NO: 35185 - DNA, 372 bp, Glycine max
  unsure (1)..(372): unsure at all n locations
  Clone ID: LIB3053-007-Q1-N1-G11
ggaaatgcagaaaatgaagaaccttggtagcattggaagcagtgggaggctatcagcagaagagtatgaggatgaggagatttcaaaactggccatctccacatttcaatctaaggaagaggagattgagaggaaaaagacggaagtgagagagaaagttgaacttcaacttggtcgtgctgaagaagagactaggcgcttagcacacatttgggaagagcttgaagttctggatgatcccatgaggaaggaagttgcaatggtacgcaagaagattgacttggctaacaaagatttaaagccactgggacttaacttccagaaaaagggagaagagtataaggaaagccttggaagctntcaacgaaaaga

SEQ ID NO: 35186 - DNA, 249 bp, Glycine max
  Clone ID: LIB3053-007-Q1-N1-G12
atcaaattagttcattctctttgcgcagttccctacctctgctttcaagatgcagatcttcgtcaagaccctcaccggaaagaccatcacccttgaggtggaaagctctgacaccatcgacaacgtcaaggccaagatccaggacaaggaaggaattcccccggatcagcaacgtctcatcttcgccggaaagcagctcgaggacggccgtaccctcgccgactacaacatccagaaggagtcaaccct

SEQ ID NO: 35187 - DNA, 254 bp, Glycine max
  Clone ID: LIB3053-007-Q1-N1-G2
cgcatgcacacgctcgtaatctcgctatacgactcaagcatcttaatattcccactttcttgtttgaccggggctcttggggcttgttttgctgatccaaacttgccagtcgccatatttcgacctgcatatctcgaggatacatctaaccaagcatgcctatcataacttgcgaatgccaaatacacctttcctcgtgatgatcatgggaaccttccctatctttgcatggatcttatataccactatacact

SEQ ID NO: 35188 - DNA, 175 bp, Glycine max
  Clone ID: LIB3053-007-Q1-N1-G4
ctcttgcctttccccattattctaagttcactgtttctcgaattaattaattccctttattatcaaaatggccctggctatggctgcttgcagtcttggacttcacttgagtgctgataacaccttgagaccttttgaaaaaaccaccgtcttgaaggccctctctatctcttat

SEQ ID NO: 35189 - DNA, 416 bp, Glycine max
  Clone ID: LIB3053-007-Q1-N1-G5
gaacgagccagagtaagaaaggagtgtcattcatggcgattgagcaatgaagatccaaggctttctcaccgtcgcaatcccaacgaatcagtttcattggaccaattagcagaattgggtgtgttatactggaagctcaatccaactatctatgagaacgatcaagagttgaccaagattagacaagataggggatacaactacatggacctgcttgatttatgcccagaaaaggtggaaaattatgaacagaagttgaagaacttctacactgagcacattcatcaggatgaagagattcgttattgtttggaaggaagtggctactttgacgtgcgggacaaggatgatcgctggattcgcattttgatcaaagctggtgatcttatcattttaccagcagggaattatcatcg

SEQ ID NO: 35190 - DNA, 367 bp, Glycine max
  Clone ID: LIB3053-007-Q1-N1-G6
gacagaagaacctttttgttgcctctttcttctttgaccgggctgctgaggctggttttgctgatccaaacttgccagtcgcgatagttcgtcctgcagattttgaggatgcagctaagcaagcatgccaaacaaaacttgagaatgccaaatccacttttcctcgtgttgatgaggggaaccttccctatctttgcatggatcttatataccagtatacactactcgttgatgggtttggtatatatccatggcaagagattacattggtgaagaaagttaaatacgacgatgccctggttgaagcagcatggcccctaggcagcgccattgaagctgtgtcatctgcgtaaaattactgggacta

SEQ ID NO: 35191 - DNA, 400 bp, Glycine max
  Clone ID: LIB3053-007-Q1-N1-G7
tagcaaaaaaggtctgggcagaggttttcttctaccttgctgagaacaatgtcctttttgagggtattcttcttaagcctagcatggttacacctggagctgagtccaaggacaaggccagtcctcagacagttgctgattacaccctcaagctccttcacaggagaattccccctgctgtccctggaattatgtttttgtctggtggacagtctgaggttgaagctaccctcaacttgaatgccatgaaccaatctccaaacccgtggcacgtgtcgttctcgtatgccagagccctccaaaacactgccttgaagacatggggaggccgcccagagaatgtgaaggcggcacaagatgcacttcttttccgtgccaagtccaactcgctcgcccagct

SEQ ID NO: 35192 - DNA, 415 bp, Glycine max
  Clone ID: LIB3053-007-Q1-N1-G8
ccaggaccctggaaggtccttagaagagtggggaataggaaatatgtgggtctacatcagcagaatagtatgccatccctcaaggaagttgcccttgagattcttccatctgcttgataaatacttatggtaagcaattctagcttgttatgtgccataactggggaaatccactatggtgtctttttcagagctacaatattgttttaatgtatatgtattagaaaaaacattgacattaacttaagactgctgatttgttgacaccccaaacagtgcagacacctacttggcaccccttatattagctttctttattctttcgtttttcttgtcacatcacattaccaatcttactaaatagaactactatcctactttaaagttgattactatcctactcttcttatctctg

SEQ ID NO: 35193 - DNA, 385 bp, Glycine max
  Clone ID: LIB3053-007-Q1-N1-G9
atcttcgcatagtgaagagcctccgggcaatggggtacgaagtttacatgttacctaaatgtggcctaacctacgtgtccgtggactggattgagccctttgaaaacttctgcaatatattaatgttagacattgtaaatataaattgctgcatttttggatttcgcatattaagttggaccaaatatattactcatcattattattattatatggtatttatttaatgaatcaattagttgcataaattgacaatagtagctactagctaatcatgatcatgatccaaacagatgatgatgtttggaatgaattatggaacatatttacccttgcaatatcttattctttcatagctgccgatgccatgtaggcccttaatttt

SEQ ID NO: 35194 - DNA, 428 bp, Glycine max
  Clone ID: LIB3053-007-Q1-N1-H1
gagaagtggagtgcttgaaacttcgagatcttgcaagcaacgtcataggacctgaagggtccgataaggaatttgaaggctatattgatagcaacctacgtgttgtggagaccttcttgcgtttgttccccattggtctttgtgtcacagctcttgtaattatgctcaagaactctcaggaaaataagtatggctctgttagctacaccgaccttggtgctttcaggtatttggtgcatgccaatggcatttgtgcaggatattcattattttcagccatttttgttgctttgcctcgtctgtcgagcatgcatatagcttggactttctttgtgcttgaccaggttttaacgtacataatcctgtctgctggagctgcatcagcagaagtgttatacctggccgaaaaagggaacatggcaacagca

SEQ ID NO: 35195 - DNA, 325 bp, Glycine max
  Clone ID: LIB3053-007-Q1-N1-H10
tccctggcggcttccaccgcagctatgtcagaaatgcttggaaaccccgtgagcctgagaggcgccaccaggtctgctccatcaccgtctacacctgttactttcaagaccgttgcgcttttctccaagaagaaggcagcaccacctcctccaaagaaaaagcctgctgctgtatcccccgccaatgaggaactcgccaagtggtatggtcctgacagaaggatcttcttgcctgagggtctcttggaccgatcagagatccccgagtacttgaccggagaagtgcctggagattatggttatgacccgtttggtcttagcaaga

SEQ ID NO: 35196 - DNA, 295 bp, Glycine max
  Clone ID: LIB3053-007-Q1-N1-H11
tggcatctccagactaaaattgagaagcaaaaagcaccggctaaggggaaccccatggattcaaacaataaagctatgcctattcagtgtaaagtgtgcaagcggacatacatatgctcctcatctcaactgaactgtaaggagcatgctgaagccaaacaccccaaatctgatctctatgattgttagcctcatcttaaaaagttaaagagttcatgttgacacatgatatcaatatatggcctgttctacaaactatatccacatagatcttcaattactcttaatataaaat

SEQ ID NO: 35197 - DNA, 367 bp, Glycine max
  Clone ID: LIB3053-007-Q1-N1-H12
aaaacaatggttatcttatggtctcgtgcaatggaggactcaaccagatgagagctgcgatatgtgacatggtggctattgctcgatatttaaatgtcacgcttatagttcctgaactggataaaacatccttttgggctgatcccagtgacttccaagacatatttgatgtggatcattttatcacttccttgagagatgaagtgcggatactgaaagagttgcctcccagactcaagctgaaagtggagcgcgggtttctttacaccatgccgcctattagttggtctgatatatcttactataaggatcagattctacccttgatacaaaagtacaaagttgttcatttaaatagaactgatgc

SEQ ID NO: 35198 - DNA, 300 bp, Glycine max
  unsure (1)..(300): unsure at all n locations
  Clone ID: LIB3053-007-Q1-N1-H2
ccgaatgaacactggctatggtgcccgtactccggaggtgaaatgcgcaagttggaggcttgctgtggaagcacacaacatctttggctttgagaccattcctgaagagtgcgttgaagcaacaaaggaatacatccatggcgaacaatatagatcagactccaaaacagttaaccaacaagcttacttttatgccagagacctcgaagtccatcccaaggacacatttgtgttcagtatagatggcaccgtactctctaatattccatactacanaaaacatggatatggngtggagaa

SEQ ID NO: 35199 - DNA, 321 bp, Glycine max
  Clone ID: LIB3053-007-Q1-N1-H4
gctgaagcaacaaaacaggccatcaaacgaaaaattgtgcgggctgcatctatcgatttacagtctcggagtctacctgcaaagcttcgtatagaggctgatgatcctgaggatgtgaaagcttcgaaacgcacgaaaatacatgcctttaagtcaaagatgcggatggagcaacttgaagtcacacataataagcggcaaaatgcttggcagcaatttcagtcaaccataggaaaggcatagaagattggtttcttctctggaagaaaacgggagagtatttttaaatctgctgatgatcctcagggtaaggttggtgtg

SEQ ID NO: 35200 - DNA, 416 bp, Glycine max
  Clone ID: LIB3053-007-Q1-N1-H7
ccacttctgaatctattgaatcaacaatcatgtcggacgaagagcaccatttcgagtccaaggccgacgccggagcctccaaaacctaccctcagcaagccggtaccatccgcaagaacggctacatcgtcatcaaaggccgcccctgcaaggttgtggaagtttcgacttccaaaactggaaagcacggtcacgctaagtgtcactttgttggaattgatattttcactgccaagaaacttgaggatattgtgccctcttctcacaactgcgatgttcctcatgtgaatcgtactgattaccagctcattgatattgctgaggatggatttttgagtctgcttactgaaaatggtaacactaaggatgacctcaagcttcccactgatgagagtctgctcactcagataaaggat

SEQ ID NO: 35201 - DNA, 416 bp, Glycine max
  Clone ID: LIB3053-007-Q1-N1-H8
tctacctctgcatcgtcccacgtggcagctgagttgagatatcaagcagaagaagcactctggttctgaggcgcaacctcgtcccaacaaccatggcggtccctgctacatcctcagcccctgtccttcgacccatccgcaccaatcactccttctcttcccctttccgctctctcccctctcccgccgccagaaaacccctaaccgtcttcgccatggcccccaaaaagaaggtgaacaagtacaatgataagtggaagaaggagtggtttggagcggggatattctacgagggaagcgaagaagtggaggtggacgtgttcaagaagatagagaagaggaaagttttgagcaacgtggagaaagctggcttgctcttcaagcagaagacttgggattcacgctctctttcatag

SEQ ID NO: 35202 - DNA, 295 bp, Glycine max
  Clone ID: LIB3053-007-Q1-N1-H9
cggctcgagaaaggaatcaagatttttcccaataaactatgggtgacatctcacaaatcacctgctgattttgctgccatttcgagaggggacgaacgagacagcaacatatcatctccgaccaaatcccgttcattcaggcagtgttcatttctctgcccctcacttacttattcactcccaactccaaaaccatcatcgtcaatatggcacaagcacacgctctattttctcctttcaatcctcgccttcttccttcttcctcccccattcttccgacgccgttcttttccct

SEQ ID NO: 35203 - DNA, 375 bp, Glycine max
  Clone ID: LIB3053-008-Q1-N1-A1
ggcattccaccttcaacgaaccctgcaactcttcttaaggaagcaatccatgttatcagctgtggttacgaagacaagacagaatggggcaaagagattggatggatctatggctctgtgacagaagatatcttgactgggttcaagatgcatgctcgtggttggatttccatctattgcatgccacctcgcccagcatttaagggttctgctcctatcaatctttctgatcgtctcaatcaggtgcttcggtgggccttgggttcaattgagatctttctaaacaagcattgtcccttgtggtatggctacaatgggaagttgaagcctctgatgaggcttgcttatattaacaccattggctacccgtttacc

SEQ ID NO: 35204 - DNA, 382 bp, Glycine max
  Clone ID: LIB3053-008-Q1-N1-A11
tggaggtgcagcaatggtggaggctcagattctccttcaggaatgcaaccatggtcgtgtgtttccttaacataatcactgcaatcttcttgcttcatgcttttctcacctctgcttacacccgcaacaaattctccaacgctaactcaaactcagctcaactcaattacattaaggaatctgaagagattcgacttgccatgctaccggtggaactgataaaaagagtgagggagattgagcaggaagtatacactgaaccagaaactgcccagaagaaagacacaaagctgactgctgcagttgatctgtctaaaaggttaaaggatttccgttccttgaatgatgctgccagcttgaaagctttggaggaatggccaaa

SEQ ID NO: 35205 - DNA, 403 bp, Glycine max
  Clone ID: LIB3053-008-Q1-N1-A12
ctttgctaagctgatcattggagcacgaagatgcatgggtcaccgtttaaaatcaattaagcctgacaaagggctgatgtccaagtcttttggggatccatatatgggttgggctccttttgtagaagatgttgttgttactcaccagacacggacaggattgccagaagagactttccctaactatgacctctgggagaaccctctgacaccgtgcatgtgtagagcctgattacagcaattttatcgataacaatgggactttactcaagatgcatttgggagaaatatgccatctaagttatgaattctatctatctacagggtaaaccgtggaatctgggcttctgtcaatacaagctttgaggtaggaagggcagtaaatagaattttgaagcagtga

SEQ ID NO: 35206 - DNA, 378 bp, Glycine max
  Clone ID: LIB3053-008-Q1-N1-A2
accaagcttgatattcagattaagttggacaaggaaaagagaattctgtgaattcgagacagaggtatcggtatgacgaatgaggatttgataaagaatttggggacaatagcgaaatctggaacttctgcatttgttgagaagatgcaaacaagtggagatctcaatctgattgggcagtttggagtcggcttctactctgattatcttgtggccgactatgtcgaagttattaacaagaataacgatgatgaacagtatgtatgggaatcaaaagctgatggagcattcgctatttcagaagatacatggaatgaaccacttggacgaggaactgagattagattacacctcatggaagaggcttggggaatactt

SEQ ID NO: 35207 - DNA, 407 bp, Glycine max
  Clone ID: LIB3053-008-Q1-N1-A3
tcacattcaacctccatgttcccaaagctctgcctcctctgccctcttgatcacgtggaacaacttctctcttcttttcttccaagcacaaatcataccacaacaacactagtcctagccaatcactacgtataacatgcagcagccagaaatcaaatcatgatgatgatggcagcctaaagtatacaagtttggcactgcaaataggagtactcttggccttggctgagcagccagtattggctgtgactggagagaataaccggccagaactcctctgggttttgacacaatggggggttggtctctttggatatttccttgtcgtgccaccaataatcatgtactggctttggaaaagatggtacagaagaaacttgctggagatgtatttacaattcatgggg

SEQ ID NO: 35208 - DNA, 412 bp, Glycine max
  Clone ID: LIB3053-008-Q1-N1-A4
ttcaaacctaacgcagcatcgctattctcttcattccatggctttgcccaaccagcaaaccgtggattaccctagtttcaaactcgttatcgtcggcgatggtggcacaggaaagacaacctttgtgaaaaggcatctcaccggagaattcgagaagaaatatgagccaaccatcggtgtggaggttcacccattggattttttcacaaactgtggaaagattcgattttactgctgggatactgctggacaggagaaatttggtggcctcagagatggatactatattcatggacaatgtgctattatcatgtttgatgttactgcccggctaacatacaaaaatgttcccacctggcaccgtgaatctttgcaggtctgtgagaacattccaattggtctttgcagtaac

SEQ ID NO: 35209 - DNA, 395 bp, Glycine max
  Clone ID: LIB3053-008-Q1-N1-A8
ctgtccgaagccacttgagagaaaatggcggtgcgctctgctctcaaagaagatcgtgaagaacacggtaaagaagctcaagaggcctcagagtgacaggacaatttccgtcaagactaactggcgcagaccaaagggtatcgattctcgtgttatgagaaagttcaagggatgcactttgatgccaaacattggttatggctcacacaagaagacccgccactatctgcctaatggcttcaagaaatttgttgttcacaatgtgaaggatttggaactgctcatgatgcacaacaggacttactgtgcttagattgcccacaatatattcacaagaaagagaaaagatattgtccagagagccgtgcaacttgatgttgatgtgacaaacaaaa

SEQ ID NO: 35210 - DNA, 412 bp, Glycine max
  Clone ID: LIB3053-008-Q1-N1-B11
aacgcgcactctctcttttctctcttaacacagagaccctgtcgttcttcgcggtttcgccgattctcgccatgccgaaagccaaatccgacgccaaagccgccgatagccggttgaagcgcaagggcgctggtgctggaaggaagcaatcgaagaaagctgctaaggatcctaacaagccaaagagacctccaagcgctttcttcgttttcatgtccgagttcagagagcagtttaagaaggagcatcctaacaacaaatccgtcgctgttgtcggtaaagctggtggtgacaaatggaaatcgctgtctgatgctgaaaaggcccccttcgttgccacggccgaaaagaagaaacaagagtatgagaaaactattttggcttacaataagaaattggaggggaagaattc

SEQ ID NO: 35211 - DNA, 304 bp, Glycine max
  Clone ID: LIB3053-008-Q1-N1-B2
ggggacgagaacgagagctgcatgcagttcttgaaggacatggaagtgatccaggtccctacctttctcttcatcagagatggcaacattgaaggcaggtacgtcggttctggcaaaggggagctcattggggaaattctcaggtaccaaggtgttcgtgtcacttattaattttcttactacacatacttatttctacttctattaagttcagctcaacaaacacatgtttactaaactttctgagaaaggaacttgctttgctttatagtcaacccctggatgcgtaatattattttgtggt

SEQ ID NO: 35212 - DNA, 323 bp, Glycine max
  Clone ID: LIB3053-008-Q1-N1-B3
tcaaatcccaacaaaaaaccaaagtaatctaacaaagtaagcacaatgagggagatattgcacgtgcaaggtgggcaatgcgggaaccaaatcggttccaagttctgggaagtgatatgcgacgagcatggcatcgaccccaccggaaagtacaccggcgacgaggccttcgatctccaactggagaggatcaacgtctactacaatgaagcctccggcggaaggtacgttccccgggccgtcctcatggatctcgagcccggcaccatggacagcatcagatccggcccatactgcaagatctttcggcccgacaacttcgt

SEQ ID NO: 35213 - DNA, 382 bp, Glycine max
  Clone ID: LIB3053-008-Q1-N1-B4
caacagagctcttttgaacctgaatgggtctggacctggggtttcagctcccagttcatccttctttgggagcagcttgaagaaggttattggctcaagggtccccaacacaaagatttcctctggaagcttcaagattgttgctgtagaagagaagaaagagattgaagagacccagcagaccgacaaggacagatggaagggtcttgcctatgatatctcagacgaccaacaagacatcacaagaggaaagggtttggttgactcccttttccaagctccacaggatgctggaactcactatgctgtcatgagctcctacgagtaccttagcactggacttcgccagtacttgtacaacaacatggatggattttacatt

SEQ ID NO: 35214 - DNA, 413 bp, Glycine max
  Clone ID: LIB3053-008-Q1-N1-B8
tgatgatggtgcccaaaaacgtgagtgcccaaggcataggtgatgacatcgtcacacaagacttcttcaacagcataatcagtcaggctgatgatggttgtgcagggaagaacttctactcacgagatgctttccttaatgctcacaattcctacaatgagtttggtaggcttggtaatcaggatgactccaagcgtgaggttgcagctgctttcgcccatttcacccatgaaacaggacatttttgctacatagaagagattaacggtgcatcatgggactactgtgactagagcaacaccgagtacccatgtgcccctaacaaagcgtactatgggcgtggaccaatccaactatcatggaacttcaactactgaccagcatggcagagcatcggatttgatggattgaac

SEQ ID NO: 35215 - DNA, 400 bp, Glycine max
  Clone ID: LIB3053-008-Q1-N1-B9
tgtgcattattcaatggccaccacagcagctcggtccggggccatggtgagcacctgcttcatgaggaagcaacctatgacgaccaagagcctaaagacattccccaacgctctttttggtctgaaaggtggacgaggaggtcgagtaacttgcatggcctcgtacaaggtgaagctcataaccccagaaggagaagtggagtatgaatgcccagatgatgttctcattgctgacaaggctgaggaagaaggcattgaacttacctactcgtgcagggctggttcttgcgtttcatgtgttgggaaaattgtgaaaggtgacttggaccagtcagatggtagcttccttgatgatgaacaaatagaaagtggatgggttcttacctgagttgctctacct

SEQ ID NO: 35216 - DNA, 237 bp, Glycine max
  Clone ID: LIB3053-008-Q1-N1-C1
gtcaagggcagtggtggaaagagaggcttctctgaaactgcttctggtgatttgaagcttaatctttcttccagtgatgactctgccttagattcaccttcatctgcgtctacagagaagactaccactgctgcacctctttctacttctcgagccaacgaccctgcataaccacctgcataggcacaagttgtgggttggccaccactttggtcatttataaagaacttagttcaa

SEQ ID NO: 35217 - DNA, 207 bp, Glycine max
  Clone ID: LIB3053-008-Q1-N1-C10
gagcaacaaagtcaagcctcttatcgctgctgtgcccaacgcgtgcttgtgtggaaactgtggatgataagaagatagcaaattttcttgatcgtgctgtagcaaatgttggcaggaaaccgttaaaggtttctgttcaagtgaatacaagcggagaaacatccaaatttggtgttgaaccagctctgtgtgtggatcttgtaaaac

SEQ ID NO: 35218 - DNA, 411 bp, Glycine max
  unsure (1)..(411): unsure at all n locations
  Clone ID: LIB3053-008-Q1-N1-C11
cattcccttcacaagattctcacaaacaactcttgagaaagaaagaatggctgccaacacattgatgagttctgccatctcagccttcccatctctcctttcctcctcaaaatccagatttgccgcagcagttcctctttccagctttgttgtcaccaatgcctcttcttctcgcttttccatgagtgctgactggatgcctggccagcctagacccccctaccttgatggttcagcacctggtgactttggattcgaccctcttcgtcttggtgaagtaccagagaatcttgagaggttcaaagagtcagaactcattcactgcagatgggccatgcttgctgttccagggattttggttccagaggcattgggcttaggcaactgggtaaaggctcangaatgggcttc

SEQ ID NO: 35219 - DNA, 251 bp, Glycine max
  Clone ID: LIB3053-008-Q1-N1-C8
gaaacgtctggaaattcgtcaatgagtagcatgacagaggcttctgggaaaaaggaggttcggtttagatcttcctccttcagtgaaggtgctgtgtcagagacatcatttatagatatgctcaaaaaagcccgttcttcttgaggtgtgggttgactcaaatgccacccagggaatcgggagcgagtcatccgatgcagcacaagcagggcgaaacgggaaaaagaaaggtaagaaaggaaaacagattg

SEQ ID NO: 35220 - DNA, 410 bp, Glycine max
  Clone ID: LIB3053-008-Q1-N1-C9
ggagagtcttatgatgatagttgctagtgtggttcccaactatcttatgggcatcattgctggttctggaattcaaggaatcatgcttttacttagtgggttctttaaattgccaaatgatattcctaagccagtttggaagtacccattacactatgttgcttttcatacgtatgccaaccaaggaatgttcaagaacgaatataaaggactaagatttaatacagatcatcaagttggatcaggaggctcacatggttacataagtggtgaagaggttttaagaaatacatggcaagttgacacgagttactcaaagtgggttgatctagcaatcttgattggaatgattgttgtatatcgagttttgtttttggttatcatcaagattaaagagaagatgaagcccc

SEQ ID NO: 35221 - DNA, 424 bp, Glycine max
  Clone ID: LIB3053-008-Q1-N1-D1
gcacactactcaggtgtgcagggcatgcactctatgcatacccaggtgtagccagtgtggtcgctgcatcaatgacagtgaatatgaggaaacattttgtctggaattgctttgttcttcttgttctaagcagctagtcaaatgttcagaaaggggagataggaagattggatcagataaatccgttgttattcatgagcaaaactagggtttttgtcatagtatcccatggaagtctttgtgagaaaaaggtccctgatggaagtcatatgaaatgttgggtgctgttggagttgtgtgacattctgtattttgtctctcggaagtaggattctttcggggattgtcctgttggtagagaaagtgggaaatgacttcatttttgtgtttcttgcagctactagagtgtaatctgcaggaacca

SEQ ID NO: 35222 - DNA, 362 bp, Glycine max
  Clone ID: LIB3053-008-Q1-N1-D11
tcaatttctcaatttggcgcacaacaagctctacggctgtgttcccgacaacctttgccaaattccttctatccgcaacaatgggaatctctctttggcgaacaattatttcaacgaaattggaccttcgtgttggagtttgataaagtccaaggttttggatgtgtcaggaaactgcattccggggcttcctaaccaaaagtctcccaaagaatgctaccagttttacaaaacaaagaaaacatgtccgaacccgaattcattttactacgttccgtgcaaatcgtactgggggaggcagagcaagcccactggttcaccttctgagccagtgacttacaagactctcaaaccacatcgtc

SEQ ID NO: 35223 - DNA, 410 bp, Glycine max
  Clone ID: LIB3053-008-Q1-N1-D12
gtttcggtgaatgatggtccaagttgggccaaatacatgtggatctctggttctcctgatgatgaatatgatatcatcactttgcaatatactgaggagggtttattatctgtagatgagaatagagagggtcgtgctgcagctttcggtgatgatattgcaattgaatgccttgctacagagttcaagcgagagatatatgtggtgcaagcacatggttcagatgccatggtcgatgaagaaaattgtgttttcttccttccacatcgtccaaggagccgaattactgaacctccatttttccttttcatgaaaggaacaggttggtgcggtgctggagctgaccactatgagcccctcattgctcatccttccgcctttgtttcccaagaaaaggttgctgtggtact

SEQ ID NO: 35224 - DNA, 209 bp, Glycine max
  Clone ID: LIB3053-008-Q1-N1-D2
gtcgtgatcttaaagatgcggaattttacaaactgcaagtcaaggctgtgtttaagaatctctcaagaggacattatgaagcatcaaggatgtcagttgaaactggcccttatgtttttcattatattatagaaggacgggtcttttacttgacaatgtgtgatcgtgcataccctaagaaactagcctttcaatatcttgaagagctc

SEQ ID NO: 35225 - DNA, 265 bp, Glycine max
  Clone ID: LIB3053-008-Q1-N1-D4
cactgacctatcttggtagagatttgaagtttaaaccttggaattaatcaaaccattttaatttgcctttagattctgagtcactgctgctatggcgctactcgtacttcttgtgttggggatgttgctgatgttgtgccttgttaaggtttcatctgatccaaagatagaagaagaaatactggaagcagaagatgaactgcattttcgcgatttcgagccatgtatcgtgagagacgcgaacagaatgcttttgcaagatatt

SEQ ID NO: 35226 - DNA, 414 bp, Glycine max
  Clone ID: LIB3053-008-Q1-N1-D6
agaagccatggcctcatttgcacgtggagccgcgtctttaacccgcattggtctttccacttccaagactccccttcaactcatccaccgccgtggcctcgccgatcaccatggccctcccaaagttgcctgctggaaagatccaatgagcccatctaaatggaaggaggagcactttgtgattgtctctttaactggttggggactactcatctatgggggatacaagttggccacaggaggcaagggcaagaaagaagaggaattggtcaaagcataacactgaagtttggagaatattaaaaatacaaagtgttcttggtaataatgctgctagcgcccatacttttccaagtttttcagactcggtcttgtttgatggcagacagatcttttggctagttattcattaat

SEQ ID NO: 35227 - DNA, 412 bp, Glycine max
  Clone ID: LIB3053-008-Q1-N1-D7
ggcttccttggcttctcacagggtgcaactctttcagcacttttgataggttaccaggcacagggaaaggtgctaaaggagcatccacccataaaatttttcatatcaatatcaggaagcaaatttagagatcccagcatatgcgatgttgcctacaaagaccccatcaaagctaaatctgttcacttcattggggaaaaagattggctgaaactgccttcagaggatctagcgtctgcatttgacaaacccttcataataaggcatccccaaagtcacaccgtcccacgattagatgaagtggctatcagtcaattgagaaaatggattacagaagaagtcctttgtcaaccaaaagttgaggtctcagtttgtgagcgtgaaacagaccatgaagaaaagatgtcagaga

SEQ ID NO: 35228 - DNA, 391 bp, Glycine max
  Clone ID: LIB3053-008-Q1-N1-D8
tggcgctgctcaaggtacacgcacccacacccagacccacatctgcctctgctcaactgcaatggcgctgcagtgtaagtgtggcacccaccactctggcgtttcccaattcctactccatttctgcggaaagaggaatgaagagaatggaattggagggtgaaatgcagcagcagcagtgcggagattgagaaaggggctgcgagttttgggcccgggagcccagtgagagcaaccaacattctggtggttggagcgactggaaccctgggaaggcatattgtgcgactggcactcgacgaaggctacgacgttaggtgtctggtcatgcccaggcccgctcctgcctacttccttcgcgatgggggagcaacatttgtgaatgctgacc

SEQ ID NO: 35229 - DNA, 422 bp, Glycine max
  Clone ID: LIB3053-008-Q1-N1-D9
cgagaaaggagaagaagagaatcataagaaagcaagaaagaaaatgggagtggagaagcagttgttgaggcctggcaccggtcccaagccaattcccggtcagaacgtcaccgttcactgcactggtttcgggaagaacggtgacctttctcagaaattctggagcaccaaggatcctggccaggaccctttcactttcaaaatcggccaaggttctgttatcaaaggatgggatgaaggtgtgcttggcatgcaaattggtgaagttgctcgtctccggtgctctccggattatgcttatggtgctggtggctttccttcttgggggatacagcccaactctgtcttggaatttgaaatcgaagtcttgagtgcacaatgaaaaccttggtagtctgtctctgtcctaagaattaaatcat

SEQ ID NO: 35230 - DNA, 418 bp, Glycine max
  unsure (1)..(418): unsure at all n locations
  Clone ID: LIB3053-008-Q1-N1-E1
caacacaacgcgcactctctcttttctctcttaacacaaagaccctatcgttcttcgcggtttcgccgattctcgccatgccgaaagccaaatccgacgccaaagccgccgatagccggttgaagcgcaagggcgctggtgctggaaggaagcaatcgaagaaagctgctaaggatcctaacaagccaaagagacctccaagcgctttcttcgttttcatgtccgagttcagagagcagtttaagaaggagcatcctaacaacaaatccgtcgctgttgtcggtaaagctggtggtgacaaatggaaatcgctgtctgatgctgaaaaggcccccttcgttgccacggccgaaaagaagaaacaagagtatgagaaaactantttggcttaacataagaaattggaagggaagaattc

SEQ ID NO: 35231 - DNA, 81 bp, Glycine max
  Clone ID: LIB3053-008-Q1-N1-E11
ctcgctcgttcgctcaaacctcacacacaacggacacagcgcgcactcttttgctctctcttaacacataaaccctatagt

SEQ ID NO: 35232 - DNA, 408 bp, Glycine max
  Clone ID: LIB3053-008-Q1-N1-E12
tcgagagcagtgctattgttggctatgtgtgtgcttccggccatggttgtggccattcgcccagcaaagaaccctttttgcgtgaagggtcgcgtctactgtgacccttgccgtgctggttttgagacctcagcaaccacctacattgccggtgctgagattatgttgcaatgcaagagcagggttagcaacgaggttgtgtacaccaagaaggggtacactgactcaactggagcatacacaatgtacgtggacgaggatcacgcagatcaaatatgcagtgccaagcttgtaagcagccctcaccctcaatgcaaggaagtcaccccgggccgcgacgaagccgtcgttattctcacccgctacaacggcattgcatccgatgataggttcggcaatgccatgggc

SEQ ID NO: 35233 - DNA, 405 bp, Glycine max
  Clone ID: LIB3053-008-Q1-N1-E2
tgtagtatcacttttgtctcggaatttgttcttttgagttatggcaagcttaaaggttgcatgtgtggttttgatgtgcatggctgtgatgagtgcaccaatgatggtgcaagccgtgtcatgcaatgatgtttctgtgaacctagcaccgtgcctatcttacctgatgcagggtggagatgttccagaatcgtgctgtagcggagtgaggaacattctgggttctgccagcaccacctttgacaaacaaaccgtgtgcaaatgtcttcagcaagctgctaataactatggcatcaacgacgaatacgctcaggcactccccgcccgctgcaatgtcagcgtcccttacaagatcagccgatccaccaactgcgactccatcaagttctaaaggagcgggtagct

SEQ ID NO: 35234 - DNA, 274 bp, Glycine max
  Clone ID: LIB3053-008-Q1-N1-E3
aattaagagcaacagtaaatctgcctaagggaaccggaaagcccgttaaagtggctgttcttactcaaggtgaaaaattcgatgaagcaaaaaatgcaggagctgatttggtgggtggagaggatctgatagaacagataaaagcaggattcatggagtttgataaactaattgcttctccagatatgatgcctaaggttgctagcctagggaagatttttggaccaagatgactgatgccaaacctaaaagctggcactgtaacacccaatat

SEQ ID NO: 35235 - DNA, 414 bp, Glycine max
  Clone ID: LIB3053-008-Q1-N1-E7
caatgtatactaggcttcgacatttttttgcaactatttataacaggatgcaggtgaaaccaaataaacaaccagttattgtttctgtgccaatatgccattatgatgatactgaatcagccaaagcatctaggcaacagcttaaagaggcaatttatgcttccttgtttgacatgaatgttcctgctgtttgcgccgtcaaccaggccactctagctctgtatgctgcaaaacgaacttctggaatagttgttaatataggttttcaagtcacgtctatagttccaattttaaacggtaaagtaatgcgcaaggtgggtgtggaagttgtggggctgggagcactgaaacttacaggatttcttaaggagaagatgcaactgaataatttaagttttcaatctttatacactg

SEQ ID NO: 35236 - DNA, 377 bp, Glycine max
  Clone ID: LIB3053-008-Q1-N1-E9
cctaagggttactgggacaatcttgaaaatttgcaggaagagataagtcggtttcaaaggagctggggcatagacccttcatttatgcccagtataaagtcatttgaacgtgcacggcgatatgatattgcacgtgcactggaaaagtggggtggactacacgaggtttctcgccttctgtcgctcaaggtaagacaacggagcagacaggacaaccttgctaaggataagaggagtgatcatacagatagtgaaatgaagacaccatgtattcctcaagacacacaaaagtggcttacaaaactaaaacagtttgacatgaattggtttgagtaaaagaggattgattttatattgtgtatacccgtgttagtgtg

SEQ ID NO: 35237 - DNA, 387 bp, Glycine max
  Clone ID: LIB3053-008-Q1-N1-F1
tctctgtctaatctctttcggtcaagctctgagaaatttggctacaacttgggtttgatgaagtcttattcttgaacctagagtatttccataattaggagctatatgtaatgctttaatttgtaaacagtagatcttagtttagcctaggtagtctgctttgaatcccattgcaatgctttacggtagatctttctagatttggtgtaagttgtaattagatgtcagattctagagtttgatctaagcatgtttctaagtgaattggatattaatatgcctttgttacattcttctcagactctaattagatgtcaagctgtagagtttgatctaggcatgtttcttggtgaattgtatattaatatgcctgtgttacattcttct

SEQ ID NO: 35238 - DNA, 424 bp, Glycine max
  Clone ID: LIB3053-008-Q1-N1-F10
attttcctttttagctttgattagagtggcctagttgttgtttttctcaatgagaagggtttccactatgcattgcgcactttggcgcttctgtgttcccttgttgctacttgctagcttcagttatgctccttttgttttggccactgaaatttcagggaatgaagtgagcactgatggaaaggttttaaatgaagagttagcaaaacctaatctacaaggacatgatgaagaagcaaagtttaaaggatttattccaaagccaattcccatagtgaagcctattccaaaaccatttcccatcattaagcctattccaaagataattcctatcgccaaacctattcctattccgatttataagcctatatcaaaatcaattcccattattaagcctgttccaaagataattcccattattaaa

SEQ ID NO: 35239 - DNA, 399 bp, Glycine max
  Clone ID: LIB3053-008-Q1-N1-F11
ctcgagccgaggcaagcgcttctcctctttgtgttctggctatgcttcttggcaagagttagatcggacgaggattgcgtgtacacggtgtacgttcggacgggttcgatcatcaagggaggcaccgattcagtaattggtctgaagctatacgacaagtccggctacggcatatacatcaccaacctcgaggcatggggcgggttaatggatccgggtcacaactactacgagcggggcaacctcgacatattcagtggtagaggcccttgcttggaagcacccgtttgcgaggccaacctaacttctgacgggtcggggccccatcacggctggtacgttaattacgtcgaggtcaccaccactggggtccacgcgccttgttctcagcagcagttc

SEQ ID NO: 35240 - DNA, 411 bp, Glycine max
  Clone ID: LIB3053-008-Q1-N1-F12
tgacacccacctaaaccatggcttcccacttcgtcaaatccctccttctcctctccacctatgccctcaccatctcagcagaatacacaggcttcgtgggaacactagacccaaagtccataggcatacaccacaggaaaaccctaagccacttcaggttctactggcacgaagtcttcagcggagaaaaccccacatcggttagaatcattccctcactccccaaatacaacgcaaccacaaccttcggctccgttggaatctttgacacccctttaaccgtgggacctgaggtgtactccaaggttgtcggaaaagccgagggcttgtttgcctccacgtcacaaacgcagtttgacctgttactgatttacaacttcgcgttgacccaagggaagtacaacggcagca

SEQ ID NO: 35241 - DNA, 379 bp, Glycine max
  Clone ID: LIB3053-008-Q1-N1-F3
aaaaaaggacattcattcatctatggctacccttattgctcgccagcaaccactctccccaagaagatgctgaagctctcagaaaggcttttgaaggatggggaactgatgagaacactgtcatagtaattttgggtcatagaactgtgtatcagaggcagcaaatcagaagagtttatgaggaaatttaccaggaggatcttgtgaagcgcctagagtctgagatcaaaggagactttgagaaagccgtgtaccgatggatactggaacctgcagatcgtgatgctgttttggccaatgttgccatcaagagtggcaaaaactacaatgtcattgtggaaattgccactatcctcgtccccgaagaacttttggcggt

SEQ ID NO: 35242 - DNA, 412 bp, Glycine max
  Clone ID: LIB3053-008-Q1-N1-F6
cgagttgcgtagaacaccaagaacacccgaggctgtattttctgagcgtctgctgtcaaggctataccgtttaaagcaaacccataacagatatcagcatatggacacattcttgggggaaattctaggcgcagttgtcttggctgagagccattcaggtcttaatccaaaatttgaggcgaaggcagttaaagttttggctgatggcaatgaatcaagtgatggaaaaactgtggtagatgagaaaggtggaaaactaatgagaattttaagcagtgtggatgcaaaggcttatcatagtttgtatgcaaaaaagcttggcgatgagaaccaatcagctaagataggcagctttgaagaacagcggagaaaatggagtcatcctcacattataaattagagatcacttcac

SEQ ID NO: 35243 - DNA, 379 bp, Glycine max
  Clone ID: LIB3053-008-Q1-N1-G1
ctcactacaagctgcagctaccttcatgcaacccaccaaggttggcatagcctctcgcaacctcaaatctacacaatgcatttctaaggcttttggcttggaacctgctgcagctaaactcacttgctcccttcagcctgatctcaaagaatttgctcaaaaatgtgtcgacgctaccaaaattgcaggattcgcccttgccacctctgctctcgttgtttctggagcaagtgcaaaaggtgttccaaaaaggctaaccttcgacgaaatccagagcaagacatacttggaagtgaaaggaactggaactgctaaccagtgcccaaccattgaaagtggagtggactcattcgccttcaaaccaggggaatacaacgcc

SEQ ID NO: 35244 - DNA, 219 bp, Glycine max
  Clone ID: LIB3053-008-Q1-N1-G10
attatataaggtgataatctgttcacaatgaattatgcgggtattcagttgactgataatattagtgaagcaaatgctatacttgccttacaatccagtcttaaaatgaatccaggtatccaggctgcacgtaaatatcatgatattcccatgtatgtgacaaagacaagttctttggatcatgtaccaaaagccatacgggcattagtaagtgatcat

SEQ ID NO: 35245 - DNA, 423 bp, Glycine max
  Clone ID: LIB3053-008-Q1-N1-G11
tgacactccaaggaggcaagggaaaacaaaccagaaagtctgacctttccctttctccaaaggatcatcaaactaaactaaatcaaatcaaaatcaaactttgtcacggttatattagacccttttataaacctctttcaaggcttttcaatcacaccctttctctaatcacttcttcttgtgctggcataacttcaacaacttattctttgttctcgatctcacgatggctcatttggccctgtctcagatggctgtaactgttcctgttggcagcgatttgtctctcagaagatctgcggttaaggcacctaactttaacttttgggataaatcatgggcaccagtatttactttgtacttgaaggcaaacaactcaagtttaagaagtcgtcatgtggtattcatgtcagtgcaacaagc

SEQ ID NO: 35246 - DNA, 395 bp, Glycine max
  Clone ID: LIB3053-008-Q1-N1-G2
gttcactgatgaaaccaaaacataaaccctactccttcctggctctcacccgacactttcgcgcgctacaatcttgtcccctcatggcccaaaccccaacttctctcgatgcagagcaccccgccgccgccgaccagcacgtgggctttccggcccggagcctgagcggagagtcttgggcggagcgggcgtgggcccactgggccaagctgggccggcccaggttcatagtggccccgatggtcgacaactcggagctgccgtttcgcatgctgtgccgcaagtacggtgcccagggcgcgtacacgccaatgctccattcccgcattttcaccgagaccgaaaagtacagaaacgaagaattcaccacttgcaaggaggatcgacccgtattt

SEQ ID NO: 35247 - DNA, 381 bp, Glycine max
  Clone ID: LIB3053-008-Q1-N1-G8
ctcaatctcttccttcccaacagttccacacgttgtctttactcctcaagcccttcagtgccatttttttctagaaaaaaactgtttccagttttattcaatccacaactgaaaacagaggactctgtttttgtgctgagaaaacaaaaaaatggcttccctttatgatgtgcttggtatttcagtgggtgcaagctgcatcgaaataaaggctgcttacagaaagctggcaagaacataccatcctgatgttgtggccatgaatcagaaggaaagctcagcgaaccaatttatgatgatccattcagcttactcaactttatctgacccagagaagcgagctcaatatgacagagaaatctatagattcagaagatcagc

SEQ ID NO: 35248 - DNA, 309 bp, Glycine max
  Clone ID: LIB3053-008-Q1-N1-G9
tgggagtgccacgtttgggaggtatagcaagcgggttaccttagacacttgcgacagggtgttttacgtgtgctatagctggattgagatcttcgaaatcttgtgcactatattaatgttagacattgttaatatcaattgctgcatttttacatattcggatatttacttggtataaatatattacttataattattattattatatagtgtttatttaatgaattacttcgttgcataaattggcaatatttgctactacctaatcatgatcatgatacaaacagttgatgatgtttggaatgaatt

SEQ ID NO: 35249 - DNA, 235 bp, Glycine max
  Clone ID: LIB3053-008-Q1-N1-H10
tatgtcagaaatgcttgggaacccggtgagcctgagaggcgccaccaggtctgctccatcaccgtctacacctgttactttcaagaccgttgcgcttttctccaagaagaaggcagcaccacctcctccaaagaaaaagcctgctgctgtatcccccgccaatgatgaactcgccaagtggtctggtcctgacagaaggatcttcttgcctgaaggtctcttggaccgatcagag

SEQ ID NO: 35250 - DNA, 384 bp, Glycine max
  Clone ID: LIB3053-008-Q1-N1-H12
gaaacacagtacccgaaaaccttcttctataaagaagaccttcatccaggcaaaacaatgaaagtacaattcagcaagcctccctttcaacaaccatggggtgttggtacatggttaaaggaaattaaagacactactaaagaaggatatagttttgaagagctatgcatcaagaaagaagccattgagggagaagagaagttttgtgcaaaatccttgggaacagtaattggttttgccatttcaaagctgggaaagaacattcaagtactttcaagttcctttgtcaataagcaagaccaatacactgtggaaggagtgcagaatcttggagacaaagcagtgatgtgtcataggctaaatttcagaactgcagtattttac

SEQ ID NO: 35251 - DNA, 374 bp, Glycine max
  Clone ID: LIB3053-008-Q1-N1-H3
cttggcttgtgaatcagcaccacattcacctgagcttttggggaggaggccaaagcatggcttcccttgcagcatccactgctgctgcttcccttggcatgtcagaaatgcttggaaaccccatcaacctcagtggtgccacaaggccagctccatctgcctctagccctgcctccttcaagactgtggctcttttctccaaaaagaaggctgcacctccaaaaaaagctgcagctgctgctcctgccaatgatgagcttgccaagtgggatggtcctgacagaaggatcttcttgcctgatggtctcttggaccgatctgagatcccagagtacttgaccggagaagtccccggagactatgggtatgaccca

SEQ ID NO: 35252 - DNA, 393 bp, Glycine max
  Clone ID: LIB3053-008-Q1-N1-H4
caaaacagcaacaaacgacagagattcttcctcaacacaggcgaaaaaaaaaaagcttccgattctaaaaccagaacaacaaaaaagtaaaacacacacgtcattttaaaacatttcatttttttggttatttatttaaagagcgagtgttgtaacaaatggtgaagccgaagagcgtggagaaacccgcagaggaacaacaacaacgaagtgtttcatcgtacagaggagtacggaagaggaagtgggggaagtacgtgtcggaaattaggttacccaacagccgtcaaaggatttggttggggtcctatgacagcgccgagaaggcggcacgcgcgttcgacgctgccatgttctgcttacgtggcagcggcgccaaatttaatttcccga

SEQ ID NO: 35253 - DNA, 419 bp, Glycine max
  Clone ID: LIB3053-008-Q1-N1-H6
caacgtccctcctcgctcgtggccgtggcgcgtcgtcggggccttcgctcctggtcacgcgcgccatcgacgtgaacgagttcctgggggacttcggggcgcgggaccctttccccgcggagcttgagagttccttcggggagaaagtgctgggatacagcaacaccgagcacaaaatcctcatccccaccatcactgctctcgccctctcgcagcatgagtgtgctcccgtttccccttcgcagccccccatctcgctggatgacgcccagacgctcattagaaaggttgtgggttggagacttgtgaatgaagaaggtggacttaaaattcaatgcttggggaagttaagagattttaaatgtgtggttgaactcattaacaggatctctaaaggtgttgaggctttgggccatttt

SEQ ID NO: 35254 - DNA, 428 bp, Glycine max
  Clone ID: LIB3053-008-Q1-N1-H7
gcttaggaagctgattaatgcaccagcttacattgaatgcagttcaaaaacacaggagaacgtgaaggcagtctttgatgcagccataagagttgtccttcaaccacctaagcagaagaaaaagaagggtaaagcacaaaaggcatgctcgatattgtgattcactaggtgttaacatttgactgccctttattctacctgtattaccctccccttctttctttttatcatttctttgttattgaagaagttggagtttgtgggtgttcctcatacaaatactctagatctccttgaagcataaggtgggttaatgctttgctttctttgaattattgtcaactctaatagtcaaatttgcatttcatggttcccacctttttttcctataactttcgttatgatttatgtattaatagactggaata

SEQ ID NO: 35255 - DNA, 266 bp, Glycine max
  Clone ID: LIB3053-008-Q1-N1-H8
accctttcttccccactccctagtcagctagctgctgcaggaacaaccactcctgttctttttctcacccaaatccacgcttcccttacaccgcgtttggatctccgttatacaaactcattaaaatgttgcgagagaaaaacaaaacagaaaaaaaattcagttaattattaaattttgttatggctttccacgaccatcttcagcacgagatagcgttccagcgtttcacggaggagcaagagttgaacgagaatagagacatg

SEQ ID NO: 35256 - DNA, 404 bp, Glycine max
  unsure (1)..(404): unsure at all n locations
  Clone ID: LIB3053-008-Q1-N1-H9
ttttggatcagtcagactcagacatgggaggaggcaatgcgcagaagtcaaagatggctcgcgagaagaatctcgagaagcagaaagcagcggctaaggggagccagttggattcaaacaagaaagctatgtctattcagtgtaaggtgtgcatgcaaacatttatatgcaccacatcagaagtgaagtgtaaggagcatgctgaagccaaacaccccaaatctgatctctatgtttggtttcctcatcttaaaaaagtgaaagagttcatgttgagacctgatttcnatatatggcctgttctacagtctctatccacatagatcttcaatntcttttaatataaaatatgtctgtgtgtttgtgtcttcaggggtagtgagagacgagaggggataattagt

SEQ ID NO: 35257 - DNA, 391 bp, Glycine max
  Clone ID: LIB3053-009-Q1-N1-A1
agccgttgctctgcttcaaccttgcggaagaagaagacgccgcagccatggtgaagtactccagagaacccgacaatcccaccaagtcctgcaaggccagaggcgctgacctcagagtgcatttcaagaacactagggagactgcctttgccatcaggaagttgcccctggttaaagctaaaagatacctggaggatgttttggcccacaaacaggccatccctttccgacgcttctgtggtggtgttgggaggacagcccaggctaagagcagacactccaatggtcaaggacgctggcccgtcaaatcagctaagttcatcctagatttgctgaagaacgccgagagtaatgctgaggtaaaaggtttggatgtcgatgctctgtacat

SEQ ID NO: 35258 - DNA, 356 bp, Glycine max
  unsure (1)..(356): unsure at all n locations
  Clone ID: LIB3053-009-Q1-N1-A11
agaaaatattgattctctgttgtcgaagaatacatcacgaaacaattcacaagcaaaaggggtggaagctgaagtaacgagtttccttgcatttccagttggggcggcacgtaattatagagcatttgttcgtgtgactttattctcctgacacaacctggtctgcattcacacattccaacttgtcatctcagattggatgcaggatgtaagtgcaaacactgtcactatatatatatatacacacacacacacaacacacaagaaagatagnttttgggagaatgaaagacggctaggtggattcactcctttctctcttgattgccttggaagaagttgggaccccatagaat

SEQ ID NO: 35259 - DNA, 245 bp, Glycine max
  Clone ID: LIB3053-009-Q1-N1-A12
ctacccataccatagtctatgcactgctgcaagtgaagggttcgttgacaccaacatggtatgtgtagggtctatagcaatgttgctgagatatcaagaaggacccaaaggctaaactgtctaagagatattgatagcctaaatcctttagatactaatcaacgcactttcaacatcaacatcatacgtacgctcaactcagacattttcgaaccatgggtcaattcgaatattacacaaaagcc

SEQ ID NO: 35260 - DNA, 377 bp, Glycine max
  Clone ID: LIB3053-009-Q1-N1-A3
atgaatagctgaatcattaggataatgccaaaagttttaggttataaaaaaagaaaagataagaacattattccactcaattgattgaaggaaacatgattttttatacagttgtagtttttttttaattaaaatatgattttgcattgctgtgttaaggaagatttatgatgattcctttccttataaaaagccttacatttcagttcatttacattttgtggtgctcctttttcattactgactgattacactgggagatcaggaaccgagatggcaggtgggtaaattgtatactccagcagatgctgttgctcaagggcttaaatctctttctttgaatgataccaagatccttgccagaaccattagtgact

SEQ ID NO: 35261 - DNA, 390 bp, Glycine max
  Clone ID: LIB3053-009-Q1-N1-A7
caaccttctttctttttctgtgagcctttctttcaggttcttaacttgatcagtgtgcagtgtccaaatcataagggtagttgcaaattgcaatggctaagcatgatgttgagggtggttccttctctgcaaaggactaccatgatcctcctccagcaccgttgattgatgctgaggaactcacacagtggtccttctacagggctttgattgctgagttcattgccacaatgctcttcctttacatcacagtgctcactgtgattggttacaagagccagagtgatgtaaaggctgggggtgatgtgtgtggggagttggcattcttggcattgcttgggcctttggtggcatgatcttcattctggtgtactgcactgctggaatctc

SEQ ID NO: 35262 - DNA, 237 bp, Glycine max
  Clone ID: LIB3053-009-Q1-N1-A8
gttttcatcatctgtgacttcaaaaactaaaatgaagggtcttttggagattctgtcttcagcttcagagtatgctcagcttccaatacgacctggagaggaagaagttgttcgtaagttaattaatcaccaaaggttttcctttggaaaccccaagggtacagatccgcatgttaaagctaatgctttgcttcatgcccatttctctaggccaattgttggtgggaaccttgcatt

SEQ ID NO: 35263 - DNA, 235 bp, Glycine max
  Clone ID: LIB3053-009-Q1-N1-A9
ctcatgtaagacaggcctaaatttgatgacgaattgtacgtatgagtacaattacaggcaaaatgatttgctatcagtgttgcgagtatgcttatatctactgttgctgcagacatgtatcttgctcttgatgaagatgcgacatgtatacattaagcacacccgagcttggatactctccatacgacacgctatctgatattgctagcgagagattatatcatacactggcact

SEQ ID NO: 35264 - DNA, 419 bp, Glycine max
  Clone ID: LIB3053-009-Q1-N1-B1
ccggaacaagacccaggcaggtgtcgcagtacgcggagaaaggacgctatataaatatatttgtccccgatgctctctatttcagccactcgtatattcttcctccgctcaacaactataagattatcttcttcttcttcttctcttcaattcttctccaatcccaaccgcaccctcttccgtccctttcttcacacttccttcaaaccacttccttcgtctttctctttccgaacagatcacactatggccacctcaaacgccaaatcagtccatgatttcaccgttaaagatgccaagggaaatgatattaaccttggtgactacaaaggaaaggtccttatcattgtcaatgttgcctcacaatgtggcttgactaattcaaattacactgagctcagtcagttgtatgagaaata

SEQ ID NO: 35265 - DNA, 109 bp, Glycine max
  Clone ID: LIB3053-009-Q1-N1-B10
attctattcccccatattgtaaagcagttgtgatttctagcaatgcaagttttgaacaaaaccagctaaatacattatatatatatatatatatatatttttttttttt

SEQ ID NO: 35266 - DNA, 345 bp, Glycine max
  Clone ID: LIB3053-009-Q1-N1-B11
gctggataggtcaaacatcatcatgtcggacgaagagcggcatttcgagtccaaggcagacgccggtgcctccaaaacctaccctcagcaagccggtaccattcgcaagaacggctacatcgtcatcaaaggacgcccctgcaaggttgtggaagtttcgacttccaaaactggaaagcacggtcacgccaagtgccactttgttggaattgatattttcactgccaagaaacttgaggatattgtgccctcttctcacaactgtgatgttcctcattggtgaatcgtactgattaccactcatgtattgctgggatggatttttgagtctgttctgaaaatggg

SEQ ID NO: 35267 - DNA, 303 bp, Glycine max
  Clone ID: LIB3053-009-Q1-N1-B12
cggacaacaaccctaaacttccatgggaattcaccgagggcaatcaagcaaaggttaaggagattttgtctcactatccatccaactataagcaatctgctacaattcctcttttagatcttgcccagcagcagcatggaggttggctacctgtttctgcaatggatgcggtagctaaaattgtagaggttcctcccatacgggtgtatgaaggtggccacattttactccatgttcaatcgagctaagggttggggaagtacccatctgtttggttttgtgggaaaacaacaccttgtatga

SEQ ID NO: 35268 - DNA, 408 bp, Glycine max
  Clone ID: LIB3053-009-Q1-N1-B2
ctcaaaatccctttcttgtgtcgattagattactttcacaccagagtcgttcgagtacttcaccttctttctctctaagcgcaaaacctcgtactgtttttggcggttaaggatgtcggggaaaggagcgaaggggttgatcacaggcaaaacctccgccgccaacaaagacaaggacaagaagaaacccatctcgcgttcttctcgtgccggccttcagttcccagttggtcgtatccaccggcttttgaagtcaaggacaaccgctaatggtagagttggggccacagctgctgtctactctgctgctatcttggagtatctcactgctgaagtattggagctggcagggaatgctagcaaggatctcaaggtcaaacgtattactccccggcatttacaactagc

SEQ ID NO: 35269 - DNA, 314 bp, Glycine max
  Clone ID: LIB3053-009-Q1-N1-B3
ctacagccgccaagagctgttttgctcccagtctctgaagacacacaagtggtagtggtacagacacaggatacatacaaactgatggtggaagccatgcgtgtcaactaagcagtggttacttacacttggagtcaagaccattctaatggaagcctttagtgcacatgcttagctctacatgttactgaggacccatggtatcgttgtgtgtacatcagacttcggtcgccacatttatagggttcacatcgctctgggagaatgttcaatcagcgaatgaatagatagcctatcgatacctgaacacactg

SEQ ID NO: 35270 - DNA, 421 bp, Glycine max
  Clone ID: LIB3053-009-Q1-N1-B4
atgacagctatgagcacgcatgcacgcgctcggaactcggatagagctggcaggtcacgtgttccttgttaagagctgtggcaaggttttcgggagggaacaagagaaaaaggaaaagatgaatagctacagctactatgggtaccaagagaagaacaccttgacaagctgtgaggagacgaggatggaatcagtgatttgccccaaacctcgccgattgggtctcataaaccactcttccatcaacacagaagtcggaccctcgaggcaccccatcatcagcttccaacctgaggtggaagattcaggagttggggcagcgcttatggacatgctcctccccaaggaaaattgctatctggaaagatccggaggccaaaaggtagcatcatcaccaccatttttctctggatctcctcct

SEQ ID NO: 35271 - DNA, 421 bp, Glycine max
  Clone ID: LIB3053-009-Q1-N1-B5
cgcttgagctctgcgagatcttgagtcgccgatttgaaaagatgagtaagcttcagagtgatgctttgcgtgaagccatctcaggaatcatggccgattccaaggagaagaatcgcaaatttgtggagaccatcgaactccaaatcggtttgaagaactacgatccacagaaggacaagcgtttcagtggctccgtcaagttgccccacatccctcgccccaagatgaaaatttgcatgcttggtgatgctcagcatgttgaagaggcagagaagataggactggactggatggatgtagaagccttgaaaaagctaaacaaaaataagaagttggtgaagaagctagctaaaaaataccatgcttttttagcatctgaagcagtcattaagcagattcctcgtcttttgggtcctggtct

SEQ ID NO: 35272 - DNA, 149 bp, Glycine max
  Clone ID: LIB3053-009-Q1-N1-B8
gggagtagaagtacaagcttcacttcactctgatcagttcgtcattgtggcatcgataattcgtctctatagctgttaccaccgttctctctcctctttgcgcattggaatagcaactcttagtctccaatgtccaagatgctggcagt

SEQ ID NO: 35273 - DNA, 359 bp, Glycine max
  unsure (1)..(359): unsure at all n locations
  Clone ID: LIB3053-009-Q1-N1-B9
ctctctctctctctctaacatggaccaacagcagcgccgcgtcagcagcggaactactaatcctgtggccgtgctccgcttctccacggggcgcgccttccccttcgcacgcctcatcgccgcctcccgccgccgcctattcctctccgactgcgccgaccaccgatcggacgacgacggagacagcgacgccgacgccggcgagtgcgcgtactcgcgcgcggtgctggtgctcgacatggtgtggaaaacctcgccttcgtcgntcgccgccgccggncccgtcctcctctccacgctccgagagcggccagcgacgccgctgaggctctggctctgcggctacgccttcgagtgcg

SEQ ID NO: 35274 - DNA, 426 bp, Glycine max
  unsure (1)..(426): unsure at all n locations
  Clone ID: LIB3053-009-Q1-N1-C1
gaaggtgtgtggcgtcaggtagagataatgagattaggtgtgagtgtgagtggcggtgctcaatcggcaccgcttcaggcaacacccaaaccgattatcccgccaaattccaacggtcatctttctcaactgccaacttcctccccgacaacgcttcttcagatttagcagtttcaatttcgagtagtagcagcaggagagggctaatacgcatagccacgttgccatgtcttcttcccctcataggttgcctcccagccaacgccatgcagccaggttcaaaggaatatcttctcattaaagaagaggtgaggaaggtcttgtccaagggaaaggctgctggcgtgcttcgattggtattccatgatgccggaacctttgacatcgatgacagtacaggtggtatgaatggntctatagtctatg

SEQ ID NO: 35275 - DNA, 391 bp, Glycine max
  Clone ID: LIB3053-009-Q1-N1-C2
gatcgctgacgcagatgctaccattgactatcgtgccggcgccttggtgcatacttcattcactggtctcaaggccatggctggcttccctaccatgaggaccaacaatgacattacctccattgctagcaaccgaggtagagtgcagtgcatgcaggactggccaccatttggcaagaagatgtctgtgactctttcctacctgccagaccttgatgatgcacaattggcaaaggaagtacagtaccttcttatgaacggatggatactctggctaggaattcggagctgagcacggatttaacgtaccgagagcgcaacaggtcaccaggcatctaccatggacgctactggaccatgtgtactctgactatgactggttgcactgatg

SEQ ID NO: 35276 - DNA, 402 bp, Glycine max
  Clone ID: LIB3053-009-Q1-N1-C4
gcaaattgtcacaccaaaaaattcttgcttagctgtcacagacaatctttaacaacaatgaagaaagtagtattaaaggtggacttaaataatgatagaatcaagaaaaaagctatgaagacagcatctggcctttcaggggttgaatcgatttctgttgacgttaaggacatgaaactagtcttattgggtgagattgatccagtgagtgcagtgtcaaagctacgaaagtggtgtcacactgaactaatttcatttggaccagcaaaagaggagaaggagaaggaccccgctattcctctctacgaagcctatcccctttattatcacatgacaccaacattgtatggttcaaattactaggttagaggttttgaagagagtcttaaggctgcgtgatca

SEQ ID NO: 35277 - DNA, 387 bp, Glycine max
  Clone ID: LIB3053-009-Q1-N1-C7
gagagttgggacaacatatcaggcagtgcatatggcctctggagggtcgttacgctagcaattacttgtgtcttcttcattttcttattcttactaattgtaaatgtgagaagaagaacgtccaaagttaagaagtgaaagtaattaaatcataatatgtgagatcacagagtctaaaagattttagagaacagatattttagacaaagccatggtttgaattgaaccatcgatattctcatccccggtcgtatagcttatacagttaaactggattttgttctaagttttgtccattgatgagaaacccagttcttgatttcaaaaaaaaaaaaaaaaagaaaaaaagataaaagtaacgagagcacaacaagtaaccaagatact

SEQ ID NO: 35278 - DNA, 395 bp, Glycine max
  Clone ID: LIB3053-009-Q1-N1-C8
agcatctcttattaccaaccttttttctaaactttctcttgccaagtatcaacacataaaacaatggcttttcggttacctggtatcagaaaggcttcccttgctgcaatccaaggaaattcaaaagctgtggatgttccaaagggctaccttgcagtctatgttggagataaaatgaagcagttcatgatccctgtaacatacttgaaccaaccttcatttcaagatttgttgagtcaagctgaggaagaattcgggtaagaccatccaatgggtggtctcataattccctgcagagaagatgtgttcctagatatgacatctcgcttgaataagtgctaatcccatgaagatgaaactgacattggcctagactaaactagacacaattttgg

SEQ ID NO: 35279 - DNA, 343 bp, Glycine max
  unsure (1)..(343): unsure at all n locations
  Clone ID: LIB3053-009-Q1-N1-D10
attcgttaacacatcaatttctatctctcttatactctcactacgctctttgctctttcttttctccactatggctgcacaagaaaacaacttccaagactacttgcctgtgatggccaacaagcttggtggggatggcctaattgatgaactgtgcaatgggttcgatcttttgaaggattctgataaaggggtcatcacttttgagagcctcaagaggaattcttacttgcttgggcttcagggtctcagntgatgaggatcttcgctccatggtttttttgaaggtgactttgatgggcggtgcactcaacagatgaagtctgtgtctgatgtcagactc

SEQ ID NO: 35280 - DNA, 250 bp, Glycine max
  Clone ID: LIB3053-009-Q1-N1-D12
ccgacccaccttagcctgtctcaccccaaaaacaagtccgtgaggattccggtcaaactctttggccgtttactggctcaacaaatttggagtggcagaagagagtggcattagaaggcataatcccagtgctggtgcaattgctgcattccggaacacccttttacaaacaaaatgcagccatttcaatcaagcagttttcaaaaaggttcatatcgctttgagccgagccccaataaagaagccctag

SEQ ID NO: 35281 - DNA, 213 bp, Glycine max
  Clone ID: LIB3053-009-Q1-N1-D2
cggtctcactctcactctcacaaacgagaccgtcggcgtgggcggcggcgggtgcggtagcagcagctctccgagtccgtcgccgtcgccggatcggcactcgtgaggaccgtcgtgccggatgccgatgcggtcacataaggacttggccgtgtagcccgctgctggtggccgaaatcatggtgcggcggatcctgagatactatcttcctg

SEQ ID NO: 35282 - DNA, 348 bp, Glycine max
  Clone ID: LIB3053-009-Q1-N1-D3
tttatcagtggccttacgatgactatgcttcagccaggcgaaatgagatcggaatcactggaagaattccgctgccgcagtttcaagaggctacgttgcagactaggtcatatatgaattgaaactattcgtgatctcagtaagactcttctgccgcccttggttatgagatcggaagacctaagctaatgacgatttcacattataccgtcctatggatgctctcatgatcatatgtgaataggatgtattcgtagacataacatgtctatcgtgtagccgctggtcatgtgatcatgatacctacatggtaccgaactcgactagactcatatgagtctcattaaa

SEQ ID NO: 35283 - DNA, 417 bp, Glycine max
  Clone ID: LIB3053-009-Q1-N1-D4
gcttgaggagaagtgttccttgttaagatctgtggtttggttttcgggaggaaacaaaaagaggaaaaatgaatagctacagctactatgggtaccaagagaagaacaccttgacaaactgtgaggagacgaacatggaatcagtgatttgccccaaacctcgccgattgggtctcataaaccactcttccatcaacacgcaaatcagaccctcaaggcacccaatcatcagcttccaatctgaggtggaagattcaggagttggggcagagcttctggacatcatccttcccaaggaaaattgctatctggaaagatctggaggccaagtggtagcatcgtcaccaccatttttctgcggatctcctcctagcagggcctctaaccctctaatccaagatgagcaatttggtaatg

SEQ ID NO: 35284 - DNA, 428 bp, Glycine max
  Clone ID: LIB3053-009-Q1-N1-D5
gaaggacacattctacatatctcatggatcaccaactttggccatagatgaatccattctggccaggaagttccttcagtcatggaagaaggacgtgtttgctcaaagaccctcttcaattcttgtcatctctggtcattgggaaaccgcagttcccacgggcaacgtcgttgactgcatcaacgacaccatctacgatgtctatggcttccccaaacaaatgtaccagcttaaatatcctgcacctggagctccacaattggcaaggagggtgaaggaactactcaagaaatctggtttcagccatgttgatgaagatacagagcgaggacttgaccatggtgcttggattcctatctctttgatgtatccagatgctgacatccatgtttgtcagatatctattcaatctcagcaagatggaactt

SEQ ID NO: 35285 - DNA, 383 bp, Glycine max
  Clone ID: LIB3053-009-Q1-N1-D6
ctggtattctttcaccaaggctctctgcatagcgtttgtgatgacgtttttttccctgtttgatgttcctgtcttttggcctatattactctgttactggtttgttctctttgtccttacaatgaggcgccaagttgctcacatgatcaaatacaaatatatccccttcaacttggggaagcagaagtatagcggtaataaatcttctgcaaggagcagtagctctcgtgcagactgaaacttgtctctcatgattggaagatctacttagttaggttttctgaacattcaggctagtcaatgccccccttttctatgaaagaatttggattcatggtattatggatgtcagtatgcattatgctgttacggaaaatcttaat

SEQ ID NO: 35286 - DNA, 400 bp, Glycine max
  Clone ID: LIB3053-009-Q1-N1-D7
agagagagagagaaaaaagagaaagtgaaaattagaaactgttgtacttggttttatgccaaattagggactcttttggttgtcaattagatcacaaagatatggaggttgccatggaactggaagatgatctattttttgctgatttgagcaaggaaattgctctactaattatggatgaagatgaagatccacttgcttcttgtcctcctgactctcttcaggctttttctggggcaattcatcctcctccacagtttgctttcatctttgagcatgctttgagaagagaaagcaaagggacaggtgtatttatccctcaggcaacacagccaagaaggaagcagaggaaaggaagggctaataattcatatgcaaaacatcaaaagcagtctcaaga

SEQ ID NO: 35287 - DNA, 421 bp, Glycine max
  unsure (1)..(421): unsure at all n locations
  Clone ID: LIB3053-009-Q1-N1-D8
aactaatatagttccatcctctcaaacttgcattttagcagtggccaaatggatctcatttgctgctctttttgcaatacttttactactcatctctcctgagcttgcaagtgctgcccaacctagtcttattcttcaactcggccgaaaacttttccaatgcggcagcgccgccgtccctgttcgtggaaataccccatccaatggccgctcgtagaggatataccccaccaccaaaacacccactctatggctgaatatttgagatgttagcatccttctttaattttgtgataaaaaaaatacttttaaagatgtataattgtgtgtcattactataatatatgtcatgtatgcttaatttcactgaaccatgtgtactactgcttatcggtcacgtncatttagtggncacacctgt

SEQ ID NO: 35288 - DNA, 389 bp, Glycine max
  Clone ID: LIB3053-009-Q1-N1-E1
ctcgagccgcaagcattggtccattaccaacagatagagcaggtttgagcttaaacatgggcaatcatgagcctaaacgttggtcatattttcagaacttggccaaagaggggtttgataatgtatctctaattgatcaggataatcttggtttttcgtctgctgtgagaaaagtacaagagggggatagtaaatctcagccatctgctcctctaccagctgctggtgttttggcaggacacacggaatcccacctcaatgttggtgaagaaagtcagaaaaatgtacctgtggcaactaaaacagaagcaacaatctttcaccaaaaatatgagcattcccaactaaagggcaatgaaaataagaacatggatgccgtaatggaaaca

SEQ ID NO: 35289 - DNA, 257 bp, Glycine max
  Clone ID: LIB3053-009-Q1-N1-E11
gtggaccagaacttcaactctccagacccacatgcaggagcagagttatcaaattctctatgttcatactgctctccagatcatggctctgggagtggtgggcacggaagctcaccacaccactctcaacatggaacaccctctcatcatggatctacatcacatggaggtggtggaagtcacaatccaaccccatcaactcccccaggtggtggaagctatgatccaactccatcaccaccctcaggtgggtggtg

SEQ ID NO: 35290 - DNA, 242 bp, Glycine max
  Clone ID: LIB3053-009-Q1-N1-E2
aacaaacactaaccctccttctcctcctccgccaccccaggtccacaacctccaagaactcttccacattttagagcttcaactaaccaccgacccaacctccgttctcaaccttctagaacgttctctcgtccccaaccctccccagaaccaaccaccgtgtcctccgaaccttatgcgcgctttaacggaaaatctcgacagggaaaaacgcgacaccaagaccctttgcgctctgtgtc

SEQ ID NO: 35291 - DNA, 417 bp, Glycine max
  Clone ID: LIB3053-009-Q1-N1-E4
gccgaagaacaagggaaagggaggtaagaacaggaagaggggaaagaacgaggcggacgacgagaagcgagagctggtgttcaaggaggacgggcaggagtacgcgcaggtgctccggatgctgggtaacgggcggtgcgaggcgatgtgcatcgacgggacgaagaggctctgccacatccgcgggaagatgcacaagaaggtgtggatcgccgtcggagacatcatcctggttggactcagggactaccaggacgacaaggctgacgtcatcctcaagtacatgcccgacgaggccaggctcctcaaggcctacggcgagctccccgacaccactcgcctcaacgagggcatcggcgccggcttggacgaggaggacgacgccaccgccaacgactacttcgagttcgaggatga

SEQ ID NO: 35292 - DNA, 427 bp, Glycine max
  Clone ID: LIB3053-009-Q1-N1-E5
cttcgttccctaattgaggactggcagaccaacaggatcaacctaagttagaaagattttagactcgaccctgcccatgaatcattaactcaactgggtattgcttaagtaacacgtgtattaattagcgtcactgtcaagcattgcattatcatctgctcatagcatagcataacatgcttatcccttagatcatcgatctgctgctatggaaactggcgtagcatgctacactcacacgccattctagcttagtgttgcttccaagcactctcacacctgtcatgtgtggcatcttttgacattgacgagctctgttatcaagctctttatatggtgacttgctaaaagtggcctacaattcaaccatgaatgtttcaatgacaaagaatccttcactcgtgaccagataccaaaattggtgaca

SEQ ID NO: 35293 - DNA, 425 bp, Glycine max
  Clone ID: LIB3053-009-Q1-N1-E6
ccgatgattcccagtaatggatccttcaaggatgtgataagcggaggagaccgtagaacgaggtactgattgcctagatcaaatgttccgtgatgcttggtttgtacaatatatatataagataatgctttcatagttgcaggatttggcctgtggtgagcatcatagtttgcagtagttttggtagcaagactttgtattttccttttatttagcttactatatgcagtagcagctatctctgtaatcttatatccatctcctgttgtttgtattgtgccgttgggttttttgatgtagtgagattgaaaatgatgtgctagtaatattattgctgttagaaatctaagcagagaatctgttgtagaaatcaaaagcaaatgaagcacttttgaaaatgagatgaggatatcatgttttacata

SEQ ID NO: 35294 - DNA, 426 bp, Glycine max
  Clone ID: LIB3053-009-Q1-N1-E7
cgagactacttctaaagaaaaagctgagtgctccacgcgaggaagaagagaaaattagcaaaggaaaaaaagaaaaaagagaaagaaggagagagcgagcagaataaggtgtctctcttggactgattcgcttcaatcgcatctctattctctactactcattcatttttatatacctctcttccttctctctcccaccctcaacacaaagaaaaaagtggacatagttatttaatttatttttgttcatggccgttcaagctcaatatccatccaatgtcctttttctaaacagcagaaacgggcaaaaaaggccatgagtattcttcattgcaaccacaaccagaaggagttgtactcttgaatcagcctcacatgttatacgacaactgcaacaacgacaatggaagtaacaataacaacaac

SEQ ID NO: 35295 - DNA, 396 bp, Glycine max
  Clone ID: LIB3053-009-Q1-N1-E8
ctcgagccgttgaaagcgtgagaatgccggtgaagaagtgttactgcgattactgcgacaagctattccaagacacaccagcagatcggaaacgacacgttcagggcattcaacaccaccaagccaaagctcgctggtacgattccttcaaacaacaacaaatccctccgattcccaatcgacccctttgctttcacttcgtcaacacgggattttgccgctacggcgactcttgcaaatatctccatcccgttcccaacaacaatgtccagcagccgccaatcgtaaccacaccgtcgccttcaccagcagcaaggggaggcaaatggagtttatggacctattcatcgaaagcactcttagtttttgtcaacatcttatctttttcatctttat

SEQ ID NO: 35296 - DNA, 360 bp, Glycine max
  unsure (1)..(360): unsure at all n locations
  Clone ID: LIB3053-009-Q1-N1-E9
tgcttaacttccaaagtcaggaatccagcttgcgtttagagttgcaaagagcagtgaagacacaacacaacacaaacacagagagagagagtgaacaaatccagcattgttcttttctctgcaacattttccactctcaaccatggcttcaaagcttttactcatcactgtcttcgtttttgatttgattgcttttggactggctgtggctgctgaacagagaagaagcactgctagcattgtgnccggacaatganaaagaaattattaattacttgttgnttctataactctgatatagcaactggctatggtgttggagcatttttgttcctcttggttagtcaagtcctgataatg

SEQ ID NO: 35297 - DNA, 406 bp, Glycine max
  Clone ID: LIB3053-009-Q1-N1-F1
ctctcacatcatttcccactctcgcgtttcctttatcatatttatagtctttggttattcaattcatattacgccatgtcccagttgaacggagcctactacggcccctccatcccgccgccgaaaacttcctaccaccgtcctgggcgcggcggaggcctcggctgctgctgcgggtgcctcttcagcctcatcttcaagctcatcctaaccgtgatcatcatcattggcatcgccgtgttccttttctggctcatagtccgtcccaacgtggtgaaattccacgtcaccgaggccaccctgacgcagttcaactacacccccaacaacacgctccactacgacctcgccctcaacatcacggtccgaaaccccaacaagaggctcggaatctactacgaccgca

SEQ ID NO: 35298 - DNA, 317 bp, Glycine max
  Clone ID: LIB3053-009-Q1-N1-F10
cttcttcctctgcgcaggaattaggaatattcgacaggtggagggtcttcaatggctcctaaagttgataagaagaatgatccaaaggcccaggccttgaagactgctaaggcagttaagtcaggtgctacctttaagaagaaggtaaagaagatccgaacttctgtcactttccacaggccgaagaccttgaagaaggacaggaaccccaagtaccctcgcattagcgccccgccgaggaacaagcttgatcattatcagatcctgaaataccccctcccaccactgagttgcatgaagagattgagacacaacac

SEQ ID NO: 35299 - DNA, 348 bp, Glycine max
  unsure (1)..(348): unsure at all n locations
  Clone ID: LIB3053-009-Q1-N1-F11
gttgaacctggactctaaatttactgagaatgtgagcaaaagcggacttcgaaatggtgtttatggtatgaatgcagtgtatcagaaaaacaatgcaaacttggtgagtaatgtgatcagtaacaagtacaatggcagtattcagcataacaaagagatcaacaacaacactggcaacaacatcaacaccaatgaaagcaacaacacaaattgcaactgacaaaaggtttaaagaccttgccttgcttgcggagacactccccncgcaaatgagggtgctttggagggggaatacatctnttgtctgtaacaatgacacaatgcangaagacttgaaacgtcagctat

SEQ ID NO: 35300 - DNA, 293 bp, Glycine max
  Clone ID: LIB3053-005-Q1-N1-B7
agcttgcatgcctgcatgttctctcaataggactctagtgcatgggtttgtgctttgcgtgttcctgttatgagggggaagatgtgatttttggctttggcaagttctgtggtggtgttgcctgtctccgctgctgaggatagtgagattttggatgctccatatgagagtattatccattatttgtttggtgtgttgttggcttataattgatggtgaaaatgtttagtgtttccttcgttgtaccctattgttgttttattaaaagtatttgtttttttattattttccta

SEQ ID NO: 35301 - DNA, 419 bp, Glycine max
  Clone ID: LIB3053-005-Q1-N1-B9
gaacacaggaaaagcctccaaaaccaacccaccgttggcgcgatggctttcccctccaaaggcgatgacgagcaagttctggtgccgcgtaaatcgaatgccaaagttttgacactaaacaggactaaacagttgaatgccctctctttttatatgggttcttggcttcttgaaattttttcttgagattaaaaagaatcctgtttttaaatggtttgtcttaaaggaaaatggaagggcttttagtcctggtggtaatgttgcagctgttgctcgtgatggaagtaaaggtgactggaggtttggtgcaaatttttttcaaagtgaatttaaattgaattacttgatggcaacatatagtaagccccaagtttcaattcttaatggaattgacatggaaggtggtgctggtgtttctg

SEQ ID NO: 35302 - DNA, 372 bp, Glycine max
  Clone ID: LIB3053-005-Q1-N1-C1
tgcaggggagggtgctgtgcgtgttccggtggtgaggctgaggattggggaggtggcggaggcgagttcggtggtggtgttgccggtctccgcggcggaggagagggagattttggaggcgccgtatgagagtaggagccagggggtgtttggtgtggtggtggcggagaagggatggggaaaatgggtggtgttgccttcgtgggacccggtggttggtttaggaaaagggggtgttgcggtatcgtttcccgatgctagggttttgccgtggaaggtgaataggtggtataaggaggagcctatattggtggtggctgacaggagtaaaaaagaggtgggtgccgatgatgggttttatcttgtgaatgc

SEQ ID NO: 35303 - DNA, 244 bp, Glycine max
  Clone ID: LIB3053-005-Q1-N1-C10
atcatgaactgcttccagcatttgatgtactggggaacaggactttcttactgtgtgaggttccaaatggtgcaaaaattaaacttgttgataacatgataatgtccagtttgattaatgctttctctgaggtactcacactaacttaaataagtggtttgaaccctataactcttctcaatatgctgtatcttcttgccatatgcaactgcatgtttaaattgaaatgacctacaatgcttta

SEQ ID NO: 35304 - DNA, 262 bp, Glycine max
  Clone ID: LIB3053-005-Q1-N1-C11
ggaatacctggtaggcctcatcatgttttttgcctatgggagcaaatcaaattcagaaaaagggtagcggggttaccagggggatatagggaaaaactgaaaaaggatttgtggggaaggtgaaaatcaacgccgtattcggtataactttggcaccaatgaactattccgtcggaagctgggggtgtttgtatgtttccactggtttgactatgatgtaatattaatatcccagcattactggaaatgatcattatggcgt

SEQ ID NO: 35305 - DNA, 354 bp, Glycine max
  Clone ID: LIB3053-005-Q1-N1-C12
gttgcattgacctggttacagaagacacggtaggaaaacatgaatactacccgagtgagatacttcgatttaactccctctgttgatggctgaaactcaattgaagtgattcactggactactttatcatcttggtctgaggttgaagctatttaatttctgaatttccgtgagtttcttaatccctgagtatggccgggagccaagatcagttagagatcaagtttcggttgagtgatggtacggatattggccccaaaagttattctgctgctactagtattgtaacactaaaagaaagtgttcttgctcaatggccaaagaataaggagtatggaccaagaactgtaaaag

SEQ ID NO: 35306 - DNA, 346 bp, Glycine max
  unsure (1)..(346): unsure at all n locations
  Clone ID: LIB3053-005-Q1-N1-C2
tgcaggggagggtgctgtgcgtgttccggtggtgagggtgangagtggggaagtggcggaggcgagttcggtggtggtgttgccggtctccgcggcggatgagagggagattttggaggcgccgtatgagagtaggagccagggggtgtttggtgtggtggtggcggagaagggatggggaaaatgggtggtgttgccttcgtgggacccggtggttggtttatgaaaagggggtgttgcggtattgtttcccgatgctagagttttgccttggaaggtgaataagtggtataaggatgaacctatattggaggttgctgacatgagtaaaaaatatgtagtttcc

SEQ ID NO: 35307 - DNA, 400 bp, Glycine max
  Clone ID: LIB3053-005-Q1-N1-C4
tgtcctttgaaggccacttaaccctaattcgacgactgctcatcgattatatgttgcattgcgtatatgttgcatctaagctacagtgtcagtgattcatatatttcttcatttgcttttaacagcaaaaggaatttaaagaagaaaagacttttaagacatttctaattttcatgtgctataatacattagttaaatggttttaagaatttgtcattatatctcatttttttttttttcttatttttagttctttttttttattattttttgggggggggggtttttattttttattattgattttttttttttattttttttttattttattatttttttattatttttttttttcttatattttttgttttttttttattttatttttttatttttt

SEQ ID NO: 35308 - DNA, 375 bp, Glycine max
  Clone ID: LIB3053-005-Q1-N1-C5
aacgtatgatgcattggactcagtagatgagcatttgttatttagttcggaaccgacagatgcaaggcccgtctcaaagaaacagaagtttgattctgatgtctttcagctttcaaattctatgtggcctcgtgcacaatacttgcctgaggtcgaaatatactcgttgtcatacgcagttccattttgattcttttggattttttttgtcaataggtggtagctttgaaagtacccgcgagctgtgttctaactgataaccggtgcttattgctattttgagagataaacatttacatggcatatgagcaaaaagatttcgctatatcttccatacatgattcatgtaattttattgctttcatatctgacgtt

SEQ ID NO: 35309 - DNA, 185 bp, Glycine max
  Clone ID: LIB3053-005-Q1-N1-C8
gccactgtcaataagccacaacagcatcagcaactacgacagcttcatcaacagagaacaaaggctcattgaccgactacaacaacaacgttctcattcaatttcattttcttcaaacaattgttgtatgaaattgtgtgcagtaaaggataggattttatttttggtataacagtttttttatt

SEQ ID NO: 35310 - DNA, 409 bp, Glycine max
  unsure (1)..(409): unsure at all n locations
  Clone ID: LIB3053-005-Q1-N1-C9
atgatgaagtgcttccagcatttgatgtactggggaaggggtctttctttctgggtgaggttggaaatggtgcaaaaatgaaacttgttgttaacatgataatgggcagtatgatgaatgctttctctgagggactcacactagctgaaagaagtggtttgaaccctggaactcttctcgatgtgctggatcttggtgccataagtaacggcatgtttaaattgaaaggacctacaatgctccaaaacagttattccccagcttttccgctgaaacaccagcaggaaggacatgagattagctcttgcccttggagatgaaaatgctgtatcaatgccagtagcagctgctgcanatgaggctttcaagaaagccagaagcatgggggttggagaccctgattttcagc

SEQ ID NO: 35311 - DNA, 396 bp, Glycine max
  Clone ID: LIB3053-005-Q1-N1-D1
tttctctatgcgtgaaacggctggtgtacacaaatgaggatggagaaattgtcaagggagtctgctcaaatttcttgtgtgacctgaagccaggagctgaagtaacaataactggacctgttgggaaagaaatgcttatgccaaaagatccaaatgccaccatcatcatgttgggaactggaaccgggattgccccatttcgctcatttttatggaaaatgttctttgagaagcacgaagattacaagttcaatggtttggcatggctcttcttgggtgtccctacaagcagctcattgctttacaaggaggagtttgagaagatgcaagagaaaagtcctgaaaacttcaggcttgacttcgctgtgagtcgagagcaaacaaacgagaaaaggg

SEQ ID NO: 35312 - DNA, 412 bp, Glycine max
  Clone ID: LIB3053-005-Q1-N1-D10
cgccgagatccgatccgacgccgacccctccgatcccgaggaccagcagttcttcaaccctaacgacaccttcaccctcggccccaagatcgataattgggacactgagcgcaagaattggcttcaccaaaaccccgaataccctaatgtcatcggaggtaaacctcgcatcttgctccttactggttctcctcccaagccttgtgataaccctattggagatcattaccttttgaagtcgattaagaataagattgattactgtagattacacgggattgaaattgtgtataatttggctcatttggatgtggaacttgctgggtattgggctaagttgcctatgattaggaggttgatgttgtcgcaccctgaggtgggatggatttggtggatggatagtgatgctttt

SEQ ID NO: 35313 - DNA, 225 bp, Glycine max
  Clone ID: LIB3053-005-Q1-N1-D11
ctcgagccgatttggttccggtcgaagaggttgcccgtggattcatatgggtctaactactgttcatctatatttatctgcaattcttaacattgtgaatggtcagaagtgtaaacaaataatttgaaataaaaatagaaaataaagatattttattaaaatcaacatgaatgaaaaaatatttaaattgaacacaaatatatatactaggctatctactactaa

SEQ ID NO: 35314 - DNA, 390 bp, Glycine max
  unsure (1)..(390): unsure at all n locations
  Clone ID: LIB3053-005-Q1-N1-D2
gcaaaaatcatgggtccgatggtgctgagccaactcggcaccgggcttagcgttctagccggagcggttctggtgaaatcggttatggaccagaagcccatggcaggcccattcactcgctgccccacgtgcaacggaaccggtcgagtcacgtgcctctgctcgcgttggtccgacggcgacgtcggatgctccacgtgctccgggtcgggtcgcatggcctgcagcagttgcggcggctccggtaccggtcgacccttgccggcgaaaatcgcgattcgcccgccgaaccgtccaattaattagttcaccaattcgttgggctcgctcgctcgcttgctactactccttttattttagcgtcagtataacattttaattntatatagc

SEQ ID NO: 35315 - DNA, 362 bp, Glycine max
  Clone ID: LIB3053-005-Q1-N1-D3
gtctcatgacagtagataatcaaccagatcaggaattgatgcaggatgaagttaatcttattttgggtaactctttatttttctcttctagtatgtttgaaatgaaaaaaatacctagcctttggtaatattctgttgcaactgtcttaagcctcaaatggtgatcgggccacgtactgattctagttgttattattatgatgtgtcgtgggggaaaaagggatttgttcaatcaagcaagtgaactagctaacttataaattaaatcactaacttgaaatatcactcgttcaggacttcagggtacatgttttacctttccctctcattttccatgatacaagatttgattaacacatcag

SEQ ID NO: 35316 - DNA, 358 bp, Glycine max
  Clone ID: LIB3053-005-Q1-N1-D4
gtctcattacagtagataatcaaccagatcaagaattgatgcatggtgaacttaatcttattttcggtaactctttatttttctcttctactatgtctgaaatgaaaaaaatacctatcctttggtaatattctcttgcaactgtcttaagcctcaaatggttatcggtccacctactgattctagttattattattatgatgtgtccctggtgaaaaaagcatttgatcaatcaaacaaattaactaactaacttataaattaaatcactaacttgaaatatcactcgttcaggactttaaggtacaatgtttacctttccctctcattttccatgatacaagatttgattaacaca

SEQ ID NO: 35317 - DNA, 355 bp, Glycine max
  Clone ID: LIB3053-005-Q1-N1-D6
ggaaataactattaatacatcaaatcaagtggcgctgcgtctcatattcaattggaattatatgctttcttattatgcctatcctgaagccaaaggaaatgagatcggaattcctcggggaattccaattccacattttcaagaaataaggaggcaaaaatgttcatatatgaattggaattatttgttttcttattaggcctatcctgaagccaaaggaaatgagatcggaattcctcggtgaattccaattccacattttcaagatataaggaagcaaaaatgttcatatatgaattggaattatttgatttcttattaggcctatcctgaagccaaaggaaatgagatcgga

SEQ ID NO: 35318 - DNA, 384 bp, Glycine max
  Clone ID: LIB3053-005-Q1-N1-D7
tataacatctattaccacacatgcagacttacataatcgtccactacggctcgatttcaatctttcctaatatcagatctaaagggataatgaatcctatacgactgggaaacatattctcttaaaaatacacatacaaaatattaataatacacattataacacccaatgcaatatatcttattcattaatcaacaatatcactacaatatgattcatctaatgattacattacacatgttttccattcacatccaacaataatccatactattaaatataccacattctccactaattacaatcccattcacatttaaaaggagccggtatctacttctatatatcatttttaatcaataattttacaaataacttctaaat

SEQ ID NO: 35319 - DNA, 330 bp, Glycine max
  Clone ID: LIB3053-005-Q1-N1-E1
ggcaagttcccgttcatggctaatagcaaagctaaagggattggcaatgctgaaggactggtgaagatattggctgaaaaggagacagacaagatattgggagtgcacattatggcacccaatgcatgagagcttattcatgaagcagcaatagcactacagtatgatgcatctagtgaggacattgcacgtgtgtgccatgcacatccaacaatgagcgaggctgtgaaagaagccgcaatggccacttatgacaagcccattcacatttaaaaggagccggttgctacttcatggtttcatttttgtccaagaattttacaatgactt

SEQ ID NO: 35320 - DNA, 308 bp, Glycine max
  Clone ID: LIB3053-005-Q1-N1-E11
ctactactatgcctgcacgtctacactagatgatcccctcgctgaatcccaattttatattttcaagaaataacgatgcaaaaattgtcatatttaaattttgggtatttgttttcttattactcctatcctgaatccaaatgaaattacatcttaattcctcggtaaattccaattccacattttcaataaataattgaatcaaaaatgttcatatattaattgtaattatttcttttcttattattcctatcctgaatccatatgaaattatatctgaattcctcttataattccaattacacatt

SEQ ID NO: 35321 - DNA, 408 bp, Glycine max
  Clone ID: LIB3053-005-Q1-N1-E12
ttggaaaacaaagtatagagtgaaagaatgggtgagaaaagcaagattttgatcataggaggcaccggctacatcggcaaacatatagtggaagcaagcgcaaaggctggaaatcccacttttgctttggtgagggaatccacactctctgacccctccaaggcacaactcatccacaattttgaggctttgggcgttaatttggtccgcggggatctgtacgatcatgagaagttggtgaaagctatcaagcaagtagatgtcgtcatatccacgctgggtcacctgcagcttgccgatcagctcaagatcatcgctgccattaaggaagccggtaatgttaagaggtttttcccttcggaatttcgtaacgacgtggatcgtgtccatgccgtggaaccagcaaaa

SEQ ID NO: 35322 - DNA, 389 bp, Glycine max
  Clone ID: LIB3053-005-Q1-N1-E5
aaaatatatcaacgtgcatttggtggtcaaagcttaagctatggaaaaggtggtcaagcttaccgctgtgcatgtgctgctgatcgaactggacatgctttattgcacactctctatggccaagctatgagacataatacccagttttttgtggaatattttgcattggatcttttaattaatagtgatggcacttgccaaggagtgattgccttgaatatggaggatggaacactacatcgtttccaagctgcttcaacaattttggccacagggggttatggtagagcatacttctctgcaacctcagcacatacttgtactggagatgggaatgccatggttgcacgtgctgggatccctcttgaggatttggagtttgtacaatt

SEQ ID NO: 35323 - DNA, 385 bp, Glycine max
  Clone ID: LIB3053-005-Q1-N1-E6
aaaatatatcaacgtgcatttggtggtcagagcttaggctatggaaaaggtgggcaagcttaccgctgtgcatgtgctgctgatcgaactggacatgctttattgcacactctctatggccaagctatgagacataatacccagttttttgtggaatattttgcattggatcttttaattaatagtgatggcacttgccaaggagtgattgccttgaatatggaggatggaacactacatcgtttccaagctgcttcaacaattttggccacagggggttatggtagagcatacttctctgcaacctcagcacatacttgtactggagatgggaatgccatggttgcacgtgctgtgatccctcttgaggatttggagtttgtac

SEQ ID NO: 35324 - DNA, 415 bp, Glycine max
  Clone ID: LIB3053-005-Q1-N1-E9
cccagttttgcaccctccaacaaaatcaaaatcttcgttgcgtgttttagcaatcggtagagagcgagacacggtttctgcattattgctttcagagggactcattgcagtcattgattgtaagcaatggagaaaacgcccaaacaaggttccaatgcatcactttttccttctactggaattggatcgaggttctccaatttgaacaagtctttcaaatattctctcagatctttgctcacttcatgctcaaaggaggaattttataaagcattttcaagtttctctaacactgaaaaggaattgctccatcgcctatttcttcaggtcattacttcgttgcatgaaaacttagaggatgggtttgagacggtctgtcttcaaacacaggcaggagctactcttgatgctgtgg

SEQ ID NO: 35325 - DNA, 329 bp, Glycine max
  Clone ID: LIB3053-005-Q1-N1-F1
cccaaacctatcgatccgctagagccgattctactctgtattctgttcaacccatacttcttcaaatctccatctcatcctttctcaccaaccaattacaaagactatcactacccttaccaaccttccacgtactacttctacatcgataatacaaattaataatcctactaacaccataatctctgtaccatctgtaccctctcacacctctacaccctatacaaccttataccactatgctcagaatctgaattgcatgacccatgctctgaatggcaacctttttgtcaacctcactgtccattaaacatgacaacaatctgaac

SEQ ID NO: 35326 - DNA, 414 bp, Glycine max
  Clone ID: LIB3053-005-Q1-N1-F10
agaacactccattgttgacattgagaagagaagagaagcaggagaatgcaatgggggctttgtacatgtcagttatggagatactcttgttcctcttcatattcatatgctctctcacaccaatctcacagtcacagggattacatcaatctcccccttttctctttggcacttcttcttcttcgtaccagtatgaaggagcttatttgagtgatggcaaagggataagcaactgggatgtcttcactcacaaaccaggtagtatatctgacgaaagcaacggtgatgttgctgttgatcaataccaccggtatctggaggatattgatctaatggaagctataaaaggtcattagctaccggttttcaatatcatgggcaagaattctaccaaaaggaagatttggagaagta

SEQ ID NO: 35327 - DNA, 416 bp, Glycine max
  Clone ID: LIB3053-005-Q1-N1-F12
gtgaagtgttcggattgcggcgacgtgagcggttcgctggccgcgacgttgtgagaagtccactgaaccttatcatttagaggatagagagtgccgtgaagaggttgatggatgatggagagaaagggaagagaatgagaagcaaggccaaagagatgcaggagaaggcttggaaagctgttcaagaaggtggttcttcttacgacagtctcacggctctgattcatcatttcaagactcttgtgcctaatcatgtgaatgggaatgggaatatcgatcactgaatgaatattacattgattcgagtttcatgtttttgattattagttatttatcaagtgaatgcatgaatgccataattttagggaatcttaatccgggtaactggctagctaccctaaatttcctaaatctat

SEQ ID NO: 35328 - DNA, 83 bp, Glycine max
  Clone ID: LIB3053-005-Q1-N1-F2
tttgagatgagagtcttgatgaacagtaccattctggtgtattgctttccttgaaagttaatgcatgcttcttatcttctgtc

SEQ ID NO: 35329 - DNA, 390 bp, Glycine max
  unsure (1)..(390): unsure at all n locations
  Clone ID: LIB3053-005-Q1-N1-F3
gaagcagttaaatgaatcttaaaatttgataagctaggattcatgctcatgctttttttgcaaatgttgttatgtcagcatgtangtacttcctactcctagctatttccaatggcatatgggattttccttgttggcagcaaaaaagttatttgcagctccttatttattgtgggagagattggatgcaatgattatggctatcctttgtctgaaacaactgcatttggagatctcgtgacttacataccccaagtaatatctgtaatcacttcagcaatcagggaattgattcatttaggggctgtaatgtttatggttcctggaagtttaccacttggatgtaattcagcctatttaacaagttttgcgactatagacaaagaggag

SEQ ID NO: 35330 - DNA, 390 bp, Glycine max
  unsure (1)..(390): unsure at all n locations
  Clone ID: LIB3053-005-Q1-N1-F4
ctgagcttcttgacacccaagtgaatcctgctgtgtgggaaattagtggacacatggttttaaagaggaggaaggattatgatgaggcgtctgaaggcaatgcttggaggcttcttgctgaggtgtccctttctcaagagaggtttcaagaagtcaatgatcttgtttttgaagccattggctgtggtgaattggaggatgtcaatgttcaaagtgtcaaaaaagaagttgatgcagtcagcacaagcgaacaccctactgtggtggtggtggctggttcacaagaatgtgtggttctacagtaacaaggctcttgtattttgaacaaattcagaaaatctgcagtgttttaagaataattgctgaaatgtgtcnaccgttaagtcatac

SEQ ID NO: 35331 - DNA, 375 bp, Glycine max
  Clone ID: LIB3053-005-Q1-N1-F5
aaaatagcaaaaaggtagtccaaaaaagatggatagctgctgcgagaagagatcgaacgaaggacatcgaagccaaagaacaaaaatgaacggaacaacaacactttcaacaacaccacaccactgtttccactccaacaccccaaccagtttcctcaacaccgtttccccaatccaattcctctctttccgcaatcacactcacaatctcagagtcctctgtttctcttcgaatccgtcgcagccgccgccggtggtggtggtgggctccgccaacgccgacatctacgtggagatcgaccgtctcccgcgcgagggcgagaccctcgcggcgaagtccggccaaacccttgccggcggcaagggcgccaacca

SEQ ID NO: 35332 - DNA, 277 bp, Glycine max
  Clone ID: LIB3053-005-Q1-N1-F8
attccttttcatatttaaaactaacgttaacatactggttcattgataactttatatcttttatacccaattcaaatacactatactaaatactaacctttctattctttattattacttcactacttaatacaatcctttccttctcatctttaccttcatttaatccttctctaattaatattaatacatattaactattttttatatatatcattattccaacatttatctaattaaatattataaaattaatatactacctacattaatactt

SEQ ID NO: 35333 - DNA, 184 bp, Glycine max
  Clone ID: LIB3053-005-Q1-N1-G1
ctcaagcttccataccaatggcaaccaacacctctgtgttatccggaccactatgaggtcactaagccatccaccacgcttacctgccatccatgccacacttctgtctattcttgtccagtcctaaccccctgaagatctccataacagatacagatgcaccatcgtgccacacagaccacat

SEQ ID NO: 35334 - DNA, 366 bp, Glycine max
  Clone ID: LIB3053-005-Q1-N1-G10
ctcgagccgctcgagccgattcggctcgagaacaggttggtcctcatcagcttttgtgttccaaaactaggaaattatccttttcttgaggcatattcccgtccaattcgatgcatctccagaagccgtaacacaagagtgtccactctggtgtggaaaaggtcaactgctcttcattgccatagtttatctcaatcttcagctatggacgatagatccttggaccttcagcattccagtcatgaagcacaagccaatccactgatgaagcggtttagacttggtcaagataagacatctgtatcagtgaaggctgaccccaccatagagcaacctgatgaagaatgtaattctcatgttcggact

SEQ ID NO: 35335 - DNA, 256 bp, Glycine max
  Clone ID: LIB3053-005-Q1-N1-G11
ggcttctctagcaaccttggctgctgttcaaccagctacgatcaatggccttgctggaagttccctctctggaactaagctctctttcaagccctctcgccacagtgtcaaatccaagaacttcaggagtggtgccgtggtagcaaagtatggtgacaagagtgtgtactttgatttggaggatctgggcatcactacagggcagtgtgacttgtatggctctgatgcacattcactctattaccctattgatatc

SEQ ID NO: 35336 - DNA, 415 bp, Glycine max
  Clone ID: LIB3053-005-Q1-N1-G12
ctcaatcagatttgcacatgatcgagcctcacaatttggctttaaattggtccacacccccattgtccttccccattgtgattcattagcacatttgcaaagtgttatttttctttttttctcatttgcactgcaaattgcaatggcttccaacaaggttattgccaccatcatggtgctttctctccttgcctactcaacatcattcaccaatgcatgtggcacatgccacccaaaacctaccccttctcctcctcctccatcaggaaagtgccctaaggacacattgaagctaggggtgtgtgcagatattctaggtcttgttactgttgttgttggctcccctgtctccagcaagtgttgtgcattgcttgaaggtttggctgatttggaggctgcactttgcctttgcact

SEQ ID NO: 35337 - DNA, 395 bp, Glycine max
  unsure (1)..(395): unsure at all n locations
  Clone ID: LIB3053-005-Q1-N1-G2
cattcctctgcggttccaaaacttacggtgacatgcggtgcggctgtgacggagatcaacgagacccaattcaaagacacggtgctgaaggctaaccgtccggttcttgttgagttcgtcgctacttggtgcggtccttgccgtctcatctcttccgccatggaatccctcgctaaggaatatgaagacagattaacggttgtaaagattgatcatgatgccaacccgcagctaattgaagagtataaagtttatggactaccgacattaatactcttcaagaacgggcaggaagttccagaaagcagaaaggaaggtgcaattacaaaattgaaacttaaagagtacgtggatgctntattggaatcaatatcagtttcatagtcatcatcata

SEQ ID NO: 35338 - DNA, 384 bp, Glycine max
  Clone ID: LIB3053-005-Q1-N1-G3
tttcagttggaaacctcaatgggaagcgtcaatttctcttccatggtcgcttccttgctcgttctctcccagggcgtaaccctaatgctatccaaatcactgcttctgttcttcgactacgagagatcctactacagcgaatactccgtcggattctccggcgtcctcttcgccatgaaagtcgttctcaattcccaatcggagaactacacctccgtctacggagtcatcgtcccgtcccgttacgctgcgtgggccgaattggttctagctcagcttctcgtgccgggtgtgtcgtttctcggccatctcggtggcattctggcggggcttctttatctgaagctgaggagtacttattcgggttctaaccctataaaagtt

SEQ ID NO: 35339 - DNA, 354 bp, Glycine max
  Clone ID: LIB3053-005-Q1-N1-G5
ccgaccttctgcatcttcttcttcttcgcgggctaatgagaagaagcccggacctgctaagccccaacccaagcccaagcctaagcctaagcccaagcccgctgctaaagccaaggacactaaggcaactaactcaaaggcaccagctaagcccaaggcagctgctaagcctaaagccaaagctccagccaagcccaagcccgcccctaaaccaaaggctgctgctgctgctgcttccaagcccaagcctgctgccgccaagcccaaagggactaagccagctgccaagcccaagcccaagcccgctgctaaaacaaaggctgctgctgccaagcccgcggcaaagcccaaagc

SEQ ID NO: 35340 - DNA, 334 bp, Glycine max
  Clone ID: LIB3053-005-Q1-N1-G6
aattccactcctatccaccttctaaacctacttctacatcctcgacaactgataattttcatcatccttacccaccccaaccacactccactcataactctcaacccaatccctctactaaaatccacactacactaatgccaactcaactcaaactcaccatctaatcccaatactcctactcaacctaataccaaaactccataccatcccaaacccaccactaaaccaacaactcctcatccatctacttacaatcccaatcactcacactccaaacccaaacggactaatcccactctcaaacccacacccaaccccacttcttaaacaa

SEQ ID NO: 35341 - DNA, 115 bp, Glycine max
  Clone ID: LIB3053-005-Q1-N1-G7
cacgaattttgcttctccgacatgtccaaggtttattgttacttttgtaagtttgagatttccttcttacattatttctttcttattcatttttcttttttttttcttctacttt

SEQ ID NO: 35342 - DNA, 346 bp, Glycine max
  unsure (1)..(346): unsure at all n locations
  Clone ID: LIB3053-005-Q1-N1-G8
gccttttaatatatggtgtggaggatgcaattcaatgattgcaaagggtgtccggttcaatgcagagaaaaaacaagtcgggaattattactcaacaaagatatggagcttcactatgaaatctgcctgctgtaaacaagagattgtcattcagactgatcctaagaattgcgagtatgtcattattagtggtgcccagaaaaaaaacagaagattttgatattgaggatgccgaaacttttgaattgcctgctgatgaagagaagggtaagcttgcagatccattttaccgncttgaacaccaggaagaagacttgatgaaaaagaggaagctgaaccagtgatc

SEQ ID NO: 35343 - DNA, 384 bp, Glycine max
  Clone ID: LIB3053-005-Q1-N1-H1
ctcgtggctcagatttgatgcataccaagagccttgagaattctcggaaacatcaggctcatacagagatacatgatactgatacgatgctcttgcctcaactctgtgatcttcaatgggattctcaatgcaaggtcattcaagatttgaaagataatttgaaaagcaatagccaagctttcgtttctgtatcaacagagaatttcatcgaaccactcgtcaggtttctgagcaatgcatatgatctgcgtgatattaacgcactgagagctggaactcagcttatgttggagtttgtgaacaactgcagaaatggtacgactaatttgcatgaagatactttcattatgctggcaagttttctgaattcaaatgtgattggag

SEQ ID NO: 35344 - DNA, 296 bp, Glycine max
  Clone ID: LIB3053-005-Q1-N1-H10
cccaatagcatgctcacactatagttctaaacattgctcgtgatatattacatcgcactcatctttccacacattactcctatcctgaagccaaatgaaatgacatccgaattcctcggagaattccaattccacattttcaagaaataacgacgcaaaaatgttcatatatgaatcggaattatttgttttcttattacccctatcctgaacccaaaggaaatgaaatcggaatccctcgggaaatcccaattccacattttcaagaaataaggacgcaaaaatgtccatatata

SEQ ID NO: 35345 - DNA, 335 bp, Glycine max
  Clone ID: LIB3053-005-Q1-N1-H2
tgcatgcacgcctactatagatgatcattttggtgaatctcaattctacattttcaagaaataccgaagcacagaggttcataggtgaattggaattattagatatattattaagcctatcctgaagccaatggatatgatatcggaatttctaggggaatttcaattccacattattaagaaataaggaggcaataatgttcatatatgaatagcaattatttgtgtacttattaagcctatcctgaaaccaatggaaatgagatcggaatatctatatgaattgcaatatcacattttcatgaaatactgaagcaaaaatgtgcatatatgaa

SEQ ID NO: 35346 - DNA, 217 bp, Glycine max
  Clone ID: LIB3053-005-Q1-N1-H3
tatgactccatgcacctactaagctcgaatcggtcgactgcatgcccgccattgtgactccactacgcagtatttgagatcctcatctccttccacattttctcctgttatatccctacattactatttcaaccccctgatatgtcaaatctagacatcagacttatcgacatagacaacactactaccgcaattcacatcatcatcaactactttc

SEQ ID NO: 35347 - DNA, 315 bp, Glycine max
  unsure (1)..(315): unsure at all n locations
  Clone ID: LIB3053-005-Q1-N1-H4
aaaattctcgccttctccgaatatggcatcgcgcgtgagcattggcaaccttacctnctccgcgccgtatattaattcccctcactttcgctcaccacttaaaatttccaacaacccctctctgcaaaacgcttcgcataaggtacttatgcgcgataagactgtactggtaaccggcggagccggttacatcggcagccacaccgttcttcagctcttgctcggaggtttcagagccgtcgtcctcgacaacctcgaaaaatcctccgaggttgccatccacagagtcagggagctcgccggcgaatttgggaa

SEQ ID NO: 35348 - DNA, 388 bp, Glycine max
  Clone ID: LIB3053-005-Q1-N1-H5
tcttaaaagagcctttgctttttctttaggcctttccggattaagtacttgtttcattttctctcgaagcaagaaaaatgttcatcgagagtttcaaggttgagagtcctaacgtgaagtacacagagactgagattcagtccgtgtacaactatgaaaccactgaacttgttcacgagaacaagaatggcacttatcagtgggttgtcaagcccaaaactgtcaaatatgaatttaaaaccaacacccatgtccctaaactaggggtaatgcttgtggcgtggggtggaaacaatggctcaaccctcaccggtggtgttattgctaaccgagagggtatctcatgggcaacaaaggacaagattcaacaagccaattactttgggtc

SEQ ID NO: 35349 - DNA, 345 bp, Glycine max
  Clone ID: LIB3053-005-Q1-N1-H6
caggacgcaaactatttcaataacatgggggcgcccggggttcaatactctaagaaagatcgggatattcaggcttatttttccttgattgctcaatgtggcgaacttgatgctgagagatcacttgatctctggaaagcgcaaagatcttccgattcttcaatcatctgcggcactgggtctttgatccagctgatagggatatctatggccctagactagaagatagacgactatggccaactcagaagctgcaaaacgcatcggctaacgcatgacatagcataatcccaggtcttcaatgatgagaacatcaccaattcatacagagaccaggttctcttc

SEQ ID NO: 35350 - DNA, 390 bp, Glycine max
  Clone ID: LIB3053-005-Q1-N1-H7
agacaatgcaaatttgttccggtacttggcttgatgtggtcttgacgattttgcaaaagaagtggtggttactgcattcgatacaaacagcaaaacaagagcatcatatttgaacatgcaaaatatcagtttctccatagtttccttggaaggaggagctgcgagtgcttgtacattttgcctccatatccaggtatggattactgtagatgtgtgctcctgttggagaagttgtaatgaattccataagtagggccagctcactggtaccttcacttccttttccttttgattgctgcagttccatatgatgacaacttagttgatgcctgtgttaattatttcacccaacccccataaaggaaatagacatcgtgtaacactagtttc

SEQ ID NO: 35351 - DNA, 307 bp, Glycine max
  Clone ID: LIB3053-005-Q1-N1-H8
ctcgagccgattcggctcgaggccagatgacttgttggaacgaatcctagcctatctccccattgcaagcatttttagagctggctgtgtgtctaagaggtggcatgaaattgttaattcagagaggtttgtatggaacctttcacatgttctaccgcagaaaccttggtactttatgtttacgagctctgatgaaccagatggttatgcttttgatcccgtccttcggaaatggtatcggtatcgcattgaacttccatgcattggaacttctaattggttcattgcttcatcatattgcatggtc

SEQ ID NO: 35352 - DNA, 383 bp, Glycine max
  Clone ID: LIB3053-005-Q1-N1-H9
gcagaaagcaagctcatcctagagttttaaaaatggcagcagcctcctccatggctctctcttccccatccttggctggcaaggccgtgaagctgggcccatcagcccccgaagtcgggagggtcagcatgaggaagaccgtcaccaagcaggcctcctccggaagcccatggtacggcccagaccgcgtcaagtacttgggcccattctctggcgagcccccgtcctacctcactggcgagttcccaggtgactacggctgggacactgctgggctttcggccgacccagaaaccttcgccagaaaccgtgagctcgaagtgatccactccaggtgggccatgctcggggccttgggctgcgtctttcccgaactattgtcc

SEQ ID NO: 35353 - DNA, 410 bp, Glycine max
  Clone ID: LIB3053-006-Q1-N1-A1
aaatgctggaaatattgctcatcgtctagaaatggtccgaataatgttgcagcagttacattgcaatgttttcatgctttcttaccgaggttatggagcaagtgatggctatccttctcagcatggaataactaaggatgctcaggctgcattggatcatctttcccaaaggcctgatattgacacatctagaatagttgtgtttggacgatcacttgggggtgcagttggagctgtactaacaaaaattaaccctgacaaggttgctgcactgatacttgaaaatacattcacgtctatattggatatggctggagttttgttaccttttttgaagtggtttattggaggaagctcttcaaatggtcctaaagtactcaattttcttgtacgttctccgtggagtacta

SEQ ID NO: 35354 - DNA, 397 bp, Glycine max
  Clone ID: LIB3053-006-Q1-N1-A10
ggcatataaccttcaacggattgcataagcttgtgcatgcgggtgacacattgttaaagaaaaaacacaaaaaggctctctcatccctatattaggaccaaaagaatctttttgtcctaatatagggatgagagagccttgaactttttggcatttcaagaatttcaagcaaatctacacttgggctacttttggggtacttttatagtcattgaaaggcaaagcaagcgcgcattctcatcatttaatatatttgcagcttcctgcaaagtacaagaacataatatattccattattgtatcaatacaagtctgcagtatattctttccccccattcttcctttctgggatcttgaaaacagtaaaataaaaaatgataattgatgtttctttttt

SEQ ID NO: 35355 - DNA, 422 bp, Glycine max
  unsure (1)..(422): unsure at all n locations
  Clone ID: LIB3053-006-Q1-N1-A11
caacgaatcaacatatgactacttgctacttctgattagacggcgcctgtatacttttgatgattgcaaatctgagatccaagttttctcattcaaaacgggtttgaggaatagagatgttattacggattcagagctcggtcgttattggatgtggctcttcattggttggtcttttgcgagaatgtagacaatgggttgagtacatgtagttcctataatggccatttgttacaatggagagagaatgtgacctatgagttgagtacccataacgaagagagaagagagcctatggtttgaatatccatagtttccataatcatcgactgctacgacgaagagagaatgcaacctataatctaagtgattgttatcctatagttattgtttgccacaacanagagataatgtggttcatt

SEQ ID NO: 35356 - DNA, 409 bp, Glycine max
  Clone ID: LIB3053-006-Q1-N1-A12
gttttgctgaagaaaaggctgcttggaaaaaaaaggaggaggaaattgttgaagctgcaattgaatctggtgctggggaactcgatgtatagagggaactcaagagacgattagaaagcttgaacacgaaacttgggagagaactggctgacaccaaaacattccttcttaaagtggtgaaagagctttgaagtgagaagagagcaagagaaattattgagcaagtatgtgatgagttagcaagagatgctgatgaagataagtctgatattgagaaaccaaagagagtgtctaccaaaagttggggagaggtagagaaagaaaagggaattatgccattggcttgataggttacgcgaggagagagctcaaaggaaattctctgaggcaaaatatcagcttgaggaaa

SEQ ID NO: 35357 - DNA, 408 bp, Glycine max
  Clone ID: LIB3053-006-Q1-N1-A2
gagatctttctatcatgatgttgcccagcttcagggtcttgcaaaaagtttgcacaaagattgcattgctaaaatggaaccatctaagtgtctctttccatcagaaattgctaaaaacataaagactccactgttccttgttcatccagcttatgatttctggcagatacgcaatattttggtgcctcaaggatcagatcctgatggtcactggcaaaggtgcagactggacattcgcagttgtaatgctaatatgattgataaacttgacagttaccgtggctctttgctgaaggctgtgaatgaattccaacaacgaaaggagattggaatgtttatagattcatgcttcgtccattgccagactgagatggaagtgacgtggcattcacccaactctcctaaata

SEQ ID NO: 35358 - DNA, 389 bp, Glycine max
  unsure (1)..(389): unsure at all n locations
  Clone ID: LIB3053-006-Q1-N1-A5
ggaggatttgattttagagcggctgccaaatctggagagtgtttggaattcaaatgttgagcttacgttcccccaagtcaagtcattggcactatgtgatctgccaaagttaaagtatgacatgttgaagccatttacacatctaaatcaagtctgtattcaaaagcttacacccaacatagagcacctgacactcggtcaacatgaactcaacatgattttgagtggagaattccagggaaaccacttaaacaagttaaaagttcttgccctgttctttcatattgaaaccgatgtatttctacaacgggtgcccaatatagagaagcttgaggtgtgtgatggttacttcaaagagattttctgctntgatagtcataatgtggatg

SEQ ID NO: 35359 - DNA, 406 bp, Glycine max
  unsure (1)..(406): unsure at all n locations
  Clone ID: LIB3053-006-Q1-N1-A6
gccgcctctgataattgattactatcaacccaacttcaagttgtgttcttttgtggtgtgtaaccgtattctgtatttgttttcatcaattggaaactgggttttctcgctttttgcagataagcatcaataggatactagatcatggattggtactatgggaacggcattaatgattatctggttcccagagatcaggatttattggacaggcatccttcaccagactattggtcaaactggggaataagtgcaactgaagggattctgtacctgaaggtcttccatgtgttgacgttgaaaacctagacaaatccatcaacatttctcctgaaaaccaatgcagcagtacacctggtatattgcagaaagatataccagcttcaaagtctngttctagcaactc

SEQ ID NO: 35360 - DNA, 407 bp, Glycine max
  Clone ID: LIB3053-006-Q1-N1-A7
ctcaaaaccctaacaaaccaacaacagttgctgccatgttcaccaatggctttctccaaggcaatgtttctcgccgccgtaatgtcggtgctcgtcgccgtcatctccgccgccgaagctccagctccgagccctacgtctcccgacgccgccgtttcgccgtccttcgtcgccggtgttctcgccgccggagccgctcttgcgttcggatctgctctgcggatctgaacgtagctcatggattttctcgtttacatgcgtggatttttagtagaagcggagatttgagcagcattagtatataactctctctctctctctccctacctctctctctatatatatcgatattgctatgtagagattattactacatatgttgatttctggatctatattgcgttcat

SEQ ID NO: 35361 - DNA, 396 bp, Glycine max
  Clone ID: LIB3053-006-Q1-N1-A8
agtgtgttaagcctcgccgactcggttgctatcagcgagtgagagtgagtgagtggttctcttgcagcaacaaggtttagtgacaccaaacagactggaaatgggtcgtggggtcagtgctggtggtggacagagttccttggattatctctttggcagtggggtacctgccagcagtgcaaatggtgctcgcactcaaaatgcaagtgctccttcaccaccggttgataagcaaagtccagcaccagcagcagcagcagcagcagcaccagcacctgcaccagcaccagcaccagcaccagctgataagcaaattccagctggaattcctggaagtctcaaaaacaattaccatcgcgctgatgggcaaaactgtggcaactttctcactgatcg

SEQ ID NO: 35362 - DNA, 425 bp, Glycine max
  unsure (1)..(425): unsure at all n locations
  Clone ID: LIB3053-006-Q1-N1-A9
gttaaattggaagaaagagtagatcgatcagagaaagaggggagatggaagttgaagggtcatcgaagaagatgatagcgactcaggaggagatggtggaggccagggttcctctggcctacagggaccagtgcgcccacttgctcatccctctcaacaagtgcaggcaggccgagttctacctcccatggaagtgccaggaccagcgtcactcctacgaaaagtgccagtacgagctcgtcatggagagaatgctccagatgcaaaagatccgcgagcaccaacaaaaccccaacgccaaacaaccccttatcgcgcttcccaaacccgccaatgcctgattcatattcactgaacctttgcttgggacagatgttatttcatgtnatgctattgtatggatcaaagtgactttggaatgtttg

SEQ ID NO: 35363 - DNA, 408 bp, Glycine max
  Clone ID: LIB3053-006-Q1-N1-B1
cactttcaaatcaactcaagagattcaaccaagaaatatagaagctagggttttgttacatttgtgttagcacgcaatactttgcaaatatggagagcagcttaggagacatgttggttaaggttgtggtgttcattctagttcaagccttggtttaccttatcctctccaattcatcaaacgtgttcaacaagaacatgaagaaatctaacagcttcaggccggcacgttcggtgagcattcgccggatgctcgctttgatctctgattttcctccagaagaagaaccctctccttcaccgaagggtgctaaaacaacatcacttcatcaaagtgatcaataattgtaaggatttaattaaattgtggctgcaattacaaattggagacaatttcagcttatcgggt

SEQ ID NO: 35364 - DNA, 394 bp, Glycine max
  Clone ID: LIB3053-006-Q1-N1-B12
ttttgctgtataaaagctgcttggaaaaaaaatgactagtaaatttttaaagctgcgattgaatctgttgctggtgaactcgatgtacagaggaaactcatgagacgattagaaagcttgaacaagaagcttgggagagaactggctgacaccaaaacatcccttcttaaggtggtgaaagagcttgaaagtgataagagaacccagagaaattattgagcaagtatgtgatgagttagcaagagatgctgatgaagataagtctgatattgataaacaaaagagagtgtctacaaaagtttgtgaagaggtagataaagaaaaggaaataatgcaattgactgataggttacgctatgagagagctcataagaaactctctgaggcataatat

SEQ ID NO: 35365 - DNA, 407 bp, Glycine max
  unsure (1)..(407): unsure at all n locations
  Clone ID: LIB3053-006-Q1-N1-B3
caagcaaccaatttcaaatccaatcatggggagctcaaccttctgtgccttcttcctcctgtgtgcaatcttggccgtccacgtggcacaatcctcatcctccaccctcgacctggacgccttcttcctccctctcaagtccggctgtcgcggatccgtcgccgagtgcagcctcctcgccggcgacgacgccgagtttctgatggagtcggagagcaaccggcgcattctagcaggaaggagctacataagctacggtgcgctgaggaggaacactgtcccttgctcccgacgtggtgcttcctattacaattgccggcccggcgctcaggccaacccctacagccgcggatgcagtgctatcacccgatgcaggcgttgaatctattcttcttctcttntttttt

SEQ ID NO: 35366 - DNA, 337 bp, Glycine max
  Clone ID: LIB3053-006-Q1-N1-B5
tgggctttcaccttcaattgagactcttgataacatagggaacttcgatcgtgttcaagaggttcctcatgaagggcccatgtgcgatctgttgtggtctgatccagatgataggtgcggctggggaatttctcctcgtggtgctggatatacatttggccaggatatatccgaacaatttaatcactcaaacaagctcaagttaattgctagagctcatcagctggttatggatggatttaactgggctcatgaacaaaaggtggttaccatttttagtgcacctaactactgttatcgatgtgggaacatggcttccattttggaggttgatgat

SEQ ID NO: 35367 - DNA, 240 bp, Glycine max
  Clone ID: LIB3053-006-Q1-N1-B6
attttcttttatctgtagtagctgaatgaaccacggggtgaaataacacacaaagaatcatccgagtcaatgtgtagtaggaactccatggcactgtaatttcttctcattacccttggatgtagtagtttagattgttagtcctatgttgttacaggtataatttcaagtctttgtacagctggagcattacccagtgagatagcatgcatagatgaagcggttaaaccgtaaatgctg

SEQ ID NO: 35368 - DNA, 360 bp, Glycine max
  Clone ID: LIB3053-006-Q1-N1-B7
caaaaggagagtgcaataactcgttgtacattcctagtgtgtgggagagacatggctaagatgtgtgttttggtgttggttcttgctctggctgtggccacaagtgccagaaacgttcccaaccccaaggatgctggtcttaaggaccagaagaacttcatcagctatggtggagttggtggttattccgggattgggaacaatggactgccttttggaggagctggtgccggaataggtggtggttttggcggaggtggtggacttggtggtggacttggtggtggacttggtggtggcctcggcggtcctaccggtggaatcggagggtttggcggtaccggtagcggtgtcggtggc

SEQ ID NO: 35369 - DNA, 417 bp, Glycine max
  Clone ID: LIB3053-006-Q1-N1-B9
caaatggcggcgagtagaagcacttttcctctgatgaaatgcttgagagtgcccgtcgacgctctttcccgcaacactcccttaaccctcgctcccaactttttgattcgccgcttctgtgaagaggttaggggttgttttctcgacaagtctgaggtcacagatcgcgtcatttcctgcgtcaaaaacttccagaaagttgatccttcaaaggttaaccctaatgctcacttccagaatgaccttggattggatagtttagattctgtagagattgtgatggctcttgaggaggagtttggtttctagattccttgtaatgaggctttcaagattctacttcataaaactttcatttgactttatttgtattttattcttatgctttatttttttattttattttttttatattat

SEQ ID NO: 35370 - DNA, 410 bp, Glycine max
  Clone ID: LIB3053-006-Q1-N1-C1
tgcccttgatgatgtgtcaattactagtctgacttttggcaaggagtttactgctgcaattgaagctaagcaggtagctgcacaagaagctgagagggctaaatttgttgtggaaaaagctgagcaagacaagagaagtgctgtaattagagcacagggagaagcaaaaagtgcccaactgattgggcaagctattgccaacaatccagcttttatcacactgaggaagatagaagccgcaagggagattgcacatactatatcaaatgcggcaaacaaggtttacctgaattcagatgatctattgttgaatcttcaagagatgaaattggagccaggcagaaagtgagtgtgttagcctgtttgtttctttttggttttagcttgtaaactatcaatttcaggatcga

SEQ ID NO: 35371 - DNA, 412 bp, Glycine max
  Clone ID: LIB3053-006-Q1-N1-C2
tgcccttgatgatgtgtcaattactagtctgacttttggcaagtagtttactgctgcaattgaagctaagcaggtagctgcacaagaagctgagagggctaaatttgttgtggaaaaagctgagcaagacaagagaagtgctgtaattagagcacagggagaagcaaaaagtgcccaactgattgggcaagctattgccaacaatccagcttttatcacactgaggaagatagaagccgcaagggagattgcacatactatatcaaatgcggcaaacaaggtttacctgaattcagatgatctattgttgaatcttcaagagatgaaattggagccaggcagaaagtgagtgtgttagcctgtttgattctttttggttttagctggtaaactatcaatttcaagatcgatt

SEQ ID NO: 35372 - DNA, 402 bp, Glycine max
  Clone ID: LIB3053-006-Q1-N1-C3
tgcccttgatgatgtgtcaattactagtctgactttgggcaaggagtttactgctgcaattgaagctaagcaggtagctgcacaagaagctgagagggctaaatttgttgtggaaaaagctgagcaagacaagagaagtgctgtaattagagcacagggagaagcaaaaagtgcccaactgattgggcaagctattgccaacaatccagcttttatcacactgaggaagatagaagccgcaagggagattgcacatactatatcaaatgcggcaaacaaggtttacctgaattcagatgatctattgttgaatcttcaagagatgaaattggagccaggcagaaagtgagtgtgttagccttgttgtttctttttggttttagcttgataactatcaatttc

SEQ ID NO: 35373 - DNA, 405 bp, Glycine max
  unsure (1)..(405): unsure at all n locations
  Clone ID: LIB3053-006-Q1-N1-C4
cgtaactattgttggtgctgtttcgccacctggaggagattgctcagatcctgtgacatctgcaaccctgagcatagttcaggttttctggggtttggacaaaaagcttgctcagaggaagcactttccttctgtaaactggcttatttcttattcaaaatactcaacggcacttgaaaccttttatgagcaatttgatccagattttatcaacattaggacaaaggctcgtgaagttctgcaaagggaagatgacctgaatgaaattgttcagcttgtgggcaaggatgctttagctgaaggagataagatcaccttagaaactgcaaagcttttgagagaggattatcttgctcaaaatgcctttacaccatatgacanattctgccccttctacaagtctgt

SEQ ID NO: 35374 - DNA, 408 bp, Glycine max
  Clone ID: LIB3053-006-Q1-N1-C6
atcaaacctaaccagtaaaaatggtgaccgtggaggaggtccgcaacgctcagcgttcccatggacccgccaccatcttggccttcggcaccgtcacgccgtccaactgcgtctcccaagccgattaccctgactactacttccgcattaccaacagcgaacacatgactgatctcaaagaaaagttcaagcgcatgtgtgaaaagtccatgataaagaagcgatacatgcacctgacggaggagtttctgaaagagaacccgaacatgtgcgagtacatggcgccatcgctggacgtgagacaagacgtagtggtgatggaggtgccgaaactgggaaaacaagccgcaacgaaagcgattaatggagtgggtcaaccaaagtcaaagatcacacactctgtgttct

SEQ ID NO: 35375 - DNA, 327 bp, Glycine max
  Clone ID: LIB3053-006-Q1-N1-C7
atcaaacctaaccagtaaaaatggtgaccgtgggggaggtccgcaacgctcagcgatcccatgtacccgacaccatacttggccttgtgcaccgccacactgtccaactgcgtcttccaagtcgattaccatgactactacttccatattaccaacagcgaacacatgactgatctcgaactaaagttcatgcgcatgagtctaaagtacatcatagagaaaccatacatgcacctgacagtggagtttctggtcgagaaccagatcatctgcgagtacaaggcgccatcgacttacgtgagacaagacgtagtgatgatggaggtg

SEQ ID NO: 35376 - DNA, 314 bp, Glycine max
  Clone ID: LIB3053-006-Q1-N1-C8
atcaaacctatccacttaaaatattgacccttgggtagatccttatctcttatcgttcccatgtacccaacaccatcttgtccttctgcaccatcactccatccaactacatctactaagccgattaccctgactactactttctcattaccaacatcgaacacattactgatctcaaagaaaagttcaagcgcatgtgtcaaaaatccataataaacaatctatacatgcacctaatctacgactttcttaaagataaccctaacatgttcgattacatagcaccatctatgtacatcagacattacttaatc

SEQ ID NO: 35377 - DNA, 414 bp, Glycine max
  unsure (1)..(414): unsure at all n locations
  Clone ID: LIB3053-006-Q1-N1-D1
ttttaggttgttttgagaaagcaaaaagaaaatcagtaggcgtggagaacagcaaagaaagaggaataatggagcaggaagagcacgaagtgtacggtgcagacattcccgacgaggagattgacatggacgcagacgccgagcaacaagatgagcaacttgcccccaatcacacaaacaaggaactggaggacatgaagaagaggctgaaggagatcgaggaggaagctagcgcccttcgcgaaatgcaggccaaggtcgagaaagagatgggcgctgttcaagattcgtcgggcacttccgcaactcaagctgaaaaggaggaagtggatgctcggtcaatctatgttggtaatgttgactatgcatgtacgcctgaagaagtccagcagcattntcagtcctgtggaactg

SEQ ID NO: 35378 - DNA, 396 bp, Glycine max
  Clone ID: LIB3053-006-Q1-N1-D12
gtcacctacaccttttggagttcaacctaacacagtgaaagggataccaagcaaggtgttacaagaactatcttcagcggcaaatggaactggtcataaccatacatcacgagcttatatcagtggcagtgcaccggctgctaaggcacaggttgctggttggcctcctataagatcatctaggaaaaactcattggccaccacttcaaagaattatgattaagtagattgaaaaccggctgcagtaacactctttgcgaaagtcagcatggatggtgctccctatcttaggaaggtagatctaagaaattatacaatgtaccaggaactgtcttactgccttgagatgatgttcagctgattcactctaggtcaatgtcgttcccatggagcttc

SEQ ID NO: 35379 - DNA, 380 bp, Glycine max
  unsure (1)..(380): unsure at all n locations
  Clone ID: LIB3053-006-Q1-N1-D2
gaaatatcattttgcgaggcaatcccattctcatcttggattggcaccatcaatactattttcttgtcgttgagaagcttcgcgaacgaaagcaaagaaccctagaccgtcacagaaccattccatagccatgtctggtgttggccctctttctcaggattgggaacctgtcgtcctccgcaagaaggctcccaccgccgccgccaagaaggacgagaaagccgtcaacgccgnccgccgctctggcgccgaaatcgaaaccctaaaaaagtataatgctgggacaaacanagcagcatctagcggcacttcattgaacactaagaggctggatgatgatactgagagtctagctcatgagaaggtgccaactgaaccta

SEQ ID NO: 35380 - DNA, 379 bp, Glycine max
  Clone ID: LIB3053-006-Q1-N1-D3
taataagcatttttcaaagcgctcccatactcatattgggtggacaccacagctactatagactagtcatggagcagcttcagcaccaaatgcacagaacccacattcgccacaaagccattgacatgcactcatacgcctagcacatctattatcaacattgccaacctgacacactccacgagctggctgacatcaacaacaccctgaaggacatcaaagacgaagataccgcccttcgctatatccacgccatcgtcaccatagagatgtatactgctcaaacttacacagccacttctaccgctactgctttgaacactgagatgcttgatcatgatactgatagtctagctgatgactatgcgtctactcatct

SEQ ID NO: 35381 - DNA, 404 bp, Glycine max
  Clone ID: LIB3053-006-Q1-N1-D4
agaccacactaccctcaacatagtaaagcagctggtgcaagtgaagcaatggctcaaaccatgttgctcatgtctagtgtctctagcagttattccgtggatttgaagaaagaccttttcctccaattgcagagtcaaagtttaaggcctaagttctctcaactctcattcaacccacttccaccatcaacttcttccttttcttcaccccgtacattcacaaccctggctctcttcaaatctaagacaaaagccgctcctgctaagactaaggttacaaagccaaagcaaaaggttgaagatggtatctttggcacttctggaggatttggttttacttaacagaacgagctctttgtgggtcgtgttgctatgcttggttttgcagcatcattgtggggtga

SEQ ID NO: 35382 - DNA, 404 bp, Glycine max
  Clone ID: LIB3053-006-Q1-N1-D5
gcttcctcgaagcgtgttgatgcggcagcagtcccctggcgtcccgcacccacaagcttggcggtgttcgacatcaacaccatccaggagccatggctgatgcacctgatcaacactcactcgtctcctgcatgacaataataaaccctatctccccgcccctattctccacaaactcaacttgctcgacgccacctatgccctctaatcctgggatgagattagcaaaacactctaagacctcaaacccaatttcacctcaccccaacatcaacctgaaccttcacataagaccaagtcctttcacactgttgaagagctagacgccaagctcaaccctaagcccgagcctaagcccaagcctaatccagaattgaaaaagcccgctgatcagataattaaca

SEQ ID NO: 35383 - DNA, 410 bp, Glycine max
  unsure (1)..(410): unsure at all n locations
  Clone ID: LIB3053-006-Q1-N1-D6
ctcattctccatacctcaacgaagaggttaaagagacggcaacactttgctgtccgccttgaccgagcagagcttcgtcttggccctcgattttgccctaaagtactctcagtcacaacagacaccgtcgtcgtcgtcgtcgtcatcaatggcaccgaagcagaccaaggctgagaagaagatcgcttacgatgcgaagctgtgcgacctaatggaggagtacggccagatcctcgttgtgaactccgataacgtgggatcgaaccagctccagaacattcgcaagggtctccgtggcgactccgtcgtcctcatggngaagaacaccatgatgaagcgctcagtcaggatgcacgctgagaaaaccggaaacaacgcctatctcaacttatcccgctccttggtggcaa

SEQ ID NO: 35384 - DNA, 400 bp, Glycine max
  Clone ID: LIB3053-006-Q1-N1-D7
ctcattctccatacctcaacgaagaggttaaagagacggcaacactttgctgtccgccttgaccgagcagagcttcgtcttggccctcgattttgccctaaagtactctcagtcacaacagacaccgtcgtcgtcgtcgtcgtcatcaatggcaccgaagcagaccaaggctgagaagaagatcgcttacgatgcgaagctgtgcgacctaatggaggagtacggccagatcctcgttgtgaactccgataacgtgggatcgaaccagctccagaacattcgcaagggtctccgtggcgactccgtcgtcctcatggggaagaacaccatgatgaagcgctcagtcaggatgcacgctgagaaaaccggaaacaacgcctatctcaaccttatcccgctc

SEQ ID NO: 35385 - DNA, 411 bp, Glycine max
  unsure (1)..(411): unsure at all n locations
  Clone ID: LIB3053-006-Q1-N1-D8
caaattaatccatatatagagagagttaggaaaacaagggaagccatttctcctaagcatcttatgacatcccttgtaataattatagcttctagtttgaccgcacactgtggctgtgccaagagagggggtgaaagaccatacaaagaagccaacacactgttcataagaacatcttgcagctccacaacatatccaagactctgctacagctccttagtgaagcatgcagacttgatccaaacaaatcgtgtggttctgacaggcgcagccctgaatgtgactcttgcgtcagtgaaatcgacatcggcaatgatgtcaacgctggcaaagaagcaggggctgaagccaagagaggttgcagcgatgcangactgtgtggagcagctgagtgacactgtggatgaactg

SEQ ID NO: 35386 - DNA, 366 bp, Glycine max
  unsure (1)..(366): unsure at all n locations
  Clone ID: LIB3053-006-Q1-N1-E12
cccaaactggagctgatagagaagtacagcgtatccttatggaacttttgaatcagatggatggttttgaccaaacagttaatgttaaagttattatggcaactaacagagcagacactttggaccctgctctgttgcgtcctggaaggcttgatcgtaaaattgagttccctttgcctgatagacgtcaaaagaggcttgtatttcaggtttgcacagccaagatgaacttgagtgatgaggtagatctggaggattatgtttctcgccctgacaaaaatcagtgctgctgagatatcagctatntgtcaagaactggaattccatgctgttcgcaagattagatatgtcatactgccaaaggac

SEQ ID NO: 35387 - DNA, 413 bp, Glycine max
  unsure (1)..(413): unsure at all n locations
  Clone ID: LIB3053-006-Q1-N1-E2
agttctgacattgtgatcttagatgacaacttcaattgtgttgccactgtcttaaggtgggggagatgtgtctataacaacatccagaaattcatccagtttcaactaaccgtgaatgttgcagcactagtgatcaattttattgcagcagtttcttcgggagacgttcccctaacaacagttcaactattatgggtaaatctcattatggatactctaggagcattggcactagctacagaaaggcctacaaaggagttaatggagaaaaggccagtgggtagaactgagcctcttattactagtattatgtggagaaaccttttagctcaagctntatatcagattgctgttctcttggttttacaattcaaagggaaagtcaatcttcaatgtaaaatgggaaggtaaag

SEQ ID NO: 35388 - DNA, 400 bp, Glycine max
  Clone ID: LIB3053-006-Q1-N1-E6
ccaaaagccagactataatgggctaagtcaccttaaagttgtgaccatgattttatacgaggttcttaggttatacccacctttaatttattttgctcgagcgatcaagaatgatgtgaaacttggaaacctttccctacctgcgggagtgcaagtttccttaccaatactattgattcaccaggatcgtgatatttggggtgatgatgctacagagttcaacccagaaagatttgctgaaggagtagcaaaggcaacaaaaggccaagttgtgtttttcccatttggatggggtcctagagtgtgcttaggccaaaattttgctttattagaagcgaagttggttttgtcattactcttacaacgcttctcatttgagctttctcctacctatgcacat

SEQ ID NO: 35389 - DNA, 409 bp, Glycine max
  Clone ID: LIB3053-006-Q1-N1-E7
ataacacaaggcagaaagcaagctcatcctagagtttgaaaaatggcagcagcctcctccatggctctctcttccccatccttggctggcaaggccgtgaagctgggcccatcagcccccgaagtcgggagggtcagcatgaggaagaccgtcaccaagcaggcctcctccggaagcccatggtacggcccagaccgcgtcaagtacttgggcccattctctggcgagcccccgtcctacctcactggcgagttcccaggtgactacggctgggacactgctgggctttcggccgacccagaaaccttcgccagaaaccgtgagctcgaagtgatccactccaggtgggccatgctcggggccttgggctgcgtcttccccgaactattgtcccgcaacggggtcaagt

SEQ ID NO: 35390 - DNA, 409 bp, Glycine max
  Clone ID: LIB3053-006-Q1-N1-F1
gtttatgataaagagcattgcattctctctggggttctggagatgtctaatagcaatggttttgttggtggatcaagaagttgtgtgaagagatggagtatgatttgtcaaacagaaatgtcacctggttgtggctttttcaagaggaaacatgttgctgtgcccgaattaccttgtcctgaaattgaggtttatgttgctggttgcttctcaggaacacctattatcttaactaagacactgcaactcaattgccggaagaagcataacaggaaatgcgccttggattccattccagaatatgaaacaactgagtgccagaaagatgtttctgatcatggacttgatttgcaggtagttgactgtagaagcttcaaactggaacaagaagaggattacaacagcatgt

SEQ ID NO: 35391 - DNA, 344 bp, Glycine max
  Clone ID: LIB3053-006-Q1-N1-F12
accgcacgaatatcttgttgtttggagcgatccgagaaaaacgtctgtaaacatgttggtttaccaggacctccttacaggtgatgagcttctctctgactccttccgttacaaggaaattgagaatggaatgctgtgggaagttgaggggaagtgggttgttaaaggagcagttgatgtagacattggtgcaaacccttctgctgaaggtggaggagaagatgagggagttgatgatgcagctgttaaggttgttgacattgttgacacattcagacttcaggagcaacccgcattcgataagaagcagtttgttaccttcatgaagaggtttatcaagaatt

SEQ ID NO: 35392 - DNA, 366 bp, Glycine max
  unsure (1)..(366): unsure at all n locations
  Clone ID: LIB3053-006-Q1-N1-F2
cttggcccttgcagatgatctcatctccagggcctttcattgccggagggggaaagcatacctattcaataatgccgtgaacttcacaattggaacaccagaagaaaggatgatgctttcaggattacatactgtcgcagatattttttgctgttgctgcggtcaaataattggctggaaatatgaatctgcacacgagaagagccaaaagtataaagaagggaagtttgttcttgaaagatgaaggattgttgatgaagttgatttctccactgagttctacatcgatagtcatgccagcatgagtgatgctgaagaacctanaacatgcgggctggccttgttggatcatgagaaagatgcact

SEQ ID NO: 35393 - DNA, 412 bp, Glycine max
  Clone ID: LIB3053-006-Q1-N1-F3
cggctcgagctcgagccgattcggctcgaggttgttcggcgggtccttgccttaattccattaaaatgctacctccaaacctagaatctttgctcctcaaaaaaggggtggataaaaaggcttcctcatcatcctctcccgtgaaatttgcaagttccgtcagttcacccaaatcctgcgaggaaacttctgatgctgtgacaatagcggatttacatcatctatggcagcttgtggaggagaaagatggaggtctcccttggattcagatgatggatcgttctacccctaccatgagttacaaagcatggcgtagagaaccaaaggatggtcctccccaatatagaagcagcactatttttgaagatgctacccctgagatggtgagggacttgttttgggatgacgagtt

SEQ ID NO: 35394 - DNA, 405 bp, Glycine max
  Clone ID: LIB3053-006-Q1-N1-G1
ctcatgtttgacaggcctaaatttcatgatgaattgaaattatgaatataattacggttaaaattatttcctatcagttttgtgtttatgtttattcctaatttttctgcagacatgtttcttgctcttgataaagatacaaatgggacattaagcaagcaggagctgcgagaatatgcagatgcgactctggctgatatttttattgagagagtatatgatgaacatgttcgacgtggaaagagtggtggtgggaacgcccgagagatggatttcgagagtttcctggactttgttttggctttagaaaacaaagacacccctgaaggcttgacatacttgtttcgatgccttgatcttcaaggaaggggttacctcactactgctgatgttcactcccttttc

SEQ ID NO: 35395 - DNA, 401 bp, Glycine max
  Clone ID: LIB3053-006-Q1-N1-G3
caaagtttcacttcagccttatccggtttagggtttcggttttggaccctacctttgacgtatcgaaaccttaagtttcggatcaggtctgagcaatctggttggtagaacctttggtcttagagagtcaagttttatgtctgaattagacgatcaaattcctactgccttcgatccttttgctgatgcaaatgctgatgactcgggtgctgggtcaaaggagtatgtgcatattcgggtacagcagcgaaatggtaggaaaagcctgacaaccgttcagggattgaaaaaagaattcagctataacaagatacttaaagatgttaagacagagttctgttgcaatggaacagttgttcatgacccagaactaggacaggttattcaacttcaaggtgatc

SEQ ID NO: 35396 - DNA, 463 bp, Glycine max
  Clone ID: LIB3053-006-Q1-N1-G4
gagagacaagctagcatgcctgcacgtcaactccggatttcggttcgagccgttattgtccccaatgacccggacctcatcgacatggtcggcatgaacggcgtcgacatttccgtcgcggaaggcgaatcccccaacagcttgttcaacatcgttggcaacttgctcttccccttgctcgcgttcgcgggtttgttcttcctcttccggagagctcaaggcgggcccggtgggcctggcgggatgggtgggcccatggactttggacggaacaagtccaagttccaggaagtccccgaaaccggtgtgagcttcgctgacgttgcgggcgcggaccaagcgaagcttgagctccaagaggttgttgatttcttgaagaatcccgataagtacaccgcgttgggcgcgaagattccgaaggggtgtcttttggtggggccaccgggaaccggaaagacctttt

SEQ ID NO: 35397 - DNA, 403 bp, Glycine max
  unsure (1)..(403): unsure at all n locations
  Clone ID: LIB3053-006-Q1-N1-G5
gtgtattctttcttttgcgaattttttttcagagttgatttgacgtaacccaaaatcgtgtttaatgttttgaggcaatttctttgtttgctacatcaatggggtttctttaaacaatagttttggaattttcgttttaaattgtttgcctattggctacattgtttggttttacattgtctggttcttctttattcaagaacgcatcatcttgtacaagatttgcacgaactcagagcgagagcaacaggaggaattgtctactttccgcaaccagatatgttctgaagggtaatccctaggacctggaatgcaactcacttagcaagtcttgcttcagttaanaacggatagtatatctttttcctaatctggtattcttgctagagttaaaaacagatag

SEQ ID NO: 35398 - DNA, 345 bp, Glycine max
  Clone ID: LIB3053-006-Q1-N1-G6
gttcctatcatcacttctcaaatctcgaaccctgtcgttcgtgccgatcactaggtcacacttcatcaatggcgggtagaggcaaaaccctaggatccagcgccgctaagaaggccacctcaaggagcagcaaagccggcctccaattccccgtcggtcgtatcgccaggttcctcaaggccggaaagtacgccgagcgcgtcggcgccggagcccccgtctacctcgccgccgttctcgaatatctcgctgctgaggttttggaattggctggaaacgctgcgagagataacaagaagactcgaattgttccacgccacatccaattggcggtgaggaacgacg

SEQ ID NO: 35399 - DNA, 415 bp, Glycine max
  unsure (1)..(415): unsure at all n locations
  Clone ID: LIB3053-006-Q1-N1-G9
caagctccaagaagagcacctctagttttatattcacacagcaaaccactaagaaaagagaggataaaccaatggctacttcactttcagcaactgggtgtgttggaacttccttctatggaagttggggcacttcaattgttggggaggattacaccatgctggccaagtcagtgccatcacaagttcgtatggggaggggaaagccagtgagattgcagcctatgatgaagaatgtcaatgaagggaaaggtatctttgcacctcttgtggtgatcactcgcaacatcgttggcaagaagcgtttcaaccagcttagaggcaaagcaattgctttacactcccaggtgatcacggagttctgcanatcattaggagcagatggaaaacagagacaagggctgatcaggttggc

SEQ ID NO: 35400 - DNA, 395 bp, Glycine max
  Clone ID: LIB3053-006-Q1-N1-H1
cgttgacttgctcttcgcctgcacccactcagcactgggtcggcttcacccgcaccaccgccaccgctaccgccacgtcactgagacaattcaacagccaccgtccgcccccactcaccacgaggatctcctcgtcgccttccaccgttgtctgcaaagctgtctccgttaagccccaaaccgaaaccgaaggtctcaacattgctgacgatgtcacacagctcatagggaaaacgccgatggtttacctcaacaatatcgtgaagggttctgtggccaatattgctgcgaagcttgagattatggagccctgttgtagtgtcaaggacaggattggttttagtatgataaatgatgctgagcagagaggagctataacacctgggaagagtata

SEQ ID NO: 35401 - DNA, 399 bp, Glycine max
  unsure (1)..(399): unsure at all n locations
  Clone ID: LIB3053-006-Q1-N1-H11
tgagcacgccaccctcgacaacttggtgctcactgacgccgatggccagggggtgctttacatgaaccgggagcagctggaagagctgagggtgaagccgctatcggcgtcgtcggcgtcgaagaggactcttgtcccggcgctcaacatgaggctctggtacgcgcctcacctggaattaccaactggggttgtgttgaagggtgccacgcttgttgctattagacccagcgagcaatcccccaacacggccaagaaggaggcgtcggatttgtcgtgggtttcgacggcgtttgaggagccgtataggacggccgncacaatgcttgtcaagaggaggacttattgggctgagatgaactcattctgatgcgtttctgagggaatgcagaatcattt

SEQ ID NO: 35402 - DNA, 411 bp, Glycine max
  Clone ID: LIB3053-006-Q1-N1-H2
gcaaaatgccagaatatgaacatatatttacagacttgctgttgagcttggggcaggggaagtacaagaaaaaataggctaaaataactgtttccagcccttttatttatgtcccccacatgacgtaagcccccttgcctctcagtttgaagctcaaaactatggctgtaggaaagtatcttagaaagcattagtgataataactttttcagttatgctgtgtgatggaagtgccatggaaaactatcaagacttgtgtttcaggaacttcgacctgtacagaacaactgctagtattttattgtgcgggaactttcggctgtccttccaaggtaacaaatgctgttgcaaatcctctgaagttctataagctggtagcttgatgaacgaaggggtcaagtctgcaatttg

SEQ ID NO: 35403 - DNA, 410 bp, Glycine max
  unsure (1)..(410): unsure at all n locations
  Clone ID: LIB3053-006-Q1-N1-H3
gttttattttattataattatttgttagagcctgtctgatgcgtgtatatatatattgaacttattgaaatataccattatctctaagcatatattgaacttcttctgagcaggttgtgatgcctgtctgatgcgtgtatatatatattgaacttattgaaacatatgtataaagaaaccaatcttaagataaaaactagtatatcaataatctttaccttcaggtctttaacttcttctgtcttggatataatttcttctaacaattgtttgaatttgatttctctctggtacacgcatgagtgcatacacacataaacacacattttgtattacctagaatctaaacatacattntactttgcccaaccttactatgatcaaggagatcttattaatgatgagtagat

SEQ ID NO: 35404 - DNA, 407 bp, Glycine max
  Clone ID: LIB3053-006-Q1-N1-H5
ccagcctctccttacacatcatacacctcttacactggctcctattctaattactaccccgcttactattctggcgctcctccccctcccccccctagacccttcttcgaccgttacgctgggcccagtgggccttctgctccgcttgattactcctccacttatgaccccatgcccaagcctcccaaaatgggcctcggcgctggcctcgccattggcgctgttgctggggctctcggcgggcttgctctcgacgagggccttaactacgaagaggacaagatcgccgagagggtcgagaacgacgtcgctgctgctgcgcgcgacgattacagcgattaccgagtggattattgaactctcactactaccggtgttgtcttgagatctttgacctacgagtatag

SEQ ID NO: 35405 - DNA, 418 bp, Glycine max
  Clone ID: LIB3053-006-Q1-N1-H9
gttgctattccctcattcactggcctcaaggcaagcgcaggcaaagtgagtgccgcagttaaagtctcagctccccaagccacaaggttgggcatcaaggcttcgctgaaagacgttggagtcgctgttgtggccactgccgcgagtgcagtgctggctagcaacgccatggccattgaagtgttgctgggtggtgatgacgggtctctggctttcgttcccaacaatttctccgtggcctctggggagaagatcgtgttcaagaacaacgcaggtttcccccacaacgttgtgttcgacgaggacgagattcctagcggcgtggatgcagggaaaatctccatgagcgatgaagaccttctcaatgcgcctggtgagacttacagcgttactttggatgctaagggaacctacagtt

SEQ ID NO: 35406 - DNA, 362 bp, Glycine max
  Clone ID: LIB3053-007-Q1-N1-A10
gtgagaatggagtttcaagggttaccggaaggttgcattgctagtatactctctcgcactacgccggcggacgtgtgtaggttttccgtcgtatcaaagattttccgttcggccgctgaatcggacgctgtgtggaaacgttttctcccttccgattaccattccatcatttcccagtctccttcgcctctcaactatccttccaagaaggagctctatctcgctctctcggatcgccctatcatcatcgatcagggtaaaaagagctttcaattggagaaaaagagtgggaagaagtgttacatgcttgctgctagagctctcagcattatttggggtgacactgagcaatactggaactg

SEQ ID NO: 35407 - DNA, 287 bp, Glycine max
  Clone ID: LIB3053-007-Q1-N1-A11
gggaaggccaaggaagacgcttctcttcctaaagcgacagtaacgaaggttattaaagagatgttgcccccggacgtgcgtgtcgccagagatgcacaggatttattgatcgagtgttgtgtcgagtttataaaccttgtctcgtcggagtccaacgaagtctgtaacaaagaagaaagaaggacgattgcaccggagcacgtgctgaaagctttaagggttcttggatttggcgagtacattgaagaagtttatgcagcctatgaaccacacaagttggagaccat

SEQ ID NO: 35408 - DNA, 305 bp, Glycine max
  unsure (1)..(305): unsure at all n locations
  Clone ID: LIB3053-007-Q1-N1-A12
ggaatggagaaggcaagcctgtgccacaggaacactcctcgcccacttcttaatcgcccttccaattttcttcaattcaagcaccaaaactccttcctcaagttcccgaacccaaacctccatcgactgcgcaggctcaattgctcagtatcagacggcaccgtttcgtcttcgcttggtgccacggactcgtctcttgcggtgaagaagaaagcagcagaggtgtcttctgagctcaaagggacctncatatttctgggtgggtttgaaaagctctcttaaaaactagtttgggggaagctgct

SEQ ID NO: 35409 - DNA, 388 bp, Glycine max
  Clone ID: LIB3053-007-Q1-N1-A2
aagaaaaaggctgtgctcttactcttgaagaagatcgtgtggaagagggataacacattcatagaggcctgaaagctgacaggttgacattgatctagactaaatcgcacactagtaactggcataccacttacgaattatactgaaatattcgctaatgccttccgacatgattacaaaagcattgaggatacttgaaggtgatggcaagtcttctgtttctatccgacgcataagttattgcaaaagttcaccacttgtgaaatcatcctttgacaaaattgaagctactgatcaggaaaagaaggtagtgtacgacactatcattgatggggaactcctgcaagagtacaaaacattcaagggagacatttcagtgactccaatt

SEQ ID NO: 35410 - DNA, 284 bp, Glycine max
  Clone ID: LIB3053-007-Q1-N1-A3
attttatcgataattcatttttaataaaaaaaatttgattgacggtcttccaatcacctttttttccatcaacaaaattatttcagaatctcatgagaaaaaaaagataaagtatataattaactgaattaaatggtttttttgtttttatgtattcaaagattgttctcgaaataaatttatcgagtaacccatctctatttttcttcgaattaatatttaataaatatttttcttattttgttctgaaaaatagttgttcaaaattatttgtgtgatttttc

SEQ ID NO: 35411 - DNA, 418 bp, Glycine max
  unsure (1)..(418): unsure at all n locations
  Clone ID: LIB3053-007-Q1-N1-A6
attttatactatacctacattttgataattttctgtgtaggtgatagccatggctacccgtggaaagcttgaggttgacattgatctcaagtccaacgcagacaagtactggcaaacccttaggaattctactgaaatattccctaaggccttcccacatgattacaaaagcattgaggttcttgagggtgatggcaagtctcctggttctatccgccacataagttatggtgaaggttcaccacttgtgaaatcatcctttgagaagattgaggctgttgatgaggaaaagaaggtagtgtcgtacactatcattgatggngaactcctncagcactacaaaacattcaaaggagacatttcagtgactccaattggcgatggatgcgangtgaagtggagtgctgtgtacgaaaag

SEQ ID NO: 35412 - DNA, 272 bp, Glycine max
  Clone ID: LIB3053-007-Q1-N1-A9
cagttaccgaggagcttcttctacgaaccgtgcttaattcgacacagaaacaccgagtcaaactggttcgtgctgtgttcgtggttcagattctcaatcgaaatttgaaattcagaagaaaaccgcaccgaacacagaatttcagaatctgaacaagtttcttccgttaacagcacttcaacttcacgtggaacaagaatcaaaccgtttcgtggttcggattctcaattcctcgtccattcgcaatcgattttcaaattccgaagaaaacc

SEQ ID NO: 35413 - DNA, 244 bp, Glycine max
  Clone ID: LIB3053-007-Q1-N1-B10
ccgtgatgggcgtatggagaagttctactgggcacctacaagggatgaccgagttggtgtctgcaagggaattttccgcactgacaatgttcctgaggatgaaattgtcaagcttgttgacaccttccctggccaatctattgatttctttggtgcactcagggctagagtatatgacgatgaagtgaggaagtggatttctggtgttggtgttgacttgattgggaagaagcttgtgaactcc

SEQ ID NO: 35414 - DNA, 422 bp, Glycine max
  Clone ID: LIB3053-007-Q1-N1-B2
tctttgtccgtgacaaaacagttcccacataaaaaagaaaaaagaaaggagaaatgcactaataaaaaatgaagaagggtttctcccttgtgctgctgattcttctgatccagtacaacaactttttcaacgcctactacaacaaatactttttcacatattattgcctcattctcttcattttattttaattttatttcttatttttttattccatttcttctcattttttttatatttttttttcttcttattttttttttatatctttttttttttattttttttttatttttttttattttttaatttttttttatttattttattatttattatatttaattttttattttttttttttatttctttatttttattttttttatttctttattttaatgtttttatctttttttttt

SEQ ID NO: 35415 - DNA, 360 bp, Glycine max
  Clone ID: LIB3053-007-Q1-N1-B3
gagcgtcggagaagagaacgagaagaacagcagcagccctgagtgcaagctttgtcaaagttagcatggatggagcaccttacctccgcaaagtggacttgaagatgtacaagagttaccgagagctctctgattctttaggcaaaatgttcagctccttcaccataggcaattgtgaatcccaaggaatgaaggatttcatgaatgagagcaagctgaatgatcttttgaacagctctgattatgtcccaacctatgaggacaaggatggtgactggatgcttgtcggtgatgtcccatgggagatgtttgttgaatcatgcaagcgtttacgcatcatgaaaggaaaggaggccattg

SEQ ID NO: 35416 - DNA, 416 bp, Glycine max
  Clone ID: LIB3053-007-Q1-N1-B5
aacagaaatggcagcgatagttagccaccaccaccaccgcgtattctccgcctccacgcgcttcaactctacttcgagagactcgcggcggcgaaggagcggcgcaaactctgttcggtgcgctgacgtaagcacggccacgagcgagaatcggcgagtgacggtgagtaacaggaacgattcgctggagatatgccgcgtgctgaacggaatgtggcagaccagcggcggatggggccgaatcgatcgagacgacgccgtcgaggccatgctccgctacgccgacgccggtctaaccaccttcgatatggccgatcactatggacctgctgaagatctatatgggattttcattgatcgagttcgtcgagagcgtcctccagaattattggaacaggtcagaggtctcactaagt

SEQ ID NO: 35417 - DNA, 325 bp, Glycine max
  Clone ID: LIB3053-007-Q1-N1-B8
atccgaatcataatcatcagatagggcagggtggatctgtgagagtggagtattgtggtggagctgcgccctacatggggcactagattccacataagtgcatcagtcttttattactggcctggcgtttcttctgagttctgaagtttaaggagctgatgcaattggcgtgtttataatgaaatgctacttactgatcagaatattttaattaccaaatggaattctgttttcgtcatcctcttttttttatattctttcctttcataatattttattattttgactttggtttatcttctaaatatattttctgtactatttt

SEQ ID NO: 35418 - DNA, 380 bp, Glycine max
  Clone ID: LIB3053-007-Q1-N1-B9
gagaatggctcaagcaatggcatcaatggctggcttgcgtggttcctctcatgctgtgttggaaggtagccttcaggtgagtggctccacacgcttgaatgtggggagtggaagcagggtggcctcagtcacacgtgcagggttcacagttagagcacaacaacaacaagtgagtggtgaggtacaaagcagccgtagggcagtgctttcacttgttgctgctggtttggccactggctcttttgttcaagctgtgcttgctgatgccaaatctatcaaagttggaccacctcccccaccttctggtggattgcctggaacgttgaactcagatgaagcaagagaccttcagctgccattgaaagataggttcttccttc

SEQ ID NO: 35419 - DNA, 328 bp, Glycine max
  Clone ID: LIB3053-007-Q1-N1-C1
ctcgagccgtgcaaagacccttggagaatgggctggtttgtgtaagattgattcagagggaaaggctcggaaggtaactggttgctcatgtgtggttgtcaaggatttcggggaggaacatgaagcatataatgttgttctgcagcatgtgaaagccaactgaggagttgctgcagcatgcctagatttgtgggttttagtttgaagttattgtatgagtctatttttgcctctatcatagggatattgatggtttagtacaattatacccgttctcattgttgctgagtgaatgcttttttaattactattggttttctgtgttttt

SEQ ID NO: 35420 - DNA, 295 bp, Glycine max
  unsure (1)..(295): unsure at all n locations
  Clone ID: LIB3053-007-Q1-N1-C10
cagttgagctgaaaccgagaagaagaagatggagatgtatcagatctggagcaggagaatagcgttgggagcgttcgcgtttgttctgcttttcctatcggcctcagcagacgacgtcgttgtgctctctgaagataacttcgagaaggaagttggtcaggacagaggagctctcgttgagttctatgctccttggtgtggacactgcaaaaagcttgctccagaatatgaaaagcttggtagcagcttcaagaaagccaaatctgttntaatcggcaaggttgactgtgatgag

SEQ ID NO: 35421 - DNA, 289 bp, Glycine max
  Clone ID: LIB3053-007-Q1-N1-C12
cgagaagcgagagctggtgttcaaggaggacgggcaggatgacgcgcgggtactttggatgctactatacaggctattattaggccaattctgtatacttgtgatataggataggaatttcttgacgaattacaatttctcattttgaagaaataaggtggcaaaaatgtttatatatgaattgttattattttttttcttattaggcctatactgatttcaaaggaattgagattggaatttcttgttggtacctaactctaattccttataatgagtcttattaaat

SEQ ID NO: 35422 - DNA, 105 bp, Glycine max
  unsure (1)..(105): unsure at all n locations
  Clone ID: LIB3053-007-Q1-N1-C2
agcagctatgatcgtcgcatggcacgccgtatcgtanatgctcgtgaattcggcttcgaggatctcgaatcagtaatcagtcatataggtgcagtgagtggatct

SEQ ID NO: 35423 - DNA, 295 bp, Glycine max
  Clone ID: LIB3053-007-Q1-N1-C3
ctcgtttcaaaaaaaggtgccgttattgttgttaccatccagaaaatggcctatcttgttgttatcatcccaatactttcttataactcttacttgaattatcaatcttatttttatttcttttttttttctttttttatatctttaatttttttttttaatcttactatttttttatattttttttcattatattatttctttttttttttttaattttttatttttattatttcttttttttttctttttttttttttttctcttattatttttttatattttttttattttt

SEQ ID NO: 35424 - DNA, 337 bp, Glycine max
  Clone ID: LIB3053-007-Q1-N1-C4
aagagaatgtcaagagagtccaattggctgacaagtacttgaacgaggctgcacttggaaatgctaacgaggatgctattaacaggggaactttcttccaatcttgaattggaggcaaagcaaacttggcaagtaaatatttctgttcctgaaggttgtgctgatccaagtgctagaagttgtgatgggacttgcgtgtaacattcttagaattctcaatgtcttaagtgcaaagagaagatgccaagtttgagatgattttactatatttttcatattggactgtcttcctctataattttgagttaaagtgtccacttaaattgaatttggtgcc

SEQ ID NO: 35425 - DNA, 344 bp, Glycine max
  Clone ID: LIB3053-007-Q1-N1-C6
caataactctgttacggaagaagaaagtgagagtgaaaatgctgctgcaaactcaattcctctcttgttgggttcaacacttgtctcccgggcaaacccaaggcagattgttcttgagaatcaatatcaaatcagaaaaggcttcttcagatgattctggtccctcaaaaaccggggtggggtttggatcatcggacactgctgctgtgcctgtgagcagtaaaaagaaaaagaaggcgcaaagagaaagggcgtccataattcggcgaagcccgcttgaaaaacctgcatttgtttctgaacaacaagtgggtaaggccaaggaagagaacaaaaatgaaagc

SEQ ID NO: 35426 - DNA, 410 bp, Glycine max
  Clone ID: LIB3053-007-Q1-N1-D1
gttttgatgcaacgctgtcactgagaaaggatcgctatctgcgaaggagcggaataaaacccttctctctgtgattaagagaatggcttcagatcggaaacttcacacttttgaggaggtggcaaagcacaaccagaccaaggattgctggctcatcttttctggcaaggtgtatgatgtcacccctttcatggaggatcatcccggaggtgatgaggttttgttatctgcaacagggaaagatgcaaccaatgactttgaagatgtggggcacagagattctgctagagatatgatggaaaaatactacattggtgagattgatgcatcaaccgtcccactaaaacggacctacattccaccttaacaagctcagtacaatcctgataagactccacaatttgtgatca

SEQ ID NO: 35427 - DNA, 268 bp, Glycine max
  Clone ID: LIB3053-007-Q1-N1-D12
cacacactgtgtttgtgaaactccctctcacagacaagtcagaaaaacaacttgtgttgttccaatggcatcagcaacaccccttttgaaagatgagctcgacatcgtgatccccacgatcaggaatctggatttcttggagatgtggaggccattctttgagccttaccatctcataattgtgcaagatggtgacccttcaaagaccatcaaggtccctgaaggctttgactatgagctctacaaccgcaatgacatcaacagggat

SEQ ID NO: 35428 - DNA, 121 bp, Glycine max
  Clone ID: LIB3053-007-Q1-N1-D3
attaaccgaagggcttcacacccggaactgtatactttttaaatactctcgaaacacgtccatttcacacttttatgcctcagttattctggcaacctgtattaagacacccctttgatgg

SEQ ID NO: 35429 - DNA, 167 bp, Glycine max
  Clone ID: LIB3053-007-Q1-N1-D4
attagaggtgccattatttacatcagcttccactctcttcagtgcttgttccaatctctttttaccatgccaaaaccagaaggattaccatgcggggtccagggattccatgcaaataatcaagggcaagcgcaccaggcgacaaaggcttcaatcccaactaaggt

SEQ ID NO: 35430 - DNA, 426 bp, Glycine max
  Clone ID: LIB3053-007-Q1-N1-D5
gttttgatgcaacgctgtcactgagaaaggatctgtatctacgaaggagcggaataaaacccttctctctgtgattaagagaatggcttcagatcggaaacttcacacttttgaggaggtggcaaagcacaaccagaccaaggattgctggctcatcttttctggcaaggtgtatgatgtcacccctttcatggaggatcatcccggaggtgatgaggttttgttatctgcaacagggaaagatgcaaccaatgactttgaagatgtggggcacagtgattctgctagagatatgatggaaaaatactacattggtgagattgatgcatcaaccgtcccactaaaacggacctacattccacctcagcaagctcagtacaatcctgataagactccagaatttgtgatcaagattttgcagttcct

SEQ ID NO: 35431 - DNA, 384 bp, Glycine max
  Clone ID: LIB3053-007-Q1-N1-D7
gattttcattgccttcgcgggcctgaaggttaaggacattgagatggtcgcgtcctcggtgctgcccaagttctacaccgaggacgtgcaccccgagagctggagagtcttcaactccttcgggaagcgttacattgtcactgctagtcctagggtgatggtggagccgtttgttaagacgtttcttggggctgataaggtgcttgggactgagcttgaggccacgaaatcggggaggttcactgggtttgctaaggagcctggtgtgcttgttggggagcacaagatagtggctgttgtgaaggagtttcagggtaatttacctgacttgggactaggagatagtaaaagtgattatgacttcatgtcaatttgcaagggaag

SEQ ID NO: 35432 - DNA, 55 bp, Glycine max
  Clone ID: LIB3053-007-Q1-N1-D9
cggaacctcgagcgggaaagaagacttggtgactctaccagggagagacttggag

SEQ ID NO: 35433 - DNA, 374 bp, Glycine max
  Clone ID: LIB3053-007-Q1-N1-E1
cttgtattttgaacaaattcagaaaatctgcagtgttttaagaataattgctgaaatgtgtcaccgtttaagtcatactattgccttgtgcttgagccttatggtcgtgtgtgttgaatgtatatgcttttatctgcctttatgacactttcatgtgaaagtacgatataataactgctcagctgagtagtgttgttggtattttggggtctgatgtatcataatgcttgacttgactgtctatcgtggctttcatgctgcgagaaataataaattcaggtaactgtttgtccttgtagttgtagttcttaaggatgaaagttttcacttgctgtatttctggcttcactttgtaataaatgttatgtttgtat

SEQ ID NO: 35434 - DNA, 292 bp, Glycine max
  Clone ID: LIB3053-007-Q1-N1-E10
ggaaaaaagaaaaaaatgtcatccactgctagcttgggttatggggctgcaacctgcttcaacaacgttcatcacacaaagaagcagcaagcaatgaggaacagtttcttgagcaataagcacaacagtgtgagagtgatgaagggttggagaggaagacatggtaacactaacaacacatccaaaagggtaggaattgtgcagtgtagagggttaggggacttcataggtggagacttgataaagtttgatcttggacgttggctttcagatgttgaagagcacaaagcac

SEQ ID NO: 35435 - DNA, 358 bp, Glycine max
  Clone ID: LIB3053-003-Q1-N1-A7
gatgggtctctggtccgggtagggcatctggcgcgggatgcaaacaagcttgggacctgtagataccaatccgatcccagtcaatgcattgtcctacaattccaactaagccgaaagtgatggtgatgtacacgcgatgggtgctacgaagcagaaatggactgcagaagaggaacaagcgcttaaagctggagatgtcaagcacggggttggtcaatggctcaccatactgactgatacaaagtccagaggtgtgttatacctgcggtctaatgcggctctcagggatgaatggacaaagctgaacgtgatgtcgactggatggagctctacggatacatgtacgttatgagtctga

SEQ ID NO: 35436 - DNA, 383 bp, Glycine max
  Clone ID: LIB3053-003-Q1-N1-A8
acaggggcaacaatgtctgatgatgagaatgaccaagtggatagtgatgccaatctcttcgattgtagttttgatggggcagatagcatggggtttggtcctcttgttcctacagagagcgagaggtccctcatggagcgagtaagacaagaattaaagcatgaactgaaacagggttataaggagaaaattgttgacataagagaggaaattttgcgcaagagaagagcagggaaacttcctggtgacacaacttctgttcttaaagcttggtggcaatcacattccaagtggccttaccctaccgaagaggataaggcaaggttggtgcaagaaactgggttgcaattaaagcagattaataactggtttatcaatcaaag

SEQ ID NO: 35437 - DNA, 417 bp, Glycine max
  unsure (1)..(417): unsure at all n locations
  Clone ID: LIB3053-003-Q1-N1-A9
cttttgccagttgctgtaatgagtttcttcaccaaagtggctataattgttggcggtcccttggttggcaaacttatggaccattttccaagagtgtctgcatataattgcttaaccattgttcaggcagcagctcagttgctatctgcagcgatgattattcgtgcccattctgtccaacctacttcattttctacactgcttctgcgtccctggtttgtcatattggtttcagctggggctattgagaggctttgtggagtagctttgggggttgcaaatgagcgtgattgggttgtgctgctggcaggagtgaataggcctattgcattagcacaggcaaatgctgntctaaatcgaattgatctcctgtgtgagatagccgggggcgatgcttgttggattccttctttctaa

SEQ ID NO: 35438 - DNA, 405 bp, Glycine max
  Clone ID: LIB3053-003-Q1-N1-B1
gtcccatagcagcgatgggaatcgatcttaaagctgggggtaagagcagaaagaccaaaagaacagcaccaaaatccaatgacatctacctcaaattacttgtcaagctttatcggttccttgttcgaaggactggcagcaatttcaatgctgttatactcaagcgcttgttcatgagcaaggttaacaagcctccaatttctttgtcaaggttaattaagtatacaaaggggaaggaggataaaattgctgtaatagtggggactgtaactgatgatatcagagtatatgaagttccagcattgaaaattacagcactcaagtttactgagagagcacgtgcaagaatagaaaaggctggtggtgaatgcttgacatttgatgagcttgcccttaggggctctt

SEQ ID NO: 35439 - DNA, 422 bp, Glycine max
  Clone ID: LIB3053-003-Q1-N1-B10
cactctcaagtggaccttcatttttcatagttacgatcttggtctaacccgcaatataaatatagcagtcgggcacatctgatggaacttgaatgctggtgaaagcacaatacaatatctaggagtttctcggataacttatatcttaaagatcctcaacctcaaccagaagatagaatggagtcgatttcggacccaccctttcacgaggcatacaagatcctgtttgacaagaccagaaacgggaaacaattttgaagagcattaaggagctcttggcggtggccgaggaatgcgacctttccgggatcgatctgagccgtttagaagagagcgatgaagttgtgaaggaagagtgcaagtcacagatagctagggcttcgcaggagtggggtttcttccaggttgtaaaccatgggatt

SEQ ID NO: 35440 - DNA, 393 bp, Glycine max
  Clone ID: LIB3053-003-Q1-N1-B11
cactctaaagtcgaccttcatttctcatagatactatcatggtataacccgcaatatgggtatagcagtcagacacatctgatggaacttgaatgctggtgaaagcacaatacaatatctatgagtttctctgataacttatatcttaaagatcctcaacctcaaccagaagatagaatggactcgatttcagacccaccctttcacgaggcatacaagatcctgtttgacaagaccagaaacggaaacaattttgaagagcataaggagctcttggcggtggccgaggaatgcgaccttccggtgatcgatctgagccgtttagaacagagcgataaggttgtgaggaaaaattgcaagttacagatagctagggctccgaaggagtggggt

SEQ ID NO: 35441 - DNA, 407 bp, Glycine max
  Clone ID: LIB3053-003-Q1-N1-B12
aatggcaggtgcaggaggagggtatggggacgcgaaccagaggatagactacgtgttcaaggtggtgctgataggggactcggcggtggggaagtcgcagatactagctcggtttgcgaggaacgagttcagcttggactccaagtccaccatcggtgttgaatttcagacaaggaccttggtcatagatcacaagaccgttaaggctcagatctgggacactgctggccaagaacgatacagagcagttacgagtgcatactacaggggtgctgtgggggcaatggtgggttatgacatcactaaacgccaaacctttgatcacataccacgttggttagaagaactgcgcaaccatgctgacaagaacatagtcatcattcttataggaaacaaatgtgatcttg

SEQ ID NO: 35442 - DNA, 391 bp, Glycine max
  Clone ID: LIB3053-003-Q1-N1-B2
atgagattaggtgtgccaatgaccacaggtggtgcctggcaggttctattgtggtcactgccaccaatttctgtcctccaaacaatgccttgcccaacaacaatggtggctggtgtaaccctgctctacaacactttgacctagctcaacctgtcttcctacgcattgctcagtacacagctggaattgtgcctgtatcctacagaaaggtggcttgtaggatgaagggagggatcaggttcacaatcaatggacactcctacttgaacctagttctcatcacaaacgttggtggtgctggtgatgtgcattctgtttcaatcaagggttcaagaactggttggatgccaatgtcaagaaactggggtcagaactggcagaagcataacta

SEQ ID NO: 35443 - DNA, 412 bp, Glycine max
  Clone ID: LIB3053-003-Q1-N1-B3
caaagtctttcttcttgtcattctactactattccaggctttcgcagaagcttcatcaatcactggagtagccaattctcttgagattacaaatgaaggaagtcaaactgtggctctgaataatgaacatatccacctgcacaaaatcaattgcaaccatgaatgttctcgaagatgcagtaaagcatcaaaaaggaagagatgcaaacgagcatgcaagtcatgttgccacacatgccactgcgtaccccctgggacctatggtcataaggaggtttgcccatgctatgcacgcctcaagactcatggggataagcctaaatgcccttgaaattattattgacgggaagtatttttaatatgaaaaagggcattcaaatctatattatttgaatgttcgattaattgaatg

SEQ ID NO: 35444 - DNA, 408 bp, Glycine max
  Clone ID: LIB3053-003-Q1-N1-B5
ctgcaaagtagaatagcttgcaggacaggaaaccacgtcagttttgcttgtttggacaatggtgttattgagtaggtaccctgattggcaagcacgtgcaagggaggaagtctttcaagtctttggataccaaaaaccagattttgatgggttaagtcgcctaaagattgtcactatgattttgtacgaggttcttagattataccctccggtagctgggatgactcgatctattgaaaaggatgtgaaacttggaaccctaacattaccagctggagtacatgttttacttccaacaattttgattcaccatgatcgcaaattctggggtgaagatgctaaacagttcaatcctgagagattttccgaaggagttctaaaagcaacaaatggtagggtttcattttt

SEQ ID NO: 35445 - DNA, 362 bp, Glycine max
  Clone ID: LIB3053-003-Q1-N1-B6
ctcgagccgaatcggctcgagcttcggttgctttatatctcctgaagcagaacatcacctttcctatttactcactgtgtgatctaatcttcttctatgggttggcttagtcggttcataactgccgtggctttcttagccatcggagtgatattctcaccggagacactggggtcaaaatcaaccacactttccacctacctcaaactcgctcacctcctctgcttctccaccgccttcggcgccgctctgtggggtaacattcatcggcggcatcatcatgtttaaaaatctgccgcggcatcagtttgggaacctgcaaagcaagatgtttccggcgtatttctcgatggtgggtgtct

SEQ ID NO: 35446 - DNA, 394 bp, Glycine max
  Clone ID: LIB3053-003-Q1-N1-B8
actcactccgcagtacttttatctcggtcaatttgcgggaggaatctgttgccaaaggcaacgtcttctgaagagcgatccactggaggaagtcaatttttcaatgagaaacgcgatggtgtcattatcctctttaacattctccaggattataagaatgagttcgataaaacggtgattgaagacacaaaagaagaagagttgtctgatgatggacagggtctgtcatttgatttgatggataagctcaattttgatacagatgacactggttctattgtcttgtatgggggtggtgccttggtggctctgtggctaacatcagctgttattggtgcaattgattctatcccattgattccgaagttgttggaagttgttgggcttgcatata

SEQ ID NO: 35447 - DNA, 415 bp, Glycine max
  Clone ID: LIB3053-003-Q1-N1-B9
ctttccaccaacaagaaagaaaacagagagaaactttcattggataaattttcatcatctcagcaaaagaatcaatcaatcaagccatggcaagcttcaatggcgacgaaaccgctcctttcttcggcttcctcggtgcccctgcggccctcgtcttctcctgtatgggagcggcgtatggaacggccaaaaattggggtggggtggcgtcgatgggagtgatgaggccggagctggtgatgaagtcgatcgtgccggtggttatggcgggagtgttggggatttacgggttgattaatgcggttattatcagcactgggattaacccaaaggctaagtcttactatctctttgatggatatgctcatttgtcctctggccttgcctgtggcctagctggcctctctgctggaat

SEQ ID NO: 35448 - DNA, 414 bp, Glycine max
  Clone ID: LIB3053-003-Q1-N1-C1
tgaggaagtggatttctggtgttggtgttgacagtggtgggaagaagcttgggaactcaaaagatggaccttcaacctttgagcaggccaagatgactctggagaagctcttgctggatggtaacatgcttgtccaagaacaagagaatgtcaagagagtccaattggctgacaagtacttgaacgaggctgctcttggaaatgctaacgaggatgctattcagaggggaactttcttccagtcttgaattggaggcaaagcaaacttggcaagtaaatatttctgttcgtgaaggttgttgtactaatccaagtgctagaagttgtgatggaacttgcgtgtaacattcttagcattctcaatgtcttaagtgcaaagagaagatgctaaagttgagatgatcttactatatt

SEQ ID NO: 35449 - DNA, 369 bp, Glycine max
  Clone ID: LIB3053-003-Q1-N1-C10
attttagaagaataccccctcttttgctgcatcagaggaggtgtaaattaagagcatggctgcacaagctcttgtatcatcatcttctcttaccttctcagcggaggctgcaagacaaagtcttggaccaagatcactccaatctccatttggcttctccagaaaagcctcctttcttgttaaggcagctgctaccccccctgtcaagcaaggatcagacaggcctttgtggtttgcatcaaagcaaagtctttcttacttggatggcagccttccgggtgactatggatttgaccctctgggactttcagaccctgaaggaacaggagggttcattgagcccaaatggctagcatatggtgagataat

SEQ ID NO: 35450 - DNA, 411 bp, Glycine max
  Clone ID: LIB3053-003-Q1-N1-C11
ctcacaaaggtgctgatgataaagcctaccgttgtgtttttgaggaggaagacaaagaaggtaaagtggggatttcccttcagaaggatctcatggctattgcaggtgaggctctcaagtctaacattactaccatgggtcctctcgtgcttccggcttcggagcagttgctcttccttctcactctcattgggaggaaaatcttcaaccccaaatggaagccttatattcctgacttcaaacaagcctttgagcacttctgcatccatgctggtgggcgtgctgtgattgatgagctgcagaagaatcttcagctttcggctgaacatgttgaggcatctagaatgacccttcacaggtttgggaacacttcctcttcttcgctgtggtatgagctcaactacattgagt

SEQ ID NO: 35451 - DNA, 401 bp, Glycine max
  unsure (1)..(401): unsure at all n locations
  Clone ID: LIB3053-003-Q1-N1-C12
gttccatttcctatagatgttccccacttaaaggagctcggggttcgtggggttatcacattgaatgagtcatatgagactttggttccaacagcattatattatgctcatggaattgatcatctggtgattcctactagagattactgttttgctccttctctgcatgacatttgccgtgctgtggacttcatacatgaaaatgcattgtcgggacgaactacatatgtccattgcaaagctggacgtggtcgcagcacgactattgttatttgttatctggtgcaccacanaatgatgacacctgatgctgcatatgcttatgtgaaatcaattcgaccaagggtgcttctagcttcctctcagtggcaagctgtccaagaatactattaccatcttat

SEQ ID NO: 35452 - DNA, 379 bp, Glycine max
  Clone ID: LIB3053-003-Q1-N1-C5
caagtgatttctcaaatcttcccacaccgaggtccgagggtgaaatcttgtcttccccaaatcttaaggcctttacctttaacaagctaaagaatgccaccaggaactttcgccccgacagccttcttggtgaaggaggatttggttatgtttacaaggggtggattgatgaacacacacttacagcttcaaaacctggatcaggaatggttgttgctgttaagaaactcaagcctgaaaggttacagggtcataaggagtggctgactgaagtggactaccttggacaacttcaccatcagaatctggtaaaaatgattggatattgcgttgaaggagagaatcggcttgtgggatatgagtttatgttcaaagggag

SEQ ID NO: 35453 - DNA, 391 bp, Glycine max
  unsure (1)..(391): unsure at all n locations
  Clone ID: LIB3053-003-Q1-N1-C6
caagtgatttctcaaatcttcccacgccgangtcctggagtgaaatcttgtcttccccaaatcttaaggcctttacctttaacaagctaaagaatgccaccaggaactttcgccccgacagccttcttggtgaaggaggatttggttatgtttacaaggggtggattgatgaacacacacttacagcttcaaaacctggatcaggaatggttgttgctgttaagaaactcaagcctgaatggttacagggtcataatgagtggctgactgaagtggactaccttggacaacttcaccatcagaatctggtaaaattgattggatattgcgtggaaggatagaatcggcttgttgtatatgagtttatgttcaaaggtaacttataaaatca

SEQ ID NO: 35454 - DNA, 269 bp, Glycine max
  Clone ID: LIB3053-003-Q1-N1-C8
tctatcacgccacatgcaggcatacataatctctcaataccctttaacaaacaatttctcaaaccttcccacgggaatatccggggctttaatctactttatccaacatcttaatacctttaactttcacaatctacataattccaccattaactttctcccatacatccttctacaaaaaacaccatttaattaccaaacaaaatttactaacatcacaacacacccacacaattaaaacacttatacacacataattaatactatta

SEQ ID NO: 35455 - DNA, 313 bp, Glycine max
  Clone ID: LIB3053-003-Q1-N1-C9
tctctacaaactacattaatcacctaacaacatacaaacacatacgggtaatatacaaatttttctaaacacctacttcatcttctcattccaattatacttaataaatcaaatatttctaacttctactcaatatcattcattaacccttcaccctcttccaccttacttacaatctctcccttctacttctccactctccatccattaaattatttcttctcactccactctttcactcacccctacaccctttactattccactctcctcattaatctcaacctcttccacttcctcattaactactcca

SEQ ID NO: 35456 - DNA, 385 bp, Glycine max
  unsure (1)..(385): unsure at all n locations
  Clone ID: LIB3053-003-Q1-N1-D1
agctgccttaaagggaccaactattttgggcttaatggctggtggtcccgtggatataacttttgcaaagaataaccctcgaattgtgggtattctgtgggctggttattccggccaagctggtggtgctggcattgcagatatcttggttggaacaacttacccaaggggaaagcttgcaagtacaatggtcccaaaaaaagtcctaacaaagttaccaatgacaaacatggcaatgcgagcgaccaaatcagcagggtatccaggaagaacgtatcggttctacaatggtccagtggtgtatccatttggacacgggttgacatacacacactntgttcatacactagcaagtgctcccacagtggtgtcagttcccttgaat

SEQ ID NO: 35457 - DNA, 366 bp, Glycine max
  Clone ID: LIB3053-003-Q1-N1-D10
gtcttcctgagggttactccactaaagtaggtgaaagaggagtgcaactatctggtggccaaagacaaagggtagccattgcaagagctgttctaaagaaccctgaaatcttgctacttgatgaagccactagtgcacttgatgtcgagtcagagcgtattgtgcagcaagcattggacagattaatgcagaacagaacaacaattatggtggcacataggctatccactataagaaatgcagaccaaatctcagttttgcaagatggaaagataattgatcaagggactcattcaagtcttatagagaataaaaatggagcatactataaattagtcaaccttcaacaacagcatcaattatagc

SEQ ID NO: 35458 - DNA, 389 bp, Glycine max
  Clone ID: LIB3053-003-Q1-N1-D11
gtgccggtttggaatctatgaccactaatccaatgggatgggatggatcagtgaatcctaaggtaaaaatgtttgaacaagcacaaaactgccttcttcctatgggaattacctctgaaaatgttgcacagcgctttggggtttcaaggaaggaacaagaccaggctgcagttgagtctcacaggcgagctgctgcagctactgctgctggtaaatttaaagatgaaattgtcccagttaccaccaagattgtggacccaaaaaccggtgaggagaaatctgtcaccatttctgttgatgatggaattcgacctggcacaacagtgtctgatctaggaagactcaaacctgtgttcaagaaagacggaagcaccactgctggtaattct

SEQ ID NO: 35459 - DNA, 402 bp, Glycine max
  Clone ID: LIB3053-003-Q1-N1-D12
agaaaccagtgactgacttttcgagaaagaaaaacaaaaatgagtttccgtcattccatcatgaacgctcttcccattctcctcttcttcctcttcgtttctgcattagtttctgcgaagaaaactggtgatgtgacggagctgcaaattggcgtgaagcataaaccagtatcatgtgaagttcaggcacacaaaggtgacagagtcaaagtacactatcggggaaaactcactgatggaactgttttcgattctagctttgaaagaaataatccaattgaatttgagcttggtactggtcaagtgatcaaaggttgggaccagggattattgggaatgtgtcttggtgagaagcggaagctgaaaatcccatcaaaactggcttttgaaaagcagggttcc

SEQ ID NO: 35460 - DNA, 382 bp, Glycine max
  Clone ID: LIB3053-003-Q1-N1-D2
ctttaacctcttaaagaccgggtcccttgctttggccattattgtcacaggctttactttacaagatggaacctttcactacctggaaaggcctggtcttctggtgggctacaatggtaattgggcatgcttctttgtacaaagaacaccctttaataaccaagctgatgttactaacatcacacttaaaccagccactaatgcagttttaagcgcttaattagtaggctttggcctatttgttgtccttttctgagatgaagaatggtggcatcgatccaaacccaaaatcagattcaaattcaatggattggttattgtttcattctgatcacattgtcatatccataaagaagggggaaaaaaaaagttagcactttgc

SEQ ID NO: 35461 - DNA, 399 bp, Glycine max
  Clone ID: LIB3053-003-Q1-N1-D5
atcgatactccaatatagactacaacataactggcggtagaaggtatcccatacctgacaaatcagcacctatttacataacaatcggagatggaggaaatctagaaggtcttgcctcaagttatttggatccacagccagaatattctgcattcagagaagcgagctatggacacgccacactggagataaaaaacaggacccatgctatctaccactggtatcgcaatgatgacggaaagaaagtcccagctgactctctcgtattgcataaccagtattggggaagcaatggaagaaaacagaatgaggttattgatgaagttgtcaatgttaaatgaagttggagcactcgtaaatcgtaaatatggtgttttgaaaagaataaaaatgtgccta

SEQ ID NO: 35462 - DNA, 378 bp, Glycine max
  Clone ID: LIB3053-003-Q1-N1-D6
tctatcacaccacatgcactcttacataatctcacatattccctctaaatcacaacttcaatatatactacaacgtatctttacaggacaatatatcccataccttacctatcaactcctattatacataacaatcctacatctatgctacatatatattcttacctccatttatttacatccacaaccataatattctccattcatataatccatctatcaccactccacactccacttaaacaacattacccactctatctaccacttttatcctatttattacccatataaaatatcaactaactctctatcattccataaccattatcatataaacattcaattaatacattattattttattcataacacatt

SEQ ID NO: 35463 - DNA, 398 bp, Glycine max
  unsure (1)..(398): unsure at all n locations
  Clone ID: LIB3053-003-Q1-N1-D8
caagtgttagatctgtacccgcctagcaattgatttggaaaagtccaagcttcaaagatgaggtattcattctctcatcttcaacttatctttgttcaaatttcttagtttgttcgtacgttttattgtgaaagcaatgttgttgattgtttttcgttgatagctgatgtgtactttgcgtggtcttactgtgtatgatgttaatgaaaattgttcggtgaaaattgtgcatttggaaaatctatgttttgtgttttctgatctgtattgngtgttggttgttatagtaagctttagagtgatgcttttagagaagctatctcaggaatcatgactgattccaaggaaaagaacaggaaatttgtggagaccattgaactccaaattaggctgaaaaa

SEQ ID NO: 35464 - DNA, 130 bp, Glycine max
  Clone ID: LIB3053-003-Q1-N1-D9
gtttcatatgatgctttcctttgaaaaaattagctattctgtaaatgatttttcatcaatttgcattttgctgggatttcaatttttgctgccttcttttgttaacataattaaagtgcttattagcagg

SEQ ID NO: 35465 - DNA, 382 bp, Glycine max
  Clone ID: LIB3053-003-Q1-N1-E1
tgtaaattaagagcatggctgcacaagctcttgtatcatcatcatctcttaccttctcagccgaggctacaagacaaagtcttggaccaagatcactccaatctccatttggcttctcaagaaaagcctcctttcttgttaaggcagctgctactccccctgtcaagcaaggatcagacagacctttgtggtttgcatcaaagcaaagtctttcctacttggatggcagccttccgggtgactatggatttgaccctctgggactttcggaccctgaaggaacaggagggttcattgagccgaaatggctagcatatggtgagataatcaatggtcgttatgcaatgttgggtgcagttggtgcaatagcacctgaaattct

SEQ ID NO: 35466 - DNA, 368 bp, Glycine max
  Clone ID: LIB3053-003-Q1-N1-E10
cgaaagcatggcttccctggcggcttccaccgcggctatgtgagaaatccttggaaaccccgttaacctcagatgcgcaaccaggtctgctccatcaccaactacacctgccaccttcaagaccgtcgcacttttctccaagaagaagccagctccacctccaaagaaaaagcctgccgctgtatcccccgccaatgaggaactcgccaagtggtatggtcctgacagaaggatcttcttgcctgagggtctcttggaccgatctgagatccccgagtacttgaccggagaagtgcctggagattatggttatgatccgtttggtcttagcaagaagccagaggacttcgccaagtaccaggccgttg

SEQ ID NO: 35467 - DNA, 421 bp, Glycine max
  Clone ID: LIB3053-003-Q1-N1-E11
tcttcttgtacactcttgttccttctggattgcagaaaggaagatggaagctgtgtctgctttttctgttggcacacttcacatcccaacagcacatgaaacaccaaactcatttaggaaatctatattcttgagcaaccaagtggcttcaccagtttcattggttctcaggggcgcttcaaaatccaagcttttcactgccttgtcaccccctccattgacagaatccagcaacaaccaacctgaggaggctgagccagaatttgaaagtcatgcagagaaatttgactggtactctcactggtaccctttgatgccaatttgtgaccttgacaagaggaagcctcatgggaagagggtgttgggaagtgatgtggttgtgtggtgggataggaatgagggtgtttggcaggttcatgat

SEQ ID NO: 35468 - DNA, 384 bp, Glycine max
  Clone ID: LIB3053-003-Q1-N1-E5
cacattcttcatcacttcattcaacagttctacccttagcttgtttcaccaatggctgctgcggttcgtgctgcagactgttttccatccaccaagtctacctctcttgcaagcaggacctccctcattgccccagagagagttgacttcaagatggcttcattgcataacagatatgtatctagcagtggacggctagttcccatcagagctcaggtcaccactgaggcaccagccaaggttgaaacagagtccaagatacaggatgcacgtctggttgtgaacatgcttaaacccacgaccctttacattggtagatgcctgctcagcacacagatcactgtgcatgatgctccaggagagacttggcacatggtcttcatc

SEQ ID NO: 35469 - DNA, 413 bp, Glycine max
  Clone ID: LIB3053-003-Q1-N1-E9
ttttgacacatggggagcggggatcactggtccagtgatattgaaaggtttggcaaatggcaacacacttgatctctcctaccagaagtggacttatcaaggtggcctcaaaggggaagacttaggtctgtctagtggaagttctggacagtggaattcacaatctaccttccctaagaaccaaccattgatttggtacaagacaacctttgctgctccatccggcagtgatccagttgcaattgacttcacggggatgggaaaaggtgaggcttgggtgaatgggcaaagcatcggacgatactggcctacatatgtggcttcagatgctggttgcacggactcatgcaattatagaggaccttacagtgcatccaaatgtcgcaggaattgtggaaagccatcacagacac

SEQ ID NO: 35470 - DNA, 382 bp, Glycine max
  Clone ID: LIB3053-003-Q1-N1-F1
gcaagggctttgttctttggacaaaatgaaggaaaggatgccttgttttatgggaaccctaaccttcttattacaagttggatgagcatgccaatgcacgaagcagattttggctggggaaagcctgtgtatttaggtctaggaagtgtatctacacaagatagggcactgattattcaaagccctgatggtgacggctctattattctgtccatacactttcagatggaacatatgcagcttttcaagaaatatttttatgaagatatgtgaactatattcacatcgctactatcttgaacttcttgtatggaagcttaatttacgtgtgatctgcaatttctcatgtttaataaatttagttaaccatgtgggttaacta

SEQ ID NO: 35471 - DNA, 420 bp, Glycine max
  Clone ID: LIB3053-003-Q1-N1-F11
cactggactaggccaaagtgtgcaaagctcagggtctgatatcactgatatagtttcagcaccaacttcagtcaccaattcaccaataatggaccttgatttctttttcgataagatcgatttcgacacagatttccctttgagcaccatggaactttgcacttaataaattgtccccacttctaagtttacagcatatgtgatttctatgcggattaactgtgagttttgtagatcctgactagcaccataaccgagggaaggaagtctataataatcaccatagatcatgtccataaatgaagacaatgaaaaacttccctcttgtgctaattaagagagttttcatgtacctaggctgcaatgtgaaaataatttgtaggttgtagcttaatttggtgcatgtttggtttgcaatgg

SEQ ID NO: 35472 - DNA, 361 bp, Glycine max
  Clone ID: LIB3053-003-Q1-N1-F7
gttttatccgaaagcaagcattatcagaaacagaaagaaagaataagaggttgcagcaacaatggcagccatggctgcgcttcagagctcaatggtcggtctctccctctcctccaactctttcttaagccaacgcctttctcccatcaccctcccctctcttcttccgggtaagtcaacagagaagcaatgtcctattgtaatgaggcttaaacgatgggaacggaaggagtgtaaaccaaacagccttcctatcttgcacaaaatgcatgttaaacttggagatacggtgcaagtcatatctggacgtgaaaggggtaaagttggggagattactaaaatcttcaagcataacagcact

SEQ ID NO: 35473 - DNA, 392 bp, Glycine max
  Clone ID: LIB3053-003-Q1-N1-F8
ctcgccgactcggttgctatcagcgagtgagagtgagtgagtggttctcttgcagcaacaaggtttagtgacaccaaacagactggaaatgggtcgtggggtcagtgctggtggtggacagagttccttggattatctctttggcagtggggtacctgccagcagtgcaaatggtgctcgcactcaaaatgcaagtgctccttcaccaccggttgataagcaaagtccagcaccagcagcagcagcagcacctgcacctgcagcagcagcagcaccagcacctgcaccagcaccagcaccagcaccagctgataagcaaattccagctggaattcctggaagtctcaaaaacaattaccatcgcgctgatgggcaaaactgtggcaactttc

SEQ ID NO: 35474 - DNA, 383 bp, Glycine max
  unsure (1)..(383): unsure at all n locations
  Clone ID: LIB3053-003-Q1-N1-G1
tttcattctggaacaaggggagatcaaaaccgaagccagttccttccccatgcattgatagcttgagtaatatgaaaactgttgattcagtcaatttccgtcctgtgaccagccagaatggtagcttgaaagcggtgggcaaaacacatgggaaagtcaagacaagaagctcttttggtgggaaatttcttggggtgcactctcagactcgatcacatttattggcttctgcaaattccagtagcaacttgaaggagccaagagtgagtagtgacatgtggttgcatgcagcaccagagagggatttagacagcatactgtctntgcattcatcattgtattattttgaacagcatagagagattatttggtgatcatgtact

SEQ ID NO: 35475 - DNA, 267 bp, Glycine max
  Clone ID: LIB3053-003-Q1-N1-G10
aaattatagattctttgacactgctcggaactctctatcatcacccaactccgcgatcttcaaattgaaaagaaaagccaattataaccgtcataattcttgaattgggacctttaccaactcttccttagcccaatcccttcataactcccaccaactcattcactcctctcaaacatttatctttcaattttaccgaattttttttaaaatctataaatttaattaactcaattcctttaaacccttttcaaacttttttaaaat

SEQ ID NO: 35476 - DNA, 410 bp, Glycine max
  Clone ID: LIB3053-003-Q1-N1-G11
caatcgcggttcccatcatcaaagaggtcgatttgtacaagtttgatccatggcagcttccagaaattggctactacggcgagaaagaatggtacttcttttctcctcgggatcggaaatacccgaacggttcacggccgaaccgtgccgccggaagcggctattggaaagccaccggcgccgataaggcgatcggaaaaccgaaagcgctagggatcaagaaagctctggttttttacgccggaaaagcccccaaaggagtgaaaaccaattggatcatgcacgaatatcgcctcgccaatgttgaccgatctgcctccaagaaaaacaacaacaacttgaggcttgatgattgggtgttgtgtcgaatctacaacaagaaagggaagattgagaaatacaacacgacc

SEQ ID NO: 35477 - DNA, 228 bp, Glycine max
  Clone ID: LIB3053-003-Q1-N1-G12
ctttaatacatatacatttcttcttactatattccttccaaaccttacccctatattattactctcatacaccacacttatcaaacttatatcacttatctttacacttcttacatctattatcctcacaccaactaactccttctataaaactctcttaatatattaattataaattaatttaaatatactacaaattattataattaacatttcttaatgtaatat

SEQ ID NO: 35478 - DNA, 361 bp, Glycine max
  Clone ID: LIB3053-003-Q1-N1-G2
atcactttcttcaccggtcggtctttctttcttccctggacaaaacatgggtttggccaatcagcaaaccgtcgattaccccagcttaaagctgcatcgccgcgacggggcacaggaaaacaccttcgtgagaggcatctcactggtgaatcgagaagaaatatgaaccgaccattggtgtgaaggttcatccgttggattttttcacgaactgtggaaagattcgcttctattgttgggatactgctgggcaagagaagtttggtggcctcagagatggatattatatccatgggcaatgtgcgattatcatgtttgatgttactgcccgtctaacatacaaaaatgtccctacctggca

SEQ ID NO: 35479 - DNA, 389 bp, Glycine max
  Clone ID: LIB3053-003-Q1-N1-G3
gtcgatggtttcaagcatgttctggtgtcgaatcgtgatggcagattcgcacgcaatgggaattggaaggagaagcgatcgcggattgacgatcgtgtgttcgtctaggccgcacaagaaagcgaccgcgcatcacatgaagactcggacttggaagacgcaggcatgggatagaaaccgtaagcccaccgtctacgatccacttactcctgttcctactgatcggaccctcgatattcccgctgacgcttcttgtgctgccgttacgcctccgcctccaactccctatgcctagtcactgtctcggtactctctgtcgatatcatgtagtcttatctttaactccagcagcttgtctgtcatgattgcatgtcagatcaaaccttgat

SEQ ID NO: 35480 - DNA, 389 bp, Glycine max
  Clone ID: LIB3053-003-Q1-N1-G5
ctcgctcgcactgtccagatcttaatgcaagaggagtgagttttgtttttccagccatgacgccgctgatcctgcatgctgggaaaaccaacaaaaattcttacaagacactcattgcagccgagtatgctggcgtccaagttgattttgcccctaattttgagatgggtgtctccaataaaactcctgaatttctcaagatcaatcctattggcaaggttcctgtgctggaaacccccgatggtccaatattcgagagcaatgccattgctcgctatgttacccggctgaaaggtgataacactttgtatggatcttccttgattgaatatgcccacattgaacagtggattgatttttcatcattggagattgatgctaataatatc

SEQ ID NO: 35481 - DNA, 376 bp, Glycine max
  unsure (1)..(376): unsure at all n locations
  Clone ID: LIB3053-003-Q1-N1-G7
agcagagcttgtatacgtcgccgcttcagcgtagcaagatgatcattcccgagaagaaccgtaaagagatctgcaaatacctcttccaagagggagtttgctttgcgaagaaggacttcaatctggcgaagcacccggagattgatgtgccgaatctgcaagtgataaagctgatgcagagcttcaaatccagagagtacgtgagggaaacatttgcgtggatgcactattactggttnctcaccaaacgatgaattgagttccttaagacttacttcaaccttncatccgaaattgtccctgccactctcaagaagcaggccaagcccgncggaagaccattcggtggcccacccggtgatcgccccaggggccc

SEQ ID NO: 35482 - DNA, 401 bp, Glycine max
  Clone ID: LIB3053-003-Q1-N1-G8
caaaacaaaagccatagattgttacttctcttcgcctgttgctttgcaattgtcaccaaacaattcttgcttagctctcacaagcaagcattatcaacaatgaagaaaattgtgttaaaggtggacttacatgatgacaggatcaagcgaaaagctatgaagacagcatctggcctttcgggggttcaatcagtttctgttgacattaatgacaagaaaatgaccttattgggggatgttgatccagtgagtgcagtgtcaaagctacgaaagtggtgtcacactgaaatagtctcagttggacccgcaaaagaggaaaaggagaaagagaaagtggagccagcaaaagaacctgttcccctcaagctctatgatgcctatcccttttattatcatatgac

SEQ ID NO: 35483 - DNA, 172 bp, Glycine max
  Clone ID: LIB3053-003-Q1-N1-G9
gtaaataatgaaccgatgtaatcttgtttcctttatcacggattgctgaatttctttggaaaaagaaaaattcagcactgcgatgatctatgtataatctagtctgtcacaactagtttccactttacatgtttatggatacaccctgaaaataaaatagttttacgttgtt

SEQ ID NO: 35484 - DNA, 260 bp, Glycine max
  Clone ID: LIB3053-003-Q1-N1-H1
actcccttctcttcacacattttcttaactctcttcaagaatccctcttgttcacactttcagattgggtgaaaatgggggctggtggccgaactggtggtcctcctggcaacaggaagtcagaagctgaccctttgaagcgggtaccatttggaaaacctcagtttagtctcagccagattaagaaagccattccacctcactgtttccagcgctctggtctccgctcattctcctatgttggttatgacctcaccata

SEQ ID NO: 35485 - DNA, 420 bp, Glycine max
  unsure (1)..(420): unsure at all n locations
  Clone ID: LIB3053-003-Q1-N1-H10
gtttggattggatttctaatctaatctatacctttctttttgctatgcttttaaggcacaaatccttctcccttctctcttctttcttcttcttctcctgacccttattattattccttgcccttaccctttaggcaagggaaggaagaaagaataactatattattatctttattgtaatctatctttttattataattataattataattattgttgttattattccttaaatatggattcgccgtgtctctccaacgattcggtttctggattcaaagacaaggagtcaatggttgacccctttttggtcgaggctctccagaaccctcgtcaccgcctcaccattttgaggatggagctggagatccagaagtttttgaataatgctgatcagctgcattntgagtttcatcattt

SEQ ID NO: 35486 - DNA, 376 bp, Glycine max
  unsure (1)..(376): unsure at all n locations
  Clone ID: LIB3053-003-Q1-N1-H3
agcccaagccctatacaaccaaaccctaacacacaccgatttgattcagtttccatggctagcctcaaggttgcatttttggctgcagtgctctgcatggttgtggtgagtgcacccatggcacatgcagctatcacgtgcgggcaggtgacgagtagcctggccaattgcatcggttacctccagaagggaggaacgccgtcgtcgggatgctgcaacggagtgaagagcctcaatgccgccgtcaagaccaccgccgaccgccagacggcgtacaactgcctcaagtcggccgccagccaaatctccggcttcaacgccaacaacgccgnctcgctccccggcaaatgcggagtctccatcccctacaagatca

SEQ ID NO: 35487 - DNA, 363 bp, Glycine max
  unsure (1)..(363): unsure at all n locations
  Clone ID: LIB3053-003-Q1-N1-H4
gttcatactggtgatattggatactttgaatctgatgggtatttgcatctcgtgggtcggatcaaggaactcatcaaccgaggaggtgaaaagatatcaccaatagaagtggatgctggtcttctttcacatccagaaattggtcaagcagttgcttttggagtgcctgatgccaagtatggagaggagatatattgtgctgtcatcccaagagaaagatcaaacgttgatgaggcagaagtgctaagatttagcaagaccaatcttgcatncttcaaagtaccaaaaaaggtcttcattactgattctttacccaaaactgccacaggcaagattttgcgccgtcttgtggcagaacacttt

SEQ ID NO: 35488 - DNA, 216 bp, Glycine max
  Clone ID: LIB3053-003-Q1-N1-H5
ctcgagccgcgcactacttgttgcaccatggccgtgcagggactaattttttctagacttcttgggatatcacactttctcattaattcttttggctatgccttattattatagtcacttgcattataataacattctcatcatctacttcttatatgtatcaatttgtatcgatatcttttgccccaccaaaaaaaaattgaatatttcattttg

SEQ ID NO: 35489 - DNA, 370 bp, Glycine max
  Clone ID: LIB3053-003-Q1-N1-H6
cgaaaggggggaaaatataattaacaccgatttcgcgaccaattcttcttctgcgttgaattgggacaacgagaaattggatctcagtttttggcaggaaataaaaattgcatttgagtgtaaaataacagagtatagtgtagggccttggtcttgatactgggctaaatttggtggatggcggagaaatcatgcatcaagcgccttcagaaggaatatagagccctttgtaaagagccagtttctcatgttgtggctcgtccttctccaagtgatattcttgagtggcattatgtgttggaaggaagtgaaggaacaccttttgcaggtggatattactatggaaaaatcaagtttcctcctgaatatc

SEQ ID NO: 35490 - DNA, 272 bp, Glycine max
  Clone ID: LIB3053-003-Q1-N1-H9
ccttcatgttttcaatcatcccagttgataacatctccaagctctatctatatttgtggcaaaccctataataccttacatagacatcatcctatttaccttttccactttatctactacactcacatttcacaccaccgatcatacccgacctatgctgatacttatattcctctgactcctatatctctcatataaaacctctctcactatcaatcaatactgctttaaattattacaccctttaaactattctacacattttatccaat

SEQ ID NO: 35491 - DNA, 301 bp, Glycine max
  Clone ID: LIB3053-004-Q1-N1-A1
caatccttgttcactcttatttcttatagctccaacaacatccctcatataaaaaaatggcctctctccgttttctcttcttagcttctttcttcattgttttgtcactttccatcaacattggtgaggtccaaggggcaaatagaaaacttttggcaccaacatttcctgacctatggaacattcctggcctggaatatcctcctcttcccccaatcaccaattggccagaatacaggttgccatcatacttaagacctaattaccccgcaattcctgcaagttattaccggtacacttc

SEQ ID NO: 35492 - DNA, 380 bp, Glycine max
  Clone ID: LIB3053-004-Q1-N1-A10
ctaactcagagactaaaccataccaaaaaaaacaacatgtgggccgcagagaaggacgggatcatgctcttcggcgtgcgcctctccgtcgtggataaccaccccacctgcttcagaaagagcgctagcatgaccaacctttcttagtccgagtctccaccaccgcacgatcccaacgcagggtatgcctcagacgacgtcgttcacccctcccgtcacacccgcgaacgcaagcgaggggttccgtggacggatgaagagcacaggttgttcctgctgggattacagaacatcggtaaaggagattggagagggatttctagaaacttcgtgaagactcgtacgcctacacaggttgctagtcatgctcagaagtactt

SEQ ID NO: 35493 - DNA, 418 bp, Glycine max
  Clone ID: LIB3053-004-Q1-N1-A11
cttcttatccatatgcattactatttttccttgcaacaatgacaagtatccgatcctttcaaagtgctatatcaaaacctttgctatggaaactcacaggctttgggtcaagcatagtagggtttagctgttatgccctcagcccctctttcctatgcttggtcaaagaatggagcccgaagaagatcgtggcgtacagcgtggtaagctcacttttatcaatctccatgctcttcgttaaaaaatggagcttgggacgacacgggaagagtttgttgctgaaaggacatgtggtttttgtggtattagcgcttaccaatctgtggtctttctgggaagaccgttgccaacaagggaaagtggaaaacaggttccggaaaattatgaacctcgcttcaattggagcatttgccttgat

SEQ ID NO: 35494 - DNA, 402 bp, Glycine max
  Clone ID: LIB3053-004-Q1-N1-A12
cagtgcttgtgctgcttttgtccttttgccacgcttaagatcacccaagagagaacctaagacacacaacacaacacaaacacacagagttagaggagaaatcatcatggcatcagcagcatctgggtttgtgttgtcacttaatgttgcagctgccaccacaaactcaagggtggtcatgttcaacacaaagaacaacgcttctaggcttgttgtaagggcttcagatgagcctgcagcggcggcacccggcaacgccacacccccagctgaagctgaagctaaaccaaagccaccacctattggccccaagagaggtgctaaggtgaagattcttaggaaggaatcttactggtacaaaggcactggttcagtggttgctgttgatcaggaccccaacac

SEQ ID NO: 35495 - DNA, 335 bp, Glycine max
  Clone ID: LIB3053-004-Q1-N1-A2
atattaccattcctgcagtgatagctttcggagattccatcgttgacccgggcaacaacaacaaggttaaaacactggtcaagtgcgatttcccttcttacggtaaagattttgagggagggatcccaaccggtcgattttgcaacgggaaaattccatcagatttgctagttgaagaactgggtattaaggagcttttacctgcttatttggatccaaatcttaaaccaagtgacctagttaccggagtctgctttgcttctggtgcttccggatacgatcctttaacgccaaaaatagcgtcggtgatatcaatgtccgaacaactagacatg

SEQ ID NO: 35496 - DNA, 372 bp, Glycine max
  unsure (1)..(372): unsure at all n locations
  Clone ID: LIB3053-004-Q1-N1-A5
ttatttgattggtgtgcatccatgttaagctagtggcgatcggatccagctacagcctacaacctacagatcaaggaaggaagatgttgggtgttataaggcacaagagtattcgccccgccttctccgcaatcagacacttctcttctgcagctaaagagattactgtcagggatgctctcaactccgcactcgatgaggaaatgtcagctgatcctaaagtcttcttgatgggtgaagaggttggggaatatcagggtgcatacaagatatccaaggggctgctcgacaagtatggccccgagagggttctcgatactccaatcactgangctgngtttgctgggattggagttggcgctgcttactatg

SEQ ID NO: 35497 - DNA, 397 bp, Glycine max
  Clone ID: LIB3053-004-Q1-N1-A6
gtgtggttcaaagctggagcccaaatattctcagaaggtgggcttgactatttggggaacccaaaccttgtccatgcacaaagcatcctggcagtgctgggcttccaagttatcctaatgggccttgttgaagggtaccgcatcaatgggcttgatggggtgggagagggcaatgacctctaccctgggggccagtactttgacccactgggccttgctgatgacccagtcacttttgctgagctcaaagtcaaggagatcaagaatggaaggctggccatgttctctatgtttggattctttgttcaagctattgtcactggaaaaggcccattggagaacctcttggaccaccttgacaaccctgtggctaacaatgcttgggtctatgccacta

SEQ ID NO: 35498 - DNA, 379 bp, Glycine max
  Clone ID: LIB3053-004-Q1-N1-A7
ctcagactgagcagagacacacacacacatcctaatcgggaagcgttggccatggcaaacatgattggggcttccaccaaacctctggttccagtctgcaccagttcccgttcccccacacccaaagtccccattcttcaaatttcacttcccaaagccccaaccttggaactgaaacttccgatttcaaagccccagatgctgtccccttcttggagggatagcaccactggtcttggccagacccttcctcgcagaagaaattgagaaagcagcactctttgacttcaacctcacccttcccataataatggtggagtttctgccgctgatggttgccttggacaagatatggttcaccccgcttgggaaattcatg

SEQ ID NO: 35499 - DNA, 333 bp, Glycine max
  Clone ID: LIB3053-004-Q1-N1-A8
caaaaataaaatctaaaggattgagtatctgtatcaccaatccaacaaaaaaaatgtctgtggcatcttcattcccatgcatcaaaatcccagcttgttcctcctctccatcatgcacatcttcatcaacttcatcatttagattttcttcttccaagccttatgctgctgtttctataaggaactctcagactgaagggcctctgagaagaccagtggctcctcctgtgagagaaccatcaagtagtgtccctcagccactgaagccttcacctccttctcaggttccgccccagaaggcttctcctgttgctggggatgataataatgtca

SEQ ID NO: 35500 - DNA, 413 bp, Glycine max
  Clone ID: LIB3053-004-Q1-N1-A9
ctgattccagaaacatcttcaatcaatctcccctcgtctggtctcaatcaagtttgaagctgagaaataatcatggccggtggtgcgaatttcgtgcagagggttctctcttacgtggtgaatgaagtggttgtcaatggtcttgccaacagccctgcatttcagaggtttgcagtgagaacatcaaaaagaattggagatatttctaacaaagctgttcagaagaggcaggagctagctgagcagatcaaggacatctcaaaaaatatggagtcattcaagaaccagtaattttggtattcttgctacattgctgaagttaatggagtcctgattttctttagccaaagatgttgctggtgacaaggctgggtgtttgtaaatttcttttgttgtaatatattttggttctt

SEQ ID NO: 35501 - DNA, 280 bp, Glycine max
  Clone ID: LIB3053-004-Q1-N1-B11
actctactaccatgcctgcacgtctactctatatcatcctctcgctcaattccaattcttcattttcaagaaattattattcaaaaattgtcatatattaatcttttgtgtatttttttcttattatgtctatcctgaatccaaattaaattatatcataattcctcatttaattccaattccacattttcaataaataactattcataattattcatatatcaattctaattattttttatcttattatccctatccttaatccaaattaatatatatc

SEQ ID NO: 35502 - DNA, 140 bp, Glycine max
  Clone ID: LIB3053-004-Q1-N1-B12
accaccatgcacgcctacacaatctcatcctccctctcaataccaacatctttatactcatgaaattactaacccaaaaccagcatatattcaaacatttattattcctccaccttataatatctctatctcttaaacca

SEQ ID NO: 35503 - DNA, 400 bp, Glycine max
  Clone ID: LIB3053-004-Q1-N1-B5
ccaacatctatctcacttcttagttctttgtggctctgtccatgatggcctctcctacatctccaagagttctcttcttgagtctctttgtaactctttccatgattttacatttgagttcagccaggaagttgtctgagtcagacccccaattgcagttccaataccacagaggccctctcctcacaggcaaaatctccgtaaacctaatttggtacggtaagttcaaaccttctcagaaagccattgttgctgatttcatcacctctctctcctcttccaaacccctcaccgcccaaccatccgttgccacgtggtggaaagccaccgacaaatactacaaaaactcgttccccaaacttgcactctccctagggtcccaaatcggtgatgaaaacta

SEQ ID NO: 35504 - DNA, 332 bp, Glycine max
  Clone ID: LIB3053-004-Q1-N1-B7
aagaatggcttctcaaagtttgagtttaccaccaacacatattccttacaataggataattgggaagcttgattccaagtttttgttgtggccttcttgtgctcatatcaaacccagaagaatttctacctcaattcgggcaatgggttcctccgcttcttcccactcccagtcacaatatgcagacagcgttgaatctgaagcaagagctgatactattgactataaatctttaaccgatgaagagtggaagaagcggctcacaaatgaacagttctatattactcgtcagaaaggaactgaaagagctttcactggggagtactggaata

SEQ ID NO: 35505 - DNA, 400 bp, Glycine max
  Clone ID: LIB3053-004-Q1-N1-B9
aatggcatgttcaagaggagggtatggtgactctaaccagatgatagactacgtgtggcaaggtggtgctgatacgggactcagctgtcgggaagtcgcatatactaactcggtttgctatgaacgagtttagcttcgactccaagtccaccatcctcgttcaatttcacacaatgaccttggtcatagatcacaagaccgttaacgctcatatctggtacactgctggccaataacgatacacagcagctactagtgcatactacaggggttctgttctagcaacgttggattatgacatcactaaacgccaaaccttagatcacataccactttggttagaaaaactgcacaaccatgctgacaagaacatagtcatcattcttattggaaacatatg

SEQ ID NO: 35506 - DNA, 414 bp, Glycine max
  Clone ID: LIB3053-004-Q1-N1-C11
aaacactcataacacaaagcacaaagcaaagctcatccttgagttaaaaaatggcagcagcttcttccatggctctctcatccccatccttggctggcaaggccgtgaagctgggcccatcagccccagaagtgggaagggtgagcatgaggaagaccgtcaccaagcaggtctcctcaggaagcccatggtacggcccagaccgagtcaagtacttgggcccattctctggcgagcccccgtcctacctaaccggtgagttcccaggcgactacggctgggacactgctgggctttccgcagacccagaaaccttcgccaagaaccgtgaactcgaagtgatccactccaggtgggccatgctcggagccttgggctgcgtcttcccggagttgctgtcccgcaacggggtga

SEQ ID NO: 35507 - DNA, 416 bp, Glycine max
  Clone ID: LIB3053-004-Q1-N1-C12
ccagcttatcggactcccaagtgtgttaaaaagtgtgtaagtggaaaccaagtttggaagaagtcaaagcactatagtgttagtgcatacagagtcaactctgatccccatgatatcatggcggaagtttacaagaatgggccagttgaagttgcatttaccgtttatgaggattttgcttactacaaatcaggagtttacaaacacatcactggttatgaactaggtggtcatgcagtaaagctaattgggtggggaacaactgatgatggggaggactattggcttcttgcaaatcagtggaacagagaatggggagatgatggttacttcaagatccgaagagggacaaacgaatgtgggattgaagaggatgtaacagctggtttgccttccaccaaaaacctcgtcagaga

SEQ ID NO: 35508 - DNA, 377 bp, Glycine max
  Clone ID: LIB3053-004-Q1-N1-C4
agagagtttctcacccaacacacacttctcttctcttcgcgtctcttcattttctgtggttctcactttcttttctctaatcttctaatctcttattttcttcccccctctgttactccccgcttctctgaatccctttctgttaatcatctgtctttcaactcgtgattttttgggtttgcctcaccaaaaagattcaaactttgaaaaattttctcgaaagccaagtgttttcagaatcgagatccagcttttttttttgtttgtttttaaaaaattattattttctttcgttcagccgcgagggtttgttttgatccctcaaaagccctctttcttttgttctttcttggatttaaggggttgtctattttaaa

SEQ ID NO: 35509 - DNA, 403 bp, Glycine max
  Clone ID: LIB3053-004-Q1-N1-C5
tgattctgttgtgtttgatcactttaaagggagagggcttaaaggtaaaggtcctaggatagattccagttccagtgggagaagctcctttgggaaaccttttctgaggcgacatttttcctttggatcaaagggttccagatccgtgttagataatcaccctacaagaaagaagggtttcttttgggcaaaatctagcaaggaataatctgcttcttggttattcggaggttccactgttgatcttctgtgcatcctcaattggtttgtgaaaaggacaagatgcaattcatgatttcagagcttctgtatacactaatctgcgatttcaactggataagaggttgaagttactctgtaaagaagacatacagaagtataagatgaacatacagacgtaaaa

SEQ ID NO: 35510 - DNA, 293 bp, Glycine max
  Clone ID: LIB3053-004-Q1-N1-C7
tcacgctagaaatttagctgaaaggatacaaatcaacggttatcttatttatctacttgctaatcctgtattcagctttggaatatagttgcaaaaaaatgattttaataaaattaagagataagctatgttaaaaaagcatacttttcatggataaaatatggaaattaattttgaaccgtagatctaattgtccttaatataaaaaggataaatgacaccgaattgtatccgatcataacatgtacaatattgtcgtggttggagttgctctgggtctattgaaaaattaa

SEQ ID NO: 35511 - DNA, 422 bp, Glycine max
  Clone ID: LIB3053-004-Q1-N1-C9
aaacgacacgaagcacctaacaacattcaagcacgttcgggcccgatactcatacccgaaacaccgacttcatcttcgcgttccggttagggttagggaattagggtttcgaacttcgacgcaatgtcgttcattaacccttcaccctcttccacctcacgtgcaatcgctccctccggcttcgccacgcgccggccatgggaggagttcttcgcgctccactcgttcacgcgcccctacaccctcggcgaggccacgctccgcgtgaagcgcaacctcggccacttccgcgtgaactacgccatggtcgtgctcctcgtcgtgttcctcagcctcctctggcaccctatctccctcatcgtgttcctcgccgtcttcaccgcgtggttcttcctctacttcttccgcgacggccccgtcgt

SEQ ID NO: 35512 - DNA, 312 bp, Glycine max
  Clone ID: LIB3053-004-Q1-N1-D11
gtttcatattttcctatccttccacaaaattaactatacggtaaattatattacatcagtttgcattctgctgccatttcactcttcgctgccttctttcgttaacataattaaattacttattatcacaacattctaaacttactgacttccacctactatttacctcttctacctcataattaattccttactcatacctacattcttaccacctttccctatattcagtcctattataccttgacataatcatcctcatatctgattcctatattaaattggtatcctctcactaatccacacatcata

SEQ ID NO: 35513 - DNA, 370 bp, Glycine max
  Clone ID: LIB3053-004-Q1-N1-D12
tataaagcaggtcgatgtggtaatttctactgtaggacacctgcagctagctgatcaagataagatcatttctgcaattaaagaagcaggaaatgttaagaagttctatccatctgagtttggaaatgatgtggaccggactcatgcagttgaaccagccaagtctgcatttgcaacaaaggccaaagttcgccgagctattgaggctgaaggaattcccttcacttatgtgtcaagcaacttctttgctggttacttcctgcccaacttgtcacagcctggagccacagctgcccccagagacagagttattatcctaggagatggaaaccccaaagctgtttttaacaaggaagaggatattggaact

SEQ ID NO: 35514 - DNA, 377 bp, Glycine max
  unsure (1)..(377): unsure at all n locations
  Clone ID: LIB3053-004-Q1-N1-D2
gcagaaagcaagctcatcctagagttttaaaaatggcagcagcctcctccatggctctctcttccccatccttggctggcaaggccgtgaagctgggcccatcagcccccgaagtcgggagggtcagcatgaggaagaccgtcaccaagcaggcctcctccggaagcccatggtacggcccagaccgcgtcaagtacttgggcccattctctggcgagcccccgtcctacctcactggcgagttcccaggtgactacggctgggacactgctgggctttcggccgacccagaaaccttcgccagaaaccgtgagctcgaagtgatccactccaggtgggccatgctcggngccttgggctgcgtcttccccgaacta

SEQ ID NO: 35515 - DNA, 404 bp, Glycine max
  Clone ID: LIB3053-004-Q1-N1-D5
ggaggtcgcaacaaacacggccgcggccatgtcaaattcatccgatgctccaactgcggaaaatgctgccccaaggacaaggccatcaagaggtttttggttaggaacattgttgaacaggctgcagtcagagatgtgcaggaagcttgtgtctatgaacaatatacacttccaaaactctatgtgaagatgcagtactgtgtttcctgtgctatccactctcatgttgtgagggttcgatcccgcaccgacaggaggaagcgtgagcctccacagagattcatcaggcgcagggatgatgcaccaagacctggtcagcccggtcaaggacctcgtcctgctggcacagcagcagcacctgtccgaacctaaaagcaagtcctaaagaataagccctggattta

SEQ ID NO: 35516 - DNA, 393 bp, Glycine max
  Clone ID: LIB3053-004-Q1-N1-D7
gaacaacctcttctttctcttcttcttcctcttcttaggctccgccgccgccagcgtccccgcccacaacatcacccgcatgcttgccaaacaccccggcttctccaccttcaaccactacctctccctcacccacctcgccgaagagatcaaccgccgccagaccatcaccgtcctggccctcgacaatgccgccatgtcctccctcctcgacaagcacctctccctccccaccatcaaaaacgtcctctccctccacgtcctcgtcgactacttcggcgccaaaaagctccaccagatcaacaacagcaccaccctcgtctcctccatgttccaagccaccggctcagcctccggcaccgtcggctacgtcaacatcaccaacctcaaggc

SEQ ID NO: 35517 - DNA, 130 bp, Glycine max; identical to SEQ ID NO: 35464
  Clone ID: LIB3053-004-Q1-N1-D9

SEQ ID NO: 35518 - DNA, 400 bp, Glycine max
  Clone ID: LIB3053-004-Q1-N1-E1
ggaaagtttgtgagccactagaggaagattcctttagacgaattcttcaccattatgatggccctaagttccgtcttgaactgagtgtgcctgaggcactgtctcttctggatatttttgcaaaccagaacagtttcgatgacattttcaaagccattccagcatagaagggtagaaattatacaagaagagagaagttacaaggacaatggataatgaatgaatactgtggattcatattattagagtgtcagaagataattaagacaacgaatattgaatttcagccgtcatatatttgtgttataattactactataatgttatttgtatagaggctgttatgcctggttgcccatttttttcttgttatgggtgtatatgaacatcacataaaaga

SEQ ID NO: 35519 - DNA, 415 bp, Glycine max
  Clone ID: LIB3053-004-Q1-N1-E10
tgcaattgaagttgaagtcttgcccttctctcttcaactgcaaacacaagacatcatcatccatggctgcctccgtctccactgtcggagctgtcaacagagctcttttgaacctgaatgggtctggacctggggtttcagctcccagttcatccttctttgggagcagcttgaagaaggttattggctcaagggtccccaacacaaagatttcctctggaagcttcaagattgttgctgtagaagagaagaaagagattgaagagacccagcagaccgacaaggacagatggaagggtcttgcctatgatatctcagacgaccaacaggacatcacaagaggaaagggtttggttgactcccttttccaagctccacaggatgctggaactcactatgctgtcatgagctccta

SEQ ID NO: 35520 - DNA, 403 bp, Glycine max
  Clone ID: LIB3053-004-Q1-N1-E12
agaatttctatctatctcttgtttcaatttcaacaacggttactcctttttcgttttgagtttcaatcaagccatcatcatgtctaccgcatcgcaacccaaggccaagaaaacggcgtcgtccaagaagcccctctcccaccctcccttcgccgtgatgatagcagaggcgattgcgagtctgaaagagagaaccggttcgagccaatacgcgataaccaaatacatcgaagggaagcacaaggagttgcctgcaacctacaagaagcttgtcctcgttcatctcaagaaatctgttgctgctggcaagcttgttaaggtgaaaaactcctttaagctcgcaccgactaagcctgctccggttaaagcccgtggctccaaaaagccaaccaaagctgccact

SEQ ID NO: 35521 - DNA, 372 bp, Glycine max
  Clone ID: LIB3053-004-Q1-N1-E2
gacggcaaggactaccaggagccggcgccggcgccgctggttgacccgacggagtttacgtcatggtcgttttacagagcaaggatagcagagtttgtggccacttttctggttctctacatcactgtcttaaccgttatgggagtcgccggggctaagtctaagtgtagtaccgttgggattcaaggaatcgcttgggccttcggtggcatgatcttcgccctcgtttactgcaccgctggcatctcaaggggacacataaacccggcggtgacatttgggctgtttttggcgaggaagttgtcgttgcccagggcgattttctacatcgtgatgcaatgcttgggtgctatttgtggcgctggcgtggtg

SEQ ID NO: 35522 - DNA, 463 bp, Glycine max
  Clone ID: LIB3053-004-Q1-N1-E3
gaagagcttgacgtcgcatggacgccttccttaacttgggatttcgcttggaggttgccccaaagaaggagcatctttctcctttctttcatgaccgttggaagagactgagatgggttcaaaaaccaagacttttacctttgaggaggtggctaagcacaatcacaggaaggattgctggattatagtcaaagggaaggtgtatgatgtcaccccatttttggatgatcatccaggaggtgatgaagttttagtgactgcaacagagaaggatgccaccactgattttgaagatattgggcacagtgattcagcaacagagatgatggaaaaatactttgttggtgaggttgacaccaacactcttccagcacaagttaccagcagcagcagtgtacgcccaccaacacaagcacctgtctataacaatcaatcttctggatttgttgtgaagatcttgcag

SEQ ID NO: 35523 - DNA, 375 bp, Glycine max
  Clone ID: LIB3053-004-Q1-N1-E5
caccttccctctcttctgttaccaatggctccctcatgagactacatttctttccttttcctcaccacccttttgtttgctcttcaaatcagtgcaagagacagccagttcttcagcaaagtcacccattttgacaaaaacagtgtcaaagagacagaacttcccaacaaagaagcaccagaagtgaacaagccagagcaacaaccacctttcattccggagactgaaaacagctatggcctatatggtcatcatgatgagtataaccaagtcccttccaccaccaccaaccccacttcttaccacccctacaagaccgagtttgagaactccaacaacaagtattacaacaatgatgcctataacacaaggttc

SEQ ID NO: 35524 - DNA, 407 bp, Glycine max
  Clone ID: LIB3053-004-Q1-N1-E6
gcttcggtgtcctttgccgtgggacttttaccttacgcttcagttcgatttcccgtattgagcaacgccaactcactgaaactcagttcctcagctagcatctctactccaattcttcagcaaaagctctgctctcttctttcccccctccctctaagccctcgccctcgccctctcaccattgtatccgctaagggctacaaaatgaaaacccacaaggcatctgcaaagcggtttagggtgaccggacgaggcaaaatagtgcgtaggagagctggcaagcagcatttgctcgtcaagaagaataccaagcgcaaatcccgactctccaaaatgcacgcggtcagcaagagcgactatgacaacgtaattggagccttgccatatctgaaaggtaaccagaatgc

SEQ ID NO: 35525 - DNA, 183 bp, Glycine max
  Clone ID: LIB3053-004-Q1-N1-E7
ccttttctctcctttcccttaccactttcaccttacgcgtcatttctatttctcgttttcatcaacaccatctcactgaaactcatttcatcagctatcatctctactccaattcttcaacataaccatttctctctacttttccccctacctattaaaccctctccctaaccctctcaccat

SEQ ID NO: 35526 - DNA, 385 bp, Glycine max
  Clone ID: LIB3053-004-Q1-N1-F1
caaaacactcataacacaaagcacaaagcaaagctcatcgttgagttaaaaaatggcagcagcttcttccatggctctctcatccccatccttggctggcaaggccgtgaagctgggcccatcagccccagaagtgggaagggtgagcatgaggaagaccgtcaccaagcaggtctcctcaggaagcccatggtacggcccagaccgagtcaagtacttgggcccattctctggcgagcccccgtcctacctaaccggtgagttcccaggcgactacggctgggacactgctgggctttccgcagacccagaaaccttcgccaagaaccgtgaactcgaagtgatccactccaggtgggccatgctcggagccttgggctgcgtc

SEQ ID NO: 35527 - DNA, 413 bp, Glycine max
  Clone ID: LIB3053-004-Q1-N1-F10
aaagaattaggagagtgaaacaagaagaagaagaagaagaagaagaagaagaattgagaagatggtgtttgaggaaactgagctgaggctgggactgggactatgtctccctggaaatggaaccacggcaacaactgaagctgctgctgcggaattaggagtgaggaagagagggttctctgagactgaaactgatgaaacagccaccgttgatttgatgcttaacctctcacccaaggaagctgctgctgctgatggtgcagatccacgtgagaagccaaagacttcgccgaaggagaagacccttctgcttcccgatcccgccaagcctcctgccaaggcgcaagtggtgggatggccacccgtgaggtctttccggaagaacatgttcgcagcccaaaagagcagcggcg

SEQ ID NO: 35528 - DNA, 392 bp, Glycine max
  unsure (1)..(392): unsure at all n locations
  Clone ID: LIB3053-004-Q1-N1-F2
ttcccccaaaaaataaaaagcacaccttcattcgttccgctttctttcttccaactctataaatatcaatcaaaattcccctccacactcattctcccatcgttttccctttctctctctcattctcttctccatcgcgcgtaagaaacacattttagttgctactaatgggaactgttgaagctgcaaacaaggatgcaaatggaagtctcctagagaaaaatccttcagttgtttttgtgttaggtggcccaggaagtggaaagggtacccaatgtgcaaatattgtccaaaattttgggtatactcatctcagcgctggtgatcttctgcgagcaganatcaaatctggttctgaaaatgggacaatgattcagaatatgattaaagga

SEQ ID NO: 35529 - DNA, 432 bp, Glycine max
  Clone ID: LIB3053-004-Q1-N1-F3
cccttccttaacctgggatttcggttcaggatggacctggatcttcctaatgggggccatttttttaagggttttaagactgttcccaaaaggatatctgaagtctgaatatttttggaaacatggccttatgaatggattgaaagtccaggttccatggactttgaccagatggaaaaatctgttccacttttaaggccaaaattaattgttgctggagctagcgcttatgcacgtctctatgattatgaacgtgtacgcaaggtttgcgataaacagaaagctatactattggcagatatggcacacatcagtggattggttgcagctggtgtcatcccatcaccttttgattatgctgatgtagttactaccacaactcacaagtcacttcgaggaccacgtggagctatgatattctacagaaaaagg

SEQ ID NO: 35530 - DNA, 396 bp, Glycine max
  Clone ID: LIB3053-004-Q1-N1-F6
gttgttaccatccaaaaaatggccggtcttgttgtttgttcccaatgctttctcaaactcttgcttgtagtttcagtctttcatgtttcctttgctgctaggaggttgaatgagctggttcaggaccagtctcagttgctacattaccacaatggtcctcttctatacggcaaaatcgccgtcaacctcatctggtatggtaacttcaaaccatcccaaaaggctatcatcaccgatttcgttacctcactgtcatccccagcgtctcagagcagccaaccctctgttgccacgtggtggaaaaccacggagaagtactaccacctgagtcccaggaaggcttctctctccctctctctcggcgatcagattctcgacgagacatactcgctgggg

SEQ ID NO: 35531 - DNA, 406 bp, Glycine max
  Clone ID: LIB3053-004-Q1-N1-F7
gggaatcggaaagtactcgaggtcgcagatgtaccacaagaggggcatttgggctatcaaggccaaaaacggtggcgttttacctcgccacgaccccaaacccaaacctgaaactcccactgaaaaaccacccaaattttaccccgctgatgatgtcaagaaaccccttgtcaacaagcacaaacccaaaccagctaagctcagggctagcattacccccggaacagtgttgattcttcttgctggtagatttaagggaaagagggtagtgtttttgaagcagctaccttctgggttgcttcttgtaacaggtcctttcaaggttaatggagttcctttgagacgtgtgaatcaggcctatgttattggcacatcaaccaaagtagatgtctctgctgttaatgtc

SEQ ID NO: 35532 - DNA, 350 bp, Glycine max
  Clone ID: LIB3053-004-Q1-N1-G1
aaacgaagtactactacaagggaagaaaaacttagctactaaggaaggatcaaagagaatggctcaagcaatggcatcaatggctggcttgcgtggttcctctcaggctgtgttggaaggtagccttcaggtgagtggctccacacgcttgaatgtggggagtggaagcagggtggcctcagtcacacgtgcagggttcacagttagagcacaacaacaacaagtgagtggtgaggtacaaagcagccgtagggcagtgctttcacttgttgctgctggtttggccactggctcttttgttcaagctgtgcttgctgatgccaaatctatcaaagttggaccaccttccc

SEQ ID NO: 35533 - DNA, 416 bp, Glycine max
  Clone ID: LIB3053-004-Q1-N1-G10
tctggatgtttgcaaaagagggtggggataacagctggagatctgtgtcttgatccaaaacaaagccgagaaaaaaggaagataggtataaggcaatctacagcttctactttggggactacggtcacatttcagtgcagggttcatacctgacctatgaggacactaatctggctgtgactggtgaatctggcatctttgaaggcgcttatggacaggacaggctgcatcaaattgtgttcccctttaaactattctacacattatatcttaagggcatcagggacttgcctaaggagcttctttcccagcctgttgagcccagcccagctattgagcccagcccatctgcacaaggcctgtgaaccacatgctgatattgctggctatactgactgaggaacaatgaggatcga

SEQ ID NO: 35534 - DNA, 417 bp, Glycine max
  Clone ID: LIB3053-004-Q1-N1-G11
cagcgatggcgagagtgggtagaatgaagttgggttcacaaggcatggacgtgtctttgcagggacttgggtgcatgggcatgtctgcgttctatggtcctcccaagcctgaccccgatatgattgctctcatccaccacgctgttcaaactggtgtcacttttcttgacacttctgacgtctatggtcctcacaccaacgaactccttctaggaaaggctctgaagggaggggtgagagatgaggttgaattggctacaaagtttggaatcaacgttgctgaatggaagagagagatcccgtgtgatccggcatatgtgagggctgcttgtgaaggaagcttaaagagacttggcatcgattgcctagatctctattaccaacatcgtattgatactcgtgtgcctattgaaatca

SEQ ID NO: 35535 - DNA, 354 bp, Glycine max
  Clone ID: LIB3053-004-Q1-N1-G12
cacgcctacaatagctcatactttcgctcaattccaattcctctattatcaagaaataatgaagcaaaaatagtcatatattaatagtaaggataccctttcttattatgcctatcctgaaaccaaacgaaatgacatcgcaattcctcatagaattccaattccacattttcaacaaatatcgaggcaaaaatgttcatatatcaattggaattatttgttctcttattatgcctatcctgaagccaaatgaaatgacatcgtaattcctcgccgaattccaattccacattttcaatatataatgaatcaaacatgttcatatattaattctaattatcatgtatcttatta

SEQ ID NO: 35536 - DNA, 399 bp, Glycine max
  Clone ID: LIB3053-004-Q1-N1-G2
taattacaaagtttgaccgatcaatgacattagatttacacagaagagaagattctatcagatctacccagtcccaaaactgtggaaagctcttggtgcatgctgaagaatgtgttagttcaaagactacaatagagatgattctcaggtgttcagatttggaatatagggatctcttctcaagaagtgatccctttttattgctatcaaaagttgtggaaggtggtagtcatattccaatttgtaaaacagaagttataaagaatgatcacaacccaatatggaagccagtgttcttgaatattcaacaagtaagaagcaaggaaagtcctttgattatagagtgctataacttcaaatgcaatggcaaacatgatttgatggggaaagtgcaaaaat

SEQ ID NO: 35537 - DNA, 365 bp, Glycine max
  Clone ID: LIB3053-004-Q1-N1-G4
ggcacgctgagcatggaacacagaaccctagaactcaacctggcttcagcaaaggatctcaaagacttgaatatattctcaaagatggatgtatatgctgtgctttcactctccggcgatcaaaagaccaagactcccgtccacagaaacggcggcaccaacccaacatggaattttccggtcaagttcacttttgatgaatcggtggcgcggcagaaccgtttggccctcgaaatcaagatccgctccgagcgcgccctcgccaccgataaggacatcggccaggtccacgttcctctcatggaactcctcaagcaacctggcgacggtaaatccttccagcacgttagttaccaagtcagaaa

SEQ ID NO: 35538 - DNA, 401 bp, Glycine max
  unsure (1)..(401): unsure at all n locations
  Clone ID: LIB3053-004-Q1-N1-G5
ttccaatatattccattctctctgtgtatttccctacgtgctcccttcaagatgcagatcttcgtcaagaccctcaccggcaagaccatcacccttgaggtggaaagctctgacaccatcgacaacgtcaaggccaagatccaggacaaggaaggaatccccccggaccagcaacgtctcattttcgccggaaagcaacttgaggacggccgtacccttgctgactacaacattcagaaggagagtactcttcacctcgtcctccgtctccgtggtggcatgcagatcttcgttaagacactcaccggcaagaccataaccctagaggttgaaagctccgacaccatcgataacgtcaaggccaagatccaggacaaggagggtatccncccggaccagca

SEQ ID NO: 35539 - DNA, 375 bp, Glycine max
  Clone ID: LIB3053-004-Q1-N1-G6
ctcttattaatttgtcatctttcagcagatccccctagtttttcttccaacatgagtttcaaatctcccctgcaattgctcatcatcatccttctagttttttcatttgttgtctcttctgctgctctccaaacaacaagaaggcttttgccaaacaaagaaaaactctcaacccagattacatctgataagggtgttgaggaattgagaaatggagaagaaatgttagatatggcagaagagttcatggtagagggaaggattgatttggagagtaatgattatccagggacaggagcaaacaaccggcatgatccaaagacaccaggaggaccttgagaaattaatgcataaattttgtacagattatgagag

SEQ ID NO: 35540 - DNA, 404 bp, Glycine max
  unsure (1)..(404): unsure at all n locations
  Clone ID: LIB3053-004-Q1-N1-G8
caatttgcagatagcttcttgactcgttactcactcactcaatggccgaccgagttcaccccagccactcgccttccgtttccgccgactcacaaccggcgtcgcctcaagactcctccgtcgttccaaaaccgccgttgccaccgtcgtcggagaagccagtgcctccgcctggaacctacgtcatcaagatccctaaggaccaagtctatcgcgtccctccgccggagaacgctcgccgctacgaccaatacactcgccgtaaacaccgccggagccgatgctgctgctgcttctgctggctcatcggaatcctcttcattctcgtcgttttcctcgccatcgccgncggcgtcctctacctcgttttccgtcccgaggagccgaaatactccatcgaaaac

SEQ ID NO: 35541 - DNA, 420 bp, Glycine max
  Clone ID: LIB3053-004-Q1-N1-G9
cgctaacacagagtgttacagtcacctgtgttcgtcacagtggcagacaatggttccaatcaattcccgtaaattatagattctttgacgctgctcggaactctctatcatcacccaaattcgggatcttcaaatgggaaagaaaggccaattataaccggcatagttctggaatggggaccttcaccactcgggccgtggcgcagccgcttcagaacgccgacgaactcatcgactccgtcgagacatttatcttcgattgtgacggagttatatggaaaggtgataaattaatagacggagtgcctgaaacgcttgacatgcttcggtcaaagggcaaaagattagtttttgtcaccaataactcaacaaagtctaggaagcaatatggaaagaagtttgaaacacttggcctgaatg

SEQ ID NO: 35542 - DNA, 419 bp, Glycine max
  Clone ID: LIB3053-004-Q1-N1-H10
aataatctgagagagaaacaaaaacaatgaaggtttccattgccaagttccactcccttcccctatgttttttccttctcttggccttcaacacaaaacccctcctagcagcagaaccagagccagtggttgataagcaagggaaccctttggagccaggagtagggtactacgtgtggccactttgggctgatgaaggaggcctcacactaggccaaacaaggaacaagacatgccctctttatgttatccgtgacccttcattcattggcaccccagtttcattcttagcaccaggccttgaccatgttccaacactcactgatctaaccattgatttccctgtggtgacagtgtgtaaccagccaacagtgtggaggctcaacaaggtaaggtcaaggttctggtttgtgagcacc

SEQ ID NO: 35543 - DNA, 413 bp, Glycine max
  Clone ID: LIB3053-004-Q1-N1-H11
gctaacattgtcccaccatatgaccagtcaaaatacgctggaactggggcagcagttgagtatgctgttttgcatcttaaggtgtctgagattgtggtcattggacacagtgcttgtggtggtattaaggggcttctgtctttcccatatgatggaacctactctactgattttattgaggagtgggttcaaaattgggcttgcctgcaaaggcaaaggtgaagacacaacatggggatgcaccttttgctgagttgtgctcacactgtgagaaggaagctgtgaatgtttcccttggaaaccttctaacatacccatttgttagagatggcttggtgaacaagacattgtcactaaaaggaggatactatgactttgttaagggatcttttgagctctggggccttcaattt

SEQ ID NO: 35544 - DNA, 389 bp, Glycine max
  Clone ID: LIB3053-004-Q1-N1-H5
agaagctcttcggtgacctcggtgccaattacaaggccatcgaactcgacactgaatccgatggaaaagagctccaagcagcattagttgagtggacggaccagcgaaccgtgcctaatgtgtttattggtggaaaccacattggtggctgtgactcaacaactgccctgcacactcaggggaagctggttcctctgctgatatctgctggagctgttgccaaatcaactgcttaaaggatctcccatttctaggttatgcagttaaataaaaataaaaacccaagtagttgggtcggttatataattcaggtcccagaaactaatgtgtgtattcctgtgtgattctctttaaactacaactctgtcaaacaagtctattgctgaatg

SEQ ID NO: 35545 - DNA, 394 bp, Glycine max
  Clone ID: LIB3053-004-Q1-N1-H7
gtagcatccaatggtcatttccccttcactccatcagagatatcaggaatgggcaccgatacatctatccttgatacggcattcacatctgatgtggcaagctccgtaggacttcaacttgcaccggacaatggcacggggatttccagatccctggatcaaattcagtggaattttagtctatctgacttaacagcagatttgtcaaacttgggagatctaggagctctaggaaactatcctggttcaccatttatgcagtctgattcagatattttgcttgaatcatcggatcaaaaggacatagtggatgacttctttgctaatacagagcccccaggttctccgtcagacgaggagaaatcttaagtgaagttgtagcaagttatgtttc

SEQ ID NO: 35546 - DNA, 344 bp, Glycine max
  unsure (1)..(344): unsure at all n locations
  Clone ID: LIB3053-004-Q1-N1-H8
aagcttttcactcctgataaacccaaagacaacgcagtgatcaatggggattttgaagagggtccatggatgttcaggaacacttcactgggtgtgttgctttccacaaatttggatgaagaagcgtnctcactacccggttggatagtcgaatccaaccgtgccgtccggtacattgattctgatcattactctgttccacaaggcaggagagccattgagttgctctcagganaggaaggaatcatatctcaaatggttgagaccaaaccagacaagctctacagcttgaccttctcattgggtcatgctgatgacaagtgcaaggagcctcttgctgttat

SEQ ID NO: 35547 - DNA, 418 bp, Glycine max
  Clone ID: LIB3053-004-Q1-N1-H9
aggaagtccttgagcttggaccagtttgtggtgccacagaccgtgtttgcgcttactgacaaaccagtttgctccttcctgggacatctccatgatgtgcttgacctctcatggtctaaaactcagcacttgctctcatcttcaatggacaaaactgtgcggctgtggcatctatccagcaagtcttgtttgaaaatattttcacacagtgactatgtaacttgcatccagtttaatcctgttgatgatagatacttcattaatgggatctctggatgctaaggttcgcatatggagcattcctgatcgacaagttgttgattggaccgatctacatgagatggtcactgctgcttgttatacacctgatggtcaaggtgcactggttgggtcatacaagggtagctgccatttatat

SEQ ID NO: 35548 - DNA, 349 bp, Glycine max
  Clone ID: LIB3053-005-Q1-N1-A1
cgctacaccacttatttttttaccccacccaccaattgtcttctcttctcttccgccaaagtaatcccttccctctccaataatcaaacaatctcacttttttcttttgatacattcaatctcaaaaattgttttaaaaatggcaatggcagcccaagccacggctcaattccgtttctctcctctatcttctcattaccgttaccattaccagtacaattaccattccaccccttctttcccgtccccgcgacgtcacccccgcaaccaaaggctccacctttccttctccggcggaaatagaggcggaagcggcgacggcggctgatgacgaggagactccgatggc

SEQ ID NO: 35549 - DNA, 402 bp, Glycine max
  unsure (1)..(402): unsure at all n locations
  Clone ID: LIB3053-005-Q1-N1-A10
cacaaagcaaagctcatccttgagttaaaaaatggcagcggcttcttccatggctctctcatccccatccttggctggcaaggccgtgaagctgggcccatcagccccagaagtgggaagggtgagcatgaggaagaccgtcaccaagcaggtctcctcaggaagcccatggtacggcccagaccgagtcaagtacttgggcccattctctggcgagcccccgtcctacctaaccggtgagttcccaggcgactacggctgggacactgctgggctttccgcagacccagaaaccttcgccaagaaccgtgaactcgaagtgatccactccaggtgggccatgctcggaacccttgggctgcgtcttcccggagttgctgtccngcaccggggtgaagttcg

SEQ ID NO: 35550 - DNA, 417 bp, Glycine max
  Clone ID: LIB3053-005-Q1-N1-A12
gaggaagtggatttctggtgttggtgttgacagtgttgggaagaagcttgtgaactcaaaagatggacctccaacctttgagcagcccaagatgactctggagaagctcttgctgtatggtaacatgcttgtccaagaacaagagaatgtcaagagagtccaattggctgacaagtacttgaacgaggctgctcttggaaatgctaacgaggatgctattcagaggggaactttcttccagtcttgaattggaggcaaagcaaacttggcaagtaaatatttctgttcgtgaaggttgttgtactaatccaagtgctagaagttgtgatggaacttgcgtgtaacattcttagcattctcaatgtcttaagtgcaaagagaagatgctaagtttgagatgatcttactatatttttc

SEQ ID NO: 35551 - DNA, 270 bp, Glycine max
  Clone ID: LIB3053-005-Q1-N1-A2
cggagaaagaggatgcaaggccaaccattatcaatgacctcatcttggttccctaagttaaagatgtggccaccattctgcattggaagctataggggccatgcttagaggtcgtgtgtatctgcaatgaagaggcctagccaccttcatcaccatatgatatttataaaaatatatatatatgaaactatgaactgcgtttatgcatgtcggaaaatcttcttttgataagagtttggaaatcctcttgtaacaaaattttcattattc

SEQ ID NO: 35552 - DNA, 241 bp, Glycine max
  Clone ID: LIB3053-005-Q1-N1-A3
attatcacaagcgtcacttgctatttcctaagttagagatacagccaccattcttcattgaaatctatatccaccattcttataaatcaccatcatctacaatacaaacccctatccaccttcatcaccatattatctctataaaaatatatatatcttaaactattcacttcacttatccatgtactaaactcttctcttgataacattttcaaaatcctctacttacaaaattatcatt

SEQ ID NO: 35553 - DNA, 386 bp, Glycine max
  unsure (1)..(386): unsure at all n locations
  Clone ID: LIB3053-005-Q1-N1-A4
atagcccaagccctatacaaccaaaccctaacacacacccatttgattcagtttccatggctagcctcaaggttgcatttttggctgcagtgctctgcatggttgtggtgagtgcacccatggcacatgcagctatcacgtgcgggcaggtgacgagtagcctggccaattgcatcggttacctccagaagggaggaacgccgtcgtcgggatgctgcaacggagtgaagagcctcaatgccgccgccaagaccaccgccgaccgccagacggcgtgcaactgcctcaagtcggccgccagccaaatctccggcttcaacgccaacaacgccgnctcgctccccggcaaatgcggagtctccatcccctacaagatcagcaccttc

SEQ ID NO: 35554 - DNA, 362 bp, Glycine max
  unsure (1)..(362): unsure at all n locations
  Clone ID: LIB3053-005-Q1-N1-A6
gtgcattccacacgctgcttccgattgaaggcatctaaggagagaaaaatgcacgatttctgcttcacgatcccctacggattgatgttagtgggtggtggactgttcgcctacataagcaaagggagcatcgcttctctcgccggaggcgccggctccggtttgcttctcatcgtcgccggctatctcagtctcaatgctttcggcaaacgaaaaaactcttacctcgctctctttctcgagaccgtttgtgcagccatactaacttgggtcatggggcagcgatatttggaaacatccaagattatgcctgctggtcttgntgctggaatcagtgctctcatgactctgntntatctcta

SEQ ID NO: 35555 - DNA, 396 bp, Glycine max
  Clone ID: LIB3053-005-Q1-N1-A7
aagaaaagcaagaatgatggttgttcaagctacacaggctatgtcaaatttaagaaagacagaaagtaaggttgaaagaattgaggatgcaataaattttatcaataaccagctttcagtggacgaacctactgcttcagccacaacatttcttcctacagattctttttctctggcttctcaggatcaattgactgccagcgtattaaaccccttggcaagttgtcatgtacaagatgctgaacttaacagttcatctgatcaaaatgaaatgaaaattccctcagaactcatatctcattgcctagctacattgttcgtgattcagaagtgtacggaacgacaattccccccagctgatgttgctcaggtactagattctgctgtcaccagttt

SEQ ID NO: 35556 - DNA, 222 bp, Glycine max
  Clone ID: LIB3053-005-Q1-N1-A8
gttcttgttcttggacaagcacaacaaatataatgaagaccgaagttaatccgtctataaattaggatgaaggtccttttgtcaaaatctgaatggtttactcttctattccatctatgccagtagctggaggagatgctatgctctttaggtaccaaataacgtggttgataggatttacttgcatcttattttgggaatgttaatgataccaaggtcact

SEQ ID NO: 35557 - DNA, 300 bp, Glycine max
  Clone ID: LIB3053-005-Q1-N1-B1
ctggacttaacacattgggggtggcattctgaagaatagacttctaagctgatggacttaacccacctgacacacaccctcgtgccactgagattgtgtttgtgttggatggacaactagatgttggattcatcaccacagccaataaactcatctcaaaggccattaagaagggtgaaatctttgtgttcccaaaaagtttggtgcactatcagaagaacaatggggataaacctgcttctgtgctttctgccttcaacagccaacttcctggcacagtgtctatagctgcagctcttt

SEQ ID NO: 35558 - DNA, 418 bp, Glycine max
  Clone ID: LIB3053-005-Q1-N1-B10
agcaaagacagtcatggcgtcgtttcttcaatggtttctggatccgaagaagaactggttcgccgctcagcacatgaaatccctctccagacggcttcgcaaatacgggctccgatatgacgatttgtacgatccttactacgatctagatgtgaaggaggcgctgaatcggcttccgaaagaggtggtggacgctcgccacgcgcgtcttaaacgcgccatcgatctttccatgaagcacgagtacctccctgacaatcttcaggcaatgcaaacaccattcaggggctaccttcaggatatgctgactcttgtgaagagggagagagccgaacgtgaagcattgggaggtttgcccctatatcaacgatccattccttgagtgcattaattattttgattgaagtgggaaggttaa

SEQ ID NO: 35559 - DNA, 194 bp, Glycine max
  Clone ID: LIB3053-005-Q1-N1-B3
ctttacttatcatcatcagtgttccacatttcagattgaacaacgtaaatatcgggacttagatacctcaccctaaatataaatccaccgaaaatccattcaaaaaaaaaacacaactcacatcttacatttactaccaaacccaataaacccataataaattccattcctatacctaaaatccttccaactcc

SEQ ID NO: 35560 - DNA, 388 bp, Glycine max
  Clone ID: LIB3053-003-Q1-N1-A4
aaaaaaaattgaaaaaattaaaaaggggcttgtaattggagagacaaatgttcattcaaacaaaacaacttatgatagtaaaagggtagaattcgaaaaaaaaaaattgcagatattacaaagaagaagaaatgctcgattaactcgtaaatcacattcttttttaaaatttttcatgaaaaggatatacagagatatatttctatatatcagttgtattccgaggatcaatatacaactttttcttgaattaacaaaaaaatttttaaataaatccatttacgataatgaagcaaatgcagaaagaatttataaaacaaatcaaagtataattcgctttatttcaattttacacaaatattttcatactagaaatccgaattcacat

SEQ ID NO: 35561 - DNA, 321 bp, Glycine max
  Clone ID: LIB3053-001-Q1-B1-A12
tgaaagctccggcatcatctgttacgtcaacgccaatctgcacgacaatgacggtatccgcccggaccagcattgtctcatcttcgctggaaagtagctcaacgaaggtcgcacactcaccgactactccatctagtcggcatcaacacttcacctcgtcctccgtctccgtggtggcatgcagatcttcgttctcacgctcatcggcatgactattagtctagatctctaaagctcctacaccatcgataacatcgacagctaagattcaggattatgagggaatctccccataccaccagatgctgatcttcgccggga

SEQ ID NO: 35562 - DNA, 395 bp, Glycine max
  Clone ID: LIB3053-001-Q1-B1-A2
gaaagaaggacgatgatcacttttcaccagtggaatcctacttcacggaaaataaagacgtggtgctgagatgttctgaatctccccaagcctctttaagggaaagggctatgaaggttcttggccttttaggtggaggccagccaaacagctctacagttaattcagagaagactgtgaaaacagagaatgctactgttgctgagttgcctgacttgatagacactggtgattcaaatgattaccatggaactgatgacactctaaagggtacaagtgatcaaaatatagcaaatttgacatcatcaactcctctggttgatgatttatttggagattttagtgcttctattggagctagtcaagaactaaaaaatgatgattcatttgctgat

SEQ ID NO: 35563 - DNA, 408 bp, Glycine max
  Clone ID: LIB3053-001-Q1-B1-A4
ctacacactagtttgtgtttttcgcgccactcagttattcatttagaaagctactgctgagttcacaagtttctcaagcttgatggggacacaaaagtctaatatgtttgatgcacctttcaaatacatggtgcctgaagataaggaaattcccgacagacctttgccatcacattggactccttctatgcaggcatataacacttctgggtctactccaactccctttttaaatcaacaggcagctggttctcacatgcctctctacatgtgggtaaatcaggtaaacaacacactacttcaatccgatgctttgcatgatccaaggatgctctccagtaaacccacagtagctggggatgctgtactggctttttcagaaatagtacacaaggacttttttttttt

SEQ ID NO: 35564 - DNA, 233 bp, Glycine max
  Clone ID: LIB3053-001-Q1-B1-A5
cacgcaatacggatgcccaacttgccattggtacctttgatgtcaaatagataatcaccagcagccattggctatcacagatatgttggctctcttaccactccatcgtgcaaagagggtgtcacttggaacattctatgcaaggtacctcattactacgtatgctctcctttggtgggaaagtatgtctacacacatcaggatggttagtcatatactatgcacaatttttt

SEQ ID NO: 35565 - DNA, 252 bp, Glycine max
  Clone ID: LIB3053-001-Q1-B1-A6
gaactggggagcaaagaattttcccaatgatcatttaggacttggttttggtcaaaatgaggtttttgacagactcacctcagacctccgtgccaaggattttccaccaaggtcgggtctaacaccgaggaaatgtgacttttaactgatgaagatgttgcaagctatctgataacataattcattgtatctgtgggacttagaatcctactcatagtatcattcttgttcgtgatgttgatgatgatcatc

SEQ ID NO: 35566 - DNA, 388 bp, Glycine max
  Clone ID: LIB3053-001-Q1-B1-A8
gcggcgttgtattgaatggtgtgctagattcttcatggtttggtagggctggtgaggtctccagtaacagcaacattgccacagataagttcaaggctgtttctggtttggggcatcttatggagttttcctgagactcggtcccatgtgcttgttacctccctactaatcagctggtccatcacagagatcattcgctattctttctttggctttaaagagacttttggatttactccatcatggcttttgtggcttagatatagcagcttcttagttttgtatccaacaggcataagcagtgaagttggtttaatatacattgccttaccattcattaaggcgtctgggaagtattgcataaggatgccaaacaaatggaactcat

SEQ ID NO: 35567 - DNA, 355 bp, Glycine max
  Clone ID: LIB3053-001-Q1-B1-A9
tccggattcgggtccagctaactctggcaatttccgagttcaatacaacactggcaagggtggctcaatccccaataatggagctgtcaacagagctccactgagcttgaacagctctgaagctggagattcggttcccagttcagccttctttggcacaagcttgaagaaggttactgcctcaagggtccctaacgtcaagatttcttctggaagtttcaaaatcgttgccggggagaaagagattgatgagcaacaacagacaaacaaggacagatggaaaggtcttgcctatgatatttcagatgaccagcaagacatcacaagaggaaagggtatggttgattccctcttc

SEQ ID NO: 35568 - DNA, 397 bp, Glycine max
  unsure (1)..(397): unsure at all n locations
  Clone ID: LIB3053-001-Q1-B1-B1
attctcttcactttaaagttacatagtttttcattgttttacttaatctacaatggctgcttcaacaatgactctctcttcatcatcattggctggccaagctatcaagcttgccccctccacccctgagcttggtgttggaagggttagcatgaggaaaacagcctccaagactgtttcctcaggaagcccatggtacggcccagaccgtgtcaagtacttgggcccattctctggtgagcccccatcctacctcactggtgaattcccaggtgactatggttgggacactgctgggctttctgctgacccagagacttttgccaaaaaccgtgaactcgaagtcatccactccagatgggccatgttangagccctgggctgtgttttccctgaa

SEQ ID NO: 35569 - DNA, 369 bp, Glycine max
  Clone ID: LIB3053-001-Q1-B1-B10
aggccgactctaacggatccctcggggaattccaattccacattttcaagaaataaggaggcaaaaatgttcatatatgaattggaattatttgttttcttattaggcctatcctgaagccaaaggaaatgagatcggaattcctcggggaattccaattccacattttcaagaaataaggaggcaaaaatgttcatatatgaattggaattatttgttttcttattaggcctatcctgaagccaaaggaaatgagatcggaattcctcggggaattccaattccacatttttaagaaataaggaggcaaaaatgttcatatatgaattggaattatttgttttcttattaggcctatcctgaagccaa

SEQ ID NO: 35570 - DNA, 359 bp, Glycine max
  Clone ID: LIB3053-001-Q1-B1-B11
ttcactcccctctgctggaatgcttattccctacacctacttttttgtccctcaaggttcaggttcttcagctggtggtactgttgccaaggatgctgttggaaatgatgtaattgcagagaattggctcaaggcacatggacctggtgaccgaacccttgcacaaggattgaagggagatcctacctatcttgttgtggagaaagacagaacccttgcaacatatgcaattaatgccgtgtgcactcaccttggatgtgtcgtgccatggaatcaagcagagaacaagttcatctgcccttgccatggatctcagtacaatgaccaaggaagagttgtgagaggacctgctcccttgt

SEQ ID NO: 35571 - DNA, 353 bp, Glycine max
  Clone ID: LIB3053-001-Q1-B1-B12
ctcgagccgctggaactggcaacctgccaaaggcgtgttgaagatgaaatgctgaggcattcaaaagctgtggaggtaacaagagccatgaccctcaacaatttgcaaacgggcttgcctggagtgtttcaggcactgaccagtttctcttccttgttcacagaggctcttgaatcagtgtgtacccgttcatatgccatcaagtaggtgaggtaattcatttgttctgcatgggatctaagttcttcataagggctgggggattttttggcggcaagctcttattgctctcactattttgagttatattttgaaatgtaaatatgaagaattttggggttccacctattttg

SEQ ID NO: 35572 - DNA, 64 bp, Glycine max
  Clone ID: LIB3053-001-Q1-B1-B4
gtgtctcaaaaaactccttggatgctcatgtcaaaagttgaaagaaactttccatatgagattc

SEQ ID NO: 35573 - DNA, 395 bp, Glycine max
  Clone ID: LIB3053-001-Q1-B1-B6
atcatcaatctccttttccttatttctattttttattttccaaaattggatctgctatggaatttgtgccttgtttctcagatagtggaatatttgttggaccatgaagcataaagatggaaaaccgattaatcagccaaataagaaccgggctgtgactttggcagtcactttaattgctctatgtggtttttctttctatctgggaggaatcttttgctctggaaaggatggggttgtggttaataccattcagaagacccttgattctcctaagcaatcctcaggttctctgcaaattaagccaatcagtttccctgaatgcagcatagactatcaagactacactccatgcacagattcaaagagatggagaaagtatggtgtgtaccccc

SEQ ID NO: 35574 - DNA, 391 bp, Glycine max
  Clone ID: LIB3053-001-Q1-B1-B7
aggatttgttagtgaagcaatggctcaaaccatgttgctcatgtctagtgtctctagcagttattccgtggatttgaagaaagaccttttcctccaattgcagagtcaaagtttaaggcctaagttctctcagctctcattcaacccacttccatcatcaacttcttccttttcttcaccccgtacattcacaactctggccctcttcaaatctaagaccaaagccgctcctgctaagactaaggttacaaagccaaagcaaaaggttgaagatggtatctttggcacttctggaggatttggttttactaagcagaacgagctctttgtgggtcgtgttgctatgcttggttttgcagcatcactgttgggtgaaggaataactgggaaa

SEQ ID NO: 35575 - DNA, 388 bp, Glycine max
  Clone ID: LIB3053-001-Q1-B1-B8
aaccgatggagatggagaaactggcctcacaagagtcttgcaggaaataaaggaatcagagctcgcaagctacgggatgattgttaatagcttttacgaactggagcaggtgtacgcagattattatgacaagcagctgctacaggtacagggaaggagggcgtggtacataggtcctctttccctgtgcaaccaagacaaaggcaagcgaggaaagcaagcttccgttgaccaaggagacattttgaagtggctggactccaagaaagcaaattcggtggtgtacgtttgttttggaagcatagccaacttcagtgaaactcagctgagagaaatagcgaaggggcttgaggattcggggcaacaattcatatgggttgtgaggaga

SEQ ID NO: 35576 - DNA, 210 bp, Glycine max
  Clone ID: LIB3053-001-Q1-B1-B9
gctgcaagacaaagtcttggaccaagatcactccaatctccatttggcttctccagaaaagcctcctttcttgttaaggcagctgctaccccccctgtcaagcaaggatcagacaggcctttgtggtttgcatcaaagcaaagtctttcttacttggatggcagccttccgggtgactatggatttgaccctctgggactttcagaccct

SEQ ID NO: 35577 - DNA, 205 bp, Glycine max
  Clone ID: LIB3053-001-Q1-B1-C10
tcgggtcttgccttgctggtttcttctctgctgctttcttcgttgttcggtctcctgttccgcttcctcgtgctgtgtgccgccttctttgtgcttgggggcttgggctttcttccttggccttgctgtgttttcctccttcggttccttgtctttccgtctttcttttgtgtgttgtcgcgctctcgctttggtcgggcggccg

SEQ ID NO: 35578 - DNA, 342 bp, Glycine max
  Clone ID: LIB3053-001-Q1-B1-C12
ttttacttgaattttcttcatccttctctgttctcctagaacttgattacttgaacattccctatgacagatgacgtggttcttctggatttctggccaagtccatttgggatgagggtcaggattgcacttgctgaaaagggtatcgaatatgagtacaaagaagaggacttgaggaacaagagtcctcttctcttacaaatgaacccggttcacaagaagattccggttctcatccacaatggcaaacccatttccgaatccctcattgctgttcagtacattgaggaggtttggaatgacagaaatcccttgttgccttcagacccttaccagagagct

SEQ ID NO: 35579 - DNA, 397 bp, Glycine max
  Clone ID: LIB3053-001-Q1-B1-C2
attccattctctctgtgtatttccctacctctcccttcaagatgcagatcttcgtcaagaccctcaccggcaagaccatcacccttgaggtggaaagctctgacaccatcgacaacgtcaaggccaagatccaggacaaggaaggaatccccccggaccagcaacgtctcattttcgccggaaagcaacttgaggacggccgtacccttgctgactacaacattcagaaggagagtactcttcacctcgtcctccgtctccgtggtggcatgcagatcttcgttaagacactcaccggcaagaccataaccctagaggttgaaagctccgacaccatcgataacgtcaaggccaagattcaggacaaggagggtatcccccgggacaacaacgtctc

SEQ ID NO: 35580 - DNA, 395 bp, Glycine max
  Clone ID: LIB3053-001-Q1-B1-C3
ctcgagccgaatcggctcgagcgagtttcacagcgaagtcgtaggagggtttcaaaagatggagaacatgcagagcttctggcaattgggcgatgaactccgtggacactcaaaagcatcggaggatcacaaatggttaatggttgcttcgaaattggcggaacagacaagattgaagggggagcgtgtgaacaaccttgatctttcaaagggccccattgaaacaaggtcaagggataaatttgggttccaggaagagaacaaatttgattctcttaacttaagcatgttgaacctggactctaaatttactgagaatgtgagcaaaagctcgcttcgaaatggtgtttatggtatgaatgcagtgtatcagaaaaacaatgcaaacttggtga

SEQ ID NO: 35581 - DNA, 393 bp, Glycine max
  Clone ID: LIB3053-001-Q1-B1-C5
aaaaactaatggcaggaagtgcacgagtggggcggattgtgatgtcttctgctgtgaagcatctaactcctgtgactttggagttgggtggaaaatgccctgcagttgttgattccctttcatcttcttgggacaaagaggtcactgtgaagagaataattgtggggaaatatgggacttgtgctggtcaagcatgcataacaattgattatgtccttgtggaaaagggttattgtttaaaactggtggaattgatgaaggtctggatcaagaaaatgtttggacagaaccctcgaaaatcaaaaactattgctaagatagttaataaacaccacttctctagattgaagaatcttcttgcggataaacaggtcaaaggttctgtggtttatg

SEQ ID NO: 35582 - DNA, 394 bp, Glycine max
  Clone ID: LIB3053-001-Q1-B1-C6
ccacgatttcgccattacgaagaaatacgcgatcttctgtgatattcagctcggaatgaaccctcttgacatgatctccggtggctcccccgtcggctccgtcgcctccaaggtcccaaggatcggaatcctccctcgtgatgctaaggatgagtcgatgatgaagtggtttgaggtgccggggttcaacatcattcacgcgataaacgcgtgggaggaggacgagggaagaacggtggtgctggtggcgccgaatattctttcgatggagcacgcgctggagagaatggagctagttcacgcgatggtggagaaggttcggatcgagctggacacggggataatcacgcggcaaccggtgtcggcgcggaatctcgatttcgcagttataaaa

SEQ ID NO: 35583 - DNA, 392 bp, Glycine max
  Clone ID: LIB3053-001-Q1-B1-C8
ctggggcctgcaaatgttcctgacaaatacgtttctgatcccatacatggctatccgattgaatgatgctgatgatgagagtgttacaagaaaactttcacagtttggctcagtgatgacaaatggtgctccaattgttggagtgattggtgggagtgcatgcattgtatctctattgtgggctctttttggtcgaatggatgcaaattttgggggcatagcagatagatgggactacttggtgggttatcttggatcagaaaggctggcttatgctttcatatgggatatatgtctttacataattttccagccttggttgattggagacaacctccagaatgtccaggaaaacaaggttgttgtagtgaagtatcttagatatgtacccc

SEQ ID NO: 35584 - DNA, 283 bp, Glycine max
  Clone ID: LIB3053-001-Q1-B1-D1
aacacgcacatcatcttacatacataccactggtcacaaccatgagttgggttcgcggagagcctctcggcagtgggaatttcgccatcgtcggcatcgccataccgaccaatacttccagccagtgttctgtcgtccaccgccgtcaaactcaccgatgttcacacctcggtcaatgctgaaatacgagaaggaaatactcgagtgccatggagcttccccttatgtcaataactgtttcggcgacgatcacacggttgaaaactgagaagagtattaccac

SEQ ID NO: 35585 - DNA, 101 bp, Glycine max
  Clone ID: LIB3053-001-Q1-B1-D10
gtgttgatccttgttttaatttatgttccatcgcttataacttaagatgttgagtacattgaacaattttgagaactcgtgttttactttaccttgctttc

SEQ ID NO: 35586 - DNA, 350 bp, Glycine max
  unsure (1)..(350): unsure at all n locations
  Clone ID: LIB3053-001-Q1-B1-D11
attgtangggcgaagccggaggtcattggagctgatatcacaagggcatacctcagtaatgtatgtgttgctaaagaactgcacagaaatgggttggcttatgcacttcttgaaaagtcaaagttagttgcttatgattggggcataacagatttgtacgtccatgttgctgtcgacaatgaaccagcgaagaaattgtatataaagagtgggtttgtctatgaaagtgatgaacctgcgtggcaggccaggtttctagatcgaccccgaagacttctcttatggtcagggttttcaaggacctaatttaacagtgttgtcctatatcttctgttaatttgattttctgt

SEQ ID NO: 35587 - DNA, 119 bp, Glycine max
  Clone ID: LIB3053-001-Q1-B1-D2
aatgtgttgtgtttgtcggaacccctgattacatttttgttaagcgcagcgagtttcaggactttgctgcgttgtgttgctttggtttattaaatgtcaactttctatttgtagtgttc

SEQ ID NO: 35588 - DNA, 379 bp, Glycine max
  Clone ID: LIB3053-001-Q1-B1-D8
tttccaattcaatagagagaatggtactgttgttacacctcttgtcgtgtgtcatgctaagaagaaactcagttttatggagcaaattctcgattacattgaaggacgctctaaaattgttgatgatgtggctgcaatcatggtcgcggactgatcttgtttccacctttttgttttccttgttgtgctcattgcctttgattttctgttcattttcagggggtcctaaattaaggaagtggtatggtgcacctgatatccttgaaaaagatggtactgcaatagaagataatgaggatgattatccggaagatgaagtcagggatgcagtgctggtaacagatggagatagtgagatgggtcagatggtgatattgtc

SEQ ID NO: 35589 - DNA, 387 bp, Glycine max
  unsure (1)..(387): unsure at all n locations
  Clone ID: LIB3053-001-Q1-B1-E1
gtttttcatttcatcgtgcattcaatggccaccacagcagctctatccggaaccatggtgagcacctccttcatgaggaggcaacctatgaccaccacaagcctaaagacattccccaacgttggtgaagctctttttggtctgaaaagtggacgaggtggtcgtgtcacttgcatggcctcgtacaaggtgaagctcataaccccagaaggagaagtggagtttgaatgcccagatgatgttttcattgttgacaaggcagaggacgaaggcattgaacttccctactcgtgcanggccggttcttgcgtttcctgtgttggcaaaattgtggaaggtaacgtggaccagtcagatggtagcttccttgatgatgagcaaatagat

SEQ ID NO: 35590 - DNA, 381 bp, Glycine max
  Clone ID: LIB3053-001-Q1-B1-E11
gcaacacccactccttcttcctatattctattcataactctcatcattcattcattcattcgtcattcatcttccatcatccatccactttcctcaatcttccattccagatctctcaccttcttcttcttcctctgtgccacccttttgttccatgattgttttttgtgtctgtatcagcttgatctttttgtttttttccttgttgtaaaaacatttcaatctgcaagataattattggcagcttcactaatatcttttaagactacatactttagctaggcaatcacatttcttgggataatgttgggaggcaacaacggaaattgcttgcttcctgttttcttggacgaaactcaatttcagcatcaaactaatgtg

SEQ ID NO: 35591 - DNA, 343 bp, Glycine max
  unsure (1)..(343): unsure at all n locations
  Clone ID: LIB3053-001-Q1-B1-E12
cagttttgggtgatcggaggtgtatcttctcatctttttgccctatttcagggtttactgaaggtcttggctggtgtgaacacaaacttcactgtgacgtcaaaagcagcagatgatggagaattctcagaactctacatcttcaagtggacatcactcttgatccctccaatgaccctactaatcatgaatattgttggggtggttgttggggtctcagatgccatcaacaatggttatgattcatggggacctctctttggtagattgttctttgcattgtgggtgatcctccaactctaaccccttcttgaangggttgcttggaaaacaagatagaatg

SEQ ID NO: 35592 - DNA, 391 bp, Glycine max
  Clone ID: LIB3053-001-Q1-B1-E2
gtgtttcatcatttgggtttcgcagaagagagagaaacccatttctagagagagaaactcgcagtcgcagacatgtcttccttcgatgccttcgccgacgacttgaacgtcaactcttcttccactcgccagcacgacgatgacgaggacaacttctctggctacggcggctactcctccttcaccggaggattctccgccgacggagatgtcgccgtcgatcactccgccgccgcgtcgccggagatctacggcttcactgattcgaatcccgcttactctcagtctcccttcgaatcggccaccgtagagaacgaaaacggaaacggatacggcgacggcgacggtgtttttgtctccgacggtccggtgcttcctccgccgacggaga

SEQ ID NO: 35593 - DNA, 394 bp, Glycine max
  Clone ID: LIB3053-001-Q1-B1-E3
ccgccattctcaagtttagaactccccaatccaaggcaacgctgcataactttggccaccaacacccccgtctctcatacattctacgaagtgaacgtcaatggcaagttgtgttggcacttcacctctatatttaccagttggtattggaaattttcctcatgctcatgttaagcttactagaccaaacattgttgggatgaaacccttaccatataacatcagaaaaggagaacttaagattgctacattgcaaaatccatcatcccatgtcagacatgctgctgctttgaattttaaatgtgctgctgcaactgcaagtgcaacccaaactgtaacacgcaattctcggtcaatgactactgacaaagtgaagtctcctaaacttgacaac

SEQ ID NO: 35594 - DNA, 364 bp, Glycine max
  Clone ID: LIB3053-001-Q1-B1-E6
gagaatctgagtcctcagagatctaagcctctctggtgttttgttcagcacacacccttttgttgtgccataattgtgagagtgaaagaatgagagacaatgatgggaatgaggaatattagtagtagtaagaacgataataagacaaatggtcattcatccatcatgaacaatggaggttcagatggtaacagagctgagccaggttcaaaggaatgggagatgaagccaagtggaatgttggttcagatgagaactgctgaatccgatcggaacccagcacttgtgccaacacttagagttaggatcaagtttggttcaatttaccatgaagtcaatattagttcacaagctacatttgggg

SEQ ID NO: 35595 - DNA, 388 bp, Glycine max
  Clone ID: LIB3053-001-Q1-B1-E7
gcccctgacagtgactctggcatgacacatatttccacccaaataaaaggaacagctggctacttggaccctgaatacctgaaaacttatcaactaactgaaaagagtgacgtgtattcatttggagttttgcttgttgaacttgtcacaggcagacgccccattgaaccaaaatttgaactcagggagcgaatcacggcaaaatgggctatgaagagattcattgatggagatgctatctcagtcttggacccaagactggatcagactactgcaaatactttggcactagaaaagattcttgagctagctttacagtgcttggctccacgcagacaaattaggcctactatgaagagatgtgctgagatcctttggtccatccgca

SEQ ID NO: 35596 - DNA, 386 bp, Glycine max
  Clone ID: LIB3053-001-Q1-B1-E8
tgagctgagaaaacccccaaccccaacctcaaccttaacctctcctcactttcttttcaaccagaactatgattaagctttttaaagtaaaggaaaaacagagagaactggcagaaaatgcgagtggcggaccacccgttaagaagcaaagtgccggcgagttgcgtcttcacaaagatataagcgagctgaatctaccaaaatcatgtaccatgcaattccccaatggcaaagatgacctgatgaactttgaagtttcaattcgacctgatgatggatattacttaggtggcacatttttgttttcctttcaagtgtctcccatctatccacatgaagcaccaaaggttaaatgcaagacaaaggtctatcatccaaatattgac

SEQ ID NO: 35597 - DNA, 391 bp, Glycine max
  unsure (1)..(391): unsure at all n locations
  Clone ID: LIB3053-001-Q1-B1-F1
ctnacttaaagatattggtgtgaagaagggagatgccgtaattatttatttgcccatgcttatggagcttcccatcgcaatgcttgcttgcgcccggattggtgctgttcattcggttgtatttgctggtttttctgcagaagctctttcccagagaatcattgattgtaaaccaaaagttgttattacttgcaatgctgttaaaaggggccctaagcctatctatctaaaagatattgttgatgctgcaatcaatgattcagcccaaaatggggtctctatagataaatgcctagtttatgaaaacccattggcaatgaagagggtagataccaaatggaaggaagggcgtgatatatggtggcaggatgtcattcctcaatatccaact

SEQ ID NO: 35598 - DNA, 347 bp, Glycine max
  unsure (1)..(347): unsure at all n locations
  Clone ID: LIB3053-001-Q1-B1-F10
tttaaccctccccgcaaggtcaattgggctaacaggggtcttctttcggcggaaatatgtacttgggagggtngattgagctattgtaattaatttaggactgtatcatgtggtgtggggtaaaagcaatgactacgagtcatcaaattcaattactaaaaagcatacattgccatccaagcaaacagtagaggacgagcattctaatcatgatgtcatcactctcagtaacttaagcgcgggaaacatagttcgagatgaacaagtatgatgaaacataccacattcaatctaaatttcagcaatctgggatctttcaaccgttcagaagcccatttgaaaacaac

SEQ ID NO: 35599 - DNA, 341 bp, Glycine max
  unsure (1)..(341): unsure at all n locations
  Clone ID: LIB3053-001-Q1-B1-F11
gttgttttttctggtcgagtgtcaacaggtgcacttgatgacatacgacgagcaactgacatggcatacaaggctatagctgaatatggtcttaatcagaccatangtcctgtttcaatagccactctttctagtggtggaattgatgagtctgggggagcagttccttggggaagggatcagggacatcttgttgatcttgttcaaaaagaggtgcaaacattactgcagtctgcactggctgtagcactttccattatccgagccaatcctactgttttggagggccttggtgctgatttggaagaaaaggagaaagttgagggtgaagagctacagaa

SEQ ID NO: 35600 - DNA, 270 bp, Glycine max
  Clone ID: LIB3053-001-Q1-B1-F2
gctggatcttctagtggtgcaaagaaggcttttactggaatgtgagcttcgatttccagtttttattgaagaaatcagatctactaaataacaaggtaacatttttatttagtagatctgatttcttttctggaaggtgacatattaaaaccttatcaattttggattttctttgaggtttcgttctggctttatgtttaggattttgttatacattatgtttttcgaatactatttgccttttaatttttgaaactatgcagactcttc

SEQ ID NO: 35601 - DNA, 391 bp, Glycine max
  Clone ID: LIB3053-001-Q1-B1-F5
tctcatttcaatttgcatttgcatttcatttggcgttttgtttctttctggaagcttcacttcggcatccatggcgtcgttcgaagaagctcctcccggaaactccaagaacggcgagaagatcttcaagaccaagtgcgctcagtgccacaccgtggataaaggtgccggtcacaaacaaggacccaatctgaatggtttgtttggaacgcaatctggcacaactcctggatattcctattctactgctaacaaaaacatggctgtgatttgggaggaaaagaccttgtatgattacttgctcaaccccaaaaagtatattccagggacaaagatggtgtttcccggtcttaagaaacctcatgaacgtgcagatcttactgcatatctt

SEQ ID NO: 35602 - DNA, 384 bp, Glycine max
  Clone ID: LIB3053-001-Q1-B1-F6
acctgctaacacggttgcaaaacattaatttggctttccattttgaggtagaacagcaagtgaatggggttttcattaacttttttgggttcaatggaacggctggtgtgtggagaataaaggcccttgaggatgctggtggttggttggagaggaccacagtggaggatatggatatcgctgtacgtgcccatcttcatggctggaaatttattttcctcaatgatgttgagtgccaatgtgagctacctgaatcttatgaagcttatagaaaacagcagcatagatggcactctggcccaatgcaattgttccgtctttgtttgcccgacataatacgctccaagataagcatatggaaaaaattcaacatgatatttctct

SEQ ID NO: 35603 - DNA, 388 bp, Glycine max
  unsure (1)..(388): unsure at all n locations
  Clone ID: LIB3053-001-Q1-B1-F7
cttcatcagttccaccacctcatcctcatccacacaacactccgctccgtttctctcttcactcctctttccccacacacaacacactcagatctctcaactcagatctctcaactcagatctctctctgcttccattaatttcacaatggtcactctcttcgactccctcgccgtcgtgcgtctccccaccgccgccttctccccggctgccaccagccggacctccgttttgctcccgcactgcgccggcctcaggctcagacccgccgccgccacgcgcttagttgcgtcncccgctcgcagaatcgcttcacgcgccgcgcgcgtcgtatgtgaggctcaggataccgccgtcgaagtggctcctattactgatgcaaattggc

SEQ ID NO: 35604 - DNA, 395 bp, Glycine max
  Clone ID: LIB3053-001-Q1-B1-F8
ctcaatttttctctcaaccggcccaatttagcataagcccagcatggccaccgcaacagcagcagccacctcgtccttcatggggacgcgcctcctggaggcccattccggggcggggcgggtgcaggcccggttcgggtttggcaagaagaaagccgccgccccgaagaaagtttccagggggtcgggctctagctccgataggcccctgtggtatccgggcgccaaggcgcccgagtacctggatgggagccttgtcggagactacgggttcgacccatttgggctagggaagcccgccgagtacctgcagttcgagttggactcgctggaccagaaccttgcgaagaacgtggctggggacatcattgggaccaggaccgagctcgcggggg

SEQ ID NO: 35605 - DNA, 377 bp, Glycine max
  Clone ID: LIB3053-001-Q1-B1-F9
tgcagagcagaagaaacagaggaagcacgcagtgtgtgttgttgttgtggttcctctgagttccgagtggactcagttacagagcaataatgagtcaggaatcgtttatatatagcttcgtggctcgtgggacgatgctgttagcagagtacacggagttcactggaaacttccctgccattgcagctcagtgtcttcagaagcttccatcttccaacaacaagttcacttacaactgtgaccaccacaccttcaatttccttgttgaagatggttatgcttactgtgttgttgctaaggaatctgttagcaagcagatctctattgctttccttgaacgtgtcaaggctgattttaagaaaagatatgggggtggg

SEQ ID NO: 35606 - DNA, 235 bp, Glycine max
  Clone ID: LIB3053-001-Q1-B1-G10
ctccgggaaattcaaattcaaaattttcaagaattaaggaggcaaaaatgtccaaaaatgaattggaattatttgtttcctaataaggccaatcctgaagccaaaggaaatgaaatcggaattccccggggaattccaattccaaattttcaagaaataaggaggcaaaaatgttcatatatgaattggaattatttgttttcttattaggcctatcctgaagccaaaggaaatg

SEQ ID NO: 35607 - DNA, 350 bp, Glycine max
  Clone ID: LIB3053-001-Q1-B1-G12
ctggacagaaaaacgctatgggagatgcagaccccacaggttatcaagcctgagttgttgaggaaaggctttgagcttgtaaatagggaaggtcttgaagttactgatgatgtgtccattgttgaacacctaaaacatcctgtttatatcactcaaggatcttataccaacattaaggtgactacacctgatgacatgttactggcagagagaatattgaatataaatgatgaagacaatatagtcttgccagttcacctttgaagggaaatcatatcctgcaagataagatagaactggaaatcttctttttcaataaatagcgatcaaacaatgaacttaaaaatcct

SEQ ID NO: 35608 - DNA, 380 bp, Glycine max
  unsure (1)..(380): unsure at all n locations
  Clone ID: LIB3053-001-Q1-B1-G4
tttttcttcaatatataataccctcattatattacagtgaaagctatgctggcaagtatgtacctactatagggtattatatattgagggtgatgcttgaaaacagggtcaagctgaacaaacctagttatagcagcaaaaagatgttttgcaacggcgttttgatccattgggatctcttctggggttgaatgttgggtttttcgggctcccctcctatgtggagtaagggtccactttatctcacttatttaagangagaaggctccgattangatgagagaaaaattattttaaagagaaaaacagttacaaaacattgaaagagaaaggagaaggaaaatcattgtgattttcgcacacacaccagaaagcgtttt

SEQ ID NO: 35609 - DNA, 392 bp, Glycine max
  unsure (1)..(392): unsure at all n locations
  Clone ID: LIB3053-001-Q1-B1-G5
ataaaatctaaaggattgagtatctgtatcaccaatccaacaaaaaaaatgtctgtggcatcttcattcccatgcatcaaaatcccagcttgttcctcctctccatcatgcacatcttcatcaacttcatcatttagattttcttcttccaagccttatgctgctgtttctataaggaactctcagactgaagggcctctgagaagaccagtggctcctcctgtgagagaaccatcaagtagtgtccctcagccactgaagccttcacctccttctcaggttccgcccanaaaggcttctcctgttgctggggatgataataatgtcattacattagagtttcagaggcagaaggctaaggagcttcangagtatttcaaacagaagaagcc

SEQ ID NO: 35610 - DNA, 395 bp, Glycine max
  unsure (1)..(395): unsure at all n locations
  Clone ID: LIB3053-001-Q1-B1-G7
tcacattcaacctccatgttcccaaagctctgcctcctcttccctcttcatcacgtggaacaacttctctcttcttttcttccaagcacaaatcataccacaacaacactagtcctagccaatcactacgtataacatgcagcagccagaaatcaaatcatgatgatgatggcagcctaaagtatacaagtttggcactgcaaataggagtactcttggccttggctgagcagccagtattggctgtgactggagagaataaccggccagaactcctctgggttttgacacaatggggggttgttctctttggatatttccttgtcgtgccaccaataatcatgtactggctttggaaaagatggtacagaagaaacttgctggagatngtattt

SEQ ID NO: 35611 - DNA, 391 bp, Glycine max
  Clone ID: LIB3053-001-Q1-B1-G8
gctcgtttctgggccaagttcattgatgacaagtgcgtggctctagcagcgaaatctgtttttattgttgatgagaaagagaaagagaaggcaaaagaagaattatttgaggctctgaattatcttgagaatgagttgaagggaaagttttttggtggagatgagtttggctttgtggatattgctgctgtgatcatacctataattcaagagatagcagggttgcaattgttcccaagtgagaaattcccaaagctctccaaatggagccaagacttttacaaccattcacttgttaaccaagttatgcctcctaaggaccaactttttgcctatttcaaggctcgggctcaaagcctcgctgctaaaagaaagaattaacaaagactca

SEQ ID NO: 35612 - DNA, 343 bp, Glycine max
  Clone ID: LIB3053-001-Q1-B1-H10
ctcatctttcctacccaaactctcccattcgaacccaaacaaccaatgcattctccctccaacctctctcttcggcaccagaatcaccctcctacgcgccacctcatcgtcccgttccctccccaacacaagttgcagtgccacgtcagcaaccgtgtcgtttagcctccccaccccgaaacccctttcggatacgcccgataaaaccccaaagtggtcggagagggctataaaatcgtatgcaatgggggaattggaagcgaggaagctcaagtatccaaacacgggaaccgaggcgattctcatggggattttggttgaaggaacaagtaatgctgcaaaa

SEQ ID NO: 35613 - DNA, 353 bp, Glycine max
  Clone ID: LIB3053-001-Q1-B1-H12
atccaacattccaacccatttcatcactcttcacagaaacatcgagcagcagaagaaagaaactacagaaaaaagaaaaaagacatggcttccacttctgcagtttcattggctatgccagtaacttatgccagccagaagagggtactggtgcctagctctgatgcattattcctcaagccactgcctctacgttcttattcttccaaggcaatggcagcatcaaaagtacccaatggaaggtttcaggtgagggcttccatgaaggagaaagttgtgacaggcctcacagcagctgcattcacagcctcaatgatggctcctgatgtggccgaggccgccgtttcgccttc

SEQ ID NO: 35614 - DNA, 381 bp, Glycine max
  Clone ID: LIB3053-001-Q1-B1-H2
gaactccaaggaaggacctccaacctttgaccaaccgaagatgactttgagcaagctcttggagtatggtaacatgcttgtccaagaacaagagaatgtgaagagagtacaactggcagacaagtacttgaacgaggctgctcttggtgatgctaatcaggatgccatcaaaagaggaactttctatggcaaagcagcccagcaagtaaaaattcccgttcctgaaggttgtactgatccaaatgcctcaaacttcgacccaactgcaagaagtgatgatggaacctgcttatacacaccctgagaacctaagcattctccacttgaagagaagctatgacttgatataatcaaataatttatcctgttcatattggattg

SEQ ID NO: 35615 - DNA, 393 bp, Glycine max
  Clone ID: LIB3053-001-Q1-B1-H5
atagccgcaagccatgggcaaagttcattaatgtagaaaatcatcacatggctgttcctgaggctgttgactttgttgacaagttattacgctatgatcaccaagaacgtcccacagcaaaagaagccatggcccatccatacttcaatccagttagaaatgcagaaagtagtagaactcgtgcacattgagttgctggtgcttgttgtgatatggtgttcgttcttgtcagggggccttcaacagtctgaactgttatttctagtggaacttgcttttagtagattcccctgttctgttgtgaaactcatttcaattagttctttatctaatcgttttgtttctggtttttaaaattatttttgggtggaaaattcagctctcaacaatttt

SEQ ID NO: 35616 - DNA, 387 bp, Glycine max
  unsure (1)..(387): unsure at all n locations
  Clone ID: LIB3053-001-Q1-B1-H6
gtgaggagagaattacagagcattttccaacacgattacacgaccgaatcaaaccctctctttctctccgaagctgcgtttaatatcttactcgccttagattgttcttctctttcattatactgttctcttttcgatttgagggaacagtacaagagtgtgaggatcggttaacccaactgcacaggtagtcactaaaataatggagtctcacgatgagactggatgccaggctcctgaacgccccattctttgcattaataattgtggcttctttggaagagcagctaccatgaacatgtgttccaagtgttacaaggacatgctgnttgagcaggagcaggacaattttgcagcatcgtcggttgaaaacattgtgaatggcag

SEQ ID NO: 35617 - DNA, 198 bp, Glycine max
  Clone ID: LIB3053-001-Q1-B1-H7
cccggtcttcggctccatgtgaggagatcagtacggcgcattttcccacacgagtacacgattgcatcatgtgctctcattctggcgggtgctgcgtttagatagtcctacctgcataaagtgttcttcgcgttgactatagtgttcggttttcaatttgagggatcaatttaatagtgtgcagatcagttaagtcat

SEQ ID NO: 35618 - DNA, 375 bp, Glycine max
  Clone ID: LIB3053-001-Q1-B1-H8
tggacagtatccatatggaggtttaatcctgaataggccaactattagcaggagattcatgcctgagaaagggtctcctgaatatgatgcgttggctaagaaccctgagaaggagtttttgaagactattactggcaagaaagagaccctcattgaccttacaattatagaaattttatcaaggcacgcatctgatgagttctaccttgggcagagagatggtggtgactactggacttctgatgccgggccattagaggcctttaagaggtttggaaagaatcttgaagagattgaaaagaagcttatagagaagaacaatgatgagacattgagaaaccgctatggggcggctaaaatgccttacactttgct

SEQ ID NO: 35619 - DNA, 298 bp, Glycine max
  Clone ID: LIB3053-002-Q1-B1-A1
acagagtttacttggaaacttcaatttttcaattcttaatgatactgttttgatatcttcaatgaattgaactgcctgcagttcaaaattgaactgcatgagttgcctttagccagtcatgttttacttcaatccagaaataaaatattttcttaaggctggggtgcttgctgttagaaagtaactggagaggatgttgatgccctggagacctttgttggtgaaacttgtagctgtcgagttttgcaattaggggtctgtttgaagatcgtgtcattgttagcatgatttgtgattc

SEQ ID NO: 35620 - DNA, 379 bp, Glycine max
  Clone ID: LIB3053-002-Q1-B1-A10
aggtcgaatctaaaggatcccctcggggaattccaattccacattttcaagaaataaggaggcaaaaatgttcatatatgaattggaattatttgttttcttattaggcctatcctgaagccaaaggaaatgagatcggaattcctcggggaattccaattccacattttcaagaaataaggaggcaaaaatgttcatatatgaattggaattatttgttttcttattaggcctatcctgaagccaaaggaaatgagatcggaattcctcggggaattccaattccacattttcaagaaataaggaggcaaaaatgttcatatatgaattggaattatttgttttcttattaggcctatcctgaagccaaaggaaatga

SEQ ID NO: 35621 - DNA, 316 bp, Glycine max
  Clone ID: LIB3053-002-Q1-B1-A11
atacaccctcttttgctgcatcagaggagttgtgaattaagagcatggctgcacaagctcttgtatcatcatcttctcttagcttcgcagcggatgctgtaggacatagtcttggaccaagatcactccaatctccatttggcttctccagaaaagcctcctttcttgttaaggcagctgcgaccccccctgtcaagcaaggatcagacaggcctttgtggtttgcatcaaagcaaagtctttcttacttggatggcagccttccgggtgactatggatttgaccctctgggactttcagaccctgaaggaacagg

SEQ ID NO: 35622 - DNA, 376 bp, Glycine max
  Clone ID: LIB3053-002-Q1-B1-A12
ccacgtccctctcttctcttaaaaaaatgtaaaagatggaggcaggaaagcatctggaagcattttctattcagcttgtaattcttgcaatctggaagcaagcactgcatatatgccatacacaagctgcatcagccatggaaggaagtccaaatcaagaaacttcaagatatagaaggagcaccagcaggaagcatggcagtcctgattcagaagaatgccttgatggaaacaccctaaggccgaaggatatattatctcaaattgaaagtgaatttttgagggaatttgagcatgctgaagaacttgccaagaccattgagcccggaaacacagagatgccagatgcaatggagacaatatttcaatccgccct

SEQ ID NO: 35623 - DNA, 316 bp, Glycine max
  Clone ID: LIB3053-002-Q1-B1-A2
gcaagctcatcctagagttttaaaaatggcagcagcctcctccatggctctctcttccccatccttggctggcaaggccgtgaagctgggcccatcagcccccgaagtcgggagggtcagcatgaggaagaccgtcaccaagcaggcctcctccggaagcccatggtacggcccagaccgcgtcaagtacttgggcgcattctctggcgagcccccgtcgtacctcactggcgagttcccaggtgactacggctgggacactgctgggctttcggccgagccagaagccttcgccagaaaccgtgagctcgaagtg

SEQ ID NO: 35624 - DNA, 345 bp, Glycine max
  Clone ID: LIB3053-002-Q1-B1-A5
acgatgacaagcttgatcggtctcatcaataagatccaacgagcctgcaccgttttgggcgatcacggtggcgagggcttgtcgctttgggaggctcttccctccgtcgccgtcgtcggtggacagagctcagggaaatcgtcggtgctagaaagtgtggtcggaagagattttctgcctcgtggatctggtattgttacacggaggccactagtgctgcaacttcagaagacggaagatgggacacaggagtatgctgagtttcttcacataccaagaaggagattcaccgactttgctgctgtgaggaaggaagtagcggatgaaacagatcgtagaactggg

SEQ ID NO: 35625 - DNA, 337 bp, Glycine max
  Clone ID: LIB3053-002-Q1-B1-A6
gaaagtactcgaggtcgcagatgtaccacaagaggggcatttgggctatcaaggccaaaaacggtggcgttttacgtcgccacgaccccaaacccaagcctgaggcgcccagtgaagaaccacgcaaattttaccccgctgatgatgtcaagaaaccccttgtcaacaagcacagacgcagacgagctaagctcagggctagcattagccccggaacagtgttgattcgtcgtgctgggggatttaagggaaagagggtagtgtttttgaagcagctaccttctgggttgcttcgtgtaacaggtcctttcaaggggtaatggagttcctttgagac

SEQ ID NO: 35626 - DNA, 175 bp, Glycine max
  Clone ID: LIB3053-002-Q1-B1-A7
tggcacttctcgtgttgctcaacacagacaggagtggcgtcggtttcagtaatggctacgaccaacaacagcaggtcgtccatggcgtcgttgcgctctgcgttgccctctgagtctccttctggttcctcttcagtgcgcgtccctgtattgccatcttcctcgtcagggaggc

SEQ ID NO: 35627 - DNA, 321 bp, Glycine max
  Clone ID: LIB3053-002-Q1-B1-A9
gttctcacaaattagaaaataaaaatattatatatacatatatatatatatatatattctcttcgagtccgtcgtaagagaaaacaatggcgaaacccagcagcgaaaagccagaggagcatagcgattccaagtactacaaaggggtccgaaagagaaaatggggcaaatgggtatccgaaataagactacgcaacagccgtcagaggatttggttgggatcctacgacactcccgagaatgccgcgcgtgccttcgacgcggcaatgttctgcttacgtggccgcaacgccaagtttaatttccccgacaacccactcg

SEQ ID NO: 35628 - DNA, 378 bp, Glycine max
  Clone ID: LIB3053-002-Q1-B1-B1
caaagtttcttcctttctctgctctttgtcttctctgacacatttggggccttgttgagtgtgtttttgcaagagggtatggcgaaggacgttgaggttgctgagcgtggctccttctctgggaaggactaccaggaccctccaccagcaccactcattgatgctgaggagctcacaaagtggtccttttacagggctcttattgctgagttcattgcgactttgctcttcctctagattactgggctcacagttatagggtacaagcaccagacggatcatgctgatgcgtgtggtggggttggcattcttggcattgcgatggcctttggtggcatgatcttcatccttgtctagggcactgctgggaattcagga

SEQ ID NO: 35629 - DNA, 384 bp, Glycine max
  Clone ID: LIB3053-002-Q1-B1-B10
caactaaccaacgtagttatggcttcctctctacacaactatgttcttgctatcttacttttggccataacccaattcaaaaccacatctgcgggctcccatcaccacctccagcacctcaaatcccttcacttctctctgtttcaacacgagaccataaacaaaaccggatacatcatagtggatggtataaaaggaggagcaggggtgactcaaaccacaaccccttttggcaccttatttgcctttcaggaccctttgactgttgcagccaacaggtcctccaaactagttgggattgcagaagggactacagtcacatctagtctcgacgggcttcggagcatttcgattcgcaagctaaccctgcgtttgaagcaccac

SEQ ID NO: 35630 - DNA, 355 bp, Glycine max
  Clone ID: LIB3053-002-Q1-B1-B11
gcccttgctccctccagaaggatcacagattggggaacgtatttctttttctgggattgatggaaagccagaagatgtactaaacccaaagaagaaacagctggataagattacaccgcatcttttcactgatgacaagggggtagccacatacaagggaataccatttatgacgtctggtggaccatgcacatcatccattcccagagcaactattaaataatggagatatggcccattcattgttcttcgccactcatagatttttggtaccacaagatatttgaagttttgattacgttaatgagacgttactatcttgttgacaagcttatgctgcacttgcacttgcatg

SEQ ID NO: 35631 - DNA, 330 bp, Glycine max
  Clone ID: LIB3053-002-Q1-B1-B12
cccaattcagcaaggtcccgccagtacccactacctcaatacgttaagtatcttatctctgagtaccaaaaaattttgcagaggctatatgatcttggagctcgaagagttcttgtgacaggcacaggacccttgggttgtgttccatcagaattggcccaacgtggtagaaatggacaatgtgctcctgaactgcaacaagctgcagcattgtttaacccacaactcgaacaaatgttgctacaactcaacaggaaaattggaagtgacgtttttattgctgcaaacacaggaaaagcgcacaacgactttgttactaacccccgacaa

SEQ ID NO: 35632 - DNA, 364 bp, Glycine max
  Clone ID: LIB3053-002-Q1-B1-B3
agcaactcattctgtttcttcagtttggtataactttagccgaggtcaggaggagcactagctaagttcacaatttcaaaatggctaggggactaaagaagcatttgaaaaggctcaatgctcctaagcattggatgcttgacaaactgggtggtgcatttgcgcctaaaccctcatctggaccacacaaatcgagggagtgcctccccctcattcttattctgcgaaaccggctgaagtatgcgctgacataccgtgaagtcattgctattctgatgcagcgccatgttcttgttgatggcaaagtcaggactgacaagacttaccctgctggtttcatggatgttgtttcaatcccaaaaac

SEQ ID NO: 35633 - DNA, 358 bp, Glycine max
  Clone ID: LIB3053-002-Q1-B1-B5
ggtagagaaggtgttgtgaaaggttaagatcgagaaattagggtgaagtgaaggagaagctcttgagaagatgggagaagcaacagaaagatatgcagttgtgacgggtgcaaataaaggaattggattagagatagttagacagttagcttcagctggaatcaaagtgttgctcacagcaggaaatgagaagaagggtctccaagcactgggaacactcaaagactcaggtcgatcggaccttgtactgtttcagcaggtggatgtggctgatgcaacaaatgtagcttctttggcagattttgtcaaatccaagtttgggaaacttgagattctgagtaacaatgcagggattggt

SEQ ID NO: 35634 - DNA, 295 bp, Glycine max
  Clone ID: LIB3053-002-Q1-B1-B6
tagacaataccctttgaattggctgtgctaaaaggaaactaggaagtgcggattaaaataagggtacatggaaatgtgggatctcttttggagcaatgtttctagagttgtgggaagtactagcctcaatgacggcatcaaatatacgttgagtgttggtttgcattggaggttggcagatgaaaagggggattaaccgcgaaggattttgaaccaattttctatagatgcatttgtgctctcacacataagacgagaaaaaggtaggatcgtcatacaaatccgtcgtcttggc

SEQ ID NO: 35635 - DNA, 362 bp, Glycine max
  Clone ID: LIB3053-002-Q1-B1-B7
aaaattttcacacctcattaagccctttagccaagagtccctagccaaaaaaattaacatggcatggtcaacttcctcctctagcacccctcatcaaaagcatgaagtgttcctcagcttcagaggtgaggacacacgcgacaccttcactgggcaccttcatgcctctttaacaagactccaagtcaacacatacattgactacaaccttcagagaggtgaagagatatcagcctcacttcttagggccattgaggaggcaaaactctcagtcgttgttttctccaaaaactatggaaattccaagtggtgtcttgatgagcttctgagaatacttgaatgtaagaatatgagggggcaga

SEQ ID NO: 35636 - DNA, 347 bp, Glycine max
  Clone ID: LIB3053-002-Q1-B1-B8
tgagatttgtgtgtgaagagaatagcgaatagcgaaggtggaaatgtcgaaaggcggttcgcttcaaaaggacgtgccatggagagcatcgtcttcttctgcgaagcccatccccaaaattcaccacagtccccttcttcgcgtatcccaaacacctgtttccgattacggtatctccgtcatgaggcatccggaccctataggtggtggattgggtcatgaggccatagtggaaccagctggccctgattgtctcgtacctggccagaaaatgcccatccaattacttggcctccaggtctggccaatccatgttgacctgaagtttttggaaccagttgggcgag

SEQ ID NO: 35637 - DNA, 365 bp, Glycine max
  Clone ID: LIB3053-002-Q1-B1-C10
gggaagaaaaacttagctactaaggaaggatcaaagagaatggctcaagcaatggcatcaatggctggcttgcgtggttcctctcaggctgtgttggaaggtagccttcaggtgagtggctccacacgcttgaatgtggggagtggaagcagggtggcctcagtcacacgtgcagggttcacagttagagcacaacaacaacaagtgagtggtgaggtacaaagcagccgtagggcagtgctttcacttgttgctgctggtttggccactggctcttttgttcaagctgtgcttgctgatgccaaatctatcaaagttggaccacctcccccaccttctggtggattgcctggaacgttgaactc

SEQ ID NO: 35638 - DNA, 158 bp, Glycine max
  Clone ID: LIB3053-002-Q1-B1-C11
gggaatactcacttagccactattgaaggatcaaagatcatggctcaagcaatggcaacaatcgctggcttgcatggttcccctcaggctgtgttgggacgtagccttcacgagagtggctccacactcgtgaccgtcacgagtggcatcatggtggt

SEQ ID NO: 35639 - DNA, 326 bp, Glycine max
  Clone ID: LIB3053-002-Q1-B1-C12
cccacacactcaaaccatcccttttattgaaatcctcaagcttcaatttgctttgtgctcactcatctatctattataaccaaacactcttcttcatattcttcttcttcttcttgttcttgttctatctgtgacgagcatcatggcctcgagagcagtgctattgttggctatgtgtgtgcttccggccatggttgtggccattcgcccagcaaagaaccctttttgcgtgaagggtcgcgtctactgtgacccttgccgtgctggttttgagacctcagcaaccacctacattgccggtgctgagattatgttgcaatgcaaga

SEQ ID NO: 35640 - DNA, 358 bp, Glycine max
  Clone ID: LIB3053-002-Q1-B1-C2
tgcatgactccaggtcgaccctaaaggatcccatcggggaattccaattccacattttcaagaaataaggaggcaaaaatgttcatatatgaattggaattatttgttttcttattaggcctatcctgaagccaaaggaaatgagatcggaattcctcggggaattccaattccacattttcaagaaataaggaggcaaaaatgttcatatatgaattggaattatttgttttcttagtaggcttatcctgaagccaaaggaaatgagatcggaattcctcggggaattccaattccacattttcaagaaataaggaggcaaaaatgttcatatatgaattgggattatttgttttct

SEQ ID NO: 35641 - DNA, 351 bp, Glycine max
  Clone ID: LIB3053-002-Q1-B1-C3
cagaatccttaacagaacaagttgcagggatggcctccactctctctatatcctcttcatccacccttgttgatgccaagcctccaactccaagacaatgcgtcacccttcccactcttccccctccaccttttcactctcagactcgtccttggaagaccactgctttctgtcgtaggcttgctcgcaattttatggcaatggccaccacaagagaggcagccgcagcagaagttgccgccacaactgacctctctattgccgagacgccagagattgtgaagactattcaagaagcttgggacaaagttgaagataaatatgcagtgagttcactggcaattgctggtg

SEQ ID NO: 35642 - DNA, 367 bp, Glycine max
  Clone ID: LIB3053-002-Q1-B1-C5
attgtactgctggatagcaagagtgagaataagacagtgccagtcattttggaaagataggtggctcaggttactgtagctttattgctacttctattttcttttatgctgtagcaattatggctggatcatacctgggaaaccatttgggcgagtttaaactgtacctgcttgtcatttggcacattttcatgtaagttgttaataatatctgtatactgttattagttttgaagcacaattcatgattatgcatgttatcagtgaatatgatgagggatgatgtccactggataacctaacttatttgtgattgagttattcagttggaataactttttagaagaacatgttattgttcaacagg

SEQ ID NO: 35643 - DNA, 356 bp, Glycine max
  Clone ID: LIB3053-002-Q1-B1-C6
ggcatctgtatcggtgctctgacagtgttggcagacttcatgggggccatcggttcaggaaccggaatattgcttgcagtaacaatcatctatcagtactttgagacatttgagaaggagagagctagtgagcttggcttcttcggtttctaagttctgccaagcaaataatgttggttggtgactccaacgagctctcccacaccccttgtttgagggatcgttagacgtgtaggtcgtttaacatcgtaagggaggacataactagtttgttgtcaggatttacttttcgttttttccctttcaactgaggaagtatcaagtagtacatcgttgttaacatttttgggtttcct

SEQ ID NO: 35644 - DNA, 355 bp, Glycine max
  Clone ID: LIB3053-002-Q1-B1-C7
accacatccatctttgccttctgcatgttggttctctgtaaacagatactgcagaagaagaataatattgaatatttggttgggttgaatccctgggttgaagcgttgcagacatcacggctattctaagagtgtctcgctctctcattcatgtcccaactgtacgacggaggacaggttgcgtaactgccaccaacccttcgccgcacggtgggcgtggtgctttgccttctgaaggtggtagcccttcagacttgctcttcttagctggtggtggttctgctgtcttctagcttcttcttaactcttttttctttttactacttttaagctaccttgttttcaaaataacaaa

SEQ ID NO: 35645 - DNA, 303 bp, Glycine max
  Clone ID: LIB3053-002-Q1-B1-C8
gagttccttcggggagaaagtgctgggatacagcaacaccgagcacaaaatcctcatctccaacatcactgcacgcgccctctcgcagcacgagtgtgcacacgtatcccctgcgcagcccctcatctcgctggatgacgccgagacgctcagtataaaggttgtgggttggagacttgtgaattacgaaggtggacttacaattcagtgcttgtggaagttaagagattttaaacgtcgggttgaactcactaacaggatctctaaggttgttgatgctttgggccatttcccagatatcga

SEQ ID NO: 35646 - DNA, 363 bp, Glycine max
  Clone ID: LIB3053-002-Q1-B1-C9
ctcgagccgcgagtcaaccgagtcaactcaccaccaccaatgcctccgtccaccaaaccgaaccttccttggaagcttcgcatattgacctctctcctcaacctcctcatcaacgcctctcgccgctccaatggcaccgtcaaccgccgtctcttcaacttcttcgaccgcaagctcccctctagccccaaccccgtcgacggtgtcaaaacctccgacgtcaccgtcgacgccacccgcaacctctggttccgcctcttcgccccttcctcctccgtcgccaccacccttcccgtcgtcatcttcttccacggcggcggcttcgcgttcctctccccggcttcagccgcatacgacgccgtt

SEQ ID NO: 35647 - DNA, 349 bp, Glycine max
  unsure (1)..(349): unsure at all n locations
  Clone ID: LIB3053-002-Q1-B1-D10
gcatgatgagactgtcacaaatgatgagattgcagctgatcttaaagaacacgtgattaagcctgtgattcctgagaagtaccttgatgagaagaccattttccatttgaacccttctggcaggtttgtcattggagggccgcatggcgatgctggtctcaccggccgcaagatcatcatcgacacctatggaggatggggtgcacatggtggtggtgccttctctgggaaggatcctaccaaggttgatangagtggtgcctacattgtgaggcaagctgcaaagagcattgttgcaaatggacttgctaggagggcaattgtgcaagtttcctatgccattggtgtg

SEQ ID NO: 35648 - DNA, 370 bp, Glycine max
  Clone ID: LIB3053-002-Q1-B1-D11
gcatgatgagactgtcacagatgatgagattgcagctgatcttaaagaacacgtgattaagcctgtgattcctgagaagtaccttgatgagaagaccattttccatttgaacccttctggcaggtttgtcattggagggccgcatggcgatgctggtctcaccggccgcaagatcatcatcgacacctatggaggatggggtgcacatggtggtggtgccttctctgggaaggatcctaccaaggttgataggagtggtgcctacattgtgaggcaagctgcaaagagcattgttgcaaatggacttgctaggagggcaattgtgcaagtttcctatgccattggtgtgcctgaacccttgtccgtgttt

SEQ ID NO: 35649 - DNA, 335 bp, Glycine max
  Clone ID: LIB3053-002-Q1-B1-D12
cacagagttagaggagaaatcatcatggcatcagcagcatctgggtttgtgttgtcacttaatgttgcagctgccaccacaaactcaagggtggtcatgttcaacacaaagaacaacgcttctaggcttgttgtaagggcttcagatgagcctgcagcggcggcacccgccaccgccacacccccagctgaagctgaagctaaaccaaagccaccacctattggccccaagagaggtgctaaggtgaagattcttaagaaggaatcttactggtacaaaggcactggttcagtggttgctgttgatcaggaccccaacactcgctaccctgttgt

SEQ ID NO: 35650 - DNA, 322 bp, Glycine max
  Clone ID: LIB3053-002-Q1-B1-D6
cttacaggagagattcacgtcggggtttcagccgtgacaatctgtgcaagaactgcaagagacctggtcattatgcaagagaatgccctaatgtcgcaatttgccacaactgtggcctccctgggcatattgcttctgaatgtacgacaaagtcactgtgctggaactgtaaagaacctggccacatgggcaggcagttgtccaaatgagggtatttgccacacctgtggtaaagctggacaccgtgctagggaatgctcagcccctccaatgcctccaggggacttaaggttgtggcaaaactgttataagcaggggcaca

SEQ ID NO: 35651 - DNA, 153 bp, Glycine max
  Clone ID: LIB3053-002-Q1-B1-D7
aggtgttactgtacttgcaggatttcgctggtgaatttgaaatcggagaattggtgaggtttggaacggaggttttgtgtgctggattggatgactgtgatgagtggaggcggagttcacgatgaccccatagtcatagtgtggatgagattt

SEQ ID NO: 35652 - DNA, 349 bp, Glycine max
  Clone ID: LIB3053-002-Q1-B1-D8
tactcaagcattttcttccaatcttgaacccaggtggatcttcaatctctctgacatacattgcttcagaaaggatcattcctggatatggtggtggtatgagttctgccaaagctgcactggagagtgatacacgagttcttgctttcgaagcaggaagaaagcgcaaaattagagtcaatactatatctgctggtccactgagaagtagggctgcaaaggctattggattcattgagatgatgatcgattactcatcagccaatgcacctctacagaaagaactatcagcagaggaagtgggcaacacagctgccttcttaacatcagctttggcatctgctatcac

SEQ ID NO: 35653 - DNA, 391 bp, Glycine max
  Clone ID: LIB3053-002-Q1-B1-D9
taagtatgtacatatcactgtacaatcccttctcgcacagattcggagacctgacaagtgcgtatagggacgcaggtcctcctctaaaagacgttaaagttacaaaacgttgcgctctcactggaaatgactaccagaacactccaggcggacgactcattgttaccgcggcgctcagagagtgaactcttgacagggatctgaatgcgtgacacatttccacatagcgcgtcctataaaagattgtcctcacagtcatatggtagattcactatatggacctgcaagaagatgagaaaacctgtagtatagtaggcagtcttagcatttcttaagcctttggtgccaaaatagtcatccatctcaaatgcactgcttggatttcacgggg

SEQ ID NO: 35654 - DNA, 346 bp, Glycine max
  unsure (1)..(346): unsure at all n locations
  Clone ID: LIB3053-002-Q1-B1-E10
cgggatgataagcagttctttcaagaccatcctggtgcagtgcctatcaccacagcacagggtgaggaactgagaaagcttatcggtgctccaatttacattgaatgtagttcaaaaacacaacagaatgtgaaggctgtttttgatgcagccatcaaggtagttctccagcccccaaagcagaagaaaaagaagagaaagggacaaaaggcctgttccattttgtgatcttcagttcttaatatagtagtttgtggaggatgacatgactgtagtcttcatcattctatatcttatactatttccaacctagatgaaggaatcatcatgtccaactgancgcatc

SEQ ID NO: 35655 - DNA, 367 bp, Glycine max
  Clone ID: LIB3053-002-Q1-B1-E12
ttgcaagcatcataacatctcgcaaaagtgcaagcaaatcagaagaagacatgctgcagtgcttcattgactcaaaatacaaagatggtcgctcaacaacagaagctgaagtgactgggcttctcattgctgcactttttgccggtcaacacacaagctcgattacctccacttggactggggcatatctgctgtctaacaaccagtacctttcagctgtgcaggaggagcagaagatgttgatagaaaagcatggggacagagttgatcatgatgttttggctgaaatggatgtgctgtataggtgcatcaaagaagctttgagactccatcctcctctaatcatgctgatgagaagctcacacac

SEQ ID NO: 35656 - DNA, 365 bp, Glycine max
  Clone ID: LIB3053-002-Q1-B1-E3
caaggaagatgtgctgccctttgatatagaagggacatggaaagctatggaagagtgttacaagttgggaatagcaaagtccattggcatatgcaattatggtatcaaaaaactcactaaactcttggaaatagccaccattcctcctgcagtcaatcaggtggaaatgaacccatcttggcagcaagggaaactcagggagttctgcaagcagaaaggaattcatgttagtgcttggtcagctcttggtgcttataagatattttggggctctggagctgtcatggagaatccaatcctccaagacatagcaaaggcaaaacggaagaccatagctcaggttgcacttagatgggtgtaccaac

SEQ ID NO: 35657 - DNA, 371 bp, Glycine max
  Clone ID: LIB3053-002-Q1-B1-E7
tgaatgcgcgcgcactcttcaaatctcaaccatgcttctgaagaaaggagtgaagagagggatgaccccctttgccattggaagccttatgtgcagggaatccttgaacaaggagtctgtgattgagggaattgtaaaggcagctctggattctgttcttccttgcacaagtgaagccacatttctggatactgtttccgaaatcatggacgagcaccttgatgagatcacgggttccatttcttaatttatgtcatagaagatggtatataaatgtctgtataatcgtgttcccagtacatatttatagctcaaatggttgtttttacattatttcacagtaatgacttcctaagtcctgaactcagtgt

SEQ ID NO: 35658 - DNA, 496 bp, Glycine max
  unsure (1)..(496): unsure at all n locations
  Clone ID: LIB3053-002-Q1-B1-E8
ggggggngtgggggggggtgggggggggggggggggggggggggggggagggggggttgggggctgggggcgagnggggtggcgggggacggggagnggggaggggggggggggggggggggggggggggggggggggggggggggggggggggggggggggggggggggggnnggggggggggggggggngggggggggggggggggggggggggggggggnggggngggggggggggggggggggggggggggggggggggggaggggggggggggggggnggngggggggaggggggcgagggggggggggggggggggggggggagggggggggggggggaggggcgcagggggggggggggggggggggggaggggggagggggggggcggggggggggggggggggggggggggaggggggggggggnggcggggggcgagggggggggggggggcnggggggggggggggggggggggggggagggggg

SEQ ID NO: 35659 - DNA, 370 bp, Glycine max
  unsure (1)..(370): unsure at all n locations
  Clone ID: LIB3053-002-Q1-B1-E9
tcattttcagctcccaacaacaatggcttcaatggcatcttcaagctccttctgcaacctcaagttcatcaccaaacccaacaatggtagaagaagctctcttccccgtattgtattctgtcagaagcaccacgatagcacacccaccgaccaaatcaaccgaagagaactcatattgagaagcagcgaaatagcgaccattggtgccatcttgaacttcggtgggaaaaaacctgattatcttggagtgcagaaaaacccaccagcattagctctgtgcccggcaacgaagaattgcgtgtcaacctctgagaatatcagtgatcgcacacattatgctcctccatggaactataatcctgaaggtang

SEQ ID NO: 35660 - DNA, 330 bp, Glycine max
  Clone ID: LIB3053-002-Q1-B1-F1
ggaagccctcagaacacctttgtcccagggctgattgatctggccatcaagaggaacagtttgattggaggagatgactttaagagtggtcagaccaaaatgaaatctgtgttggtggatttccttgtgggggccggcatcaagccaacatctatagtgagttacaaccatctgggcaacaatgatggcatgaatctctcagcccctcaaaccttccgctctaaggaaatctccaagagcaatgttgttgacgatatggtcaacagcaacgccatcctctatgagcccggtgaacatccagaccatgtggttgtcattaagtacgtgcct

SEQ ID NO: 35661 - DNA, 146 bp, Glycine max
  Clone ID: LIB3053-002-Q1-B1-F11
agacaactcaacattatcacgtgaactccttgatagtagacaaatatttagcttttttttttttttgtatttatatgttattattattcaaggcaacaaggaatggtacttttatatacaatagcattatggagttttgaatctat

SEQ ID NO: 35662 - DNA, 380 bp, Glycine max
  unsure (1)..(380): unsure at all n locations
  Clone ID: LIB3053-002-Q1-B1-F12
ctatttggtttgtagcgttgcgttgttcttgacattgaaggaactactactcccatatcatttgtttccgaggttctcttcccatatgcccgtgataatgttgggaggcatctatctctaacatatgatacccccgagaccaaagctgatatcaagttgcttcgttcccaagttcaaagtgaccttgaacaagggattgcangtgctgtgcctatccctccagatgatgctgggaaacaggaagtcattgctgcacttgttgccaatgtggatgctatgattaaagctgatagaaagatcactgccttaaaagagttgcagggtcatatatggaaaactggctatgagaataatgaattggagggaatagtttatgatga

SEQ ID NO: 35663 - DNA, 352 bp, Glycine max
  Clone ID: LIB3053-002-Q1-B1-F3
ctacccacttctcaaccaacaatggcaatggcaacccaagcctctctcttcaccccacccctctccggtctcaaacccagcgaccgagccaccgcgccatggaaacaatcctccaccctctccttctccacctcgaagcccctcaagttctcgcgaacaatcagagcagcagccaccgaccagaccacagaggcaccggttgggttcaccccaccggaactggacccaaacaccccttcgccgatcttcggaggcagcaccggcgggctcctgcgcaaagcccaagtggaggagttttatgtcatcacatgggactccccgaaagaacagatctttgaaatgcccactggcg

SEQ ID NO: 35664 - DNA, 394 bp, Glycine max
  Clone ID: LIB3053-002-Q1-B1-F5
gaaaacgcagttctcaccatttccctctcgattgtgagacttgttgttgttaactgaacttttctgagcaagaatgtctgggcgtggaaagggaggcaagggtttgggaaagggaggagcgaaacgacaccgtaaggtgctgcgcgataacattcagggaatcaccaagcccgcgattcggcgtttggctcgtaggggtggcgtgaagcgtatcagtggtctcatctacgaagagacacgtggcgtgctcaagatctttttggagaacgtgattcgtgacgccgttacctacactgagcatgctaggagaaagaccgttaccgcaatggacgtggtttatgctctcaagagacaaggaaagaacctctacggaatttggggctaaggtttttta

SEQ ID NO: 35665 - DNA, 352 bp, Glycine max
  Clone ID: LIB3053-002-Q1-B1-F6
gtccgtgacacacttatccacctactttcatttgagccactcttctcagtccaaaacagtttttcgttttctcatctgaaaaatgaggagcatctttgtccttctccttgttctgggtttgtttaagtatgcatttgctgaagaagggttttgctctgctccttcggaatcgaaatcaaagcctctttattggaaagtggataaccccactctctcacctatccaccttcaagatttgcctggattcacacgcagtgtttataagagtaatcatgctttggtatcaccagaaagtcatgtatatggcccattgcctgattggatcgacacgtcaggcgcatatttaatttca

SEQ ID NO: 35666 - DNA, 381 bp, Glycine max
  Clone ID: LIB3053-002-Q1-B1-F7
ggaggagtgacattgtggaagaaagactgaaggtgttcgcgatcggagactttgaaaccctcctttcacccattcatcccaagcattcaacaatgtctccgttatcgaagctctcgttgctgatactgatggtgttcatctcctccgcgatggcctcctccgacgagagagtgagcgaattgctctccctgcaatccagatccaaatcgggcgtaatccggctgaacgaccaatcccgcgcccgcttcctcacctccgtgaaaacccctcgcccttattccatcctccttttcgttgacgccgcacagctccacgacaagccggagctccgcctcacggagctccgcagggaattctccatcgtctcctcctccttcctcg

SEQ ID NO: 35667 - DNA, 363 bp, Glycine max
  Clone ID: LIB3053-002-Q1-B1-F8
cttaaaagagcctttgctttttctttaggcctttccgaattaagtacttgtttcattttctctcgaagcaagaaaaatgttcatcgagagtttcaaggttgagagtcctaacgtgaagtacacagagactgagattcagtccgtgtacaactatgaaaccactgaacttgttcacgagaacaagaatggcacttatcagtgggttgtcaagcccagaactgtcaaatatgaatttaaaaccaacacccatgtccctaaactaggggtaatgcttgtggggtggggtggaaacaatggctcaaccctcaccggtggtgtaattgctaagcgagagggtatttcatgggcaacaaaggacaagat

SEQ ID NO: 35668 - DNA, 346 bp, Glycine max
  Clone ID: LIB3053-002-Q1-B1-F9
ctcgagccgtgcgatttccctcaagaaatcttgcacatatgattgatacatgtgacggagagcaagtgggaattatttgaaaaataataataataataaaaatattgttttatgattaatgtgttcttttgatgtgaggaaagaaatggtacagccagagagcagtgtgccaaggacgcgtttttgggactgcttgggctgcccaaattgcctcaaattgcggtaagacaaagacatgcatgttgggttcggtagagaaatgtaatcttgtgattgatcatttcatgaagacatttttttgggttgattatttgtccgattttaatttattaattgttaaagtgac

SEQ ID NO: 35669 - DNA, 381 bp, Glycine max
  Clone ID: LIB3053-002-Q1-B1-G10
aggtcgaatctaaaggatcccctcggggaattccaattccacattttcaagaaataaggaggcaaaaatgttcatatatgaattggaattatttgttttcttattaggcctatcctgaagccaaaggaaatgagatcggaattcctcggggaattccaattccacattttcaagaaataaggaggcaaaaatgttcatatatgaattggaattatttgttttcttattaggcctatcctgaagccaaaggaaatgagatcggaattcctcggggaattccaattccacattttcaagaaataaggaggcaaaaatgttcatatatgaattggaattatttgttttcttattaggcctatcctgaagccaaaggaaatgaga

SEQ ID NO: 35670 - DNA, 362 bp, Glycine max
  Clone ID: LIB3053-002-Q1-B1-G11
gatccctcggggaattccaattccacattttcaagaaataaggaggcaaaaatgttcatatatgaattggaattatttgttttcttattaggcctatcctgaagccagaggaaatgagatcggaattcctcggggaattccaattccacattttcaagaaataaggaggcaaacatgttcatatatgaattggaattagttgttttcttattacgcctatcctgaagccaaaggaaatgacatcggaattcctcggggaattccagttctacattttcaagaaataacgaggcaaaaatgttcatatatgaattggaattatttgttatcttattaggcctatcctgaaaccaaaggaaatg

SEQ ID NO: 35671 - DNA, 134 bp, Glycine max
  Clone ID: LIB3053-002-Q1-B1-G12
cccttttgtttgtttagttagcatatgaaagaattcttaggctaaacctttgggagcggtagtaacaaggattagataccatgctatatgtacatatcacctttattagtaagcaattgtttgtttatatcttt

SEQ ID NO: 35672 - DNA, 364 bp, Glycine max
  Clone ID: LIB3053-002-Q1-B1-G2
caacctacatatcctgcatcttatggatatccaccttactataatgcagttcctccaccagctcccccttctgcccccatgcctgtctcaacttcagatcaatcccacaacattgcaaatgtgccttgggccagtaattctctcgtcgcagctcctgcttcatcagcagacaatcaatcccatagcattggaaatgtgcctagggccacaaatccatcagtgcctcctcctgcttcatcagctgattcagagtatgagaagttcatggcagagatgaaatgagtttgatcaattttggttcagtgttccaaaaggcctgatgtttcttggagctcttgtgaagctgatttcttaacctcttgcc

SEQ ID NO: 35673 - DNA, 341 bp, Glycine max
  Clone ID: LIB3053-002-Q1-B1-G3
ggaaagtgttgtttttctttttttcatttgcattgcaaagcaaaaaccttgcaaattgcaatggcttccaacaaggttattgccaccatcttggttctttctctccttgcctactcaacatcattcaccaatgcatgtggcacatgccacccaaaacctactccttctccccctcctccatcaaggaagtgccccaaggacacattgaagctaggggtgtgtgctgatgttctaggacttgttaatgttgttgttggttcccctgtctctagcaagtgttgtgcattgcttgaaggtttggctgattcggaagctgcactttgcctttgcactgctattaa

SEQ ID NO: 35674 - DNA, 359 bp, Glycine max
  Clone ID: LIB3053-002-Q1-B1-G5
cttctttgaacctcgcgcttcccagcgacagggtggtggtgccggaggagccagcaccccgacacgtgtcaggatgtggccacacgagggtcgccggaattctggcgttgccgggaacgagactcgccggagggaaatacgggccaatgatcctgaacatgcttccgaaggggccggttccaccatctggaccaagcagaggaaccaacaaccttaacaactagtttttgttgaatgtttctgtatcgggatcgaacccagtccgtgtgaccaaactataagacaattatcatcggatcctgatacaacctcaacagctagtcattcatgattaatcaaagatagtggatacatcacat

SEQ ID NO: 35675 - DNA, 361 bp, Glycine max
  Clone ID: LIB3053-002-Q1-B1-G6
ggccaccacagcagctctatccggaaccatggtgagcacctccttcatgaggaggcaacctatgaccaccacaagcctaaagacattccccaacgttggtgaagctctttttggtctgaaaagtggacgaggtggtcgtgtcacttgcatggcctcgtacaaggtgaagctcataaccccagaaggagaagtggagtttgaatgcccagatgatgttttcattgttgacaaggcagaggacgaaggcattgaacttccctactcgtgcagggccggttcttgcgtttcctgtgttggcaaaattgtggaaggtaacgtggaccagtcagatggtagcttccttgatgatgagcaaatagat

SEQ ID NO: 35676 - DNA, 329 bp, Glycine max
  Clone ID: LIB3053-002-Q1-B1-G7
aaagaaaaaaaaataaacagcaaataaaacagcttctttctccacaaacctagcgggtctctccacttatatatccaaaaaaaaaattcactatccatcatggacatgaagaaggttacctgtgccgttctcatcgccgccgcctccatgagtgcagcattggctgccacagaggtccctgcgcccgcccctggccctagcagcggtgcctcggccgcagccgctgtcggctccttggttggtgcctcagtcttgtccttctttgccttgttccactaaaatgtgacatggttagttaatggggaaagaatgttggaagaacaatgcag

SEQ ID NO: 35677 - DNA, 267 bp, Glycine max
  Clone ID: LIB3053-002-Q1-B1-G9
gggatatcgaagcgcaagcttcaccggtcgatcctcagacgcaccagctagagatttgtgactttgggagtgcagctctcgtggccggccgggaagcacgcatatcttacatctgctctaagtactatacagcacctgaacttacatctggtgcacctgattacaccagtgtcattgatatttggtcacctggttgtgtacatggtgcactaatgcgtggccaggctctattcccgggtgagattggagtacatcagcttgttgcaa

SEQ ID NO: 35678 - DNA, 320 bp, Glycine max
  Clone ID: LIB3053-002-Q1-B1-H1
gccactctaaagaaaatggcggtgcctctactctcgaagaagatcgtgaagaagagggtgaagaagttcaagaggcctcagagtgacaggaaaatttctgtcaagacaaactggcgcagaccaaagggtatcgattcccgtgttaggagaaagttcaagggatgcactttgatgccaaacattggttatgggtcagacaagaagacccgccactatctccctaatggttttaagaaatttgttgttcacaatgtgaaggacttggaactgctcatgatgcacaacacgacttactgtgctgagattgcccacaatatatc

SEQ ID NO: 35679 - DNA, 340 bp, Glycine max
  unsure (1)..(340): unsure at all n locations
  Clone ID: LIB3053-002-Q1-B1-H10
gtgacggcttgatcgattttgaagagttttgcttgttgacaagtgagtgtgtaggaggggatcatcatgagaaagagggtggtgttatgggaaatgaagacgttgatttgaacgaggcttttgatgtgtttgatanagacaatgatgggcttatttcggtggaggagttagctttggtgcttacttcgttggggttaagggaagggagaaagattgaagagtgcaaagagatgattaagaaggttgatatggatggagatggcatggtcaattttaacgagttcaagagaatgatgatgaatggaggaaagcttgccttcaacgcatagtgattcactac

SEQ ID NO: 35680 - DNA, 318 bp, Glycine max
  unsure (1)..(318): unsure at all n locations
  Clone ID: LIB3053-002-Q1-B1-H3
cgggaacgccgttgccgttaacgattcgtccaacgtgcttctcttcctcctcctcctcctgcgagatcgaaatcgaaaaccccaacacaccggcatcggaggaggaagaagggatattgaagaaattgaagagtaacgaggtgtttgagcaagaagaaggcgcaatcgcgctgaggaagatcacgaggtgcaaagaggaggctanggtttcgctctgcacgccgcgggtgctgttagcgcttcgtggtttactcgcttcccgatacggcgtcattcaggtcaacgcagtggcgtctttgggcaacctttctcttgaga

SEQ ID NO: 35681 - DNA, 340 bp, Glycine max
  Clone ID: LIB3053-002-Q1-B1-H5
aaaatgttgataaagacgaatgggaatcgctgaacagatgaaggaagtgtggtttgtggacactgacaagatttcagtattatatgcttttcgggaaattgaatgaaatggtaccttatattattacaacaagcgggtagggggcgcatatacgttgctgattgtcgctcaaccaccatgatcttcaaattatttgaagccacgaaagtcaatctacccaaacccaagcatgtttgtttattactattatttccggcagtattggttctgccaagtgactatcatggcactggctaaaacttgaaagaccacactttccatatggcaggctaacttgtta

SEQ ID NO: 35682 - DNA, 330 bp, Glycine max
  Clone ID: LIB3053-002-Q1-B1-H6
tgaatagtgatggcacttgccaaggagtgattgccttgaatatggaggatggaacactacatcgtttcaaagctgcttcaacaattttggccacagggggttatggtagagcatacttctctgcaacctcagcacatacttgcactggagatggcaatgccatggttgcacgtgctgggatccctcttgaggatttggagtttgtacaatttcacccaacaggtatatatggagcaggttgccgtatcacagaaggatctcgtggtgaaggtggaattcttaggaatagtgagggtgagcgatttatggaacgatatgcccctactgcaa

SEQ ID NO: 35683 - DNA, 332 bp, Glycine max
  Clone ID: LIB3053-002-Q1-B1-H8
cggaagttgatccatgtagccgaccccacctagtgggataaggcgttattgttgttgttgtatattgtcttatgtttctgttagaggtgatgactcttatgtttctgttagaggtgatgacgtgacggaataagatttttgttgttcttgtgtttgtgtcagtgattgtgtttacttttgcgagagatataattttttcctcgtgaagctgtattatggttttgaaaagttaaatgagaattggatgcgcatagtcagataatctttatgtatgtacttgggagtcatattttttctctgaacattatcaccataatgtgcagatattttga

SEQ ID NO: 35684 - DNA, 393 bp, Glycine max
  unsure (1)..(393): unsure at all n locations
  Clone ID: LIB3053-002-Q1-B1-H9
cccagtttacaagtacaagtctccaccaccaccatacaagtacccttcccctccaccaccacctaagaaaccatacaagtattcatctccacctcccccttaccactactaagtatagtgatttactatatatatatatcatcccatggatctgaagaatgtgtgcaaataaagaagattgatatggaaggaacaagcagtgaagcaccatacatatatatcagttaatttggcttgactttttttttctttttgtattttataaagttttaaggcactgttcagatctgattcatatgtactcgttgtcctgcatgtgttgtggtattgtaactgctgggcatgcatgcaggggtttgttatgccangttatattatatnataaataataaa

SEQ ID NO: 35685 - DNA, 300 bp, Glycine max
  Clone ID: LIB3053-003-Q1-N1-A11
gcatggaggcctcctacataagctaattcttctcctacagcttcttatactaaaccataccaaaattacttcatcaagtgcacagataacgacgggatcatgctctatatcaaaaccctttccctcgtagataaccaccctacctccttcacaaagagcgctaacatgaccaacctttctcagtacgagtctctaccaccgcacgatcccaactcaaggtatgcctcagactacgtcgttcacccctcccgtcacacccataaacgcaagctatgggttccgtggacagatgaagagcac

SEQ ID NO: 35686 - DNA, 413 bp, Glycine max
  unsure (1)..(413): unsure at all n locations
  Clone ID: LIB3053-003-Q1-N1-A12
gtaagcctctcctactatctttaaatccttttgtaccctcagcttccctaagcactagcaccacacaatggtcattgcagcaacccctcttctcttctttcttcttaatttatgcctaagaggcacttatgctgactatggaggtggatggcaaggtggtcatgctacattttatggtgggggtgatgcatctggcacaatgggaggggcttgtggttatggaaatttgtacagccaaggctatggaacccaccactgcagcactcagcactgctctattcaacaatggcatgagctgcgggtcttgctatgagatgaaatgtgacactgaccccanatggtgcctncccggtagcataatcgtcactgccacaaacttcttgcccccttactttgcattggctaataacaat

SEQ ID NO: 35687 - DNA, 201 bp, Glycine max
  unsure (1)..(201): unsure at all n locations
  Clone ID: LIB3053-003-Q1-N1-A2
tatctggggctatgcatatagcaatgaaatagaagtggtcgaatatgtagcaactatgttcccaattctggcagcatccaactttctggatggactccaatgtgttctttcaggtttttcttttcccccattacttttacttgtctgcacaggagctatgactcanaagcactggtataggctgagaggcatattggaact

SEQ ID NO: 35688 - DNA, 360 bp, Glycine max
  Clone ID: LIB3053-003-Q1-N1-A3
tctactttccccatttatctgtcaaacgcgcagcaacgagaatcaaaatgcaaggcgagctttaaaccatttcaagttttgatcggtctggtacgagttttcttatttctgatcatctggcttacatcatttaccaacaacaatgaccaccccttttcctagctcactgtcctgtgtaggcaacactggtctttaccgaaccaaatccgagcagttaactcattttggttccaacacagtgacacggttcctctgctcttcaactcagccacaacacgaaaaccctctcagggaacaagcacagacaccacctcaagaatctctccatgatgagaacaaacaaagccatgagcccgaaga

SEQ ID NO: 35689 - DNA, 287 bp, Glycine max
  Clone ID: LIB3053-001-Q1-B1-A1
aaattataacacataaattacatggcttgcttatgaattaaagcaattttgggatttccatataatttttctttctattttttgtccggatagtcttatttcaaaaatgagattgtgtaaagggtttaaactttgaatgttgttgcaacttgcaaaggttgtgtttagatctggtcaatgtaaaatttgttgaaactatatccatggatcattcttgatggacaatggcatcttgtgatgcatgtaacatgattccccccgatggatattggattgttgttatttaa

SEQ ID NO: 35690 - DNA, 354 bp, Glycine max
  unsure (1)..(354): unsure at all n locations
  Clone ID: LIB3053-001-Q1-B1-A10
gtacgtaaaactcaaattcngctcgagtgaaagctccgacaccatcgataacgtcaaggccaagatccaggacaaggagggtatccccccggaccagcaacgtctcatcttcgccggaaagcagctcgaggacggccgcaccctcgccgactacaacatccagaaggaatcaacccttcacctcgtcctccgtctccgtggtggcatgcagatcttcgttaagaccctcaccggcaagactattaccctagaagtcgaaagctccgacaccatcgacaacgtcaaggctaagattcaggacaaggagggaatccccccagaccagcagaggctgatcttcgccgggaagcagct

SEQ ID NO: 35691 - DNA, 291 bp, Glycine max
  Clone ID: LIB3053-001-Q1-B1-A3
caggcaataaggatgcccaaattgcaattggcacctttgatgtagaagagataaacagaagcagccataggtattatagatatgttggctctcttaccactccaccgtgcaaagagggtgtcacttggaacattctaggcaaggtaactaattactatatatgctctcctttggtgggaaagtatgaatacacacataaggagggttagaaatatactatgcacaattttttcttaacacattattaatcgtaatataaaatctgtccggccaccattctatacttttaaa

SEQ ID NO: 35692 - DNA, 118 bp, Glycine max
  Clone ID: LIB3053-001-Q1-B1-C11
tacgtaaactcgaaattcggttcaacccggaaccaacccttaatttcaataattaaaaaatttcaaaattaaaaattcaattaaaatacaacgttcaacgggctgctattcattgttt

SEQ ID NO: 35693 - DNA, 173 bp, Glycine max
  Clone ID: LIB3053-001-Q1-B1-C9
ccttgctggtttcatctatgagactttcttcattgaccgatctcatgttccacttcctcgtgatgaagaaagctaaacaatatgattggcaacttgcactttcttcattggccttgctgtattttcctacttaagttaataaaataacaatatttcttttgtgtgttgaaaaa

SEQ ID NO: 35694 - DNA, 248 bp, Glycine max
  Clone ID: LIB3053-001-Q1-B1-D5
tttagaaatatgtaaattatgcggctcggagtagttagtcaaaattatttatacacatggcagaatgagtgaaagatgttctcttgatgcaaaagttcagtttgcttcttcagtttctgtatttggaattttgaattctctaaactgcaggtacaatatttcactttggagaatcccgtttcttatgtagcctgttttctttggattattagtaatcattcatttggctggtaaacgccactgataaa

SEQ ID NO: 35695 - DNA, 216 bp, Glycine max
  Clone ID: LIB3053-001-Q1-B1-F4
attccttgacctacaggaatagtaactgttcccagttcaggggtgattcggacagagtttgacattacagataaaattattcgtcagtttattcaattatttattccccattttagcattgagatttgagtgtactgtaattactaagaatgttcaagatcactttgatgtaccatcacagcagactactataaattatgttttatttcccaaaaa

SEQ ID NO: 35696 - DNA, 416 bp, Glycine max
  Clone ID: LIB3053-001-Q1-B1-G2
cgtaagctcggaattcgggtcgagaatccctctctctctccgacgtacatttccatctttttacggtttcatttcagggactccgaatcctggatttccacgcgcctctcttcctcttcacgccgccaccattatcgatctgatctgtacgctgaggagagtgaacggaacgatgatttcagggcggagtttctatgcactttctgcgccgaggattacgacgtcgtttccctctgttgccacattgatgaccatcaccctatccatgccaaaaacggggtgtgtcccatttgtgggaacaaggtgagactggatctcgttggagattttactagacaacatgggaacttcttgacggtgcagcgcaaaaagacggtcacgaaaggacgctctgcatcaacaagttctatattgag

SEQ ID NO: 35697 - DNA, 406 bp, Glycine max
  Clone ID: LIB3053-001-Q1-B1-G3
tcggggaattccaattccacattttcaagaaataaggaggcaaaaatgttcatatatgaattggaattatttgttttcttattaggcctatcctgaagccaaaggaaatgagatcggaattcctcggggaattccaattccacattttcaagaaataaggaggcaaaaatgttcatatatgaattggaattatttgttttcttattaggcctatcctgaagccaaaggaaatgagatcggaattcctcggggaattccaattccacattttcaagaaataatgaggcaaaaatgttcatatatgaattgggattatttgttttcttagtaggcctatcctgaagccaaaggaaatgagatcggaattcctcgggggttacgagctcgatttccctatagtgagtcg

SEQ ID NO: 35698 - DNA, 357 bp, Glycine max
  unsure (1)..(357): unsure at all n locations
  Clone ID: LIB3053-001-Q1-B1-G9
acgcgtacgtaaactcggaattccgctccaagtttcaagggaaacaatagcactttccaaagctcaagttccagcaataacagaacccttgttccccgcaacaatcaaccagcgaaagtagtgttgtgagaaatgactttggtcgcgttctcgattcatacgaagaggcaagagtcgataacttttggacacagtcatatgtagctgacatgtcncacgttccaagcgaactatttgttccctccgtggcagaatctgaatattttactccattatatgatgatctgtggggtcaaactcatttgtaccatgagcatcattgcgtattctgatgaacacaattactcgatctctaga

SEQ ID NO: 35699 - DNA, 325 bp, Glycine max
  Clone ID: LIB3053-001-Q1-B1-H1
tgacaacgcatgcacgcctacgtaagctcggaaattggctccaggcaaaagaacaagtaatttgagaactaagaaaggagaaacaaatggcttccccaatgatctcttccccagctgttaccactgtcaaccgtgccggtgccggcatggttgctccattcactggcctcaagtccatggctggcttccccaccagaaagaccaacaatgacattacctccattgctagcaacggtggaagagtgcaatgcatgcaggtgtggccaccagttggcaagaagaagtttgagactctttcctacctgccagaccttgatgatgcaca

SEQ ID NO: 35700 - DNA, 386 bp, Glycine max
  Clone ID: LIB3053-001-Q1-B1-H3
cacgcctacgtaagctcggaaattcggtccaagctccctcctcaaaaaatttccgtgcgctccaacaaacattcccgttcacactttcagattgggtgaagaagggggccggtggccgaactgaagttcctcctgccaacaggaagtcagaagttgaccctttgaaaccggttccatttgaaaaacctccatttagtctcagccaaatcaagaaggtcattccacctcactgtttccagcgtttctgttttccgctcattctcctatgttgtttacgacctcaccatagccttctgcctctattatgttgccaccattacttcacctccttccagccctctctctttcttggcatggccaatctactgggctgtccaaagttgcat

SEQ ID NO: 35701 - DNA, 259 bp, Glycine max
  Clone ID: LIB3053-002-Q1-B1-A4
gggatgtcacgggtgtatctcgctatcaacttctcagaatgataaaggcgaccccttcttgattcttgatgccttaaacacatggattacaatttacgttttaatagagatgtgtttagtgtattgtgttggtgaacaatattgaattttttttttttttcatataccgggctatttaacccctagaatattgagagttgcaacagatttgagtgagtttcagattaatattaaaataaataatcgcagtatcaaaagg

SEQ ID NO: 35702 - DNA, 281 bp, Glycine max
  Clone ID: LIB3053-002-Q1-B1-B2
gacgtctagaccacgcggacgtaaactcggaatatggctcgagaaaaaaaagagaaaaaaaaaaagagagagaaaaaaaggaaagagaaagaaaagagaagaagaggaaaaaaaaggaaaaagaaaaggggggaataggaaagagggggggaaggaaggggggagggggagaaaggagagagtaagggaagggaaagagaaaaaaaaaaaaaaaaagggggggggggcgggggaggagagggaggggaggggggaattgctggggggggtggggggggggg

SEQ ID NO: 35703 - DNA, 360 bp, Glycine max
  Clone ID: LIB3053-002-Q1-B1-B4
gacgtctagaccacgcgtacgtaagctcggaatacggctcgagtagaatttgtgaaagaagctggacgtggaggcaaagggaatttgcccctgcaaggcactccaaccattgtaaagacagaaccatgggatggaaaagatggagaaataattgaggacgatgaattttctcttgaagaactaatgggggaagatgcttcaagcaaggatgagctatgatcaatttataaggaatttagagcagattaaggtttcaaccaccgatttttacgttacaggcaagttgttgctcatgattattgtgatcactattctgtttttccatgttccaagttaaaaaaccagtcgagtgatgagtga

SEQ ID NO: 35704 - DNA, 313 bp, Glycine max
  Clone ID: LIB3053-002-Q1-B1-C1
tcgggaatcggctcgagaacaagatttagaaacagagacatgttggtgaacgtgtacggtccaacctatggagcccccaagagggtgctggtgtgtctgattgagaacgaaattgagtttgagacagtagatagtgatcgcttcaagggagagaataaggaacctgagttcctaaagctgcagccatttgggtcacgtcctgttaggcaagagggtgattatgctctctatgcccgtattgatgtgggtagttgaacttcggactttggatcaagaatgttatttgagttgtggagaatctcgtgcaataatc

SEQ ID NO: 35705 - DNA, 407 bp, Glycine max
  Clone ID: LIB3053-002-Q1-B1-C4
gacgtctagaccacgcgtacgtaaactcggaatacggctcgagcaattttctcctccttttgtgcttccaactcttttctttgttatattattctctttcactttctcccaacccttggaatcgacatgactatcctcattgagcaatctgatcactttggggctgaagtagaggcaaagactgaaccaataaatgagagggaactggtgttggatggtggatttctgataccacagaccaactcatttgggcacatgtttagggcttataatgatgctggaagtgagaggcgtgaaggagtggagaacttctacagaaaaaatcacacttaccaatcagttgatttcgtgaagaaaatgagagacgagtatgcaaaattgaacagggtagagatgagcatatggga

SEQ ID NO: 35706 - DNA, 377 bp, Glycine max
  Clone ID: LIB3053-002-Q1-B1-D1
gacgtcagacgcacgcgtacgtaagctcggaatacggctcgaggttggcgtaggttgaagaagaagaagagagagagagagagagagagagagagagagagagagagagagagagagagagaagggtaaggtaaccctagagtggtgaatcgaattcgaaacgatggaaagtgtttctcgaagaagaggtggaggcattttcgaaagcctctacaaggtcgttatggcgtcgcaactctgtctatgttacgtttgtcatcgctggcgccttccttggagaacgggctgtggattagggagtccacaagctctgggaggcagataatgttgggaaacgatatgaagacattcctgtgctagggcaaggggcgtcagaa

SEQ ID NO: 35707 - DNA, 386 bp, Glycine max
  Clone ID: LIB3053-002-Q1-B1-D3
gacgtcagacgcacgcgtacgtaaactcggaatacggctcgagctaaatggttatacaaagggtgccagaaatgagatatttgctatgcaacctgcaccaattcaagtttcatatatgggattccctggaacaactggggctacttacatagactacttagtcactgatgagtttgtttcaccactacggtatgcaaatatatattcagagaagattgtacatctaccgcattgctactttgtaaatgattataaacagaaaaatcaggatgtgttagatccaaactgcccacacaaacgatcagattatggtctacctgaggataaatttatatttgcatgcttcaatcaactttacaagatggatcctgaaatatttaatacat

SEQ ID NO: 35708 - DNA, 396 bp, Glycine max
  Clone ID: LIB3053-002-Q1-B1-D4
gacgtctagaccacgcgtacgtaaactcggaaatcggctcgagctcgagccgaatcggctcgaggaactcaaagccacagctgctgagaaagtggagcagataacagcttctctgggaacatcatcatctgatggcatcccatcatcagaagcctcagacaggatcaaagctggtttcattcacttcaagaaggagaaatatgacaagaatccagctttgtatggtgaacttgccaaaggccagagccccaagtttatggtgtttgcttgctcagactcaagggtgtgcccatctcatgtgctagatttccaaccaggagaggcctttgtggtcagaaatgttgcgaacattgtcccaccatatgagcattcaaaatacgctgggactggggcagc

SEQ ID NO: 35709 - DNA, 376 bp, Glycine max
  Clone ID: LIB3053-002-Q1-B1-E1
gacgtcagacgcacgcgtacgtaaactcggaaatcggctcgaggaagattgagaaaggtaaaggtccttgttgttccggtgtgctgctagagaatctggtgaaggatgtcaattgttccaatcaaccaaggtcactcccaggactcttgggatcaattcatcgattttcctctccctccttccatctccagcttcttccccggcttcgaattcggattcggctcatcggtggttaacacacgtgtggactggagggagactcccagagcccacgtgtggaaggtcgtgcttcctggcttcacaaacgaggacgtgctggttgagctacaagaccagaaggtgctccaggtcagcgtggagagtggtaacttcctga

SEQ ID NO: 35710 - DNA, 372 bp, Glycine max
  Clone ID: LIB3053-002-Q1-B1-E4
gacgtcatgaccacgcgtacgtaaactcggaaatcggctcgagcttcaacaagttcgacaagaacggcgacggaaaaatctcggtaacggagctgaaggacatgctcgcggccctcggatccaaaacgacggacgaggagttgaaacgcatgatggaggagctcgaccagaacggcgacggtttcatcgacctcaaggagttcgcggattttcactgcaatggcggtgccggaaaggacgactcgaaggagctccgcgacgcgttcgatctctacgacgtcgacaagagaggcctcatctccgcgaaggagttgcacaacgtgctccggaatctaggcgagaagtgctccctcagcgattgccggagaatga

SEQ ID NO: 35711 - DNA, 95 bp, Glycine max
  Clone ID: LIB3053-002-Q1-B1-F10
gaagatgccaagtttgagatgattttactatatttttcatattggactgtcttcctctataattttgagttaaagtgtccacttaaattgaaaaa

SEQ ID NO: 35712 - DNA, 383 bp, Glycine max
  Clone ID: LIB3053-002-Q1-B1-F2
gacgtctagaccacgcggacgtaaactcggaatatcggctcgaggtggacactaaagagtttgaatccatgcaggccttatcaagcaagaaagacaatcatgacatattcattaaactgggatctgagaaagataagcgaaaagaggcttttgagaaggaagaaaaatccaagaagtctgtgagcatcaccgagtttctgaagcctgctgagggggaagcatactataacccaggacgtggtaggggccgtggccgtggttcacgaggcggaggcggttaccatggaagtggcaccaagaatgcacctgctccatccattgaagatgccgggcatttcccaaccttgaggtgccaagtgaagccttcccagaacgcttttgac

SEQ ID NO: 35713 - DNA, 104 bp, Glycine max
  Clone ID: LIB3053-002-Q1-B1-F4
atttcattaactttttaattcatctggatccatatttgttgcggttactatagaaaacatttaacacgtaactcttaatgaaaattttaaaatatattcattaa

SEQ ID NO: 35714 - DNA, 383 bp, Glycine max
  Clone ID: LIB3053-002-Q1-B1-G1
gacgtcagacgcacgcgtacgtaaactcggaatatcggctcgagtctctatttacacttctcttctgtgtttcttagaagaattaagatggctaccttgactgtacctccagttcctccttcccccagagatgatgccatgcagctttaccgtgcttttaagggatttgggtgtgatacaagtgctgttatcaatatacttgctcatcgagatgctacacagcgtgcctacatccagcaagaatacaaagcaatgtattctgaggaactttccaagcgcttagcttcggagcttagtggaaagttagagactgcagttctgctctggttgcatgaccctgcaggacgtgatgcaacaatcattaggaagtctctaacagcaga

SEQ ID NO: 35715 - DNA, 394 bp, Glycine max
  Clone ID: LIB3053-002-Q1-B1-G4
gacgtcagacgcacgcgtacgtaaactcggaatacggctcgagcaaattagttcattctctttgcgcagttccctacctctcctttcaagatgcagatcttcgtcaagaccctcaccggaaagaccatcacccttgaggtggaaagctctgacaccatcgacaacgtcaaggccaagatccaggacaaggaaggaattcccccggatcagcaacgtctcatcttcgccggaaagcagctcgaggacggccgtagcctcgccgactagaacatccagaaggagtcaacccttcagcttgtccttcgtctccgtggtggcatgcagatcttcgtcaagactctcactggcaaaaccataaccctagaggtcgaaagctctgacaccattgacaacg

SEQ ID NO: 35716 - DNA, 381 bp, Glycine max
  Clone ID: LIB3053-002-Q1-B1-H2
acgcgtacgtaaactcggaatacggctcgagaagtagttgagaactaagaaggagaagcaaatggcttcctcaatgatctcttccccagctgttaccactgtcaaccgtgccggtgccggcatggttgctccattcactggcctcaagtccatggctggcttccccaccagaaagaccaacaatgacattacctccattgctagcaacggtggaagagtgcaatgcatgcaggtgtggccacgagttggcaagaagaagtttgagactctttcctacctggcagaccttgatgatgcacaattggcaaaggaagtagaataccttcttaggaagggatggattccttgcttggaattcgagttggagcacggtttcgtgta

SEQ ID NO: 35717 - DNA, 335 bp, Glycine max
  Clone ID: LIB3053-002-Q1-B1-H7
tcggggaattccaattccacattttcaagaaataaggaggcaaaaatgttcatatatgaattggaattatttgttttcttattaggcctatcctgaagccaaaggaaatgagatcggaattcctcggggaattccaattccacattttcaagaaataaggaggcaaaaatgttcatatatgaattggaattatttgttttcttattacgcctatcctgaagccaaaggaaatgagatcggaattcctcggggaattccaattccacattttcaagaaataaggaggcagaaatgttcatatatgaattggaattatttgttttcttagtaggcct

SEQ ID NO: 35718 - DNA, 318 bp, Glycine max
  Clone ID: LIB3053-003-Q1-N1-A10
tagaagatctatcacctctcatgcacgcctacataatctcataattcgtctctagaataatcttacacataaacaaacacactaaacactcacagtgacaatttacactctcttaccctattttttatccttctctttttcttaaacacacaacccctcctattatcacaaccataactcatatttcatatacattttcaacactatttaacctacactacttacttcattcagtacacttatcactcatcaattatctctatacactaatctatacaacacacaatacatatacactttatgttattcataactctc

SEQ ID NO: 35719 - DNA, 393 bp, Glycine max
  Clone ID: LIB3053-003-Q1-N1-C2
ttggggaattccaattccacattttcaagaaataaagaggccaaaatgttcatatatgggattggaattatttggtttcttattaagcctatcctgaagccaaaagaaatgagatcggaattcctcggggaattccaattccacattttcaagaaataaagaggcaaaaatgttcatatatgaattggaattatttgttttcttattaggcctatcctgaagccaaaggaaatgagatcggaattcctcggggaattccaattccacattttcaagaaataaggaggcaaaaatgttcatatatgaattggaattatttgttttcttattaggcctatcctgaagccaaaagaaatgagatcggaattcctcgggggtaccgagctcgaattc

SEQ ID NO: 35720 - DNA, 324 bp, Glycine max
  Clone ID: LIB3053-003-Q1-N1-D3
atcacgtcgcatgcacgcctacctaagctcggaattcggcttgagcctcgaaccggtcttccttcttggccgaggaaaagaaacaagaagatcaagttcagctaagattcaacagaatgccagaatcttatgctgctcatatgaggcttagacttggaagcttcaaggctagaagcttttctcttgcagatctgcaagaacatgatgatgaggaagaaggtgatgatcattaaattaacatttaacatagggttttatttttgttttattcttttgttattgtggttgttactaaataaaattaaatagtattaagtaactgtt

SEQ ID NO: 35721 - DNA, 332 bp, Glycine max
  Clone ID: LIB3053-003-Q1-N1-E12
tcggggaattccaattccacattttcaagaaataaggaggcaaaaatgtggatatatgaattggaattatttgttttcttattaggcctatcctgaagccaaaggaaatgagatcggaattcctcggggaattccaattccacattttcaagaaataaggaggcaaaaatgttcatatatgaattggaattatttgttttcttattaggcctatcctgaagccaaaggaaatgagatcggaattcctcggggaattccaattccacattttcaagaaataaggaggcaaaaatgttcatatatgaattggaattatttgttttcttattaag

SEQ ID NO: 35722 - DNA, 257 bp, Glycine max
  Clone ID: LIB3053-003-Q1-N1-E2
gttttgtaagtcttggttataaattattgatcttttgcagtgattttgacttggattcttcttcctattagctttatgcttgtgggtccatgtttaatttattgggacttgggattcttttaatgcctataattgatgtagtaatcacaatttaatcatactcttgatacatgtaactttacctggcgactcctactttcatctttatatttgggtagtttgtagcctatcatgcaaggtcaagatgcatggaccca

SEQ ID NO: 35723 - DNA, 198 bp, Glycine max
  Clone ID: LIB3053-003-Q1-N1-E3
aagctcgcaatcttactctcagaattaattactcacctttatcaacaatcgatccatctggccctattttgagtcttatcatatcttcctattatcattatcctatctgctctcctctttaaactaattataacttcacaatctcacacaacctactatccatatacataatcacaatttaaccatactcctaataca

SEQ ID NO: 35724 - DNA, 268 bp, Glycine max
  Clone ID: LIB3053-003-Q1-N1-E4
gcacgcctacataagctgctaattcttctccattatttatttattctcatttataaataattctatcttatagaaatattttcggcttctattcatcttcctattaactatatactcttttttccatatttaatttattttcacttactattcttttaatacctataatttatttaataatcacaatttaatcatactcttaatacatctaactttaccttcctactcctactatcatctttatatttctacaatttctaccctatca

SEQ ID NO: 35725 - DNA, 273 bp, Glycine max
  Clone ID: LIB3053-003-Q1-N1-E6
tctatgacgtcacatgcacgcttacataagctcataattcggctctagcacatgcttcatcactacattcaacaggtctaccctggtcttatttcaccatatactcatccatataattccccacactcttttccatccaccaatactacctatcttccaatcatcacctccctcattcccccaaacagactagacttcaacatatcttcaatacaaaacacataccttactaacatattacatctaaaacccatcataactcaaattcaccac

SEQ ID NO: 35726 - DNA, 402 bp, Glycine max
  Clone ID: LIB3053-003-Q1-N1-F6
tcggggaattccaattccacattttcaagaaatagggaggcaaagaggttcatatatgaattggaattatttgctttcttattatgcctatccttaagccaaaggatatgagatcgcaatttctctgttatctccttctcctcatcttttttatccattatttctttttttttctttttatattttgtcttcttttttctcttattttttctatttcctttcttattttcatttttcttttctcttctttatctttctttttttttacttatgttgtttttttttctttctttctttatttttatatttatatttttttctttttttttttttctactatctcttatttttattattttatattttttttcttttttttctttttattttttcttatttttt

SEQ ID NO: 35727 - DNA, 383 bp, Glycine max
  Clone ID: LIB3053-003-Q1-N1-F9
ggtgaaaagaactgcaatggttccctcttgctatgctattggatacatcaactcatccgactgagatgcttataaatgatatgcttgcagaaactgctagaatcagaggaggatatgaggctgaaaagtctaaggcagaggagcttcagggaaaacctggtgaaaatgtggacctggtttctaacacaagtgacattaaagaaagatggaaattgcgtagagaaaatgcaaagcatagccatagaagactgctgaccaagtgatattcctatgtttgttttattttttcagcaatctatctagattgttacatgtagtccagtttaaaggattctaatgtatgcattacacaatgttaaagtcactaattccagctcaatgcc

SEQ ID NO: 35728 - DNA, 313 bp, Glycine max
  Clone ID: LIB3053-003-Q1-N1-G6
aagctcggaattcggctctagctcgctcgcactgtccagatcttaagcgagaagaatagcttttgtttttccaggcatgacgccgctgatcctgcatgctgggaaaaccaacaaaaattcttacaagacactcattgcaaccgagtattctggctttcaagttgattttgcccctaatttttagatgggtgtctccaataaaactcctgaatttctcaagatcaatccttattggcaaggttcctttgctggaaaccccctatggttcaatattccataaccatgccatttctcgctatgttaccccgcttaa

SEQ ID NO: 35729 - DNA, 324 bp, Glycine max
  Clone ID: LIB3053-003-Q1-N1-H12
tcggtgaattccaattccacattttcaagaaataaggaggcataaatgtgcatatatgaattggaattatttgctttcttattaggcctatcctgaagccaaaggaaatgagatcggaattcctcggggaattccaattccacattttcaagaaataaggaggcaaaaatgttcatatatgaattggaattatttgttttcttattaggcctatcctgaagccaaaggaaatgagatcggaattcctcggggaattccaattccacattttcaagaaatcaagaggccaaaatgttcatatctgaattggcattatcatgttct

SEQ ID NO: 35730 - DNA, 308 bp, Glycine max
  Clone ID: LIB3053-003-Q1-N1-H2
cggaaatccgctcgagaatccctgctctttacaaattttcctaaatatataccggaatccctcaggttcacactttcagattgagggaacattgttgcctgtagcccaactgatggttctcctgacaacacgaattcacatgctgccctttgaagcgggcaccatacgaaaaacctgagcttaggcttaggctaactaaaaaagccattaaacctcactgtttccagcgctctggtcttcgatcattctactatgctgcttatgacctcaccatacccttctacctctatcatgttgccacccattac

SEQ ID NO: 35731 - DNA, 173 bp, Glycine max
  Clone ID: LIB3053-004-Q1-N1-B1
catgcacgcgtacctaagctcggaattcgggttgagcttgaacccgttcaaagctggggattacatttctaaagggtgcttttggatggtcatatgaacacattggcagggattcatttcatgggattaaattaaccaaaacaagaatagctttgcttcctcttgtatgttca

SEQ ID NO: 35732 - DNA, 431 bp, Glycine max
  Clone ID: LIB3053-004-Q1-N1-B6
gagacctgctaccatgcatgcacgcgtactttagctgatcctctggctgaaggccaatttctcaagctcaggcgatagagttggattcatgatcatatatgaattggtagatatcagatgattattagagctattctgaagccaaccgaaatgagatcggaatccctcgaagaacaccgatctcacattggcaagagatactgacgccgaactgttcatatatgaggacatattatagggcggcttcttcagactatcctgattccaatggatctgacatcggaatagctacacgcactgcaattccacgattctaaagcttgactgatacgcacacgtagatatctgatcatgtacttaatggttaaattaccaagcctatcctggttccaaccgaagtgctatcgctatggatcacgcttaccgatctc

SEQ ID NO: 35733 - DNA, 286 bp, Glycine max
  Clone ID: LIB3053-004-Q1-N1-C6
tcacgctagaaatttagctgaaaggatacaaatcaacggttatcttatttatctacttgctaatcctgtattcagctttggaatagagttgcaaaaaaatgattttaataaaattaagagagaagctatgttaaaaaagcatacttttcatggataaaatatggaaattaattttgaaccgtagatctaattggccttaatataaaaaggataaatgacaccgaattgtatccgataaaaaaatgtacaatattgtcgtggttggagttgctctggttctattgaa

SEQ ID NO: 35734 - DNA, 410 bp, Glycine max
  Clone ID: LIB3053-004-Q1-N1-D1
tcggggaattccaattccacattttcaagaaataaggaggcaaaaatggtcatatatgaattggaattatttgttttcttattaggcctatcctgaagccaaaggaaatgagatcggaattcctcggggaattccaattccacattttcaagaaataaggaggcaaaaatgttcatatatgaattggaattatttgttttcttattaggcctatcctgaagccaaaggaaatgagatcggaattcctcggggaattccaattccacattttcaagaaataaggaggcaaaaatgttcatatatgaattggaattatttgttttcttattaggcctatcctgaagccaaaggaaatgagatcggaattcctcgggggtaccgaactcgaattccctataatgagtcgtatt

SEQ ID NO: 35735 - DNA, 130 bp, Glycine max
  Clone ID: LIB3053-004-Q1-N1-D10
gtttcatatgatgctttcctttgaaaaaattagctattcggtaaatgatttttcatcaatttgcattctgctgggatttcaatttttgctgccttcttttgttaacataattaaagtgcttattagcagg

SEQ ID NO: 35736 - DNA, 199 bp, Glycine max
  Clone ID: LIB3053-004-Q1-N1-D8
tctatcacttcacatgcacgcgtacataatctcaaaattcctctcgagcaacaactttacaactctcacctctaccctcttcttaggctccttcccctccttgaccccctcccacatcctcacccttattcttacataacacccatactacaccaccttcaaccatcttcttttctctacataactctcttaacacatc

SEQ ID NO: 35737 - DNA, 293 bp, Glycine max
  Clone ID: LIB3053-004-Q1-N1-E8
cagcttccaagccttgatatgagcacgatatgcatgcaacttggtatatacattattgttatgactgttagcatttcaaataagaggttcatcaatatggccttgctcaagccttctcgatcaccaagtttaattattactttatggtttaattttagttgtattccttagattattaattgggtggattcaatttgcgagatccttgttgatcccgtgatgtttctctcccctgttaaatgttcacaatgttcggtgtatgaatgaaaaaaaaaatgtgcttgtttctttaa

SEQ ID NO: 35738 - DNA, 139 bp, Glycine max
  Clone ID: LIB3053-004-Q1-N1-F4
gaagagctatgacatcgcatgcacacgcacacaaaatctgggaattcatctcgaggaagcatgcatcatcccggtctgtgatttttaagaacgaaatccaacattgctttaattctcaattatgtattgatgtattagc

SEQ ID NO: 35739 - DNA, 339 bp, Glycine max
  Clone ID: LIB3053-004-Q1-N1-F9
tcggggaattccaattccacattttcaagaaataaggaggcaaaaatgttgatatatgaattggaattatttgttttcttattaggcctatcctgaagccaaaggaaatgagatcggaattcctcggggaattccaattccacattttcaagaaataaggaggcaaaaatgttcatatatgaattggaattatttgttttcttattaagcctatcctgaagccaaaggaaatgagatcggaattcctcggggaatccaattccacattttcaaagaattaaggaagcaaaaatgttcatatatgaattggaattaattggtttcttaataagcctattc

SEQ ID NO: 35740 - DNA, 397 bp, Glycine max
  Clone ID: LIB3053-004-Q1-N1-H2
tcggggaattccaattccacattttcaagaaataaggaggcaaaaatggtcatatatgaattggaattatttgttttcttattaggcctatcctgaagccaaaggaaatgagatcggaattcctcggggaattccaattccacattttcaagaaataaggaggcaaaaatgttcatatatgaattggaattatttgttttcttattaggcctatcctgaagccaaaggaaatgagatcggaattcctcggggaattccaattccacattttcaagaaataaggaggcaaaaatgttcatatatgaattggaattatttgttttcttattaggcctatcctgaagccaaaggaaatgagatcggaattcctcgggggtaccgagctcgaattccctat

SEQ ID NO: 35741 - DNA, 104 bp, Glycine max
  Clone ID: LIB3053-005-Q1-N1-B2
gctgtggttgcttctattatgtaatgcgtggcaggtgcgtcattgtgtagtacctaattgtcatgtgtattttcgaatgaaaaagcaacgtgaattcattgaaa

SEQ ID NO: 35742 - DNA, 234 bp, Glycine max
  unsure (1)..(234): unsure at all n locations
  Clone ID: LIB3053-005-Q1-N1-B4
ctatgacttctcatgcacgccctgacagtaagctgcngaattctgctcgagccttacttttctcattttatgtaacactcttcagaatgaacattgtaacttaccgaattagcacacctaacacacactctaaaaccaacgataatccatttaaaaataatacacaactatatcttccattcattaccacactcaataacctcataacaaattccattcctattccttaaatct

SEQ ID NO: 35743 - DNA, 413 bp, Glycine max
  unsure (1)..(413): unsure at all n locations
  Clone ID: LIB3053-005-Q1-N1-C7
tatgacttcgcatgcacgcgtgcggaagctcggaattgggctcgagtttctctattcgtgaaacggctggtgtacacaaatgaggatngagaaattgtcaagggtgtctgctcaaatttcttgtgtgacctgaagccaggagctgaagtaacaataactggacctgttgggaaagaaatgcttatgccaaaagatccaaatgccaccatcatcatgttgggaactggaaccgggattgccccatttcgctcatttttatggaaaatgttctttgagaagcacgaagattacaagttcaatggtttggcatggctcttcttgggtgtccctacaagcagctcattgctttacaaggaggagtttgagaagatgcaagagaaaaagtctgaaaactttaagcttgacttcgctgt

SEQ ID NO: 35744 - DNA, 435 bp, Glycine max
  Clone ID: LIB3053-005-Q1-N1-E2
ctcatgcacgcgtgcgtgaagctcggaattcggcttcgagggcatagttcaccgttcatggtctaatagcagtagctaagtgcaattgaggatgacttaaggacttggtgaagatattggcatgaaaaggagacagtcaacgatatttgggagtgcacaattatggcacccaatgcaatgagagcttattcatgacagcagctaatatcactacatgtatgatgcatctaagtgaggacattgcacgtgtgttccatgcacatccaacaatgagcgatgctgtgaaagaagccgcaatggccacttatgacaagcccattcacatttaaaaggagccgtgtgctactttattgtttcattattgtccaagaattttacaatgacttgtacatgatacatcctgtggtaaatttataatcatgtttttaaatgcaa

SEQ ID NO: 35745 - DNA, 396 bp, Glycine max
  Clone ID: LIB3053-005-Q1-N1-E3
tcggggaattccaattccacattttcaagaaataaggaggcaaaagtgttcatgtatgaattggaattatttgttttcttattaggcctatcctgaagccaaaggaaatgagatcggaattcctcggggaattccaattccacattttcaagaaataaggaggcaaaaatgttcatatatgaattggaattatttgttttcttattaggcctatcctgaagccaaaggaaatgagatcggaattcctcggggaattccaattccacattttcaagaaataaggaggcaaaaatgttcatatatgaattggaattatttgttttcttattaggcctatcctgaagccaaaggaaatgagatcggaattcctcgggggtaccgagctcgaattcccta

SEQ ID NO: 35746 - DNA, 347 bp, Glycine max
  Clone ID: LIB3053-005-Q1-N1-F6
ctatgacgtctcatgcaggcgtacataatctcggaattcgtctcgataaaatattaaaaaggtagtccaaaaaagaggtatatgtctgctttaagagttcgaactaatgacatctaatccaaagaacaaaaatgaactgaacaacaacactttcaacaacaccacaccactgtttccactccaacaccccaaccagtttcctcaacaccgtttcctcaatccaattcctctctttccgcaatcacactcacaatctcatagtcctctgtttctcttcgaatccttcacatccatctcctattatattgttgggctccgtcaacgcctacatctacttttatatctac

SEQ ID NO: 35747 - DNA, 276 bp, Glycine max
  Clone ID: LIB3053-005-Q1-N1-F7
tctacacgtcacatgcacgcgtacataatctcttaattcggctcgatataatagttaaaaggtagtccaaaaaatatgtatatcgcaactttaagagttcgaacgaattacatctaatccaaataacaaaaatgaactgaacaacaacactttcaacaacaccacaccactgtttccactccaacaccccaaccagtttcctcaacaccttttccccaatccaattcctctctttccgcaatcacactcacaatctcatattcctcattttctctt

SEQ ID NO: 35748 - DNA, 396 bp, Glycine max
  Clone ID: LIB3053-005-Q1-N1-H11
tcggggaattccaattccacattttcaagaaataaggaggcaaaaatgggcatatatgaattggaattatttgttttcttattaggcctatcctgaagccaaaggaaatgagatcggaattcctcggggaattccaattccacattttcaagaaataaggaggcaaaaatgttcatatatgaattggaattatttggtttcttattaagcctatcctgaaaccaaaggaaatgagatcggaatttctcggggaattccaatttcacattttcaagagatatagaggcgcaaatgttcatatatgaattggaattatttgtgttcttattaagcctatcctgaagcccaaggaaatgagatcggaattcctcgggggtacccagctcgaattcccta

SEQ ID NO: 35749 - DNA, 227 bp, Glycine max
  Clone ID: LIB3053-006-Q1-N1-B4
cacatgcactcgtacataaactcggaattcaactctagcaatcaactattttcacatccaatcataccaatctcaagctagtttacatttttactacttttttcaatcttctccatacacttcacacaatcctcatacttcactctacacctttactccttatttctccctcacaataaccccatactacaatccatataccatttcaaactcactacaatctacta

SEQ ID NO: 35750 - DNA, 189 bp, Glycine max
  Clone ID: LIB3053-006-Q1-N1-C12
aatctcggaattctgctctagcttattcaattttaaaatctatttttcaaaaacattccatagaaattttaaaaacttcaatctaatcctctccttattaactcaatctacacaccaaactcataacacaattacaaatctttaacacaaatcttctaatacaactttctaacaccaaaacattccttc

SEQ ID NO: 35751 - DNA, 193 bp, Glycine max
  Clone ID: LIB3053-006-Q1-N1-D11
aataaagccatttatggcctatggggcgtgtaaataataccgtatgaagtttgtgattatagttcatggatatttctttgcaattcttaacattgtgtttggtcagaagtgtaaacaaaaaatttgaaaaaaaaatagaaaataaagttattttattaaaataaaaatgaatgaaaaaatatttaaattgaaa

SEQ ID NO: 35752 - DNA, 404 bp, Glycine max
  Clone ID: LIB3053-006-Q1-N1-E3
tcggggaattccaattccacattttcaagaaataaggaggcaaaaatgttcgtatatgaattggaattatttgttttcttattaggcctatcctgaagccaaaggaaatgagatcggaattcctcggggaattccaattccacattttcaagaaataaggaggcaaaaatgttcatatatgaattggaattatttgttttcttattaggcctatcctgaagccaaaggaaatgagatcggaattcctcggggaattccaattccacattttcaagaaataaggaggcaaaaatgttcatatatgaattggaattatttgttttcttattaggcctatcctgaatccaaaggaaatgagatccgaattccttgggggtaccgagctcgaatttcctatattgagt

SEQ ID NO: 35753 - DNA, 278 bp, Glycine max
  Clone ID: LIB3053-006-Q1-N1-F5
gtagatcctgactaccagcataaccgagggaaggaagtgtataataatcatagatcatgtcaataaatgaagactgtgaaacttctctctcgtgctagttaagagagttttcatttacctaggctgaaatgtgaaaataatttgtaggttgtagcttaatttagtctcttgtggtttctcacttcagttgtagtattgtcatttgtcgtgcttcaaacagaacaacaaattgtgaaataaatgaattttgtctaaaaaaaaaaaaaaaaaaaagaaaa

SEQ ID NO: 35754 - DNA, 451 bp, Glycine max
  Clone ID: LIB3053-006-Q1-N1-G10
ctatgacgtctggtggactacttaatctcggaattcagctcgagcaagctccaataagagcacctctagttttatattcacacaggaaaccactaagaaaagagaggataaaccaatggctacttcactttcagcaactgggtgtgttggaacttccttctatggaagttggggcacttcaattgttggggaggattacaccatgctggccaagtcagtgccatcacaagttcgtatggggaggggaaagccagtgagattgcagcctatgatgaagaatgtcaatgaagggaaaggtatctttgcacctcttgtggtgatcactcgcaacatcgttggcaagaagcgtttcaaccagcttagaggcaaagcaattgctttacactcccaggtgatcacggagttctgcaaatcaataggagcagatggaaaacagagacaagggctgatc

SEQ ID NO: 35755 - DNA, 93 bp, Glycine max
  Clone ID: LIB3053-006-Q1-N1-G2
tgtgaaactatgcaccttgatgtattgtgtgcttgcatttgaagggaccattttcattaaatgtcattcagaacagtagattatatattaaaa

SEQ ID NO: 35756 - DNA, 308 bp, Glycine max
  Clone ID: LIB3053-006-Q1-N1-H12
atcgtctcgggctttcaactcctcattccaatgacgtgagttcttgaaatgggcatatccgaatggggactacacgtactctgactcagatgccactttttgcagcttggacagatgcatagttcatagctcaattccaatttcacattttcgttctctcaagtgaaatttcaatcctttttattgtcttttttttgcatgcatgaacaacacaagaggaaggggttgtagctagtcaaatggagggtctaaatattatatcatcaaaaaaatcaagaaataagggcggacgactgctaatgaactaa

SEQ ID NO: 35757 - DNA, 340 bp, Glycine max
  Clone ID: LIB3053-006-Q1-N1-H4
tatgacggcgcatgcacgcatacgtaagctcggattaatgggtcggccggctcttagaattacccaacgctcataacccgctgggggtggcttgctcttcatcggcttttccatatcttcatacttctatccgcctctatgataattacaagtgcagagtaatctgattcgaaatggcttgtggcctctctgtcctgtttttttccccccctacataattgtctttattgtagatttgtgttgtacttgttccctaggaaagctcgatactaactggaacatgagattttgaatcccattctttttttgtaaaatatgttaagtcttcgtctcctcaaaa

SEQ ID NO: 35758 - DNA, 201 bp, Glycine max
  Clone ID: LIB3053-006-Q1-N1-H7
caactgctcagtgagtttttggaataaattatttgtcggaatgaactctagaagccataaataagcgcgattgagaatttgagattggtacggttaatatattttaataggaattgcattgtttttatcttttatcagtcgggtgaagacaatgtgtgacaattgccaatacttcaaaatgggtcaattggctttttgaaa

SEQ ID NO: 35759 - DNA, 325 bp, Glycine max
  Clone ID: LIB3053-007-Q1-N1-A7
gcatctgcaatccaatcattgccaagatgtaccaaggtggtgctggtccagacgtgggtggtgctggtgcagcagaggatgagtatgctgctcctccttctggtggaagtggtgctggccccaagattgaggaagtggactaaatgtagttgctttccttcagatacctgttttaaaaacttattttactttatgcttttttaattggattttaatcgcatgatttttgttggatgggattcaaactatttttcccttctgatatgaacgttgctttaagcattatgttatttgcgttattttcattattagatggtatactcaa

SEQ ID NO: 35760 - DNA, 271 bp, Glycine max
  Clone ID: LIB3053-007-Q1-N1-D6
tcggggaattccaattccacattttcaagaaataaggaggcaagggtgttggtatatgaattggaattattcgtattcttattaggcctatcctgaagccaaaggaaatgagatcggaattcctcggggaattccaattccacattttcaagaaatacggaggcagaaatgttcatatatgaattggaatgatttgttttcttattaagcctatcctcaaaccaaaggaaatcggatcggaattcctaggggaatttcaattccacatttt

SEQ ID NO: 35761 - DNA, 305 bp, Glycine max
  Clone ID: LIB3053-007-Q1-N1-E11
tatgacatctcatgcacgcgtacatacgctcggaatccggctcgagacatcatgaaacctcgtctcggcttcgcaatcgcgtaccggctcctagtacatacctctcttgcttccgacatacacataaaccaaagcaattttcgatttgaaggatacaatcgtcaagggatatgcgataacggcggacgatgatgttaatagtacggtgaacgatccgagagacgctgatgtaaggcaataatcggaggaagcaattcaacatccaaatcggtcacagggtcatccaatcgaggcttttcgaaaat

SEQ ID NO: 35762 - DNA, 253 bp, Glycine max
  Clone ID: LIB3053-007-Q1-N1-F2
gcatgcacgcctgcgtaagctcggaattctgctcgaggatcatgcctgcttcattgtcctggtcttatgccaattacgataaggggatacagctactcttgatcggtcacagctatgttgtatatagctgcctcctaatgcgcttctacaatgggactattaccactagtatcattacacctataggcatcgaacccttatattgaaccatagagctttatggcaaacggatcatgctgtacatctgggaaac

SEQ ID NO: 35763 - DNA, 345 bp, Glycine max
  Clone ID: LIB3053-007-Q1-N1-F3
atgaaacttaaagcaaaagccctatggatatgctgaattcgtctgccttatgtggctcgaccttagttgaagaactaattatcgttgtctcgttgctatctaaaatcccttgctagcacacccatttaaagtacaggttcataatgaaatgcaactgattcttttgaagggagtgcaaattgtaaaatagtctacagatctggtttaagaattaatatatgaattgtagatttagattaactttgtcttgatggggggtaataatttcctgtcacctgtattaatgaatactgttgtacacacggtacatttgtgagtcttaaaattttactcttatttttgttg

SEQ ID NO: 35764 - DNA, 340 bp, Glycine max
  Clone ID: LIB3053-007-Q1-N1-H6
gggtttttgtgtttttcattagttgtaagttgtaaaattctatggtcttgctatgtttgtcaatcattgatttttgttgatagaaatactgcagcattcctttgccacaaagcaacagaaggaaagtaggaaacttttctgttttacctctaggtcttgtgtgtaaagaacattaactatattgaaggagattgtaatttaccataccagagtttggggcaagagaaggatgataaccgatacgctatatacacttgttaatcaatcccccacccccttgggttacgtaacccattttgaacccttccatttatccctggcaatggatttattttggact

SEQ ID NO: 35765 - DNA, 312 bp, Glycine max
  Clone ID: LIB3053-008-Q1-N1-A10
gagactaagctggcacgcctgcatgagctcggaatacggctcgaggtgataatggagtttcaagggttaccggaaggctgcattgcgagtatactctatcgcactacgccggcggacgtgtgtaggttttccgtcgtatcaaagattttccgttcggccgctgaattggacgctgcgtggaaacgttctctcccttacgattaccattccatcatttcccagtctccttcgactctcaactatccttccaagaaggagctctatctcgctctctcggatcgccctatcatcatcgatcagggtaaaaagagc

SEQ ID NO: 35766 - DNA, 274 bp, Glycine max
  Clone ID: LIB3053-008-Q1-N1-A6
ctcgagccgttctcttaaaaaacttctgatatatgtccaatgtgttgaccatcatacattctaacccttacgcatgacttagaataataacgtgaaatcaacaaatggaaaacataatcttcatgcattgttaagaaaatgaagcaaatgtgtgtatccaagaagccaaaactatagttagtttaatcttctccccattagcactaaaacaaggggaacaaggttaactattaacatattttgaaaaaaaaaaaaaaaaaaaaaaaaaagaaag

SEQ ID NO: 35767 - DNA, 289 bp, Glycine max
  Clone ID: LIB3053-008-Q1-N1-B10
tatccctcaattctatatccttataattataatatacacattctgggcatttgcaattttatctcttcatagaaattttaccaacttacaacgatcattagcataaaatcatcaagcttctctacaccttccctgaacaatctattgatttctttgtttctctcatgtctattatctatgtcaatcataataacctattaattatatgtatattattaatactcaatttatgattaaacttttgaactccatgtaataaccttcattctactaccatactaatataact

SEQ ID NO: 35768 - DNA, 315 bp, Glycine max
  Clone ID: LIB3053-008-Q1-N1-B5
tcggggaattccaattccacattttcaagaaataaggaggcgaaaatggggatatatgaattggaattatttgttttcttattaggcctatcctgaagccaaaggaaatgagatcggaattcctcggggaattccaattccacattttcaagaaataaggaggcaaaaatgttcatatatgaattggaattatttggtttcttattaagcctatcctgaagccaaaggaaatgagatcggaattcttaggggaattccaattccacattttcaagatataaggaagcaaaaatgttcatatatgaattggaatta

SEQ ID NO: 35769 - DNA, 397 bp, Glycine max
  Clone ID: LIB3053-008-Q1-N1-C4
tcggggaattccaattccacattttcaagaaataaggaggcaaaaatgtgcatatatgaattggaattatttgttttcttattaggcctatcctgaagccaaaggaaatgagatcggaattcctcggggaattccaattccacattttcaagaaataaggaggcaaaaatgttcatatatgaattggaattatttgttttcttattaggcctatcctgaagccaaaggaaatgagatcggaattcctcggggaattccaattccacattttcaagaaataaggaggcaaaaatgttcatatatgaattggaattatttgttttcttattaggcctatcctgaagccaaaggaaatgagatcggaattcctcgggggtaccgagctcgaattccctat

SEQ ID NO: 35770 - DNA, 407 bp, Glycine max
  Clone ID: LIB3053-008-Q1-N1-C5
tcggggaattccaattccacattttcaagaaataaggaggcggaaatggtgatatatgaattggaattatttgttttcttattaggcctatcctgaagccaaaggaaatgagatcggaattcctcggggaattccaattccacattttcaagaaataaggaggcaaaaatgttcatatatgaattggaattatttgttttcttattaggcctatcctgaagccaaaggaaatgagatcggaattcctcggggaattccaattccacattttcaagaaataatgaggcaaaaatgttcatatatgaattggaattatttggattcttattaagcctatcctgaagcccaaggaaatgagatcggaattcctcgaggggaccgaactcgaaatccctatagtgagtcgt

SEQ ID NO: 35771 - DNA, 282 bp, Glycine max
  Clone ID: LIB3053-008-Q1-N1-D10
atgcacgcatgcacgcgttcgtaatcctgctttagcacacactctttatgtgtttctctctctcacatacaagtgcgtaaaaatgtctagttttgtttcaatggcatcatcaacaccccttttgaaagatatagttcttcatctttatccccactatcattaatctgtattacttggagatagtgtaggccattctttgagccttaccatctcatatttgtgcaagatggtgacccttcaaagaccatcaatgtcccttattgctttgactatgagctctac

SEQ ID NO: 35772 - DNA, 245 bp, Glycine max
  Clone ID: LIB3053-008-Q1-N1-F2
gcagagaccgtggttactctcgtggtggtgatggtggtgatggaggctggagaaactaaggcttgatgtcgtcaattagggtttatgattatgccccgtatttttagttgttgtggtttgagttcgagtttctttatggtttcgtgttaccgtggttcttgtttttgaccaatatatctggttgtttatagttgatttagtgaaatgataatcagtaattggagtaaaaaaaaaaaaaataattt

SEQ ID NO: 35773 - DNA, 78 bp, Glycine max
  Clone ID: LIB3053-008-Q1-N1-F8
ctcactcactggaagccttgccgctacctacgggcatacgggctgtccctatctcgagctgcaatacagtttggcctt

SEQ ID NO: 35774 - DNA, 312 bp, Glycine max
  unsure (1)..(312): unsure at all n locations
  Clone ID: LIB3053-008-Q1-N1-G4
taataagttaactaaattaatagggggttcgagaatgtcacatgcgtgttatagttctaactggcgttacacgattataatattttataataataataataattataataaatggtatcctttgtttgatgtatctaactgtaagctacaaaaaggccataccactagaagatgagagactgaactgaaagcgaaacctctgtgtgtccttttcgttccttcttgttccttctacagcctgtaccatgtaatgtaacttgtttgtacatgtaactctntgcggtattttgatgatattattatagttaaaaa

SEQ ID NO: 35775 - DNA, 274 bp, Glycine max
  Clone ID: LIB3053-008-Q1-N1-G6
tcggtgaattccaattccacattttcaagaaatagagagtcagaaacgtgcatatatgaattctgacgattcgcgatcttattatgcctatcctgtagccataggaattgagaacggaattcctcggggaatgtcaattacacgttagctacacataaggcatgccacttgttcatgtgtgactgggcagtatgcgaaaccttattaggcccattctgaagccaaaggaaacgagatcagaatttctcatggaatgtcaattgcacattcatat

SEQ ID NO: 35776 - DNA, 140 bp, Glycine max
  Clone ID: LIB3053-008-Q1-N1-H11
ggcgaatctaattattttttttattatttacaaaagatatatgtacatatattttgttatttccagtctcaaatgatattttagattttcagttatagctcaatacaatgatgatcttaaatttggagaagccttagata

SEQ ID NO: 35777 - DNA, 331 bp, Glycine max
  Clone ID: LIB3053-008-Q1-N1-H2
cagagaaagggctaaattgatacaaaacttaacttgcatatttttctggcatctatatggtgttatgattccagagaaagggctaaattgatacaaaacttaacttgcatatttttcttttttgggaggttagacattgctgtacagtagatgggaaactgttttgtgattctgcatttacgaatggggaagtcaaggttttgtagagagtccatgcatggtttttgggctctgatgtattgttgtcattgtatactctactactgggtctgttctgtacattattattcaacagtaaaatggaagaaatctgatcttatgatcctcatta

SEQ ID NO: 35778 - DNA, 338 bp, Glycine max
  Clone ID: LIB3053-009-Q1-N1-A10
ttcggggaattccaattccacattttcaagaaataaggaggcaaaaatgtgcatgtatgaattggaattatttgttttcttattaggcctatcctgaagccaaaggaaatgagatcggaattcctcggggaattccaattccacattttcaagaaataaggaggcaaaaatgttcatatatgaattggaattatttgttttcttattaggcctatcctgaagccaaaggaaatgagatcggaattcctcggggaattccaattccacattttcaagaaataaggagggccaaaaatgtcatatatgaattgaattattgtttttattggcctatctga

SEQ ID NO: 35779 - DNA, 406 bp, Glycine max
  Clone ID: LIB3053-009-Q1-N1-A4
tatgacctatgacgcacgcgcacgcgtacgtgagctcggaattcagatcgaggttttcatcatctgtgacttcgccaactgaaatgggggatgttttggagattctgtctaccactacagagcttgctcaactgccagtaccacctgtagaggaacaggttgagcgtaagttaattaatcacctgaggttgtcctttgaaaaccccagggttacagatccgaatgctaaagctaatgcttggcttacggcccatttctctaggctattgggtggcgtgaaccttgcatcggaccagattgacgtgctatatttctgcaactagactgcttcaggctatggtagatgctacatcgaacaccggttgtctgagcctgaccttacttgctatggatgacactcaaatgc

SEQ ID NO: 35780 - DNA, 107 bp, Glycine max
  Clone ID: LIB3053-009-Q1-N1-A6
ctcgagccgattttaacatttagtataacattcagtcttgcagttttggagtaagcaaataaggtttatgtatgaaattctgctttgtattgattcatcaactcaaa

SEQ ID NO: 35781 - DNA, 403 bp, Glycine max
  Clone ID: LIB3053-009-Q1-N1-B6
aactcggctcgagcttacagctcatgtgtttcttgtaaagaactgctttcaccgtagatgggttcaacatcatgaccttgactctatctattcgtacagcttctatctgttcttggcgattaacgatttcacttaatggatcgataggattgatcacacgcaaaacctccgccgccatcaaagacagggactagaagaaacccatttcatgtacacatagtgccgtccttcaattcacagcaggatgaattcaccgccttatgaagtcaatgacagccgctcatgatagattttgggccacatctgctgtctactatgctgctatcttggagtatctcactgctgaagtattgcatctggcccggaatgctagcaaggatctcatcgtaaaacgtattactac

SEQ ID NO: 35782 - DNA, 254 bp, Glycine max
  Clone ID: LIB3053-009-Q1-N1-C12
ctctaaaagacctatgacgatgcatgcacgcgtactttagctgataatttggctcgagatcataaccacacactctagatcatatgctgcttatacggctagatcttaatctatctgatgacgagcattatggactctatagcagagctataggagactatatctgagcttccggccatgagttgaagtcattattccagcgaagaaccgttgctgcgttaaggatatattatactgagacctttgccgtgcta

SEQ ID NO: 35783 - DNA, 367 bp, Glycine max
  unsure (1)..(367): unsure at all n locations
  Clone ID: LIB3053-009-Q1-N1-C9
tcggggaattccaattccacattttcaagaaataaggaggcagaaatggtcatatatgaattggaattatttgttttcttattaggcctatcctgaagccaaaggaaatgagatcggaattcctcggggaattccaattccacattttcaagaaataaggaggcaaaaatgttcatatatgaattggaattatttgttttcttattaggcctatcctgaagccaaaggaaatgagatcggaattcctcggggaattccaattccacattnttcaagaaaataagggaggggcaaaaatgttcatatatgaattggaattatttgttttcttattaggcctatcctgaagccaaaggaaatgagatcg

SEQ ID NO: 35784 - DNA, 397 bp, Glycine max
  Clone ID: LIB3053-009-Q1-N1-F8
atctatgacttctcatgcacgcttacgtaatctgggagctcaggtccaggttgctaccaactattccatatgctccgcccacatgacgatggatgggaagatcgatagtcaagtcattcgtatcttaacttgacacgcactataaccataccaatctttgcctctagaagctcccacgtgcgctctactgatacgactctgccgcttaccgagctacctgtacaactttcttccttttcgaagccttgccctttctaataactcacgctgatggtatatcatatccttgtaagtcttactatcctagctgagctgtatgcactaacccgaagtttagaccgaccactgtactttattcattaactatcgtcttgactccaacccgctaatacacgac

SEQ ID NO: 35785 - DNA, 341 bp, Glycine max
  Clone ID: LIB3053-009-Q1-N1-F9
agacagcttgacgtcgatgcacgcgtcgtagctcgaattcgctcggtgaaaacttgtggtctacgaaaagcattcctcggaaggatgcgcaagaggtcattcaagagtgcaaagagatatatgagaattcacttgttgatggaagacctccaaaggcaggttttgtttttcgacgtgtgaagtgcttaacagcaaccaagggagggctttggcgtaaactcacttgaagtacgattccattcagttattcatatatcttgttttgcctgttaaattatttgttccttttgcataattcccaaatgctatgctgtcaattagaaaacagttttgtaaattca

SEQ ID NO: 35786 - DNA, 249 bp, Glycine max
  Clone ID: LIB3053-009-Q1-N1-H11
tcggggaattccaattccacattttcaagaaataaggaggcaaaaatgttcatatgatgaattggaattatttgttttcttattaggcctatcctgaagccaaaggaaatgagatcggaattcctcggggaattccaattccacattttcaagaaataaggaggcaaaaatgttcatatatgaattggaattatttgttttcttattaggcctatcctggaagccaaaggaaaatgagatcgggatttc

SEQ ID NO: 35787 - DNA, 445 bp, Glycine max
  Clone ID: LIB3053-009-Q1-N1-H8
acctaggagttatgaggacgcatgcacgcgctcggaatctgggaattaggttaaagcgaatattcaaaatgtccaaaatccttaaagggtatgatgaacaaatatggggtgcctaaaataaactggcagtatactgatcattggagcctaccgcatctgcattttcaatatctcacacacttcttctttgatagctagtggagtgactgtggattcacctattggtatcgatgtggaagagacacaaaagatgttcaagaatgatattttatcctgtgcacaacgaaacttttatcctcatgaaatatacatgctgactcacatttcagaccctgaactttggcttcaggagtttattatattatggactctgaatgagtcttatgtgaaaacaatatcgatgggctttttaaactctccttttaagacttttactatttctatt

SEQ ID NO: 35788 - DNA, 356 bp, Glycine max
  Clone ID: LIB3053-010-Q1-N1-A8
ttactttctacttcccctccccttttttagccaaagtaacacactttcttttatatatattttaagatacgtagatttgataaaaacaagcaaagctctctatgaatttatgccactcctcctccagttgtgccagaggataacagaaaactaaccaaacttgatgaatccgctaatttcattcgcactggtttaagtcccagatggaatgatctagatgtgaatcagcatgttaacaatgtgaagtatgttgggtggattctggagagtgctccacagccacttttggagagccatgagctgtgtgccatgacattggagtacaggagggagtgtggcaggaacagtgtgctgga

SEQ ID NO: 35789 - DNA, 352 bp, Glycine max
  Clone ID: LIB3053-010-Q1-N1-B12
tcggggaattccaattccacattttcaagaaataaggaggcaaaaatgggcatatatgaattggaattatttgttttcttattaggcctatcctgaagccaaaggaaatgagatcggaattcctcggggaattccaattccacattttcaagaaataaggaggcaaaaatgttcatatatgaattggaattatttgttttcttattaggcctatcctgaagccaaaggaaatgagatcggaattcctcggggaattccaattccacattttcaagaaataaggggaggcaaaaatgttatatatgattgaattattgtttttattaggcctatcctgaagccaaaggaaaga

SEQ ID NO: 35790 - DNA, 332 bp, Glycine max
  Clone ID: LIB3053-010-Q1-N1-D4
tcggtgaattccaattccacattctcaagaaataaagaagcaaaaatgggcagatatgaatcgcaattattcgttttcttattaggcctatcctgaagccaaaggaaatgagatcggaattcctcggggaattccaattccacattttcaagaaataaggaggcaaaaatgttcatatatgaattggaattatttgttttcttattaggcctatcctgaagccaaaggaaatgagatcggaattcctcggggaattccaattccacattttcaagaaataaggaagcaaaaatgttcatatatgaattggaaataattggtttcttaataag

SEQ ID NO: 35791 - DNA, 301 bp, Glycine max
  unsure (1)..(301): unsure at all n locations
  Clone ID: LIB3053-010-Q1-N1-E10
catagcaaggaggcgtccatgtgctttgtgatgaggttgggatatccaaaggggcacccttgctgttgccagaatcaccgaggagtgaagacccaatatgctgccaaaggcaagttgaataccaaaaaataatcaaatcagacagcactgggtttcaaggacaaaacttgctgtggagaagaagatatatttgcaaacatactactaataaattatagtattaaattgttttggaattacgatttcttgtgaatgntcannataattaggnnttaatanannaattgagtgcattgtgtta

SEQ ID NO: 35792 - DNA, 364 bp, Glycine max
  unsure (1)..(364): unsure at all n locations
  Clone ID: LIB3053-010-Q1-N1-E12
tcggggaattccaattccacattttcaagaaataaggaggcaggaatggtcatatatgaattggaattatttgttttcttattaggcctatcctgaagccaaaggaaatgagatcggaattcctcggggaattccaattccacattttcaagaaataaggaggcaaaaatgttcatatatgaattggaattatttgttttcttattaggcctatcctgaagccaaaggaaatgagatcggaattcctcggggnaattcccaattccacanttttcaagaaaataagggnaaggcaaaaatgttcatatatgaattgggaataattgttttcttattaggcctatcctgaagccaaaggaaatga

SEQ ID NO: 35793 - DNA, 62 bp, Glycine max
  Clone ID: LIB3053-010-Q1-N1-G12
ttgtgctttggaagaaaaacataaccctcctttctactgtttgtccttggagataattctta

SEQ ID NO: 35794 - DNA, 272 bp, Glycine max
  Clone ID: LIB3053-010-Q1-N1-G6
gtttaatggaccggtgtagccaattatattcatataatgaggtattggaaactagtccaatcaggatttgagtctagagaataggggattattgtgtaccgatgttgcttaaatgtgaagcattgttcccccgtgtttaatcaggacgtagatggtcatagtaggtgtgttattattccagccatttaccataatgggtgtaccccgtggttatcattttgatcgaaattatttcaattctattgtaaaataatgatcatttctgtttctaa

SEQ ID NO: 35795 - DNA, 452 bp, Glycine max
  Clone ID: LIB3053-010-Q1-N1-H2
ctatcgacatgccacgccgtaccgtaaagctgcggatttcggctcgagtggaagcccaattccttcccccactcactctcctaacgggttgaaccaaaatattgttccttcttttcacatcaattcagaatccccaaaggagagtggttcaacttctgctccagctagtactgcatcagtttctgctggtcaacagccggtcaacatttctgttggcaaggaagtggttgtcaatggcgagaatggatataaggaaggcaatggcaagcagagctctagtcatgacgattgtgatttgcaagaatgtttggagcataatctccctgatagcccttttgcttccccaacaaaaggtgatggagacttcctggttgccttctccaatggacctaatgaggccaatgatgcagatgcctcagctgcatctgccaactccaaatttggtactagca

SEQ ID NO: 35796 - DNA, 444 bp, Glycine max
  Clone ID: LIB3053-010-Q1-N1-H4
tatgacttcacgcgtaccttaacctcggatttcggttcaaggttggaaggtggctctggatgctgccaaagggctggcgtttgggcacagtgctgaagcaaaagtgatatatagagattttaagacttcaaatgtcttgctggattcaaaatataatgcaaaactttctgattttgggctggcaaaggacggaccaacaggagacaaaagtcatgtctccaccagggtaatgggaacatatggatacgcagcacctgaatatctagccacaggtcatcttactgccaagagcgatgtgtacagttttggagttgtcctgctggaaatgttgtctgggaagagggcagttgacaagaatagaccatctggacaacacaatttggtggaatgggctaaacctttcatggcaaacaagcgtaagatattccgcgtgttggacacccg

SEQ ID NO: 35797 - DNA, 190 bp, Glycine max
  Clone ID: LIB3053-010-Q1-N1-H9
ataacattttctgtttgtatatttgttcacttatatggagtgtatttaggacactcccggtagcttagagtctggttttgatataaaattctttcataggatagacagtgagttcctggggcatggtttccggaggataccttgtattgattttcttcatatttgtatttattgtttacgtttatcttaa

SEQ ID NO: 35798 - DNA, 403 bp, Glycine max
  Clone ID: LIB3053-011-Q1-N1-B10
tcggggaattccaattccacattttcaagaaataaggaggcaaaaatggtcatatatgaattggaattatttgttttcttattaggcctatcctgaagccaaaggaaatgagatcggaattcctcggggaattccaattccacattttcaagaaataaggaggcaaaaatgttcatatatgaattggaattatttgttttcttattaggcctatcctgaagccaaaggaaatgagatcggaattcctcggggaatcccaattccacattcttatgatgtatcgaggcaaatatgttcatatgtgaattgtaattattgggtgaaatattaagcctatcctgatgccacacgacatgagatccgaattcctcgagggtaccgagctcgaattctatatagtgag

SEQ ID NO: 35799 - DNA, 169 bp, Glycine max
  Clone ID: LIB3053-011-Q1-N1-D5
ccaattcaacatatgaaaagttcttttccttctatacaaagatgggatataaaaagggcgtacgtctactaatgagctcgattaccaccgaattaattccagactctttcctgcaggcctaccatcttatccctatattgagtcttattacaactaagcttatataatc

SEQ ID NO: 35800 - DNA, 283 bp, Glycine max
  Clone ID: LIB3053-011-Q1-N1-E4
tgcatgcacgcgtacgtaagctcttaattcggctctagcgtctccgcatcctcgatcatcggatcataccccgaccgatcatttgatctatctatattctaaatgatatctaccctccaaacaatcctgcccgactctgactgtgctataaatgggcacctttcgtaggtggtactcacattccacctcttgaaagattttcccactatcatctctaataacatttagaagaatcttgatgaatctttttaacccatcgtgatcatctacttgaactctatct

SEQ ID NO: 35801 - DNA, 467 bp, Glycine max
  Clone ID: LIB3053-011-Q1-N1-F2
gctatgactccatgcacgctacgtaagctcgaattcgctcgagggaatggaaatcggagctgcagattggaatgccaaaactttgaacttgaggcttccgttaagcttccttctagagttccttatgggtttcacggcacttttattcattcaaatgatttgaggaaacaagcttgaattggtgacggtatataagtgagttattcactttctgatgagagttttttctgttttatatttgcatatacgctttctttatctattttttttgtttatactgttttttaatttttttttttttttctttattttattctttttttttttttgagtttttttttttttatttctttttgttttttttttttatttatttttttctttatttatattttttttctctttattttttttttttattttatattcttttctttttattttttattttttttttttttactttt

SEQ ID NO: 35802 - DNA, 322 bp, Glycine max
  Clone ID: LIB3053-011-Q1-N1-F5
tatcacgtaccatgcacgcgtgcgtaagctcgcaattctgctcgagctttcctaaagaaaattggaacctgcctctgttgttaaaggttgtatttttttttgagtgggtggattgagagaactgtgcaagctttggaacttcttcaaagtctggtacttcaatggctactgaagaggttaataaacttcaatcacttcctccttaccctgagatgatagtgaaagcacttgaagccctgaatgaggcttatggatcgagtaaatcagcgatatcaaagtacatagaaaccacctacggtgagttgccagatgaaactttttt

SEQ ID NO: 35803 - DNA, 302 bp, Glycine max
  Clone ID: LIB3053-011-Q1-N1-F7
tcggggaattccaattccacattttcaagaaataaggaggcaaaaatgtgcatatatgaattggaattatttgttttcttattaggcctatcctgaagccaaaggaaatgagatcggaattcctcggggaattccaattccacattttcaagaaataaggaggcaaaaatgttcatatatgaattggaattatttgttttcttattaggcctatcctgaagccaaaggaaatgagatcggaattccttggggaaattcaattccacaatttcaagaaataaagaagcaaaaatgttcatata

SEQ ID NO: 35804 - DNA, 402 bp, Glycine max
  Clone ID: LIB3053-011-Q1-N1-F8
tcggggaattccaattccacattttcaagaaataaggaggcaaaaatgtggatatatgaattggaattatttgttttcttattaggcctatcctgaagccaaaggaaatgagatcggaattcctcggggaattccaattccacattttcaagaaataaggaggcaaaaatgttcatatatgaattggaattatttgttttcttattaggcctatcctgaagccaaaggaaatgagatcggaattcctcggggaattccaattccacattttcaagaaataacgaagcaaaaatgttcatatatgaattggaattatttgctttcttattaagcctatcctgaagccaaaggaaatgagatcggaattcctcgggggtaccgagctcgaaattcctataatga

SEQ ID NO: 35805 - DNA, 322 bp, Glycine max
  Clone ID: LIB3053-011-Q1-N1-G11
catgcacgcgtacgtaagctcgtaatacaactccatgctacaggtttatgttcattatctttcacttcaaaaatggtaaaatgtaaatttaaactgtttgatcaataaatatacctatactgcatcataatcaaacgatatctctattcctctaactacctaacctacattcattatactaagtagatttaaattcatatcatatcatagctattaacattattaaatatttatatactcacaatttaacacatcatacataaccttattcataaacttttatactctatactgcctaatgagttatctaacttacattaat

SEQ ID NO: 35806 - DNA, 369 bp, Glycine max
  Clone ID: LIB3053-011-Q1-N1-G7
tcggggaattccaattccacattttcaagaaataaggaggcaaaaatgtgcatatatgaattggaattatttgttttcttattaggcctatcctgaagccaaaggaaatgagatcggaattcctcggggaattccaattccacattttcaagaaataaggaggcaaaaatgttcatatatgaatcggaattatttgttgtcttattaggcctatactgaagccaaaggaaatgagatcggaatttcatggggaatttcaattccacattttcaagaaataatgaagcaaaaatgttcatatatgaattggaattatttgccatcttattaagcctatactgaagccaaaggaaatgagatcggaatttc

SEQ ID NO: 35807 - DNA, 408 bp, Glycine max
  Clone ID: LIB3053-011-Q1-N1-H5
ggctaatccctcaagcaagaaaggcatgtggtattgggatgatgatgaacaagaatatcctattactgatgtgatcaaattccgagttactaatgtgagttatccccaaattccagttgaacaaccaaaagaatcaaagccatttgcccctatgttggtctctggagcgatagatgatgatggtctaggccctatttcttggtggtttggagatgaggatgaggacgagtaaatgagtccaaaaatggtcggatagaagatatttcggatgctttctgcatgatttttaatttaacaactcaagttacaactcgacaacagtatacttttgttaaattcctttgcttcataaagtatttaattcaatgaaaaaaaaaaaaaataaagggcggacggcgactagtgagc

SEQ ID NO: 35808 - DNA, 281 bp, Glycine max
  Clone ID: LIB3053-011-Q1-N1-H7
cacgcatacgtaagctcgcaattcatctcgagctcacacaacacacatcacacaccatatcatatccacctctttgtatatctcaacctttattcccatccatcatctcatcacaatcctcccacttgcacttcctcttcacttccaccaatcacaccaacaatccttaacctctaacacaatctataccactatcaatctccttaccacattaacactatctcacagaccctaccttttcaaatacttaacaccactctctaaccactctacttactacc

SEQ ID NO: 35809 - DNA, 396 bp, Glycine max
  Clone ID: LIB3053-012-Q1-N1-A1
tcggggaattccaattccacattttcaagaaataaggaggcaaaaatgttcatatatgaattggaattatttgttttcttattaggcctatcctgaagccaaaggaaatgagatcggaattcctcggggaattccaattccacattttcaagaaataaggaggcaaaaatgttcatatatgaattggaattatttgttttcttattaggcctatcctgaagccaaaggaaatgagatcggaattcctcggggaattccaattccacattttcaagaaataaggaggcaaaaatgttcatatatgaattggaattatttgttttcttattaggcctatcctgaaaccaaaggaaatgagatcggaattcttgggggtaccgaactcgaattccctat

SEQ ID NO: 35810 - DNA, 158 bp, Glycine max
  Clone ID: LIB3053-012-Q1-N1-A2
gctaaatactgccattgtagtattgtaacttgtttttgtgtaaaactaaaaggttaattgtagatccgcgctaaatatgaaggtatctttcccacgctaaatactgccattgtagtggaaacttttgcatggtaataaacttagttataccattaaaa

SEQ ID NO: 35811 - DNA, 161 bp, Glycine max
  Clone ID: LIB3053-012-Q1-N1-A6
gctaaatactgccattgtagtattgtaacttggttttgggtaaaactaaaaggttaattgtagatccgcgctaaatatgaaggtatctttcccacgctaaatactgccattgtagtggaaacttttgcatggtaataaacttaggtataccattaaagaag

SEQ ID NO: 35812 - DNA, 203 bp, Glycine max
  unsure (1)..(203): unsure at all n locations
  Clone ID: LIB3053-012-Q1-N1-C1
tcttggtgaattgcaattccacattttcaagatataaggaggcaaaaatggtcataggtgaattggaattatttgttnacttattaagcctatcctggaaccaaatgaaattggatcggaattcctcggggaattccaattccacattttcaagaattaaggaggcaaaaatgtgcatatatgaattggaattatttggtttc

SEQ ID NO: 35813 - DNA, 379 bp, Glycine max
  Clone ID: LIB3053-012-Q1-N1-E7
acatgcacgcggacggaagctcgatgttcgactcgagtgtctctttacctctatatctctatctctctttctcatgggctgggctagttgaagtttgtaagacaaatacaccatggcagatatcctgagtggagaacagattgttgattttaaagaggcctttgacttgtttgtcaaagatgtagatggtgagcaagctttcttatgtagttgaattactctttagattgatgcaattctgtcatctctatcatatatatatatatatttatatgtatgtatgtagatgcatgtatagtggtgtttatgaatatgtagtgcatcttctaagataacattactgtgtaagaacttgccactgtcattcggtcattggatc

SEQ ID NO: 35814 - DNA, 154 bp, Glycine max
  Clone ID: LIB3053-012-Q1-N1-H12
cattctatggagatagatgccttatttcttgtgttttatgagctttctacatatttccttggcaaagggtggctagaatcagttgtgttagtgtgtactgaattttggcctacaacttcaattatgtacctaaatgatgacatcaattagtaaa

SEQ ID NO: 35815 - DNA, 92 bp, Glycine max
  Clone ID: LIB3053-013-Q1-N1-A12
aaaacagtaagaataaaaaaagataattgatgtttaatttgtgtattttctgaaggcagtatacaatttggcttgtaaactccatctcgtaa

SEQ ID NO: 35816 - DNA, 231 bp, Glycine max
  Clone ID: LIB3053-013-Q1-N1-C1
catgcacgcatacgtaatctcggaattctgctcgagatttcctgtttacctaattgcttttactcatttgactacggttcccttatatgttctatctccctttatatatatatctcataactaatcttatcatacaacaaattcaatctcacacttacacttacacacatattaattctcattttatttctcataactaatgatttcatactcattattctctataactat

SEQ ID NO: 35817 - DNA, 73 bp, Glycine max
  Clone ID: LIB3053-013-Q1-N1-D3
ctatcacgtcgcatgcacgcatacataaactcggaattcggctccagcacatatgcacaccatctacacttac

SEQ ID NO: 35818 - DNA, 286 bp, Glycine max
  Clone ID: LIB3053-013-Q1-N1-F5
catgtatatatggagtccctacacatatactgtatatagtggttttgtttttttgccaattttgttcagaataaaaggtggagcaagtttgtattcttaaagcagatgatgaaagaacgtgaaataaccctatgaccttacgtcccgacactgtagttttactatgctgtggagtcctttaatcttaattcgtatacgtagtttgaaaaataaaggctaaatgaatttgtaagttcctgtattatttaacaattttaaacatgtcaatacttttaaaaaaattatt

SEQ ID NO: 35819 - DNA, 99 bp, Glycine max
  unsure (1)..(99): unsure at all n locations
  Clone ID: LIB3053-014-Q1-N1-A12
ttctcatgtaacatagaaagaattgaatcctaaaggaggggtaatgggngtattttctgaaggcagtatacaatttggcttgtaaactccatctcgtaa

SEQ ID NO: 35820 - DNA, 61 bp, Glycine max
  Clone ID: LIB3053-014-Q1-N1-A9
atcaacaaagttaattattaattattagtttttattgatcaatcttatatcttgttattgt

SEQ ID NO: 35821 - DNA, 335 bp, Glycine max
  Clone ID: LIB3053-014-Q1-N1-B8
actctacttaccaccatgcacgcctacttaagctcataattctactcaataattactccttacacactaattattactaccatcgcatccgtacaatttctactttcctcctcaaaatccaaatattcctaaacatatactatttccaactttattctaaccaatacctcttcttcaaacttatacattatagcttactctattcctaaccaacctataccacactaccttgataattcatcacctattcactttctattctaccctcttcttcttatataaattaccatataatcttcatatactccaatattcataactcattcactgtaaat

SEQ ID NO: 35822 - DNA, 181 bp, Glycine max
  Clone ID: LIB3053-014-Q1-N1-D10
cttgaaggtttcagacttcaagagatggggtacacaagttttttttgtatttgtaatttataccttgacaggtttacttttgactgattcatttcatgctcaagtgtccattaaattctataggatttacatttcattttattcatttgagtatatattggcatcttaattattaagttca

SEQ ID NO: 35823 - DNA, 326 bp, Glycine max
  Clone ID: LIB3053-014-Q1-N1-E8
ctcatagatggtctgaaaattatgtgttataaaccatgcgattattgccacatcataatagtgtattcatcttttttgttttaaatcctgtgcaggaactttgcattatgtttggctgtcatttgtctgtataggaaattctgtgaattgtctattgaagatgttatgctaggattataaatggaataagtttctgccattgtctgtcaccgcaaagtttgtaattcttggaactttctgttgtggtaaaagccaacgtttaagtagaacaatttaaagactattttcttatgatcaataaacgtagaacaatttaaattcctaaa

SEQ ID NO: 35824 - DNA, 63 bp, Glycine max
  Clone ID: LIB3053-014-Q1-N1-G5
ttgtgcttttgtaagaaaaacataacctcccttgctactgtttgtccttggagataattctta

SEQ ID NO: 35825 - DNA, 353 bp, Glycine max
  Clone ID: LIB3053-014-Q1-N1-G6
taacattattacgacgcatgcacgcgctcgtaatctcgctataccattcgagtattgcttctttatgaaatgcacttcctccatagatacgtggtgaccattatattttcagctgcattaattaacctaatcttctatccacaacgatctagcccacacaccagcataataattttggagccgatcttataacatgcatactgagattttaactcaattacttagatcctttccttgtcttggatgaattctcattgactgctactgctgaatttcctgatcattcacatataatattttatactgtcacataccttttgcatttatcttgtatctcactaatatttttaatg

SEQ ID NO: 35826 - DNA, 410 bp, Glycine max
  Clone ID: LIB3053-014-Q1-N1-H5
ccctattacatatttgccgttcattcattcactcatctgcgagcatggccgataagcaaccccacctgaacggtgcttattacggtcccgccattcctccggcggagcaaccacgctaccgccctcaccgcgaaagaagctgctgctgctgcctgttctgaatcttgtggaagattatggttgcactcattgtcctcgttggcctcacagtactcatattctggctggcggttcaaccccgctacttcaagttctacgtcacggaagccgacctaacacaatttgattactatagcaacaacaacacccttcactacaacatggtcctcaacttcactgcacgcaaccccaacaagaagctcagcatatactacgacaaggctgaggcattagcattctacgaggatgtc

SEQ ID NO: 35827 - DNA, 583 bp, Glycine max
  unsure (1)..(583): unsure at all n locations
  Clone ID: LIB3053-009-Q1-N1-E8.F1
gccgagaacaagggaaagggaggtaagaacaggaagaggggaaagaacgaggcggacgacgagaagcgagactgggtgttcaaggaggacgggcaggagtacgcgcagtgctccgnatgctgggtaacgggcggtgcgaggcgatgtgcatcgacgggacaagaggctctgcacatccgcgggaagatgcacaagaaggtgtggatcgccgccggagacatcatcctggttggactcagggactaccaggacgacaaggctgacgtcatcctcaagtacatgcccgacgaggccaggctcctcaaggcctacggcgagctccccgacaccactcgcctcaacganggcatcggcgccggcttggacgaggaggacgacgccaccgccaacgactacatcgagttcgaggatgaggatattgataaaatctaatcaccctcgcaatcgcaattatcattcatatctgtctctgtctgtctctagtagtatttcgctctctgcttgtttgaactccccgtgttggatttcattttataattgtgcactattattcaataactcagatatttccgattctcgtctc

SEQ ID NO: 35828 - DNA, 636 bp, Glycine max
  unsure (1)..(636): unsure at all n locations
  Clone ID: LIB3053-009-Q1-N1-E8.F2
acgcgtnnacgtaagnctcggnaattttcggctcgnagggccgnaagnaacaaggggnaaagggnnaggtaagnaacaggnaatagtgggaaagaacgaggcggacgacgagaagcgagagctggtgttcaaggaggacgggcaggagtacgcgcaggtgctccggatgctgggtaacgggcggtgcgaggcgatgtgcatcgacgggacgaagaggctctgccacatccgcgggaagatgcacaagaaggtgtggatcgccgccggagacatcatcctggttggactcagggactaccaggacgacaaggctgacgtcatcctcaagtacatgcccgacgaggccaggctcctcaaggcctacggcgagctccccgacaccactcgcctcaacgagggcatcggcgccggcttggacgaggaggacgacgccaccgccaacgactacatcgagttcgaggatgaggatattgataaaatctaatcaccctcgcaatcgcaattatcattcatatctgtctctgtctgtctctagtagtatttcgctctctgcttgtttgcaactccccgtgttggatttcattttataattgggcactattattcaataactcagatatttccgattctcgtctc

SEQ ID NO: 35829 - DNA, 526 bp, Glycine max
  Clone ID: LIB3053-009-Q1-N1-E8.R1
gagacgagaatcgaaatatctgagttattgaataatagtgcacaattataaaatgaaatccaacacggggagttgcaacaagcagagagcgaaatactactagagacagacagagacagatatgaatgataattgcgattgcgagggtgattagattttatcaatatcctcatcctcgaactcgatgtagtcgttggcggtggcgtcgtcctcctcgtccaagccggcgccgatgccctcgttgaggcgagtggtgtcggggagctcgccgtacgttgaaggagcctggcctcgtcgggcatgtacttgaggatgacgtcagccttgtcgtcctggtagtccctgagtccaaccaggatgatgtctccggcggcgatccacaccttcttgtgcatcttcccgcggatgtggcagagcttcttcgtcccgtcgatgcacatcgcctcgcaccgcccgttacccagcatccggagcacctgcgcgtactcctgcccgtcctccttgaacaccagctctcgcttctcgt

SEQ ID NO: 35830 - DNA, 499 bp, Glycine max
  Clone ID: LIB3053-009-Q1-N1-E8.R2
gagacgagaatcggaaatatctgagttattgaataatagtgcacaattataaaatgaaatccaacacggggagttgcaaacaagcagagagcgaaatactactagagacagacagagacagatatgaatgataattgcgattgcgagggtgattagattttatcaatatcctcatcctcgaactcgatgtagtcgttggcggtggcgtcgtcctcctcgtccaagccggcgccgatgccctcgttgaggcgagtggtgtcggggagctcgccgtaggccttgaggagcctggcctcgtcgggcatgtacttgaggatgacgtcagccttgtcgtcctggtagtccctgagtccaaccaggatgatgtctccggcggcgatccacaccttcttgtgcatcttcccgcggatgtggcagagcctcttcgtcccgtcgatgcacatcgcctcgcaccgcccgttacccagcatccggagcacctgcgcgtactcctgcccgt

SEQ ID NO: 35831 - DNA, 137 bp, Glycine max
  Clone ID: LIB3053-014-Q1-N1-B5.F1
ctctcccagcccagttgatcgaatccgcccctcaaggtcagtggcgctaattccaacaatacatctaatttgtatactgacagcgaatctgaatcagtcgtccaacgacaaaactccgtggcatcacatgggggaca

SEQ ID NO: 35832 - DNA, 561 bp, Glycine max
  Clone ID: LIB3053-014-Q1-N1-B5.F2
ctcttccagccctgtgatcttttcgcctctctgtgcagggctcaaatctaacaaaacattaagtgaaaatgacacagaatgcaatagtgtccaagacaaaatccgggatcaagggggacataggcgcggcacattaagccactggcggcgccggggttcattcccattccgaggaggagggttttggaagaacactccaattcaatggaggacatagaattaatgcttgggttgattccatgagagccttttctccaaccaattgcaaatgcacctcttctctcgctagaagaacacagctcttggattcttcaccacccttcatcattagacatgtttgagcaaattatggatgcgtccaggggaaagcaaattgtcatgttcctatactatgatggtactttgtcgcctatcgttgatgacccacaccatgctttaatgtcggattctatgaggagaacggtgaggaaacttgcaaggagatttcctactgctatagtcaccggcggatgcaaaggacaagattacagttttgctcgcttggctgatctatattatggt

SEQ ID NO: 35833 - DNA, 206 bp, Glycine max
  Clone ID: LIB3053-014-Q1-N1-B5.R1
tatttttacgtcacttgtaatatatatgatcaaatttggaaaagtacaaaattaatccattcagaattacatttgatgcaacagagacttttcccctgtactatacaaactacgggtctaattacatcaacgtgtactcgcttcaaactcagaaagtcacgtttgtctgtcctgtttccatgcagttttgttctctgtgctgatct

SEQ ID NO: 35834 - DNA, 430 bp, Glycine max
  Clone ID: LIB3053-014-Q1-N1-B5.R2
acgtcacttgtgatatatattgatcatatttggaaaagtacaaaattaatccattcagaattacatttgatgcaacagagacttttcccctgggctacacaaactacgtgggtgattacatcaacgtagacgcgcttcaaactcagaaagacacttttgtctttcctttttccatacatttcttgctctctggtctaatctgaacaaaacatagaaaaaagggtcctatatgctaccctagctgatctacatttttttggcagggtagggatgtacattagcattctatccatttacacccgagaacgtgttctgagccggagggatacttgattccactcaaccaaacggtgaaggaaatccataaccttgtttggttcttgaaaagaggatgatgcactagtgtcctttggaaatttccagacaagaa

SEQ ID NO: 35835 - DNA, 685 bp, Glycine max
  unsure (1)..(685): unsure at all n locations
  Clone ID: LIB3053-007-Q1-N1-A9.F4
tggcggtccctgctacatcctcagcccctgtccttcgacccatccgcaccaatcactccttctcttcccctttccgctctctcccctctcccgccgccagaaaacccctaaccgtcttcgccatggcccccaaaaagaaggtgaacaagtacaatgataagtggaagaaggagtggtttggagcggggatattctacgagggaagcgaggaggtggaggtggacgtgttcaagaagatagagaagaggaaggttttgagcaacgtggagaaagctggcttgctctccaaggcagaggacttgggattcacgctctcttccatagagaagctcggcgtcttctccaaagccgaggagctcggcttgctcagcttgctcgaccgagccgccagcttctccccctccctcctcgcctccgccgccctccccgtcttcgtcgctgccattgccgccattgtgctcattcccgacgactctgccaccctcgtcgccgtccaggctgttgttgctgccgcgctcggcgtcggagccgtcgggcttttcgttggctccgtcgtgctcggcggcttgcaagaggctgattgattgaatggtgtgggaatggtatgtgggatgaatncatcttaaattttttttttttgggtttgggggtggggggaattgggggggacaatttgttgggnggg

SEQ ID NO: 35836 - DNA, 391 bp, Glycine max
  unsure (1)..(391): unsure at all n locations
  Clone ID: LIB3054-010-Q1-N1-F2
ccaaaactcatgctatattctcactctcacaacttcaatcgctttcgctctctctctctctctctctctctaccaaaaaaatggctttggaaactctcaactcaccaacaacaaccgccccatctttccccttcgacgacccaactattccatgggccaaaagaaaacgttcaaagcgttgttcacgcgaccacccttcggaggaagagtacctcgctctctgcctcatcatgctcgctcgcggcggcaccacccgccgcgtcagcactccaccgccgcaaccgactccagatccttccaccaagctcagttacaaatgctccgtttgcaacaaaagcttnccctcttaccaagcgctcggtggacacaaggccagtcaccggaaactcgc

SEQ ID NO: 35837 - DNA, 336 bp, Glycine max
  Clone ID: LIB3054-004-Q1-N1-H8
aaggaaacatggacagtcctgctaatgaaaatgaagaaaaggagcctgaggacaaggagatgacactggaagagtatgagaaggtgctggaagagaaaaggaaggccctgcaggctcaaaaaactgaagcaagaaaggtggacatcaaggaatttgcatccatgcagccactgtcaaacaagaaagaaaatgatgagatctttattaaattgggatctgacaaggataagcgcaaagatgctttggagaaggaggagaaatccaagaagtctgtcaacatcactgagtttctgaagccagctgaaggggaaaggtactaccctggtgggcgtggtc

SEQ ID NO: 35838 - DNA, 395 bp, Glycine max
  Clone ID: LIB3054-002-Q1-N1-E7
ctgtcttccttctctagggtttttagctcccccaatttctgcgctcaacatggttcttcaaaatgatattgatttgctaaatcctccggttgagcttgagaagaggaaacacaagctcaagcgtcttgttcagtcaccaaactctttcttcatggatgttaagtgccagggttgcttcaacataaccactgtctttagccactctcagactgttgttgtatgcggaaactgccagactgtcttgtgtcaaccaaccggtggccgggcaaggctaaccgagggatgctcctttaggaagaagggagactgagtggattgccatctttttttgtttgtgattggagagtttcagtaatgccttcttttgttttgggtatgatgaatatgtaattttg

SEQ ID NO: 35839 - DNA, 396 bp, Glycine max
  Clone ID: LIB3054-010-Q1-N1-G10
ggcaactatgactggtgtgagcctttcatgccccagggttttcttcaacgcatcagcctcaccgcaaaacgcgcatgctgtaaagttctcacttccacccagccaagcagtgcgaccgggtagtatcaagttgggtcgcgtgatgaggatccgacccgttcgcgctgcgcctgagcgcatatcggagaaggtggaggagagcataaagaacgcgcaggaggcgtgcgccggcgatccgacgagcggcgagtgcgtggcggcgtgggacgaggtggaggagctgagcgcggcggcgagccacgccagggacaagcaaaaggaaaaggactccgacccgctcgagaattactgcaaggacaacccggagaccattgagtgcaaaactttcgaagactg

SEQ ID NO: 35840 - DNA, 313 bp, Glycine max
  Clone ID: LIB3054-001-Q1-B1-A11
gaaatggctctccaggctgcttctcttgttcctgcttctttctcggttcttaaagagggaaagagtggtgtgtctctcaaggactccaccttgttcggtctttcattttcagaacctatcaaagctaacttcagctcttctgcattgaggtgcaagagggaattcgaacaaaagctctgtgctgtgagggccgaaacagtggctacagcctctccagcagttaccaagtctacaccagaaggcaagaaaacattgaggaagggcagtgttgtgataactggggcttcatctggacgaggcctggccactgcta

SEQ ID NO: 35841 - DNA, 396 bp, Glycine max
  unsure (1)..(396): unsure at all n locations
  Clone ID: LIB3054-009-Q1-N1-A12
caataaactgctaagctaactgaactctccctctctccttgctcgctcctttcgcctctcactacaaatacacatctcatctcatccgtctctcacttttaatttttctctgcaatctgaaccttccggatttcgtttttctttgttccggtagccagccagccagccatggtgctcttcaatgtttcacgcgttgagaccactcccttcgatggacagaagcctggaacctctggtctccgcaagaaggtgaaagtattcgtgcaacctcattacctncataactttgttcagtcaacattcaatgcattaactgtggaaaaagttagaggtgcaacgctagttgtatctggtgatggtcgttatttttcaaaggaagctattcagattataact

SEQ ID NO: 35842 - DNA, 358 bp, Glycine max
  Clone ID: LIB3054-009-Q1-N1-A5
gcgaattcagctcgagcaattaactgttaagctaactgaactctccctctgtcctgcctcattcctttggcctctcactacaaatacacatctcatctcatccgtctctcacttttaatttttctctgcaatctgaaccttccggatttcgctattctttgttccggtagccagtcagccagccatcgtgctctacaatgtttcacgcgttgagaccactcccttcgatggacagaagcctggaacctctggtctcctcacgaacgtgaccgtattcgtgcaacctcattacctccataacttcgatcagtcaacattcaatgcattaactgtggaaaaagttagaggtgcaacgcta

SEQ ID NO: 35843 - DNA, 377 bp, Glycine max
  Clone ID: LIB3054-008-Q1-N1-C5
tgggttcttctttaagctataaggttggaactatgattgaagttccaagggctgcactagttgcagatgagattgcaaaggaagcagaattcttttcgtttggaaccaatgaccttactcaaatgacatttggatatagtagagatgatgttggcaaatttcttcctatatacctatccagtgggattctgcagcatgatccattcgaggtacttgaccaaaaaggtgtgggtcaactaatcaagatttgcacagagaagggtcgtgctgctagaccaaacttgaaggttggaatatgtggggagcatggtggggagccttcttcagttgcattctttgctgaaatcggacttgactatgtttcatgttctcctttt

SEQ ID NO: 35844 - DNA, 415 bp, Glycine max
  Clone ID: LIB3054-002-Q1-N1-B7
atagcatgctacactcgcgggcctttcctgcctagtgtttgttccaagcactctccaccctccatctctccatcttttggcttgaggagtctgaaatcgagctctttatttggagaatctctaagagtggcatccaaatcaacactaaaggtttcaaagacaaagaatacttcactcgtgaccagatgtgaaattggtgacagtctggaagaattcctcacaaaagcaacaccagataaggggttgatcaggttgttggtgtccatgggagaagcattaagaacaatttccttcaaagtgaagacggcttcttgtggtggaacacaatgtgttaatacttttggggacgagcagcttgcagtggatttgctagctaatcagcttctttttgaggccttaaattactctcatttct

SEQ ID NO: 35845 - DNA, 396 bp, Glycine max
  unsure (1)..(396): unsure at all n locations
  Clone ID: LIB3054-003-Q1-N1-E12
aaatatttcatacccaaaaaatgcagtttcattagccgatctactcagcacctgccacgtggcactacacatatagttagccacatatctaaaattgctatcccctcctcctcctctcccttcttagtctcactatcaagcaatgcaataacatcagtacataacataacataacatccttaaccctttgaacatcgttttgcagccatggaaacaggcatagcatgctacactcgcgggcctttcttgcctagtgtttcttccaagcactctccaccttccatttctccatcttttggcttgaggagtctgaaatcaagctctttatttggagaatcgctaagagtggcctncaaatcaacaataaaggtttcaaagacaaagaatacttcactc

SEQ ID NO: 35846 - DNA, 397 bp, Glycine max
  Clone ID: LIB3054-006-Q1-N1-C1
gtctcaacttctgctcttccaactcctacaacgcttttctctgcactcatgggcaaggtcaagatcggaatcaacggatttggaagaattggccgtttggttgccagagtcgctctgcaaagagacgatgttgaactcgttgccgttaacgaccctttcattaccaccgattacatgacatacatgtttaaatacgacagtgttcacggacactggaagcatcacgatgtcaccgttaaggacgagaagacccttctcttcggtgacaaggcagtcactgtttttggacacagaaaccctgaagagatcccatgggggtcaactggagctgacatcattgttgagtccaccggagttttcaccgataaggacaaggctgccgcacatttgaagggtg

SEQ ID NO: 35847 - DNA, 342 bp, Glycine max
  Clone ID: LIB3054-003-Q1-N1-B6
gcattcagagagagtgccgacaatgagctcaagggaatccgatatgagtgtgatgagccacttgtgtgcattgactataggtgcactgctgtgtgctaaaccgttgactactagttgacgcatggccatgggagatgacatggagaacgtgattgcttggtatgacaatgaatggagctactaccaaagggttgctgaattcgctgacattggtgtcaacaaatggaactgagatccaaacaaattgtcattggtaattaaaatatcatgtatgtaccatgacattgaaaatacggatgcttactactactaacactacgacactagtggcttaaactttat

SEQ ID NO: 35848 - DNA, 373 bp, Glycine max
  Clone ID: LIB3054-004-Q1-N1-E12
gcctctactatactgcttcaccttctgctctagaaaatgcagtgctgaaacatggcttcggctactctctctgtagccaaaccagcccttcaggcaaatgggaaaggcttctctgaattctctggcctccgaagctcatcaggcttccttcccttttctagaaaatcttcagaggatttccattctgtcattgccttccagacctatgcagttggaagcagtggaggatacaagaagggtgtgacagaagcaaaactgaaggttgccataaacgggtttggaaggattggaaggaacttcttgaggtgctggcacggtcgcaaagactcccctcttgatgtcattgccatcaacgacaccggcggcgtgaaac

SEQ ID NO: 35849 - DNA, 357 bp, Glycine max
  Clone ID: LIB3054-007-Q1-N1-A7
gaaagttaatgttctcttgcttggtggaggaatgatctttaccttttacaaggctcagggttattcagttgggtcatctcttgtggaggaagacaagcttagccttgcaactacacttcttgaaaaggccaaggctaaaggggtttctttgttgcttccaactgatgttgtcatagcagacaagtttgctgctgatgctaacagcaagactgtgccggcatcaagcatcccagatgggtggatggggttggatattggtcctgattccatcaagacatttggtgaagcattggatacgactcagaccattatttggaatggaccaatgggtgtttttgagtttgataagtttgccac

SEQ ID NO: 35850 - DNA, 298 bp, Glycine max
  Clone ID: LIB3054-006-Q1-N1-E5
atttattagttctcatccattaatttccattgaagtccgagtacagaaaccaaaaatacaggatgatgaaatctcaaaaagcaaaaacaaatgggaatgtagtttaagtacaaacaaacaaagtggtgtggcggctacaaatgctttgcaaaatatttacacttataatcttgtttgtttttatgcttttaatctatattatttatattttttttatttttttttttttttttatttatattattttttttttattttattttttaattttttattattttttatttttattttattt

SEQ ID NO: 35851 - DNA, 382 bp, Glycine max
  unsure (1)..(382): unsure at all n locations
  Clone ID: LIB3054-001-Q1-B1-A6
caagttgagaactaagaaggagaagcaaatggcttcctcaatgatctcctccccaactgttaccactgtcaaccgtgccggtgccggcatggttgctccaatcactggcctcaagtccatggctggcttccccaacaagaagaccaacaatgacattacctccattgctaacaacggtggaagagtgcaatgcatgcaggtgtggccaccagttggcaagaagaagtttgagactctttcctacctgccagaccttgatgatgcacaattggcaaaggaagtagaataccttcttaggaanggatggattccttgcttggaattcgagttggagcacggtttcgtgtaccgtgagcacaacaggtcaccaggatactacgat

SEQ ID NO: 35852 - DNA, 346 bp, Glycine max
  Clone ID: LIB3054-003-Q1-N1-G2
caagtagttgagaactaagaaggagaagctaatggctttggcaatgatctcttccccagctgttaccactgtcaaccgtgccggtgccggcatggttgctccattcactggccttaagtccatggctggcttccccaccaggaagaccaacaatgacattacctgcattgctagcaacggtggaagagtgcaatgcatgcacgtgtggccaccatttggcaagaagaagtttgagactctttcctacctgccagaccttgatgatgcacaattggcataggaagtagaataccttcttacgaagggatggattccttgcttggaattccagttggagcacggttta

SEQ ID NO: 35853 - DNA, 341 bp, Glycine max
  Clone ID: LIB3054-011-Q1-N1-C4
gcagaaaaacaagtagttgagaactaagaagaaggaaatggcttcctcaatgatctcctccccagctgttaccaccgtcaaccgtgccggtgccggcatggttgctccattcaccggcctcaaatccatggctggcttccccacgaggaagaccaacaatgacattacctccattgctagcaacggtggaagagtacaatgcatgcaggtgtggccaccaattggcaagaagaagttcgagactctttcctacttgccagacctcgatgatgcccaattggcaaaggaagtcgaataccttctaaggaaaggatggattccttgcttggaattcgagtttg

SEQ ID NO: 35854 - DNA, 295 bp, Glycine max
  Clone ID: LIB3054-001-Q1-B1-C9
aagcagaaaaaacaagtatttgaaaactaagaatgagaagcaaatggcttcctcaatgatctcttccccagctgttaccactgtcaaccgtgccggtgccagcatggttgctccattcactggactcaagtccatggctgggttccccaccagaaagaccaacaatgacattacctccattgctagcaacggtggaagagtgcaatgcatgcaggtgtggccatcagttggcaagaagagatttgagactctttccgacctgccaggccttgatgatgcacaactggcagaagaa

SEQ ID NO: 35855 - DNA, 354 bp, Glycine max
  Clone ID: LIB3054-011-Q1-N1-A1
aaggaagtcgaataccttctaaggaaaggatggattccttgcttggaattcgagttggagcacggtttcgtgtaccgtgagcacaacaggtcacctggatactatgatggacgctactggaccatgtggaagctgcctatgtttggctgcactgatgcttctcaggtgttgaaggagcttcaagaggctaagactgcataccccaatggcttcatccgtatcattggatttgacaacgttcgccaagtgcagtgcatcagcttcatcgcctacaagcccccaggcttctaagtcattgaaaaatttgcaaagcatctgtagccaccccactttgtttgttgtacttaaactaca

SEQ ID NO: 35856 - DNA, 335 bp, Glycine max
  Clone ID: LIB3054-011-Q1-N1-G1
aagtagttgtagaactaagaaggagaagcaaatggcttcctcaatgatctcttccccagctgttaccactgtcaaccgtgccggtgccggcatggttgctccattcactggcctcaagtccatggctggcttccccaccagaaagaccaacaatgacattacctccattgctagcaacggtggaagagtgcaatgcatgcaggtgtggccaccagttggcaagaagaagtttgagactctttcctacctgccagaccttgatgatgcacaattggcaaaggaagtagaataccttcttaggaagggatggattccttgcttggaattcgagttgg

SEQ ID NO: 35857 - DNA, 387 bp, Glycine max
  Clone ID: LIB3054-006-Q1-N1-F11
gcagaaaaacaagtagttgagaactaagaagaaggaaatggcttcctcaatgatctcctccccagctgttaccaccgtcaaccgtgccggtgccggcatggttgctccattcaccggcctcaaatccatggctggcttccccacgaggaagaccaacaatgacattacctccattgctagcaacggtggaagagtacaatgcatgcaggtgtggccaccaattggcaagaagaagttcgagactctttcctacttgccagacctcgatgatgcccaattggcaaaggaagtcgaataccttctaaggaaaggatggattccttgcttggaattcgagttggagcacggtttcgtgtaccgtgagcacaacaggtcacctggatacta

SEQ ID NO: 35858 - DNA, 396 bp, Glycine max
  Clone ID: LIB3054-003-Q1-N1-G12
taagaaggagaagcaaatggcttcctcaatgatctgttccgcagctgttaccactgtcaaccgtgccggtgccggcatggttgctccattcactggcctcaagtccatggctggcttccccaccagaaagaccaacaatgacattacctccattgctagcaacggtggaagagtgcaatgcatgcaggtgtggccaccagttggcaagaagaagtttgagactctttcctacctgccagaccttgatgatgcacaattggcaaaggaagtagaataccttcttaggaagggatggattccttgcttggaattcgagttggagcacggtttcgtgtaccgtgagcacaacaggtcaccaggatactacgatggacgctactggaccatgtggaagct

SEQ ID NO: 35859 - DNA, 388 bp, Glycine max
  Clone ID: LIB3054-001-Q1-B1-E6
ttgagaactaagaaggagaagcaaatggcttcctcaatgatctcttccccagctgttaccactgtcaaccgtgccggtgccggcatggttgctccattcactggcctcaagtccatggctggcttccccaccaggaagaccaacaatgacattacctccattgctagcaacggtggaagagtgcactgcatgcaggtgtggccaccagttggcaagaagaagtttgagactctttcctacctgccagaccttgatgatgcacaattggcaaaggaagtagaataccttcttaggaagggatggattccttgcttggaattcgagttggagcacggtttcgtgtaccgtgagcacaacaggtcaccaggatactacgatggacgctact

SEQ ID NO: 35860 - DNA, 404 bp, Glycine max
  Clone ID: LIB3054-010-Q1-N1-D11
attcggcagaaaaggggcttctgggttttcatcatcatccactgcagagcaagtcactgaaggaattgatggaactggtttcactgccattgtcacaggggcatccagtggtattggcactgagactacgcgtgttcttgctttgcgtggtgtccatgtgattatgggtgtgagaaatatgcttgctgctaaagatgtcaaagaaacaatactcaaggagattccctccgctaaagttgatgccatggagttagatctcagttcgatgaagtctgtcaggaaatttgcatcagagtttaagtcctctggtcttccattgaacatcttaataaacaatgcaggaattatggcttgccctttcagtctctctaaagacaaaattgaactacagtttgccacaaatc

SEQ ID NO: 35861 - DNA, 399 bp, Glycine max
  Clone ID: LIB3054-010-Q1-N1-D12
attctgcagattaggggcttctgggttttcatgatcatcggctgcagagcaagtcactgaaggaattgatggaactggtttcactgccattgtcacaggggcatccagtggtattggcactgagactacgcgtgttcttgctttgcgtggtgtccatgtgattatgggtgtgagaaatatgcttgctgctaaagatgtcaaagaaacaatactcaaggagattccctccgctaaagttgatgccatggagttagatctcagttcgatgaagtctgtcaggaaatttgcatcagagtttaagtcctctggtcttccattgaacatcttactaaacaatgcaggaattatggcttgccctttcagtctctctaaagacaaaattgaactacagtttgccac

SEQ ID NO: 35862 - DNA, 410 bp, Glycine max
  Clone ID: LIB3054-010-Q1-N1-D2
ctcgagccgaatcggctcgagatcaattcccgtaaattatagattctttgacgctgctcggaactctctatcatcacccaactccgcgatcttcaaatggaaaagaaaggccaattataaccgtcatagttctggaatggggaccttcaccactcgcgcgttggcgcagccgcttcagaacgccgacgaactcatcgactccgtcgagacatttatcttcgattgtgacggagttatatggaaaggtgataaattaatagacggagtgcctgaaacgcttgacatgcttcggtcaaagggcaaaagattagtttttgtcaccaataactcaacaaagtctaggaagcaatatggaaagaagtttgaaacacttggcctgaatgtcagcgaggaggagattttcgcatcat

SEQ ID NO: 35863 - DNA, 410 bp, Glycine max
  Clone ID: LIB3054-010-Q1-N1-D3
ctcgagccgtatcggctcgagatcaattcccgtaaattatggattcgttgacgctgctcggaactctctatcatcacccaactccgcgatcttcaaatggaaaagaaaggccaattataaccgtcatagttctggaatggggaccttcaccactcgcgcgttggcgcagccgcttcagaacgccgacgaactcatcgactccgtcgagacatttatcttcgattgtgacggagttatatggaaaggtgataaattaatagacggagtgcctgaaacgcttgacatgcttcggtcaaagggcaaaagattagtttttgtcaccaataactcaacaaagtctaggaagcaatatggaaagaagtttgaaacacttggcctgaatgtcagcgaggaggagattttcgcatcat

SEQ ID NO: 35864 - DNA, 411 bp, Glycine max
  unsure (1)..(411): unsure at all n locations
  Clone ID: LIB3054-010-Q1-N1-D4
ttcaaagaataatgatgaagtagatggaaaaccgggtgcagcagcactctttgtgaaggtcagcatggatggtgctccctatctgaggaaggtagatctaagaaattatacaatgtaccaggaactgtcttctgcccttgagaaaatgttcagctgtttcactctaggtcaatgtggttcccatggagctccaggaagagaaatgttgagtgagagcaagctgaaggacctcctgcatggttcagaatatgtactcacttatgaagataaagatggtgactggatgcttgtcggagatgtaccatgggatatgttcattgacacatgcanaagactgaaaatcatgaagggttctgatgccattggcttagctcccagggccatggaaaaatccaggagcaggtgctagtt

SEQ ID NO: 35865 - DNA, 214 bp, Glycine max
  Clone ID: LIB3054-010-Q1-N1-D8
gaagtgaagcttgtgtgcttcctgtcatcaaggttgacaagggcacagtcgagcttgctggaactaatggagaatccaccattcaggtactagatggcctatgtcagcgttgtgtcatgttctacatagctggtgcacgtgttgccaaatggtgtgctgagcttaagattgatcataacaagccatctcatctggttatacatctgaactccta

SEQ ID NO: 35866 - DNA, 401 bp, Glycine max
  Clone ID: LIB3054-010-Q1-N1-D9
cctaaaacatggaactccgtttaaggaaaggaaaacagcgtacgaggaagagagagatagaaaacggcatgcagtggtgggcttcatggcggaggtgttatattggatctcaacgtttgttctcattttgactcttctttgtattctcggttaccagcttatattattggtggacctggagtttgattatatcaacccatatgattccacgtctcagataaaccaggttgtcttgccagagtttatcatccatggaatcttctgcttcaccaatcttatagccgggcattggtttatattcttgatatctctccctttcctgtattacaatctgcgattgtacattaaaagagagcacttagcagatgttactgaaatctacaataagctaaattgggaga

SEQ ID NO: 35867 - DNA, 414 bp, Glycine max
  Clone ID: LIB3054-010-Q1-N1-E1
ggactttggttcttaaaagacgctatatttgaagaaggggatgcggaagaattggctgaagttgaagctaaattggataaagattggaaggctagcaatggagctacaaaaaatagcaataaggatgatgatgccacaaaaaagcataaacggtcatttttatctcagtttttttctcctatctttttacaggcattttctatcaccttttttggtgaatggggtgacaagagccagttggctaccataggtttggctgcagatgagaacccatttggtgtggttcttggagggattctgggacaagcattgtgcactgctgctgctgttgttggaagaaagagtttagcttctcagatatctgaaaaaattgttgcactctcaggtggaattcttttcattggttttggaatt

SEQ ID NO: 35868 - DNA, 315 bp, Glycine max
  Clone ID: LIB3054-010-Q1-N1-E12
acaccccgagattccaagattcaaagaacaactgcactgattggacctaggccatcttccattgacatctaggccctctactctcatctcctaccgaactaaaccaataaccgactaatcgaccaatcgtataccctacttctgcctctctcacgaattaaaccctcaacataaatcaatcacccaactcgccctgacaaacttacctcaaatacactgctcctgcactcaatggatcactcactctctggccacctgaggacccatacaactagcggtattaccttaaacccaagctttgaaacggacattcac

SEQ ID NO: 35869 - DNA, 406 bp, Glycine max
  Clone ID: LIB3054-010-Q1-N1-E2
acttaacaacagcacaaagcgggttactgtctgttcaagctaccatctctctctctctttcttagtgcctccttgccagaagttaaaatggcccaagaaactttcctattcacatctgaatcagtgaacgaggggcaccctgacaagctctgtgaccagatctccgatgctgtgctcgatgcatgcttggagcaggaccctgacagcaaggttgcctgtgaaacctgcaccaagaccaacatggtgatggttttcggagagatcacaaccaaggccaacgtggactatgagaagattgtgcgtgacacatgcaggaacattggttttgtctctgatgatgttggtcttgatgctgacaactgcaaggtcctcgtcaacattgagcaacagagtcctgatattgctc

SEQ ID NO: 35870 - DNA, 408 bp, Glycine max
  Clone ID: LIB3054-010-Q1-N1-E3
caaaagccttctcctccttctctggttcaaccttcccacagacactgcatgcgtctttgaccacaactgcttcttcaatttccaatctttttggacaccctctattgctcttcctcccttggtgtagtttgtgtaaaagggtatctctatttatagagtttccattgtctctggaggcaattttcgaccttaggtgtgttttggagagtttttttttttttttttgtgttgtttagttgttgaggttggttggtttgtgagagagagaatggtgggtgctctatctgttgtgggatcatcagtaatggactctcacactggcccttgtttgtgtgtggatgctctcccaacaacaactagtgtcaatctcaagagtggtggagatgttgttttgtgcaagaatttgat

SEQ ID NO: 35871 - DNA, 409 bp, Glycine max
  Clone ID: LIB3054-010-Q1-N1-F5
aagaagcaaatcaagaagtacctgcttggctctcacggtttgctgctcgatcttcttttggtggaggcaggaaccgccgatcaggcggtcgatttggtggtcgtgacttccgaagagatggctctttcagtagaggttcttcagattactacagtgcaggaaacggcagtggtggtggatatggaggctcgggtgggtatgctggtggagggtatggtcctggggtcacgagtgcttgggattgactttcttcttttcatagcattacataccatcttaagtataggtgtggatgcgcctacaggatgatttttcttcccccagtgtttttatgatcttcaatttacttgtgtttcaagccatcatcattttgtactattttacagtgctaatcattgtggggaaatgg

SEQ ID NO: 35872 - DNA, 305 bp, Glycine max
  Clone ID: LIB3054-010-Q1-N1-F7
acctatcgcttatagacaagaaataatgactctcagatggggatatatgaactggtattagtgggataccttatctagcctatcttcaatccaaatgaaatgcgatcgccattacttgatgaattccaattccaaataattaagacataatccggcacagcagacgatctatctattgctataatgagtcttattataactctcattaataatccacataactggagactggattaccttggtttcagcttacactacatctcgacgtactaaccatacgcatattgtgataagcctatcgtact

SEQ ID NO: 35873 - DNA, 202 bp, Glycine max
  Clone ID: LIB3054-010-Q1-N1-F9
acttactggaagccttgttgtgagtaagagaaaaggcttgctgcaccgagcacaccaacttgatacctctgattctttctttgcttagaattccacagaatatggagactgttcttttcaatcactcccaacctttggaatcaaagggtttgagcagggaggaggaagactaatggttgggccaggtggaattttgaaggtc

SEQ ID NO: 35874 - DNA, 388 bp, Glycine max
  Clone ID: LIB3054-010-Q1-N1-G1
gattcccttcgtttaaagatacaattaagatgatgcacacaacacaaacggacaggttacatttggagggtggtcggtcacaacaatgtcctattctacactaacaatgctctaaaattattaacaaattcaacaaatccgtagtgctttaaaaataattgctgaattgtgtcaccgtttaaatcacataatattgtgctgtgcttgaaccttaatgtcctgtattgtatgtattcgcttttatctgcctttatgactctttcatctgaaagtactatgtaataactgctcacctgagtactgttgatcatgtttatcagtatgatgtatcataatgctttacttgactcttagaaataataaattcatttatctgtttatccttttt

SEQ ID NO: 35875 - DNA, 339 bp, Glycine max
  Clone ID: LIB3054-010-Q1-N1-G11
gaatccttgatctgtgaaaagccttataggcattagaaataacattactaccaagttaaatccatttaattcgctaggttatatgtaattcctttgaacctcattaatactacttcggcttaaatagttgaaatgattaatgttcaatattaaattccaactcccgatcattgacatcgaatggttgacatgtgaaacgagcttcggaaaactgcttaaaccaacccaacacttcagagaggacagtgttattggaaagggaggcactggcacaatgcacagggcaactcttcaaaacgcgcgtttctcgctcacagttaaaactctataagactgaga

SEQ ID NO: 35876 - DNA, 374 bp, Glycine max
  Clone ID: LIB3054-010-Q1-N1-G12
gtttactatttctgtgaaaaaccttataggcaggagaaatgtcaataatacatggttctaggcatattattctctagcatatatataattacattgaaactcattaatactactatctcttaaattcaatatattattaattatgtataatcaattacaactacctatcaatgacattatatggttgacatgtaaaacgagcttaacaaaactctataaaccaacccaacacttcagacaagacagtatcattggtcagcgaaggactaggacaatgtacaaagcaacacttccaaacagttgattcttgctcacagttaagaaactttatgattgttagataagtatcacaagttcaaatttagaactaatga

SEQ ID NO: 35877 - DNA, 395 bp, Glycine max
  unsure (1)..(395): unsure at all n locations
  Clone ID: LIB3054-010-Q1-N1-G2
agcaccacattcacctgaggcttccaaagcaatggcttcccttgcagcatccactgctgctgcttcccttggcatgtcagaaatgcttggaaaccccatcaacttcagtggtgccacaaggccagctccatctgcttctagtcctgcctncttcaagactgtggctcttttctccaaaaagaaggctacaccaacacctncaaaaaaagctgctgctgctgctcctgccaatgatgagcttgccaagtggtatggtcctgacagaaagatcttcttgcctgagggtctcttggaccgatccgaaatcccagagtacttgaccggagaagtccctggagactatggttatgacccatttggtcttagcaagaagccagaagactttgccaaatatc

SEQ ID NO: 35878 - DNA, 410 bp, Glycine max
  Clone ID: LIB3054-010-Q1-N1-G3
gataaatctgggccttccaaggttggtgatatggtacatgtctcttccctcgggaaacaggtgactgttttaaaagtggattcatccaaaggagaaattgtagttcaagctggaaacatgaagttgaagctgaaactaactgacattcaaagatcatagaagcgggggaatcatggccatggttagaaatgtgaaaaatgtgcattgaaactgctatcatatgataatgacgtaagataaagcaaaggtggggggcactttcagcttcagaaactaaagttcctagatttctccggatgtgtcaagaactacagttttgcaatgtcatcagcaatacaaatagttggcgtgctagttgtgcaagaataaattaaaactgccaaaaaaaaaaagaagaaaacaagccattc

SEQ ID NO: 35879 - DNA, 397 bp, Glycine max
  unsure (1)..(397): unsure at all n locations
  Clone ID: LIB3054-010-Q1-N1-G4
cgagggttattggacacattcttcagcgactgcgtttttggatcggaacctcttctgcggcgtagcaatgggacactccaaacgttggaactctcacccaaaaaactacggtcctggttctcgcacttgccgtgtgtgtggggaatccacatggactgatcaggaagtatggccttatgtgctgcagcagtgcttncgtagcaatgccaaggaaattggcttcatcaagtatcgctaaaagagcagttgtcaactacggaccaatattgtgttctggcactaagatgttttgaagatgttatgtttgaagaaacttgagactttcttttttcatctaattaattatcagacgtaatttgtggtactaagaatacttttatataaattgttttgaacc

SEQ ID NO: 35880 - DNA, 407 bp, Glycine max
  unsure (1)..(407): unsure at all n locations
  Clone ID: LIB3054-010-Q1-N1-H1
gaatcccaacgctccgatgttcgtgccactcgcctatcggacggtggaggatttctccgaccagtggtggaacctcgttcactccttcccctggttccacgactactggctccgcgagtgcttccaagatccccagttccaaaacgacgacgctttcgacttcgactttgacctagatctccaagatgaagatgaaaaggaacgaaaggaagggaaggaggtggtgtcgttgggggtgctgaaatggcgaagctgtggaggaggatgggcccaggcgccgaggtatgtggaaaaggcccncaagtttgtgaagccccaagtgagcccacgggctattcaccagcccaggtagacgcaacccggcccattccccaccagctatagctgtgtacataagcgcaaatgac

SEQ ID NO: 35881 - DNA, 383 bp, Glycine max
  Clone ID: LIB3054-010-Q1-N1-H10
gtcagtttctgccatgctttcagtacccaattgctttgtgcggcctagggaggcacaaaaagctgcggatgaagctaaagctaggttcgggcacattgatggagatcatctcactctgttgaatgtctatcatgcgtacaagcaaaataatgaggatccctcttggtgctacgataactttgttaatcatagggcattgaaatcagctgataatgttagacaacaattagtgcgtatcatgtcccggtttaatctgaagctatgcagcactgactttaatagccgtgactactatgtcaacataggaaaagctatgctagctgggtattacatgcaggtagctcatctggagcgtacaggactctacttgacagtgaaagaca

SEQ ID NO: 35882 - DNA, 400 bp, Glycine max
  Clone ID: LIB3054-010-Q1-N1-H11
gagaagaaaatagtcgttcgagatggcccgtacgaagcaaactgctcgtaagtccacaggaggaaaggctcctaggaagcagcttgcaaccaaggctgcacgtaagtctgcaccaactactggtggtgtgaagaagccacatcgttaccgtcctggtaccgttgctcttcgtgagattaggaaataccagaagagtaccgagcttttgatcaggaagctccccttccagaggctggttcgtgaaattgctcaggacttcaagactgatctgcgtttccagagccacgccgtgcttgcattgcaagaagctgctgaggcataccttgttgggctctttgaggacactaacctgtgtgccattcacgctaagcgggtaaccattatgcccaaggatatccag

SEQ ID NO: 35883 - DNA, 394 bp, Glycine max
  Clone ID: LIB3054-010-Q1-N1-H12
gaagagtttaaggttaatttaaggtgaaggtcctgtggtttgagtagccaaagggccaaccttaccttagttatggatgttgaggcagagattgatcgcttgccaattgatttgttggctcatatttttgttctgttcacttccttcactgatttggcacaggcgagtggtgtttgcaagaaatggaaacaaggggtgaaggagtctcttgctcggagacacaatctcagctttgccggttggaagatggatgatgactccactgctcgccttgtttatcatgcctacaacctcactaaactagatataccgaggagccgctggggttgccaaataactgatgctggacttctcagaatatctttcgctaagtgtataagcaatctcacatcca

SEQ ID NO: 35884 - DNA, 342 bp, Glycine max
  Clone ID: LIB3054-010-Q1-N1-H2
taggtcgaggtttatcactataggtaggatcatcatgaagcgggcatgggtatatatgaatcggggctatggctatccttattaagtctatcctgaagccaaacgacatcagatctgaattcctcgtcgaataccaattccacataattatcaaatattgacacttactatgttaacatatcaactttaattattacattacttattaggcctatcctgaatccaaatgaaattatatcatattccctaaattaattccatatacacattttcatcaccatactcctcaaattcatacatatctccaatgtttatatatccactcttattatccacttcttt

SEQ ID NO: 35885 - DNA, 423 bp, Glycine max
  Clone ID: LIB3054-010-Q1-N1-H4
ttcagccaagaggaacctttacccctaggaccagcaccacctatcttaacttgaaagggccttttaagggttggcttctggggccttaaaacttgcccttttaactgttgaaaagtcctcagtgagaggccttccctctttttcaaggaactcttcttcattcagagttgtggccagtggcaagaagatcaagactgacaaaccttatggaattaatggtggcatggctttgagggatggaactgatgcatctggcaggaaaggaaagggaaagggtgtttaccagtttgtagacaaatacggtgctaatgtcgatggttacagtcctatctacgacaccaaggactggtctccaaccggtgatgtctacgctggcggtacgactggcttggctatctgggctgtgactctacttggtctttt

SEQ ID NO: 35886 - DNA, 408 bp, Glycine max
  Clone ID: LIB3054-010-Q1-N1-H5
gataactagaaacagtgtgatgaaaatgaaggtccttgttttcttcgttgctacaattttggtagcatggcaatgccatgcgtacgatatgttccctctccgaatgaacactggctatggtgcccgtactccggaggtgaaatgcgcaagttggaggcttgctgtggaagcacacaacatctttggctttgagaccattcctgaagagtgcgttgaagcaacaaaggaatacatccatggcgaacaatatagatcagactccaaaacagttaaccaacaagcttacttttatgccagagacctcgaagtccatcccaaggacacatttgtgttcagtatagatggcaccgtactctctaatattccatactacaaaaaacatggatatggggtggagaaatttaactc

SEQ ID NO: 35887 - DNA, 401 bp, Glycine max
  Clone ID: LIB3054-010-Q1-N1-H6
gtgaagcagcagagggaggagcggcattaaaaatgcagatgttcgtgaaaaccctaacggggaagaccataaccctcgaggtcgaaagctgcgacaccattgacagtgtcatggctatgattcaagacatggaaggcatccctgcggatcagcagcgtttgattgtcgccggaaagcaacttgaagattgaaggaccttggccgattacaacatccagaaggaatcagccttttaccttgtcctaaggcttcgaggtggcatcatcgagccttacctcatggcttaggctcgtaaatacaaccaggacaagaagatttgccgcacatgctatgctcgtctgcaccctacggctgtgaactgacttaagacgacgtgcggtcttagtatccagttgaggcct

SEQ ID NO: 35888 - DNA, 302 bp, Glycine max
  Clone ID: LIB3054-010-Q1-N1-H7
gctttttagtttcagttagatcagcatgaatgttggtatgggaatctgtgacaactagttggcatattataactatcctgcatccaatctaaatcatatccgaattactactggctttccaactccacattctcaagaaatatgcacacataaatgtccatatatgaattcacactatatgttttcttattaagacctatcctgaagacaacggaaatgagatcggaatacctatccatatcccacttcctcattcacactacataacgattcaccaacgttcatatatgaattccaattac

SEQ ID NO: 35889 - DNA, 393 bp, Glycine max
  Clone ID: LIB3054-011-Q1-N1-A10
aagcaatgtctcacagaatgcatgtagacaacagtgtaaaactgattgggaagcttttatttggcattgaaaagggtccagaagtactcaacgctgttagaccggctggatcggcacttgttgatgactggcactgcctgaaaaccatggtgaggacttttgagacacattgtggatccttgtctcaatacgggatgaaacacatgaggtcctttgcaaacatctgcaatgtacggataaagaatgaacaaatggctgaggcttcagcacaagcttgtgtcagtattccttccaatccctggagttctctgcaaaggggtttcagtgcataataactccctgtaatgtgcactagtaaagaccaaagtatgattattgctacattatgttaca

SEQ ID NO: 35890 - DNA, 393 bp, Glycine max
  Clone ID: LIB3054-011-Q1-N1-A11
aagctttgttttacagaatgcatgtagacaacaggggtagactcattgggaagcttttatttggcattgaaaagggtccagaagtactcaacgctgatagaccggatggatcggcacttgttgatgactggcactgtctgaaaaccatgccgaggacttttgagacacattgtggatcctagtctcaatacgggatgaaacacatgacgcactttgcacacatctgcaatggacggataaacagtgaacaaatggctgatgcttcagcacaggcttgtgctactattccttacaataatggagttctctgcaaaggggacacagcgcatagtaactacctgcaatgcgcactagtaaagaccagagtatgactattgctacatgatggcacat

SEQ ID NO: 35891 - DNA, 405 bp, Glycine max
  unsure (1)..(405): unsure at all n locations
  Clone ID: LIB3054-011-Q1-N1-A12
caaccaaaccctaacacacacccatttgattcagtttccatggctagcctcaaggttgcatttttggctgcagtgctctgcatggttgtggtgagtgcacccatggcacatgcagctatcacgtgcgggcaggtgacgagtagcctggccaattgcatcggttacctccagaagggaggaacgccgtcgtcgggatgctgcaacggagtgaagagcctcaatgccgccgccaagaccaccgccgaccgccagacggcgtgcaactgcctcaagtcggccgccagccaaatctccggcttcaacgccaacaacgccgcctcgctccccggcaaatgcggagtctccatcccctacaagatcagcacctncaccaactgcgctaccatcaaggtttgaagagaaagt

SEQ ID NO: 35892 - DNA, 322 bp, Glycine max
  Clone ID: LIB3054-011-Q1-N1-A2
tggcaaaatgccagaatatgaacatatatttacagacttcctgttgagcttggggcaggggaagtacaagaaaaaataggctaaaataactgtttccagcccttttatttatgtcccccacatgacgtaagcccccttgcctctcagtttgaagctcaaaactatggctgtaggaaagtatcttagaaagcattagtgataataactttttcagttatgctgtgtgatggaagtgccatggaaaactatcaagacttgtgtttcaggaacttcgacctgtacagaacaactgctagtattttattgtgcgggaactttcggc

SEQ ID NO: 35893 - DNA, 308 bp, Glycine max
  Clone ID: LIB3054-011-Q1-N1-A4
cggttttattccagaatatgaacatatatttacagggtagctgaatagcaaggagcaggcgaagtacaagacctatcctgctaacctaactgtatgaaatcctaatacctatgtgcattacattaccacatcccccttacctatcaatgcgaagctgatcacttttgctgtgggattgtatgttatattacattacctatcctaactccatcagatatgctatctgatgtaatcgccatagaacactatcacgacttgagtatcaagagcttcgaccttgtcaatacatctgctggaattatattgtt

SEQ ID NO: 35894 - DNA, 89 bp, Glycine max
  Clone ID: LIB3054-011-Q1-N1-A5
attcagctcgagcacttctcttctgcccatgaaaagaacttgaatggtattgaacctatgagtacgattgctaaccgtgcagctggatc

SEQ ID NO: 35895 - DNA, 364 bp, Glycine max
  unsure (1)..(364): unsure at all n locations
  Clone ID: LIB3054-011-Q1-N1-A6
cccctggtggaatcccatttcaaaattttcaggaattaaggaggcaaaaaggtgcttatatgaattggaataatttgttttcttattaggcctatcctgaagccaaaggaaatgagatcggaattcctcggagaattccaattccacattttcaagaaataaggaggcaaaaatgttcatatatgaattggaattatttgttttcttattaggcctatcctgaagccaaaggaaatgagatcggaattcctcggggaattccaattccacattttcaagaaataaggaggcaaaaatgttcatatatgaattggaattatttgntttcttattaggcctatcctgaagccaaaggaaatgagat

SEQ ID NO: 35896 - DNA, 323 bp, Glycine max
  Clone ID: LIB3054-011-Q1-N1-A7
cgcttaaattcccgaagatgaacatatgtctacagagttgctgatgagctaggtgcatgcgaagtacaggagaaaacacgctatgggatctgactccagaccttgtatctatgtacgactgatgacgtatgccaccttgcctctaagaccgtagatcaaaactatggctgctggaaagtatcttagagcgcattagtgatagtaacttttgcattcatgctgtgcgacggaagcgccatggagaactataacgacttgagctctaagaacttcgagctgctcagaccagatgatagtaatgcactgctccagaactttaagac

SEQ ID NO: 35897 - DNA, 302 bp, Glycine max
  Clone ID: LIB3054-011-Q1-N1-A8
tgagcaggatgtgtcgctgggagcgaacaagttcccggagagacagccgattgggacggcggcgcagagccaagacgacggcaaggactaccaggagccggcgccggcgccactggttgacccgacggagtttacgtcatggtccttttacagagcagggatagcagagtttgtggccacttttctgtttctatacatcactgtcttaaccgtcatgggagtcgccggggcttagtctaagtgcagtaccgttgggattcaaggaatcgcttgggccttcggtggcatgatctttgccctcg

SEQ ID NO: 35898 - DNA, 395 bp, Glycine max
  Clone ID: LIB3054-011-Q1-N1-A9
gtcagcaggtatcataggtctagccaacgacaaactctccatgcttggtcaattgtccaacaaatatggcaatgccttctcctattgtctcccctcatctttttcagcacaaccaaactcttctgtatcaggtttcttgtccattggagcctcatcattgtcatcatcaccatacaagttcactcccttggtcaagaatccaaagattccaagcttgtactttcttggtttgacaactatcactgtggcaggaaagccactaggagtttctgcctcaagctacaatgttcctaccataattgactctggcacagtaatcacaaggcttcctgtggctatttacaatgcattgaaaaaatcttttgtgatgatcatgtccaaaaagtatgcacagg

SEQ ID NO: 35899 - DNA, 311 bp, Glycine max
  Clone ID: LIB3054-011-Q1-N1-B1
gtgaaagagaatccgaggcgaagagaagagaaaaattaagatggaggggaaggagcaggatgtgtcgctgggagcgaacaagttcccggagagacagccgattgggacggcggcgcagagccaagacgacggcaaggactaccaggagccggcgccggcgccactggttgacccgacggagtttacgtcatggtccttttacagagcagggatagcagagtttgtggccacttttctgtttctatacatcactgtcttaaccgtcatgggagtcgccggggctaagtctaagtgcagtaccgttgggattc

SEQ ID NO: 35900 - DNA, 400 bp, Glycine max
  unsure (1)..(400): unsure at all n locations
  Clone ID: LIB3054-011-Q1-N1-B10
cgagttacagccgcaccttgattcagagcagagcgaccttgaagagctatggctgtcggaaagaataagaggatttccaagggaaagaagggtggcaagaagaaagccgctgatccctttgccaagaaggactggtacgatatcaaggccccttccgtctttcaggtcaagaatgttggcaaaaccctcgtctctcgtacccagggaaccaagattgcttctgaaggactcaaacatagagtgtttgaggtctcattggctgatctccaaggagatgaagaccatgccttcaagaagattcgtttgagagctgangatgttcaagggaaaaatgttctgacaaacttttggggaatggatttcacaactgataagttgaggtccttggtgcggaaatggc

SEQ ID NO: 35901 - DNA, 404 bp, Glycine max
  unsure (1)..(404): unsure at all n locations
  Clone ID: LIB3054-011-Q1-N1-B12
ggaaaggggagaggattcccttgccgtgggagattctgcagccttcgctcagaatcctggggcactgtctattgggaccgttgaactctcaggatgtgaaggacgccgcttccttcgcggtgcggtgcttgtacgcccgcgcttcgcacgatttggtgccgcaggcgatactcgcgacgaggagtctcattcagcttgatgtgaggactcgagaggctgccaagacgaatgccgccactaactcgaacgccaacacccccaccaaggccaagaagccggagattcttctggtttccaagtgaggaggaggttgctgctgtgtactattactgtaggtcttcatactgtaaacacaatttctatttgtataatagaaacttcatagatgccattntttttttata

SEQ ID NO: 35902 - DNA, 324 bp, Glycine max
  Clone ID: LIB3054-011-Q1-N1-B2
cacgcctactctagctgatactctggctcaagcacatttcctcattttcaagaaatcccgacgcaaaggtgggcatatatgaactgcaattatctcttttcttattaggcctatcctcataccataggaaatgacatcggaattcctaggataatcccattcccacattctcatgatatccggatgcacaactgttcatatatgaattagaattatttgatttcttattacgcctatactgacacccaaggacatgataccgtaattcactagagaattccaattccacattttcaagaaataccgaagcaactcctgttcata

SEQ ID NO: 35903 - DNA, 264 bp, Glycine max
  Clone ID: LIB3054-011-Q1-N1-B3
caatcgacgccttttttgcgaataaggaggcaaattgggacgaggtgaatgagcatgatgtgtcgctgtaatcgaactattttgcagccagacggcctgttgtcacagttgctcagagcctagacgacggccatgactaccaggagccggcgccggcgcgactgtttgtcccttcggagtatacgtcatggtactttgactgtgctgggatcgcagagtttgtggtcactattctgttgtgtacatcaatgtctcaaccgtcat

SEQ ID NO: 35904 - DNA, 347 bp, Glycine max
  unsure (1)..(347): unsure at all n locations
  Clone ID: LIB3054-011-Q1-N1-B4
ggagagttggcaacaccggtgggatggccgcgattcagttgtctactgagcacaatgcgaattttgaggctgtcaggcaggagcttaaggaattgcacccgaatgacccccagattgttgtcctcaaacatggagtgtggagagtaaagggcattattcaggtttctagatctataggtgacgtatatatgaaacatgcgcagtttaaccgagaacccattaatgcaaaattcagactccccgaaccaatgaacatgcctttcttgtctgctaatccaactattctttctcatcctctccaaccaaatgattccttccttatanttgcatcagatggtttatgggag

SEQ ID NO: 35905 - DNA, 355 bp, Glycine max
  Clone ID: LIB3054-011-Q1-N1-B5
caccaaagtacttgtgagtgtatacccaacacaaactaagatcaacatggactactacacccgcgtttcagaagttgagagggaacctatcatggagtattccacaccacgaccaatgatgggcaactaccaccaccctaatgctcaccgtgtcctcaacgagaagattgtttatgaggaggatgtgattggaggatcccgccacaaccacatgcatcaccaccaccctgagactcatgagagagtcaaggtggtggagtatgaacaagttcctgagaggcgcgttgtctatgaagagaaagttgcttatgacaacgatcgttactactcttcaaggtattgaaattggacaaat

SEQ ID NO: 35906 - DNA, 111 bp, Glycine max
  Clone ID: LIB3054-011-Q1-N1-B6
ggggaggctaccccccaaacattcactcactccatttaattaatgtaatgcgattctttcgttttttaatttctatattgaatgtcatatattcaaagaattttgttactg

SEQ ID NO: 35907 - DNA, 204 bp, Glycine max
  Clone ID: LIB3054-011-Q1-N1-B7
ctcaagcacttttgctcatgttcaagaaatcccgacacaaagttgtgcctatatgaactgcaactatctcttttcatattacgcctatcctcactccataggatatgacatcccaatacctctgataatccccttctcaacaccctcaagctctcctgatgcacaactattcatatgtgaattagaattatttgatttcttaat

SEQ ID NO: 35908 - DNA, 272 bp, Glycine max
  Clone ID: LIB3054-011-Q1-N1-B8
aagcccatcagtattaatcctctttcggtgtcggtctagtctttataaggttacagaaataaatggtcgcaagctgaaagttgtactaaaatttattttttataaaaaaatcgaaggtagtattaaatatgttatatgtatgtattgtgcggaataaatgcagccacgtactatatataatggtacatacggtgtagggctgtacaagttgggcatcctatttcaatattaacgaccactaataaatattaccattggagttattacgtatt

SEQ ID NO: 35909 - DNA, 401 bp, Glycine max
  Clone ID: LIB3054-011-Q1-N1-B9
ctcaatatccgccattgaattcttcttccatttctcttttttctgcatacccatttcgtttttcttcccaaatggccctttcttgctccaaagttttaagcttttatctctcgcccgttgtgggtggtggtgatgttccgaaaaagctcactttttcttcttttttgggtctttctaagggtgttggtggaagcaggagctcgagggtgtgtgctgcttcaaatgcacccgcaccactcgctggggtcatatttgaaccatttcaagagctcaagaaggattatcttgctgttccgattgcacacaatgtttccttggctcgtcagaactatgcagatgactctgaatctgcaatcaacgagcagatcaatgtggaatacaacgtttcctatgtgtaccac

SEQ ID NO: 35910 - DNA, 360 bp, Glycine max
  Clone ID: LIB3054-011-Q1-N1-C1
ggcttgtgaatcagcaccacattcacctgagctttttgcgaggattccaaagcatggcttcccttgcagcatccactgctgctgcttcccttggcatgtcagaaatgcttggaaaccccatcaacctcagtggtgccacaaggccagctccatctgcctctagccctgcctccttcaagactgtggctcttttctccaaaaagaaggctgcacctccaaaaaaagctgcagctgctgctcctgccaatgatgagcttgccaagtggtatggtcctgacagaaggatcttcttgcctgtaggtctcttggaccgatctgagatcccagagtacttgaccggtgaagtccccggagactatt

SEQ ID NO: 35911 - DNA, 402 bp, Glycine max
  Clone ID: LIB3054-011-Q1-N1-C11
gtatgttcagttcttggtctcaagtttcatcttgggctgtagactgtagcaaacaccatgaccaccaaggttccaaaatccgtatacgactttgttgtcaaggatgctatgggagatgttgtagatctctccttttacaagggaaaagtccttctgattgtcaatgttgcttctcaatgatatccttaatctgtgctgtgtttgttacttcttcttttgttttccctgattgtgccttctaattaatttaaagccttgatattttcatcttttctattcttttcagtaactactctcaccgctaatgttataaatgttgagaaaatttacaatatgtttgggattgagacagcggcttgaccaactccaattatacggagctgaatcaattgtatgacaagt

SEQ ID NO: 35912 - DNA, 396 bp, Glycine max
  Clone ID: LIB3054-011-Q1-N1-C2
acccctaccatgagttacaaagcatggcgtagagaaccaaaggatggtcctccccaatatagaagcagcactatttttgaagatgctacccctgagatggtgagggacttgttttgggatgacgagttccgaccgagatgggatgacatgcttgcaagctcttcaatcattgaagagtgtcccactactggtactatgaaagtgcagtggatacggaagtttccctttttctgtaaagatagagaatacataattggtcggagaatatgggaatctggaaagcattactattgtgtgaccaagggagtaaattgtccttcaatgcctagaaaagattaacctagacgcgttgatgtgtactactctagttggtgcattagagcagtggaatcaaat

SEQ ID NO: 35913 - DNA, 394 bp, Glycine max
  Clone ID: LIB3054-011-Q1-N1-C3
aaagatggatattcatttctctaccctttcgggtggcaggaagtagtaattgaaggccatgataaggtgttcaaagatgtcattgatccactggagaacgtcagtgtaaatgtgataccaactggcaaacaggatattacagaattcgtgtcccctcaagaggttgctgaaactctaataaaaaaggttttggctcctacaaaccagaaaaccaagatagtagaagcaaaagagcaagatgttgaaggaataaagtactatcaatttgaattcattgctaaggcttcaaactatactcgtcatgctctcagcacagtcttcattggcaatggtaagttttacaccttaacaacaggtgcaaaccagagaagattggacaagatgaaagacaggc

SEQ ID NO: 35914 - DNA, 139 bp, Glycine max
  unsure (1)..(139): unsure at all n locations
  Clone ID: LIB3054-011-Q1-N1-C7
tcaactnttattgctgtggtctacctgttttcttactgaggaaggcttcatctctgcatagcgcacttttactcttaagggtcccattggtgctagttatcaccttctattatactactttgactgctgcaacaacaac

SEQ ID NO: 35915 - DNA, 347 bp, Glycine max
  Clone ID: LIB3054-011-Q1-N1-C8
cgctcacacctctaatctcttcacctacttgctcattagtcaaacacttttccctgcattccaatcattttcttttcctccatatataataataatccttcgcttttttttttttttctcttcttcttcgatcgcattgaaaccttgttcgttgtagctatgttcttctccacagcttcaacgaacaacgcttgatggtgaaaaaaccttcaatcgcctattaactgcaatgcaccactcatcatcaactcatccatggctttctccgctttacttcgcccttcctcttctccttctcactctcagttgttttgctctgttaggttcaataggaggcatcgtagtag

SEQ ID NO: 35916 - DNA, 389 bp, Glycine max
  Clone ID: LIB3054-011-Q1-N1-C9
gaggcttcttgctgaggtgtccctttctcaagagaggtttcaagaagtcaatgatcttgtttttgaagccattggctgtggtgaattggaggatgtcaatgttcaaagtgtcaaaaaagaagttgatgcagtcagcacaagcgaacaccctactgtggtggtggtggctggttcacaagaatgtgtggttctacagtaacaaggctcttgtattttgaacaaattcagaaaatctgcagtgttttaagaataattgctgaaatgtgtcaccgtttaagtcatactattgccttgtgcttgagccttatggtcgtgtgtgttgaatgtatatgcttttatctgcctttatgacactttcatgtgaaagtacgatataataactgctcaac

SEQ ID NO: 35917 - DNA, 372 bp, Glycine max
  Clone ID: LIB3054-011-Q1-N1-D12
gattatcctaagtctttgggaatagtgctgcaatggcttcaagtcaagaggaggtgacccttttgggagctactggaagcccatttgtgtgcaaggttcatattgccctcaagttgaagggagttcaatacaaatatgtcgaagaaaatttgaggaacaagagtgaactgcttctcaaatccaacccagttcacaagaaagttccagtgtttattcacaatgagaagcccatagcagagtctcttgtgattgttgaatacattgatgagacatggaagaacaaccccatcttgccttctgatccttaccaaagagccttggctcgtttctggtccaaattcattgatgataaggtttttggtgctgcatgga

SEQ ID NO: 35918 - DNA, 377 bp, Glycine max
  Clone ID: LIB3054-011-Q1-N1-D4
tctggtttgtgtggtgtacttggtcaagggtctgaaacagcacagtgtgtagcatttacccggattgatttcccacctttgccacgagtggttcacgtttcagcctcctttaaccatgccgctttcgttatgcaatctggagaggtattcacatgtggagataattcatcttcttgctgtgggcatagagatacaacccgaccaattttcaggccacgccttgttgaatccctgaagggaattccttgcaaacaagttgcagcggggcttaacttcacagtcttcctcaccagacaaggtcatgtttatacatgtggaaccaacacacatggccagcttggtcatggtgatactcatgacagggcaacccccaaaat

SEQ ID NO: 35919 - DNA, 367 bp, Glycine max
  Clone ID: LIB3054-011-Q1-N1-D5
cgctcacacctctaatctcttcacctacttgctcattagtgaaacgacttttccctccattccaatcattttcttttcctccatatataataataatccttcgcttttttttttttttctcttcttcttcgatcgcattgaaaccttgttcgttgtagctatgttcttctccacagcttcaacgaacaacgcttgatggtgaaaaaaccttcaatcgcctattaactgcaatgcaccactcatcatcaactcatccatggctttctccgctttacttcgcccttcctcttctccttctcactctcagttgttttgctctgttaggttcaataggaggcatcgtagtagtagccgggtaggtttcgcg

SEQ ID NO: 35920 - DNA, 337 bp, Glycine max
  Clone ID: LIB3054-011-Q1-N1-D6
agctcgagcgctcacacttgtattctcttcacctacttgctcattagggaacgctttttcctgcattccaatcattttcttttcctccatatataataataatccttcgctcttttttttttatctcttcttcttcgatcgcattgaaaccttgttcgttgtagctatgttcttctccacagcttcaacgaacaacgcttgatggtgaaaaaaccttcaatcgcctattaactgcaatgcaccactcatcatcaactcatccatggctttctccgctttacttcgcccttcctcttctccttctcactctcagttgattcgctctgataggttcaat

SEQ ID NO: 35921 - DNA, 367 bp, Glycine max
  Clone ID: LIB3054-011-Q1-N1-E11
cttctcataaccttcttctggatctctctggaagttattatggacacaagcaggtatgagggaaaaagggtcttgaggtacaaagaggaagatgaaaatgatgatgatgaagaagaagaagaggtgagtgaggtgggttttggagaagacagaagaaggaataagagagtaatgagagatctccatggaaagagatcagggtccaaaggtggaggctcaatgccaccttcttgtcaagtggataattgagatgctgatctgagtgaagctaagcagtaccacagaagacacaaggtttgtgagtaccatgccatagctccttccgtacacatggcagggctgcaacaaaggttttgccaacaatgta

SEQ ID NO: 35922 - DNA, 374 bp, Glycine max
  Clone ID: LIB3054-011-Q1-N1-E12
gggatctgataggagaggtgcggcgatggcttttgcagttgcgcccaagataataacggtgtcattcgataagcaaaaccaaaggaggagtttcgaaggattgtttgggaaaaggtatcgggtaagggtgaagcgaagtcaagatcattcagtgaagtgtggtattgagcgaagcagcatcgatggaaagaaagggggcagatgaggaggcgtgtcaaattcgaactacgtggtgccgctggacaacatggcgaactcatcctgcataacacgtcctttagccgagatactcagggacctcaataaaagaatcccggatactatcgtcaaacatgatcgcttcatcctctggtatcatgccaacaggatgctca

SEQ ID NO: 35923 - DNA, 308 bp, Glycine max
  Clone ID: LIB3054-011-Q1-N1-E4
ggtgtaccgtgttcaaggccgattattctactgcaagtgattaggtggccagagacagcatatataaactgccgttaattgatgcattaatactcctaaactgtggcctactgatcatacatcggattgccaaggatcattccaattacacattttccaggaagattgagccccgactgttcacatgctaatacgcattatctgtctactaattacgcctatactctagcccacagaagttcgatccgagatccaatcggaattacaatttgacacttgtcagacataacgagactgaaatgttcata

SEQ ID NO: 35924 - DNA, 397 bp, Glycine max
  Clone ID: LIB3054-011-Q1-N1-E5
gaatggccttattcaacaaggccggtttcaatcctggccggcccagccgtcaccaaccggttggcagtagcaacgcagaggagatcactcgtagtgaatgctgccaaagctgttgaagcggaaaaggtcagttatgacaatgacatggatggtagcaatggaaggaggaacttgatgttcgccgcggcggcggcggctgctgtttgctctgttgctgggatggcagtggcagatgagccaaaaccaggaaccccagcagccaagaaaaagtatgctccgatttgtgtcaccatgccaactgctaggatttgtcgcaattgagggactcggtttttattttacttctgatgatcggaaatgtgcattatggttgtagtaatgttttgatttcacatga

SEQ ID NO: 35925 - DNA, 321 bp, Glycine max
  Clone ID: LIB3054-011-Q1-N1-E6
ccttggggaattccaattccacattttcaagaaattagggagccaaaatggtcattttttaattgggattatttggtttcctaataaggcctttcctgaacccaagggaattgaatccggaattcctcggggaattccaattccacattttcaagaattaaggaggcaaaaaggttcatatatgaattggaataatttggtttcttattaggcctatcctgaacccaaaggaaatgagatcggaattcctcggggaattccaattccacattttcaagaaataaggaggcaaaaatgttcatatatgaattggaattattt

SEQ ID NO: 35926 - DNA, 366 bp, Glycine max
  Clone ID: LIB3054-011-Q1-N1-E7
gaaacaagtagctggtaaattaaaattggaattagcacaattcgcagaattagaagcttttgcccaattcgcttctgatctcgataaagctactcaaaatcaattagcaagaggtcaacgattgcgcgagttgcttaaacaatcccaatcagctcctcttaccgtggaagaacagataataactatttatactggaacgaatggttatcttgattcattagaaattggacaggtaaggaaatttcttgttgagttacgtgcttacttaaacacgaataaacctcaattcaaagaaatcatatcttctaccaagacattcactggggaagcagaagtccttttgaaggaagctattcaagaacagat

SEQ ID NO: 35927 - DNA, 294 bp, Glycine max
  Clone ID: LIB3054-011-Q1-N1-E8
aataaaatttgaaataacaccagtcaggcttatttaaaacctttgcccaaactactttttaacctcactaaacctcctcaaaacaattaaccaaaagtcaaccaattgcaccaatttcttaaacaatcccaatcagctcctcttaccgtgtaataacatataataactatttatactttaactaatggttatcttgattcattataaattgtacatgtaatgaaatttctttttcaattaccttcttacttaaacacaaataaaccttaattcaaataaatcatatcttctacc

SEQ ID NO: 35928 - DNA, 402 bp, Glycine max
  Clone ID: LIB3054-011-Q1-N1-E9
ctctttgcgaggaagaccttcatctgagttcaccagtgtgaactcagatgtaagtctctttgcgaggaagaccttcatctgagttcacactggtgacagcagatgtagaggagaaatcggttataattggtgagagaaatagagtagcaatagaggccctgagagcagcaatggacaagggacacaataaaattgcaatactatatgggggtggccacatgccagatcttgggaggagattgagagaggattttgatttagtcccatctaatgtacagtggataacagcttggtccataacgaaaaaggacctaaatactgattcatttccatttctgaagacaattgctaaggcctcaggctggccattgaaccgctatcagaccttggcattgctcatct

SEQ ID NO: 35929 - DNA, 403 bp, Glycine max
  unsure (1)..(403): unsure at all n locations
  Clone ID: LIB3054-011-Q1-N1-F10
gttaactgatactcctgatatcagaaaaagaaaaaagaaaaaaatgtctctagtgactgcagagatcaaagccaaagcagaggtgtatcatggagatgaactctgccaagagaagtcaaagttgctgctaaaggaggtagggctacctaatgggcttttgccattgaaggacattgaggaatgtgggtatgagagggatagtgggtttgtgtggctgaagcagaagaagagcacagaccacaagtttgagaagattgggaagctggtttcctatgctcctgagatcactgcctatgttgaggttggtaagatcaaaaagctcactggtgtgaaaaccaaggaagctctggtttggatcacactcagtgagatctttgttgatgatcctnccactggcaagatc

SEQ ID NO: 35930 - DNA, 397 bp, Glycine max
  Clone ID: LIB3054-011-Q1-N1-F11
ggttctgcacgctctgcttccagcgagtgttctttcttcgtttcaacaccttaatttgcacacgctgcttcttcagcttgagaaatggcacaagaaacctttctattcacatctgaatctgtaaacgagggtcaccccgacaagctgtgcgaccagatctctgatgcagtgctcgatgcgtgccttgaacaggaccctgacagcaaggttgcctgtgagacatgcaccaagaccaacatggtcatggtctttggagagatcacaaccaaggccaacgtagactatgagaagattgtccgtgacacatgccgcgaaattggattcatctctgatgatgttggtcttgatgctgacaaatgcaaggtgttggtcaacattgagcagcagagccctgata

SEQ ID NO: 35931 - DNA, 343 bp, Glycine max
  Clone ID: LIB3054-011-Q1-N1-F12
gggatctgacaggataggtgcggcgatggcttttgcagcgacgcccaagataataacggagtcactcgatatgcaaatccaaaggaggagcatgaaaggattgtatgggaaaaggtatctggtaacgatgaagcgaagtcaagatcattcaacgaaatgtgttattgagcgaatcatcagcgactgaaagaaaagcctcacaggaagaggcgcttcaaaacataactacatactgacattggactacatgtcgaacagatcctgcataacacgtaactttaactgtgatactgatggacctgaataaatgaatcccggatactatcatcaaacatgatcgctt

SEQ ID NO: 35932 - DNA, 346 bp, Glycine max
  Clone ID: LIB3054-011-Q1-N1-F3
atttttctccatcatttcagggctttctttcttctcttttgcctcccatattccattctcctcaaaatatctctacattttcctctctaccccaacaaaattccaaaaatttcccctcctatctccttttcacgtcacttaccacaactgggatgctccactttcttaaggattatttgttaactgagtcctaagtgtaattgagatggacggtgatatatttggagaattaggcaattcaactcaagtagatagcaagcttctacaggtatttcaaaagagcttattgcaagctcaagatattttgaatcagaatcggttgctgatcaatgagataaaccaaaac

SEQ ID NO: 35933 - DNA, 415 bp, Glycine max
  Clone ID: LIB3054-011-Q1-N1-F4
tctcggtgaagaccaatcccacacattcaagggctaacgaggctaaattgtgcatataagaatcggaactactcgaaatatcattacgcctatcctgataccacaggaaatgtgctcggatttcctctgctatctccaattcacagatacttacgacatctggaatgctacacgttcatatggataatgtgataactgagtcctatatgaagccgatacggacggcgatgtatatggagtctgaggcacttgaactcatgtagatagcaagcttctacaggtattgcagcagagctgatcgcatgctcaagatatttagaatcagaatcagttgctgatcaatgagatcaaccgaaaccatgactgcaagatgcctgataatctgagtcgaaatgtgggtttgaatagagagctc

SEQ ID NO: 35934 - DNA, 246 bp, Glycine max
  Clone ID: LIB3054-011-Q1-N1-F6
gatctcgataaagctactcaaaatcaattatcacgaggtcaacgattgctcgagttgcttaaacaatcccaatcagctcctcttaccgtggaagaacatatactaactatttatactggaacgaatggttatcttgattcattagaaattgtacaggtaaagaaatttcttgttgagttacatgcttacttaaacacgaataaacctcaattcaaagaaatcatatcttctaccaatacattcact

SEQ ID NO: 35935 - DNA, 206 bp, Glycine max
  Clone ID: LIB3054-011-Q1-N1-F7
gttatcaagttgattcacttgccacacttcatcgctggacgacagactgatcaggcattttatggcagaaataaccgtgttctttaatttgcattcatatgcagatgtgtagcagctgctcaagatcatgtgtaagctcctcaatccagctgacatcaaatgtctgtatttaggagcaattgctcactataccgcctattactagg

SEQ ID NO: 35936 - DNA, 332 bp, Glycine max
  Clone ID: LIB3054-011-Q1-N1-F8
tttttcttcatttcataatttttctcaaaaggtcaactttcatgtggaaaatcttccttctaatttccatctttcaaatctctttcgccactaggaggttgaatgagttagttcaggaccaaactcagcttcttcgttaccacaatggccctcttctctctggcaaaatctccattaacctcatttggtacggccacttcaaaccttcccagaaggcaatagtctccgatttcatcacctcgctgtcaccctcatcccctcacagcacccaaccatccgtcgccacgtggtggaaaaccacagaaaaatactaccaccacctcagtaatact

SEQ ID NO: 35937 - DNA, 361 bp, Glycine max
  Clone ID: LIB3054-011-Q1-N1-F9
gtatcagcagagacactcagctgatacagatcttggaactatttactctgtcacagtgcctgtacggcgggttaaaccagaatatcaagaaatggatgaatttgggacaataacaaatgttgagtataaggacaccggagagacttctggttctgttgatgttacatttgatttctatgttccagacgaaaggtcttgattttgagttgaaagttcttgaattttgatttctttgtcaaaagttagtgtctgaaatgcttaccagtgaaagctaatctggatttctgtatatatttttaaattgaagcttacattagggtgacactagattttgatgagaagttttgtttttgtactatct

SEQ ID NO: 35938 - DNA, 400 bp, Glycine max
  Clone ID: LIB3054-011-Q1-N1-G12
gcgacgatgaaagcaatgacagcaacgacaacgtttgatgtctctgccgcttgcttccgtgcccctccttcttgttcaccgaatccatgccacaccagtttttcagttataaactccctgaatcctcacaagggacgacggataagcgttgctgttccacctaagtttccaagcttccggagggaagcagctctgcaggggaatttggaggctgttagagtcccaacttcggtgcctgtgcgtgtagcatacgaacttcttctagctggtcatcgatatttggatgtaaggactccagaagagttcaatgctggacacgctcctggcgccattaacataccttatatgttcagagttggatcagggatgactaagaatagcaactttattagacaggtgt

SEQ ID NO: 35939 - DNA, 369 bp, Glycine max
  Clone ID: LIB3054-011-Q1-N1-G2
tggaaattggggagtttgcttgacttatggctcttggtttgcacttggaggtctagcatctgctggttagacttacaccaattgtgctgccattcgcaaagccgattaatttctacttactacacagagagaggacggtggatggcgagagagtcatctctcaagcccatagcagatatatgtacctgtagaaggaagccgatcaaatgttgtacatacagcatgggctcttatgggactaattcatgctggacaggcggattgagaccccatgcctcttcaccgtgctgcattagtagctcattaattgtcagcttgaagagggtgattggcccccacaggttatcacgggagtgttcacgaaaaatt

SEQ ID NO: 35940 - DNA, 359 bp, Glycine max
  Clone ID: LIB3054-011-Q1-N1-G3
ctcgagccgaatcggctcgagcggctcgagaaacaacaattgattaagagtgttgagtgagatcagaatggccgacttgatgaaaagaatcctcctaatggaggccgagcaagcaagcaaatggtccaaacatgttacttcaaccatcaacagtggcaatcatcacaacatcggtaacaggtatgaccactcataccactacgatgaacgccctatttataacagaggcactttcaatggtgatggcaatgggtcacatatccagggtgactttgactcctcagaacggaactactatggtcgtcgttatgggtattaattatctggatttgatacataagatatgctgggcaacatca

SEQ ID NO: 35941 - DNA, 363 bp, Glycine max
  Clone ID: LIB3054-011-Q1-N1-G4
ctcgagcctatatcggctcgagcggctcgagaaacagcagtggattaagagtgttgagtgagatcagaatggccgacttgatgaaaagaatcctcctaatggaggccgagcaagcaagcaaatggtccaaacatgttacttcaaccatcaacagtggcaatcatcacaacatcggtaacaggtatgaccactcataccactacgatgaacgccctatttataacagaggcactttcaatggtgatggcaatgggtcacatatccagggtgactttgactcctcagaacggaactactatggtcgtcgttatggttattaattatctggatttgatacatagtatatgctgggcaacatcatat

SEQ ID NO: 35942 - DNA, 345 bp, Glycine max
  Clone ID: LIB3054-011-Q1-N1-G6
cttccttttatgcctatcgcccatcactttgcttctttctgcgttgcgtgctcaagctcaatctcatgctccagctaccactttcaagtactgtgaaaagaatgcagactatgctgtgaaggtgagtggagtggaaatattgcctgaccccgtggagagaggagtgccattcacctttaagatcccagcttatactcctgaaccaattcaaagcggggacttgttatatgaaatttcttatgctggaatagaagcacaacctgctacatttctccatgatctctgtgaggaagcaccatgcccagtacctgcaggcaactttgtgctcgttcacaccgaattatt

SEQ ID NO: 35943 - DNA, 399 bp, Glycine max
  Clone ID: LIB3054-011-Q1-N1-H10
caatttctctctcttttctctcttctgaattattgtcatggctaagagctcattcaagatggaacacccacttgagaggaggcaggctgaagcatctcggataagggagaagtatcccgaaagaattccagtaattgttgaaagggcagagaagagtgatgttcctgaaattgataagaaaaagtatctggtccctgctgatttgactgttggccagtttgtgtatgtggtgcggaagagaatcaagctgagtcccgagaaggccatcttcatttttgttaagaatattttgccaccaactgcggcaatgatgtctgcaatttatgaggaaaacaaggatgaagatggatttctatacatgacttacagtggagagaacacatttgggcttgtgttctg

SEQ ID NO: 35944 - DNA, 393 bp, Glycine max
  Clone ID: LIB3054-011-Q1-N1-H11
aaaaaatttagaaacagaagaaacatatcaataacttaagtcacatacattctgacaccaaaaaaaaggaaaggaacttgagccacattctgtccctggtggactcaagaagagtctttcataggacagttaaaattatagcttgcaaaaagggttcactagcaaacattgcaatggcctcaacctcttctgctctcactatatcctcttcttccacccttcttgatggcaaggctccaagacagtcaccagctgcttcccctcaatgtgtgagcctcccccctccccctttgcactctcagaaccgttcatggaagaccactgcttattgtcgcaaggttgctcgaaaagttatggcaatggccacaggagaggcaccagctgaagctaccc

SEQ ID NO: 35945 - DNA, 380 bp, Glycine max
  Clone ID: LIB3054-011-Q1-N1-H12
ctcaattactacatcgtattctgcaaattcaaaccgggtcttggttttctgaaagatgggaggtggcaaggacaagcatcatgatgaatctgacaaaggaattttttcacaccttgctcatggggtagctggtgcagcacatggtggacatgggtacccacctggggcttacccaccaccacctggggcataccctccacaacaaggatatcctccagctgggtatcctccacaacaagggtatcctccagctgggtaccctccacatcaaggctatcctcctgctggttaccccccagctggttatcctggttcatcacatgcaccaggttctcatgggcacggcggtatgggagcaatgctcgctgggggtgctgctg

SEQ ID NO: 35946 - DNA, 351 bp, Glycine max
  Clone ID: LIB3054-011-Q1-N1-H2
accgcattccccttcttctccttctaacccaacctgtttgtccgacaatcacattcaacgcttctgtcatggaagaagttaatgtcgtggaaactaaggatggaactgtctcagtagctgctgcgtttgctggtcaccaggaagccgtgcaggatagagaccacaaatttttaagcaaagctgttgaagaagcatataaaggggtagattgtaaagatggaggcccttttggtgccgttatagttcataatgatgaaatagttgctagttgtcacaatatggttctgtgtaacacagacccaactgctcatgctgaagtgacagcaataagagaagcttgcaagaagctta

SEQ ID NO: 35947 - DNA, 345 bp, Glycine max
  Clone ID: LIB3054-011-Q1-N1-H4
ctctttcgcccccttctccctctctctattatttggttctttcccgctttttcatagcaaaacgaaaaagaaaaccctagaacgggagagatttcattccccaaaaaatctcttccttctctctcctcatttctgagttcccaactttcctcacctgaggtcagaatcatacaataattcctttctgttttcagtttcttattacaattcaattggatgatgattattgagtctaataattttgaacagatctggtgtgacgtgcatcacaattgaatcgaattgaaatttgttgtcgtgggtgcagcaaggaatgccgctggtattagcgaaaagcgattcgat

SEQ ID NO: 35948 - DNA, 377 bp, Glycine max
  Clone ID: LIB3054-011-Q1-N1-H5
aacctggggattcagaaccccattaacctgacctttttgggaggatgccaaaccatggcttcccttgcagaatccactgctggctgcttcccttggcatgtcagaaatccttggaaaccccatcaacctcagtggtgccacaaggccagctccatctgcctctagccctgcctccttcaagactgtggctcttttctccaaaaagaaggctgcacctccaaaaaaagctgcagctgctgctcctgccaatgatgagcttgccaagtggtatggtcctgacagaaggatcttcttgcctgagggtctcttggaccgatctgagatcccagagtacttgaccggagaagtccccggagactatggttatgacccatttg

SEQ ID NO: 35949 - DNA, 346 bp, Glycine max
  Clone ID: LIB3054-011-Q1-N1-H8
ctctttcgccctcttctccctctctctattttttttttcttggccgctttttcatagcaaaacgaaaaagaaaaccctagaacgggagagatttcattccccaaaaaatctcttccttctctctcctcatttctgagttcccaactttcctcacctgaggtcagaatcatacaataattcctttctgttttcagtttcttattacaattcaattggatgatgattattgagtctaataattttgaacagatctggtgtgacgtgcatcacaattgaatcgaattgaaatttgttgtcgtggttgcagcaaggaatgccgcttgtattagcgataagcgattcgatc

SEQ ID NO: 35950 - DNA, 420 bp, Glycine max
  Clone ID: LIB3054-010-Q1-N1-D1
ctagacgagaatgtcgctcaagtgcaattgcttatcgttttagaagtaacgaggcgaaacaggggatatgggaattggaatgatgagaaatcttattaagcctctcctgaagccaaaggagatgcgatcgagcctactcaggcaactgcaactgcacattttcaagaccagcagaggccacaatggacatgtacgaaccggcattatcagttgaatcattaggcctatcctgtatccagaggacgtgagctcagacttacgtacagaatgccaattacacacttgctagaaatggtgctgcttagatgtgaccatatgaattccaattatgcaggtcacgtattaagactatcctgaagacaaaggacatgagatcactataccattaagataccgagctcgaatgacctataatgagtc

SEQ ID NO: 35951 - DNA, 362 bp, Glycine max
  Clone ID: LIB3054-008-Q1-N1-A6
gtagacccagctttcatccaagacctagaacacagaccagggctctccataatccaagctgaaggaattcccataattgacctctctccaatatccaaccacacagtttcagatccatcttccattgaaaacttagtgaagcagatagggagtgcatgcaaggaatggggtttcttccaagtaaccaaccatggggtgcccctcactctaaggcaaaacattgagaaagcctcaagattgttctttgcacagaatttggaggagaaaagaaaggttagcagagatgagagttctccaaatggttactatgacacagaacacaccaagaacattaaggactggaaaagaagtctttgattttc

SEQ ID NO: 35952 - DNA, 409 bp, Glycine max
  Clone ID: LIB3054-008-Q1-N1-A7
gtatacccatctttcatccaagacctagaacacagaccagagctctccataatccaagctgaaggaattcccataattgacctctctccaatatccaaccacacagtttcagatccatcttccattgaaaacttagtgaagcagatagggagtgcatgcaaggaatggggtttcttccaagtaaccaaccatggggtgcccctcactctaaggcaaaacattgagaaagcctcaagattgttctttgcacagaatttggaggagaaaagaaaggttagcagagatgagagttctccaaatggttactatgacacagaacacaccaagaacattaaggactggaaagaagtctttgattttcaagccaaagaccccactttcatccctgtcacttttgatgaacatgatg

SEQ ID NO: 35953 - DNA, 408 bp, Glycine max
  Clone ID: LIB3054-008-Q1-N1-A8
agcgagcattctacaatggctactataccagttaatcccgggcctttcttgaacaatttgactgggaagcctgtaattgtgaaactgaagtggggaatggagtacaagggctatctcgtttccgttgattcctatatgaacttgcagctggccaacaccgaggagtacattgagggacaatttactggaaatttgggagagattttaatcagatgtaacaatgttctctaccttcgaggagtaccggaggatgaggaaatcgaagatgctgctgaagactagagagtgatagaagctgctaatggctatgacataaacagaactcgaatttctactgtgtatgtatcttcacataaatgtaggttttttgtagtcaatgtgtacagatttgaatcaatgatgcactcg

SEQ ID NO: 35954 - DNA, 354 bp, Glycine max
  unsure (1)..(354): unsure at all n locations
  Clone ID: LIB3054-008-Q1-N1-A9
ccctcgggaattccaatgctattntcaagaaataaggaggcaaaaatgtgcatatatgaattggaattatgtgttttcttattaggcctatcctgaagccaaaggaaatgagatcggaattcctcggggaattccaattccacattttcaagaaataaggaggcaaaaatgttcatatatgaattggaattatttgttttcttattaggcctatcctgaagccaaaggaaatgagatcggaattcctcggggaattccaattccacattttcaagaaataaagaagcaaaaatgttcatatatgaattggaattatttggtttcttaataagcctaatcttgaacccaaagaaa

SEQ ID NO: 35955 - DNA, 310 bp, Glycine max
  Clone ID: LIB3054-008-Q1-N1-B11
catataactatcatcacatctatcatctctgaacccaaattaccaaatcacctcattactatcacaacatgctttcatagcattctgctccagattacaacaatagatgtttaaaaaaatctacaaaggcattccgctatatcggacaaatcgttcctctaattgtctcataaatagacatttcttctccttttttgatgatgaccttctttgatgttccaatgtattctatcttcctggccaaagtgccttacatctgtcatacatctgcacaatcttattgataaagatattaagggcataacacaac

SEQ ID NO: 35956 - DNA, 358 bp, Glycine max
  Clone ID: LIB3054-008-Q1-N1-B3
ttgagctcaacaaaacttgatgagaaaccactgttccctgtgcttgctacaaaggatggaatctgctcattgtctcaaaaaactgtggtctcgggcaacaaaagaggttttgctgacacaatggaccctgagtttcctggcaatgcagggataaacatgatgctatcacctaaaccttctggagttcagcctaccacagtgaaagaaataccaagcaaggtgttacaagaacttccttcagcggcaaatggaactggtcataaccatacatcaggagcttctatcagtggcagtgcaccggctgctaaggcacaggttgttggttggcctcctataagatcatttaggaaaaactcat

SEQ ID NO: 35957 - DNA, 363 bp, Glycine max
  unsure (1)..(363): unsure at all n locations
  Clone ID: LIB3054-008-Q1-N1-B4
cggttgagccaacccaaatcccggaccttcggtttggattcttattcaggaattcctggttggaaccggagggttcccttaccttgggccccatttgggccaacttcggattaaccaccaattccttttcttcggctttaagggactggcaccagtggccggatcttgcgaaattcggccaccggttcttcggaaaacgcggcggggttctcatcgcnctgccgccaccgaaaaattccgacgacttgatccgncaaactcgtcgccgatctccactcctnctncatcgacgatcagaagcaagccgccatggaaatccgattactcgcgaagaacaagccggagaatcgcatcaaaatcgcg

SEQ ID NO: 35958 - DNA, 387 bp, Glycine max
  Clone ID: LIB3054-008-Q1-N1-B5
aaataatgcagtccatgttaaccatccgtgccacccatggccttcctctgtgtctctcagggatgattcaccctcttgctctctctcacgagtaagaacttagaatatcatgaaatttattaactaattaacacaccatatttttctgattccactcttatttctaacaactaacaagtgctgtgatctgctgtggtttttttttttttctatccataaatatatattaatggttagtatattagtttttcgtgatcccactcttatatctctgtagtgtgtgtaggatagcggatcacgaccgtaggagacgcaccatgaggaagcaaaggcaaagatcactcaccagagagggtgtagtgcatgatgcggttcgagaaattcact

SEQ ID NO: 35959 - DNA, 376 bp, Glycine max
  Clone ID: LIB3054-008-Q1-N1-B6
gttgaaactttatggtcctgaagctatggaattgtgtaaacctgacttggaggagagaatgaaagtgttggcaatgaccacaacagaagaagaagaaatgggagacacttttgctgaaagagcagaaacttactaccaaaagaggcctcagctactgtcccttctgcaggacttgtacaatggctacataaccttatctgaccgttacatccaaacactggccaagcacaagcaccatagtagacactcttctcaagtttcaactgtagatgaaggcttctctgaccaagaagaggctagtggtgtgagccacagggatttagacatctagagctgagtctactagcatcacaggacacccatgatgatgatgcca

SEQ ID NO: 35960 - DNA, 355 bp, Glycine max
  Clone ID: LIB3054-008-Q1-N1-B7
ctcgagccgcaaaacacaaccaaaatcttaaatttcttggaacccttttaattgttttttttctttaaaaaaatcattttcctttaaacttcaaatttagagttctctctctgattcatccccagcaatggcttgtgcattgcaagcaaccttagcagccaacgcctatgtcttttcttccaggagattctccttgaagctccaaaagaacagtaagagaaggttttctttggtcactgttagagttgattctgatgaatctgattgcaatgaggaagaatgtgccccggataaggaagtagggaaggtcaatgtggaatggttagcttgggagaagaccaaagtagtgggtaca

SEQ ID NO: 35961 - DNA, 347 bp, Glycine max
  Clone ID: LIB3054-008-Q1-N1-B8
ctttatccgtaaaaacacaaccaaaaccttaaatggcttggaacccttttaattgtttgctgcctttacaaaaatcatattcctttcaacttcaaatttagagtcctctctctgatttatgcccagcactgcctcatccattgcaggcaaccttaatagccaacccctatgtcttttactccaggagattctacttgaagctccaacagaacatccacagacggttttctttgattactgttcgagctgattctgatcaatctgattgccatgaggaagaatgtgccccgaatcaagtactagcgaaggacaatccggaatgactaactggagtcaagacgaccgta

SEQ ID NO: 35962 - DNA, 402 bp, Glycine max
  Clone ID: LIB3054-008-Q1-N1-B9
aaagaaatatatcaaattgatcgcttgtgtgttacccttcgaaccaaagaacttaacatgtaaaatgatctatttttcttatctatatagatagatctatctgtattctatcatttacagttgaatatatacaaatatcagtatataacaacatatattaaaaaaataacaacatatattaaaaaagtcagaataaaaaaacaaatcctttatagtatttcttgtaataaatgtgatttttggaatagggataaataaaccatggaaaaatctaagcgactctttatgaaatccaagcgatcttttcgtaggcgtttgcccccgatccaatcgggggaccgaattgattataaaaacatgggtttaattagtcgatttattagtgaacaaggaaaaatatta

SEQ ID NO: 35963 - DNA, 283 bp, Glycine max
  Clone ID: LIB3054-008-Q1-N1-C1
taaactataaagatctaactatgattgagttaacaagaactgtactattgccatatcatattacaaatcaatcacaattcttattcatttaaaccaatcaccttactcaaatgacatttctatataatacatatcaaccttacaaatttcttcctatatacctatccactgtaattcttcatcatgacccattctaagtactttaccaaaaatgtattcgtcaactaatcaacattatcacatacaattttcatacttctacaccaaacttgaatgttataat

SEQ ID NO: 35964 - DNA, 320 bp, Glycine max
  unsure (1)..(320): unsure at all n locations
  Clone ID: LIB3054-008-Q1-N1-C10
ggctcgctactccttcctcttggccctcctcctcctnctcggcgccggcgtgtccaacgcccgcgaagacatcctgatccgtcaggtggtgccggatgccgtcggcgaagcggcggagaaagaggaggaccacctgctgaacgcggagcaccactttgcgagcttcaaggcgaaattcgggaagaagtacgcgaccaaggaggagcacgaccgtcgcttcggcgtcttcaagtccaacctccgcagagcgaggctgcacgccaagctcgacccctccgncgtccacggcgtcaccaaattctccgatctcacttcggccg

SEQ ID NO: 35965 - DNA, 409 bp, Glycine max
  unsure (1)..(409): unsure at all n locations
  Clone ID: LIB3054-008-Q1-N1-C11
tcgtaggtgaagttgttaaacatttctagcttcttcgctctccttcgtccattcttgcacatccccctcttcctcttccttattgtcaatttcacctccaaaccccaaaccctctcacttcctacctttcgtggtcgaagccaaagacaggacccgcagggaagacaggaccgctcgccacactcgcatcagaaagaaggtcgaagggacgcccgagaggccgaggctgtccgtgttccggtcgaacaagcatctctctgtgcaggtgattgatgacaccgcaatgcgcacgcttgcttcggtgtcgacaatgcagaagacggttgctgatgagttcaactactccgctggccctacagttgaagtagcaaagaggatgggtgagatcattgcanaatcctgtttggag

SEQ ID NO: 35966 - DNA, 364 bp, Glycine max
  Clone ID: LIB3054-008-Q1-N1-C3
catgcaccgcacgtgcacgctagagggtcctgtcaatgaatctcaagcgcatatttttaagagctatagagtcaaaactgtgcatagattaattggaatgatagggtgtcatattaagcctatcctgaagcccaaataaatgagatcggaatccatgaccgaactccaataccacatctataataactaaagcaccatacatgactcatatactcaatatccaattatgacgagatcctattacgccaatcatgaagcctacttaccttatatcgcgatactgatgctattaagaatttcacatatacaggacatgctgatacacaaacctccatagttgaaatggaatgaacccatacttaac

SEQ ID NO: 35967 - DNA, 403 bp, Glycine max
  unsure (1)..(403): unsure at all n locations
  Clone ID: LIB3054-008-Q1-N1-C6
catagacatggccaccgtcacttctgcagccgttgctattccctcattcactggcctcaaggcaagcgcaggcaaagtgagtgccgcagttaaagtctcagctccccaagccacaaggttgggcatcaaggcttcgctgaaagacgttggagtcgctgttgtggccactgccgcgagtgcagtgctggctagcaacgccatggccattgaagtgttgctgggtggtgatgacgggtctctggctttcgttcccaacaatttctccgtggcctctggggagaagatcgtgttcaagaacaacgcaggtttcccccacaacgttgtgttcgacgaggacgagattcctagcggcgtggatgcagggaaaatctncatgagcgatgaagaccttctcaatgcgcct

SEQ ID NO: 35968 - DNA, 400 bp, Glycine max
  Clone ID: LIB3054-008-Q1-N1-C7
cttcataaacgcctttcttctccgtttccgtttcctcgttcaaattcgctttttgatctgcgaaaatgagagagtgcatctcgatccacattggtcaggctggtatccaggtcggaaatgcttgctgggagctctactgcctcgagcacggcatcgggcccgatgggcaaatgccaagtgacaagacagttggcggtggtgatgatgctttcaatactttcttcagcgagactggtgctggaaagcacgtgccacgtgcagtgtttgtagatcttgagcccactgttattgatgaggtgagaaccggaacttaccgccagcttttccacccagagcagctcatcagcggcaaagaagatgccgccaacaactttgcccgtggccattataccattgggaa

SEQ ID NO: 35969 - DNA, 382 bp, Glycine max
  unsure (1)..(382): unsure at all n locations
  Clone ID: LIB3054-008-Q1-N1-C8
ggaagcccctccagaaaatcaaagctatcttgtccaagtgacaaaataccaagctgcacaaaactgcaagacctggatcgttggtaagtggatcacgccaagagagcaatactgggcaccacgtggaacccattttcatcaatttgttgtcccaccaattttatcatttagaaaagattgcacttatggtgacctggcagccatgagattaccagaagacgtggaaggacttgggtgttgtgagtacacgatggataggggagtggttcacgcgtgccatgcaggaggagtggtacatagccttgaaggttggtctcatcacgaagttggggccatagatgttaacagaatcgatcttgtgtgggaagcagcactcanacat

SEQ ID NO: 35970 - DNA, 398 bp, Glycine max
  Clone ID: LIB3054-008-Q1-N1-D10
aacatcgagtttgaaataaatgaactgggtgcacggaggagggcaggattcagtgcacccccaattgggtgtttgccattacatagaacagtgggaggaggattagaataaagatgtgcagaaaggcccaacagttcggcccaattatttaacaccaaattgtcaaaggagcttgattccctcaaccgcaactttcccaatagcaggaatgttttcatcaatgtttacgaccctctacttgacatcatcaccaatcaccataaatatggctataaagttgcgagacacatgatgctgtggcacacgcaggatagaggttgcaatactatgcaaccgcttcgattccagctgtcccaatgttcatgattatgacttttgagacagttttcatcctacag

SEQ ID NO: 35971 - DNA, 332 bp, Glycine max
  Clone ID: LIB3054-008-Q1-N1-D11
aacaaatagatagtaaattaatgaactgagtacacggagcagtaccggtttcagtgcacccgaacttggatgtttcccattacatagaacagttagagcaagattataatacaaattaccagaaacgcccaacaatccttcccaattatttcacaccaaacagtcaaaggaactttattccctaaaccgcaactttcccaataacaggaatgttttaaccactgtttacacaccctttacttgacatcatcaccaatcaccaaatatatagctataaagttacagacacctgatgctagatcacacacaggatataagctgcaatactatcc

SEQ ID NO: 35972 - DNA, 330 bp, Glycine max
  unsure (1)..(330): unsure at all n locations
  Clone ID: LIB3054-008-Q1-N1-D2
caaaaccacaacctcaacgcgtgcgttctcagattttcgcggtggtcgaaaaatctgcgtgggttccgggacttggctcggacattgcagcttaaggatctctgcattggaaatttgtttcaatttatatgttctaaacacggcttangaaacctggcatgggagttgttactgtgtctaccttagctgctaggacgccattaagattgaatacaaggttgaccagtcatcagcaggtgcataaaagacctttaattgtagcttttaaaggagatgcattgaataaagccgctttggtttcacctcaggagcaaattcctctacccatag

SEQ ID NO: 35973 - DNA, 411 bp, Glycine max
  Clone ID: LIB3054-008-Q1-N1-D3
tgcagttgataccgatgaggtggtgacaaaggagacagaggaggagaagccagcagcagaggagaaatcacaggagaaaactgataaagtgaaagaggaagcagaagagcctaaagaaactactgaaacagaaacagaatcagcaccagcagcaaccacagaggaagagaacataccagctgagacagtggaagccccagtagaggttcctgttgagaaaactgaagcttagacttatggacagtgtgagtgagaaaaacaagtttaaaaatggtcctagttgtggggatcattaggtctaccattttgcatgtcatgttgaaaagcttttttttctatttatttctttagtttactttaatagtaagtatattattattatatggaggtttaagccttgggtggaatatg

SEQ ID NO: 35974 - DNA, 239 bp, Glycine max
  Clone ID: LIB3054-008-Q1-N1-D4
acatgcttgcatgcctgcacgcgtactctagatgataaccctgctcgagtgcaattgcttacctttgaggagtgacgaaggagacaggggaagagatgcctggtactgatgagaaatcatatgaggcctctgatgaagtccaaggagaagcagatcagcctacctaggctactgccactgacacattatcagcacctgcagcggccacagtggacgtgtacgaaccagcagtaacagtg

SEQ ID NO: 35975 - DNA, 398 bp, Glycine max
  Clone ID: LIB3054-008-Q1-N1-D5
ggcaaacactccactagtccagtgtaccagccatatgtgtcctattcgagtgcattggcatgtgaagctcaattacaaagagtactggagggtcaagatcacaatcacaaatttcaattacagaatgaactactctcaatggaaccttgttgtgcagcatcctaatttagataatattacccagctcttcagttttaattacaagtcactaaatccctatgagggcttgaatgatacaagtatgctgtggggagtcaagttctacaatgattttctttcttcagctggatctcttggtaatgttcagtcagaaatcttacttagaaaagacaaatcaaccttcacatttgataagggatgggccttccctagaagaatttatttcaatggggataact

SEQ ID NO: 35976 - DNA, 371 bp, Glycine max
  Clone ID: LIB3054-008-Q1-N1-D8
gcacgcctactctagctggtcctctagctcaatgccattgactcatctactacagataaccaggcatagatggtcaaatatgaatcggaggcaggcgaatccctattacgcctatccctaagccaacggaaacgcgatcgcaattcctaattgcaattccgatctcacatcaacaagacctagtgatgcagaaatctacatatatgaataggacccatctcttcacttatcattcctatcctctaaccaaatgagatgacatcggagttcctcgtgtaattccaacaccacatttacacgatgtaacgatgctgtcatgtgcatatatgaattgtgatcattcgtaaacctaacatgcctatcccgaatcc

SEQ ID NO: 35977 - DNA, 384 bp, Glycine max
  Clone ID: LIB3054-008-Q1-N1-D9
aatttgttgtacggaaattaatgaactgggtgcacggacgagagcagctttcagtgcacgccacaattgggtgttcgtcattatcatagaacagggggaggaggattagatacaagatgtgcaggaacgggccaacagttcgggccaattatttaacaccaaattgtcaaaggagcttgattccctaaaccgcaactttaccaatagcaggaatgtttacatcaatgtttacgaccctgtacttgacatcatcaccaatcaccaaaaatatggctataaagttggagacacatgatgctgtggcacaagcaggatagaggttgcaatactatgcaaccgtttcgattccagctgtcccaatgttcaagattatgacttttggga

SEQ ID NO: 35978 - DNA, 102 bp, Glycine max
  Clone ID: LIB3054-008-Q1-N1-E1
ctcgagcctgtaatataaacatgccttccagtttcgaaacgaaatggaatgtaaaaatttgaacaggtgtttctgaggattattcagagtaatgcttttgag

SEQ ID NO: 35979 - DNA, 405 bp, Glycine max
  Clone ID: LIB3054-008-Q1-N1-E11
agggaaggttcctaccatcatctatgtttggtctggattgctctccgattattatctctatgctttgggtgtacataaaccctccttcacgaagaacacaggattacatgaatttccaattcccttgagtttgaaggtagatagatgaagttcctctgcttgatcatctatgtatggtctggattgctctccattattatctctttgctttgggtctggattactctgcttcatcatctcgtagtaatagtagtactgtgcctttgttgtgctagattgattacattcaattgtgattatatcttactttctgctatgtgtgggccacactctcaatatgtgtccgagaaaaacaagtaggtatctgttaactctttttgttaatatctcataatgactgagata

SEQ ID NO: 35980 - DNA, 405 bp, Glycine max
  Clone ID: LIB3054-008-Q1-N1-E3
caataaacgatgattctcattatctccctcattttttctggtctctctttctcccatgcttctgtcctagatttctgtgttgcagattatgcaggtcctattggacctgcaggatattcctgcaagaagccttcaaaggtcacagcagatgattttgcttacagtggccttggcattgctggtaacacctcaaacattatcaaagctgcagtgacccctgcatttgatgctcagtttgctggtctcaacggtcttggcatttccgcagcacgtttggacttagcagcaggtggagttataccacttcacactcatcctggagcttcagaattacttgttgtaattgaagggagcatcctagctggattcatttcttctgccaacattgtctacctcaaaactctt

SEQ ID NO: 35981 - DNA, 420 bp, Glycine max
  Clone ID: LIB3054-008-Q1-N1-E5
caataaacgtttagattcattatctgcctcattttttctcgtctcgctttctcccatgggtgtgtcgtagatttctgtgttgcagattatgcaggtcctattggacctgcaggatattcctgcaagaagccttcaaaggtcacagcagatgattttgcttacagtggccttggcattgctggtaacacctcaaacattatcaaagctgcagtgacccctgcatttgatgctcagtttgctggtctcaacggtcttggcatttccgcagcacgtttggacttagcagcaggtggagttataccacttcacactcatcctggagcttcagaattacttgttgtaattgaagggagcatcctagctggattcatttcttctgccaacattgtctacctcaaaactcttaagaagggggatgtt

SEQ ID NO: 35982 - DNA, 420 bp, Glycine max
  Clone ID: LIB3054-008-Q1-N1-E6
ttcacctgctgggtctaggccgtcttctcccaggtcacataatgaaagtgaggggtacaacagtgctgatgaacagaagccttgcctggtttcatcttatgatgattttgaaagggagcgacagttcgaaattgatatcagaagggcaaaaggttatgaagtcaaaaaaatgatggaggatggaaattgtctattccgagctgttgcagatcaggtgtatggggattctgaagtgtatgatttgatcagacagatgtgcatagattatatggagcgagagagagatcacttttctcagtttataactgaaggcttcacatcttactgcaagagaaagagaagagacaaggtctatggaaataatgttgagatccaagccatgtgtgaaatgtataatcgtccaattcacatatactccta

SEQ ID NO: 35983 - DNA, 412 bp, Glycine max
  Clone ID: LIB3054-008-Q1-N1-E7
ttcttctgttgtgtctaggccgtcttctcccaggtgacagaatgaaagtgaggggtacaacagtgctgatgaacagaagccttgcctggtttcatcttatgatgattttgaaagggagcgacagttcgaaattgatatcagaagggcaaaaggttatgaagtcaaaaaaatgatggaggatggaaattgtctattccgagctgttgcagatcaggtgtatggggattctgaagtgtatgatttgatcagacagatgtgcatagattatatggagcgagagagagatcacttttctcagtttataactgaaggcttcacatcttactgcaagagaaagagaagagacaaggtctatggaaataatgttgagatccaagccatgtgtgaaatgtataatcgtccaattcacata

SEQ ID NO: 35984 - DNA, 405 bp, Glycine max
  Clone ID: LIB3054-008-Q1-N1-E9
ctcgagccgtttcggctcgagagccctacagcgaggtgttgcggctgcagaggttccgcgagtgcgagctcattcacgggaggtgggccatgctcgccactctcggagctctcactgttgagtggctcactggtgttacatggcaagacgccggaaaggtggagctagtggaaggttcatcatacctagggcaaccacttccattctcaatcaccacactgatctggatcgaggttctcgtaattggctacatagagttccagaggaacgcagagctggacccagaaaagaggctgtacccaggtggcagttacttcgacccactgggcctggcctcagatccagagaagaaagccacccttcaattggcggagatcaagcacgcccgtctcgccatggtgggct

SEQ ID NO: 35985 - DNA, 403 bp, Glycine max
  unsure (1)..(403): unsure at all n locations
  Clone ID: LIB3054-008-Q1-N1-F10
cgccgccatgtccaccgtcaccacccaagccttcgccgcagttttccggccatgtacctcgaaatcgaggtttttgaccggctcttccggtaaacttaaccgggaagtgactatgcggccaatggggtgccctccttctgcctctttcaaggttgaagccaagaagggagagtggttacctggcttggcctncccaacttacctcaatggcactcttcctggtgacaatggatttgaccctctggggctagctgaggacccagagaacttgaggtggtacgttcaagccgagcttgtgaatggacgttgggccatgttgggtgttgcaggaatgttgcttcctgaggttttcaccaagtttggaatcatcaatgcccctcaatggtatgatgctgggaaatca

SEQ ID NO: 35986 - DNA, 404 bp, Glycine max
  Clone ID: LIB3054-008-Q1-N1-F11
gatgaaatgtataattttgggttggagaagttcccttctgtggagagtgattgggcggcaatatgactcgctgaattttcgttacgtcaaatggttggtttggctttgctctgcttttgggtttagtatgtatctactacttattatgttttgtaattttttaggtttatgtttcggtagtgtctttggctgcttctgcaatggattttttgacatttgcggatgttttgcttagacacgagggttgcaaattttaggcagtgaaatcagagagggtcgtagtggtctttttgtggtctgctcgtgttttttgttacttgcatgaccgtggggacttctacttgtgtgtcttgggtagctacttcttgttcaactgtaattgaagtgcccttccaatatatgaa

SEQ ID NO: 35987 - DNA, 387 bp, Glycine max
  Clone ID: LIB3054-008-Q1-N1-F2
tggtgacaatggatttgaccctctgggactagctgaggacccagagaacttgaggtggtacgttcaagccgagcttgtgaatggacgttgggccatgttgggtgttgcaggaatgctacttcctgaggttttcaccaagattggaatcatcaatgcccctcaatggtatgatgctgggaaatcggagtactttgcttcatcgtcgaccctctttgtgatcgagttcatcttgttccactacgtcgagatccggagatggcaggacatcaagaaccctggctctgtcaaccaagaccccatcttcaagcaatacagcttgccccaacatgagtgtggataccctggtagtgtgtttaaccccttgaactttgcacctactttggaggc

SEQ ID NO: 35988 - DNA, 357 bp, Glycine max
  Clone ID: LIB3054-008-Q1-N1-F3
aagaaagaaaacaaagaagagaagtaaggtatataaggaagatacgtacaatttttgcaaattgttcaaaatctccttccaagaaacctcatcacacctaatacaagaactacatcacatccaactactcaagcaatttcgagatacaactctatcaatactcaacattgaattattaaatgactctcaatacttatccattacccaacagagtcctgatcagcttatccaagtttaatccaattccgtattctgcatagttaacttaccaagtgtcaacaaatatatagttgaattctaagtgagagttaaagaccattgcttcagccgaagttgcacctacctgctattcattgc

SEQ ID NO: 35989 - DNA, 410 bp, Glycine max
  Clone ID: LIB3054-008-Q1-N1-F5
acacagaagagaaagaaagaaaacaaagaggagaaagaaagtagttgaggaagatacaaacaatttttgcagattgttgagaatgcctttcaagaagcctcatcacacctcagacaagaactacataacaggggacgacggaggcaagttcgagatacaacctagaggactcaacattgtgtggggaaatgattctcgatactggaaaattccagaacaaggtcctgcggagctgatccaagtttcatggttggaggtatccggcgtggtaaacttaccaggtgtcaagaaatatagggttgaattcgaagtgagagttaaagacgatgggttcggttggagtggcacggacgtgctagtgatggctaagattgggaaaacgggaaaatatacgtataaagtgacgaaac

SEQ ID NO: 35990 - DNA, 254 bp, Glycine max
  Clone ID: LIB3054-008-Q1-N1-F6
tcgtaatatttagtacagtgattatttctaaactgtgaagtaaaaaattatatgaatggatttagaaataatcgtaatatggagtacagtgatttttttttgacagaatgttgatatagatacataaaacgttttcttttttagacagaaagaatggagaattatatattatgctgtacatgtagaagtgagtgttcagtcaggactctcgcaggatcatgttctgagtcggtgatctatgtgtcatggtctga

SEQ ID NO: 35991 - DNA, 86 bp, Glycine max
  Clone ID: LIB3054-008-Q1-N1-F8
aactgacacacaaaccaaattaactatatcatgctcaaggcttcatggtttcttattttgtaataaagtttatatattgttacttc

SEQ ID NO: 35992 - DNA, 377 bp, Glycine max
  Clone ID: LIB3054-008-Q1-N1-G1
cgttgaaagtgtcaaagaagttgatgcagtcagcacaagcgaacaccctactgtggtggtagctggttcacaagaatgtgtgattctacactaacaaggctctaaaattatgaacaaattcagcaaatccgtagtgctttaagaataattgctgaattgtgtcaccgtttaagtcacatagtattgtgctgtgcttgagccttaaggtcctgtgttgtatgtatttgcttttatctgcctttatgacgcgttcatgtgaaagtacgatgtaataactgctcacctgagtactgttgttggtgttttggggtatgatgtatcataatgcttgacttgactctgagaaataataaattcagttatctgtttgtccttgt

SEQ ID NO: 35993 - DNA, 401 bp, Glycine max
  unsure (1)..(401): unsure at all n locations
  Clone ID: LIB3054-008-Q1-N1-G10
ctacttttatattcacaacananaaaaaaaaaagagagcataaaccaatggctacttcactttcagcaactgggtgtgttggttcttccttctatggaagttggggaacttcaattgttggtgaggactacaccatgctggccaagtcagtgccatcacaagttcgcatggggaagggaaagcccacgagattgcagcctatgatgaagaatgttaatgaagggaaaggtatatttgcacctcttgtggtgatcactcgcaacatcgttggcaagaagcgtttcaaccagcttagaggcaaagcaattgcactacactcccaggtgatcacggaattctgcaaatcaataggagcagatggaaagcagaggcaagggctaatcaggttggccaagaagaat

SEQ ID NO: 35994 - DNA, 386 bp, Glycine max
  unsure (1)..(386): unsure at all n locations
  Clone ID: LIB3054-008-Q1-N1-G11
ctactttgattttcacttcaganaaaaaaaaaagagagcagaaaccagtggctacttcactgtcagcaactgggtgtgttggttcttccttctatggaagttggggaacttcaattgttggtgaggactacaccatgctggccaagtcagtgccatcacaagttcgcatggggaagggaaagcccacgagattgcagcctatgatgaagaatgttaatgaagggaaaggtatatttgcacctcttgtggtgatcactcgcaacatcgttggcaagaagcgtttcaaccagcttagaggcaaagcaattgcactacactcccaggtgatcacggaattctgcaaatcaataggagcagatggaaagcagaggcaagggctaatcagg

SEQ ID NO: 35995 - DNA, 343 bp, Glycine max
  Clone ID: LIB3054-008-Q1-N1-G2
tagcgttgaaagttacaattaagttgatgcaatcagcacaagggaacagcctactgtggtggtagctggttcacaagaatgtgtgattctacactaacaaggctctaaaattatgaacaaattcagcaaatccgtagtgctttaagaataattgctgaattgtgtcaccgtttaagtcacatagtattgtgctgtgcttgagccttaaggtcctgtgttgtatgtatttgcttttatctgcctttatgacgcgttcatgtgaaagtacgatgtaataactgctcacctgaatactgttgttggtgttttggagtatgatgtatcataatgcttgacttgactc

SEQ ID NO: 35996 - DNA, 402 bp, Glycine max
  Clone ID: LIB3054-008-Q1-N1-G3
tttaaagtttcattgaagttgatgcaatcagcacaagcgaacgccctactggggtggtagctggttcacaagaatgtgtgattctacactaacaaagctctaaaattatgaacaaattcaacaaatccgtagtgctttaagaataattgctgaattgtgtcaccgtttaagtcacatagtattgtgctgtgcttgagccttaaggtcctgtgttgtatgtatttgcttttatctgcctttatgacgcgttcatgtgaaagtacgatgtaataactgctcacctgagtactgttgttggtgttttgaggtatgatgtatcataatgcttgacttgactctgagaaataataaatccatttatctgtttgtcctttgtaaaaaaaaacacattttataaaaatt

SEQ ID NO: 35997 - DNA, 377 bp, Glycine max
  Clone ID: LIB3054-008-Q1-N1-G5
cgttaaaagtttcattgaagttgatgcagtcagcacaagcgaacagcctactgtggtggtagctgggtcacaagaatgtgtgattctacactaacaaggctctaaaattatgaacaaattcagcaaatccgtagtgctttaagaataattgctgaattgtgtcaccgtttaagtcacatagtattgtgctgtgcttgagccttaaggtcctgtgttgtatgtatttgcttttatctgcctttatgacgcgttcatgtgaaagtacgatgtaataactgctcacctgagtactgttgttggtgttttggggtatgatgtatcataatgcttgacttgactctgagaaataataaattcagttatctgtttgtccttgt

SEQ ID NO: 35998 - DNA, 403 bp, Glycine max
  Clone ID: LIB3054-008-Q1-N1-G9
cgagggttattggacacattcttcagcgactgcgtttttggatcggaacctcttctgcggcgtagcaatgggacactccaacgtctggaactctcacccaaaaaactacggtcctgcatctcgcacttgccgtgtgtgtgggaatccacatggactgatcaggaagtatggccttatgtgctgcatgcagtgcttccgtagcaatgccaaggaaattgtcttcatgaagtatcggtacaagagcagttgtcaactactgaccaatatagcgtcctggcactaggatgttttgacgatgccatgatcgcagaaacttgagactgtcatttttcatctaactaattatcagacctaatttgtggtactaagaatacttttatataaatcgaattgaacccataaa

SEQ ID NO: 35999 - DNA, 405 bp, Glycine max
  Clone ID: LIB3054-008-Q1-N1-H10
gctgcagcaatgaaagctaaattgtttgctgatcatgaagagcgagaaattcagaggctatgtgccaatattgttaataataagttgaaaagattggaactgaagctgaagcagtttgcagaaattgaaacacagttgatgagagaatgtgaacaagttgagaaggtgaagcagaggttggcttctgatcggtcccatattgtatcaacacgtcttggaaatggtggaaccactccgccaatgaatgttgcaagtgctggtccatccatggttaacaacaacagcaatggtaggcaacaaatgatttctgcttcttcctcacagcctagcatctcaggatatggcaatagccaaccagttcatccacatatgtccttcgtcccacggccttcaatgtttgggttg

SEQ ID NO: 36000 - DNA, 406 bp, Glycine max
  unsure (1)..(406): unsure at all n locations
  Clone ID: LIB3054-008-Q1-N1-H11
ctcacacactttgtactctccgtccttccttcttcgatccagatctgtctccttctccctcaaatggcttcccttctgcaatgttccatgcccctcgtctctctttccaatcgagctctggtacccggtaccaggatctccaacccaagttcagtttccctttcaattaagggaagaagtttcccatccgttacattgcagcccagagggcgtcggtttcagcttagatgtgcggcaaaaccagagacagtgaagaaggtgtgtgacatagtcaagaagcaattggcactgccagatgaatcagctgttactggagagtctaaatttgctgcacttggagctgattctcttgacacggttgagattgtgatgggacttgaggaggaatntggtattaccgtggaag

SEQ ID NO: 36001 - DNA, 280 bp, Glycine max
  unsure (1)..(280): unsure at all n locations
  Clone ID: LIB3054-008-Q1-N1-H12
ggttttagttttggntcctgnggngnnggaccggtgcttgcnatatccaaagggccaagggaaccttaatcaatcttccatacgcttagactcattttttaaaatcattttactatcctgaacctatattattcgtaccatcctaatattgcatatcccttttggtgctacgataactatactaatcatattgcattaaaataagctgataatattatacaacaactaattcatctcattttccggattaatcttaaaccattctttactaacttttata

SEQ ID NO: 36002 - DNA, 412 bp, Glycine max
  unsure (1)..(412): unsure at all n locations
  Clone ID: LIB3054-008-Q1-N1-H2
tggtgtttgagttccattgaaaatgcattgcgacatggtgatgcctacactgatggagagggtaactctttctttttgaatccatggngattagaatttttgaagtgttattctacagggaaagatctgatagaaaccagtggaacctctgctactgctgagcaaattgcatggatggtttctggtgcagctgatacttttgtcagaaaagagaaagaagggttgtcctttcccgggccttttcttttattccttgtaccctcccaagaaaaatctacccaggttcgaacagtttgcaagcctttaaaatctgttggaatacatacagtgagtattcatccaggtgcttccttagatcatcagattcaaggtctgaaaacttgtgagcctgagtttcttggttctactcctg

SEQ ID NO: 36003 - DNA, 428 bp, Glycine max
  unsure (1)..(428): unsure at all n locations
  Clone ID: LIB3054-008-Q1-N1-H4
ggccgagggtagaaggtgggctgatatcatcaagccaggctgtgtcaacactgaccctatctttccaaacacaagcttacaggactgatgtggggtacccaagtgggctttggtttgatccacttggctggggaagtgggttcttctgagaaagatccagggagtttgagaacaaaggagatcaagaatgggaggtntggccatgtggctgtgatgggggcatggttccagcacatttacactggcactggtcctattgacaacctctntgctcaccttgcagatcctggtcatgctactatttttgctgctttcactcccaagtgagaagggttggaacaactctatgattgcaagccttggagaaacattgggaaacttgtttaactaagttgtaaggcttaaatgtctttaggggggagttttta

SEQ ID NO: 36004 - DNA, 362 bp, Glycine max
  Clone ID: LIB3054-008-Q1-N1-H5
caattaattccaattccatatgttcaataaataaggatgcaaaaattgggaaggttaattggaatgagtgggctggcttattaagcctatcctgaatccaaatgaaatgagatctgaattcctcctcgaattccaattccacatttccaagatataacgatgcaaaaatgttcatatatgaattgtaattatctgttattcttattacgcctatcctgaatccaaatcaaatgatatcggaattcctcgtccaattccaattccacattctcatgacctaagtaatgcaaaaacgttcatatatcaattgtaaatatttattattcttatcatgcctatcctcaatccaaaagacatgagat

SEQ ID NO: 36005 - DNA, 181 bp, Glycine max
  Clone ID: LIB3054-008-Q1-N1-H9
gatggcatattatgccctcaaacctgcccatttcaatgataacaagatctcacagagaatcctaatctctcattcacaaaacttttattcattcatattttcatacatcaacaataataacaatactgactaaccttattaaactaatgccaacataaatttgatcgatataactcataca

SEQ ID NO: 36006 - DNA, 352 bp, Glycine max
  Clone ID: LIB3054-009-Q1-N1-A1
gtgaaagagaatccgaggcgaagagaagagaaaaattaagatggaggggaaggagcaggatgtgtcgctgggagcgaacaagttcccggagagacagccgattgggacggcggcgcagagccaagacgacggcaaggactaccaggagccggcgccggcgccactggttgacccgacggagtttacgtcatggtccttttacagagcagggatagcagagtttgtggccacttttctgtttctatacatcactgtcttaaccgtcatgggagtcgccggggctaagtctaagtgcagtaccgttgggattcaaggaatcgcttgggccttcggtggcatgatcttcgccctc

SEQ ID NO: 36007 - DNA, 391 bp, Glycine max
  unsure (1)..(391): unsure at all n locations
  Clone ID: LIB3054-009-Q1-N1-A10
gtaatggtggatttattcttctatagagaacctgaagaggccaagcaacaagaggaagatgaagcaccacctgcccaagattatgccatttcagacttcaatgctgctggcattggcagcttccctgctactgatggccaatggcctgctgcagtcgaacaaccctggactgaagaagctccacaaccaatctcagcagctcctactaactggacaccagaagcagctgctgcaggagattggggtgaggctgttccagctcctgctccagctccagttccacaagctggtgcgcctncagctcaagcttttcctcctgctactggctgggactagcttttgacaagagattttattccatggtgtcaaaaccatagtttttcttcccctc

SEQ ID NO: 36008 - DNA, 398 bp, Glycine max
  Clone ID: LIB3054-009-Q1-N1-A11
gtcagcaggtatcatattgtctaagccgacgacaaaaaatgatcaaacaggttcttcttgttctgctcttcttggcctctggattgaccctctcagtctcagagactgaatctgtttctcttctgcctcacgccgctgagtccttcaatgtcagctatatccagatgaagaacgccgggacttgttcttacttggtggttatatctactagctgttcgtctcctaggtatacaagggatcagatcagtatttcttttggggatgcttatggcaatcagatatatgcaccaagactggatgatccagcttcaggtacatttgagagctgttcttcggatacatttcagataactggtccgtgtgcatatcagatatgttatgtgtacctatatagatct

SEQ ID NO: 36009 - DNA, 344 bp, Glycine max
  Clone ID: LIB3054-009-Q1-N1-A6
cgaagggctatatagcataaacatttgagtcttcattgcacaatgtcgacctcttccattaacgggtggtgcctctcttccatctccccagccaaaacctctctcaagaaggccacattaggcccttctgtcttcgcaaccgttagcactccttcttctccttcttcttcttcttcttcttccttcccttctctcattcaagacaggcctgtctttgctgcccctgcccccatcatcaccccaactgtgagagaggatatggcaaaggaatacgagcaagctattgaagaactccagaaattgttgagggagaagagtgaactcaaagccacagctgctgagaa

SEQ ID NO: 36010 - DNA, 341 bp, Glycine max
  Clone ID: LIB3054-009-Q1-N1-A7
ggaacttaatggtaccagagtagagtagtgcggaagaaaagaaaaacgaaatccctcgctttgagaaatgggtgtattactcttccggtgggttctgccactgactctgttgctcacttgcgcgttaggtttccaatcggacgagcttctcctcgacgaccaagagttcggcatcgagggaggacgagcctccttcgattccgattcgcacccatctcccacctccaccttgaggaagagcttttctgactcctcctccgactccaagatccacttccctctccaacacgctttcggcgactccgatttctccgacgccggcaacttctccggtcgcctta

SEQ ID NO: 36011 - DNA, 362 bp, Glycine max
  Clone ID: LIB3054-009-Q1-N1-A8
cacaactttgcccccttgtaaaacttcttattgtgatgtctaaaagcgaagacttgaagcttttgggaggctggttcagcccatttgccctgagggtgcagattgcccttaacctcaagggtctagaatatgaggttgttgaagagaccttgaatcccaaaagtgacctgcttcttaagtccaaccctgtgcacaagaaaatcccagttttcttccatggagataaagtcatttgtgaatctgcaatcatagttgagtacattgatgaggcttggactaatgttccctccatccttccacaaaatgcttatgatcgtgctaatgctcgattttggtttgcctacattgatgagaagtggttt

SEQ ID NO: 36012 - DNA, 359 bp, Glycine max
  Clone ID: LIB3054-009-Q1-N1-A9
tgcttgttgaattgtccaacaaatatgtcaatgccttctcctattgtctcccctcatctttttcagcacaaccaaactcttctgtatcaggtttcttgaccattggagcctcatcattgccatcatcaccatacaagatcactcccttgatcaagaatctccagattccaagcttggacctacctggattgaccactataaccggagccggaaagccacttagagattcttgcttaaagctccattgttcctaccataattaactttggcccagtaatcacatggcttcctgtggctatttcacaatgcatggaaaaaatcttttgagatgatcatgtccaaaaagtttgcacaggccc

SEQ ID NO: 36013 - DNA, 379 bp, Glycine max
  unsure (1)..(379): unsure at all n locations
  Clone ID: LIB3054-009-Q1-N1-B1
tttacatttctctctccagtatggcttctactcacaatgagttttatgcacttatgctagtggtggtggttggctccatggtggcttcctgtggtgctaacttcaaccaagactttgatctaacatggggtgatcaccgtgctaagatattcaatggtggtcagcttctatctctttctctggacaaagtctctggctccggcttccaatccaagaaagagtacctatttgggaggatcgatatgcaactcaagctcgttgctggcaactctgccggcactgtcactgcttactacttgtcgtctcaagggccaactcatgatgagattgattntgaattcttgggaaacgtgagcggtgacccttacattctccacac

SEQ ID NO: 36014 - DNA, 317 bp, Glycine max
  Clone ID: LIB3054-009-Q1-N1-B11
ttccaggattcctaagtggggggcccagtcctgattaaaagcagttgtagtctgattaggaatcaaggaagaacttccgcatcaattttataactggtagaaaactcacgagcaaagctgatgcatttgagtatgctgaccaagtcttggagcgttggtacccttctgtagaagaagggtacaacaagggcattgtggttcttgtcacgagtcagaaagaatgagcagtcactgatggcccggctttagtcgaagctgtttgggcatagatccttggtgctaccgtgtcaaagaaccttgcatattttgctaccgat

SEQ ID NO: 36015 - DNA, 351 bp, Glycine max
  unsure (1)..(351): unsure at all n locations
  Clone ID: LIB3054-009-Q1-N1-B12
gcgcgacgttttgatacgtactattcatgctgcgcgtgatacgacctcctctgatctgagctggttttctggattctgtactgcatacccgacgtgcanagaaaaatgccggacgaaatctagacggctcgtttgaatacgaagaggtgaacgagatgcgctatctgcaagccgagatttccgatacgatgaggttgtacccgccagtgccagttgacacgatggactgcctatacgacgacatattgacggacggaactagggttgggaaggcgtgcctcgagacttaccacacgtacgcgatgggcatgatgaatagcctgtctcacaatgactgtaccgaacttaatg

SEQ ID NO: 36016 - DNA, 286 bp, Glycine max
  Clone ID: LIB3054-009-Q1-N1-B2
gattcaaaaggaagtccctcctgaatatcagagctatctggtccaagtgacaaaataccaagctgcacaaaactgtaagacctggatcgctggtaagtggatcacgccaagagagcaatactgggcaccacgtgtaacccattttcatcaatttgttgtcccgccaattttaccatttataaaagattgcacttatggtgacctgtcagcgatgagattaccagaatacgtggaaggactaggttgctgtgagtacacgatggataggggagtggttcacgcgtgc

SEQ ID NO: 36017 - DNA, 373 bp, Glycine max
  Clone ID: LIB3054-009-Q1-N1-B3
accccttcttgatgagtgctgaaaagttgcaaagtggaattcccgcatagcctccagaactgatcaggcatagatcccgtgaagctgcagacatgatcaagaccggaaagatgtgcgctctcttcatgaacgatcttgatgcaagagctggtcgtcttggtggaaccacacaatacactgtgaacaaccagatggtgaatgccactctcatgaacattgctgataaccccaccaatgtgcagcttccaggtatgtacaacaaggaagagaacccccgtgttcccatcattgtcaccggtaacgatttctcaacactctatgcacctgtcatccgtgatgggcgtatggagaagttctactgggcaccaacagg

SEQ ID NO: 36018 - DNA, 352 bp, Glycine max
  unsure (1)..(352): unsure at all n locations
  Clone ID: LIB3054-009-Q1-N1-B4
tagggagccaaaatggtgatatatgaattgggaataattggtttcctaattaggctaatctgaaacccaagggaattgaaatcggaattcttcggggaatcccaattccacattttcaagaaataaggaggcaaaaatgttcatatatgaattggaattatttgttttcttattaggcctatcctgaagccaaaggaaatgagatcggaattcctcggngaattccaattccacattttcaagaaataaggaggcaaaaatgttcatatatgaattggaattatttgttttcttattaggcctatcctgaaaccaaaggaaatgagatcggaattcctcgggggtaccgagc

SEQ ID NO: 36019 - DNA, 361 bp, Glycine max
  Clone ID: LIB3054-009-Q1-N1-B5
aaagacagctcatgaatcttcttcttcttggtgccatttcactccccactgctggaatgcttattccctacacctacttctttgtccctccaggttcaggttcttcagctggcggtactgttgccaaggatgccgttggaaatgatgtaattgccgagaattggctcaaggcacatggacctggtgaccgaacccttacacaaggattgaagggagatcctacctatcttgttgtggagaaagacagaacccttgcaacatttgcaattaatgccgtgtgcactcatcttggatgtgtcgcgccatggaatcaagcggggaacatgttcatctgcccttgccatggatctcagtacaatga

SEQ ID NO: 36020 - DNA, 152 bp, Glycine max
  Clone ID: LIB3054-009-Q1-N1-B6
aactcaaaaacacttcttatgaatcttcttattcttgattccagtgcgctcaccactgatggtatgctgatcccctacacctactctctttatccctcccaaatcacatcctaaaacctccgataatgccaacaccacatcctcaagaaact

SEQ ID NO: 36021 - DNA, 369 bp, Glycine max
  Clone ID: LIB3054-009-Q1-N1-C1
gagacatagtaccacgagcattttcttgcaattaccctagagcatgttgcagaactattgaaggctgtcaatgggaacttccgtagtcatccttgtctcaataaacagaagctactatatgcaccaatgggtaatctgctgattctgcagccagatgagaaattttcaccaagccatcatctcctaccatctggcagtggtctatatcttttgtgttgtccattatcagaatccgatgacacagagaagcggctccgagctgctcagatggtcttcttaaactcacctcatccacttgagatattaagtgaccgatctgcttatggatctggaggaagtatacaaagagatcatgacatgaactcttac

SEQ ID NO: 36022 - DNA, 382 bp, Glycine max
  Clone ID: LIB3054-009-Q1-N1-C12
cacagtacttgtgagtgtatacccaacgcagactaagatcaacaaggactactacaaccgcgtgttaaaagattgagagggaacctatcatggaaggttccgcaacccgaccaatgatgggcaactaccaccaccctaatgctgaccgtgtgctgcacgagaagatttgttatgaggaggatgtgattggaggatcccaggacaaccacatgcatcaccaccaccctgagactcatgagagagtcaaggcggtggagtatgaacaagttcctgagaggcgcgttggctatgatgagaaaggtgcttatgacaacgatcgttactactatccaaggtattgaaattggacaaatggaagaacacctatgacgccgtatcatgt

SEQ ID NO: 36023 - DNA, 141 bp, Glycine max
  Clone ID: LIB3054-009-Q1-N1-C3
attttggaagaaaaggaggggagactattagatccagttaaaataataggttaatggactagaatatgtgaaggattttatttcttataaaaatggattttttggacggacagttaaattgatattactgtcctcatcttg

SEQ ID NO: 36024 - DNA, 276 bp, Glycine max
  Clone ID: LIB3054-009-Q1-N1-C4
gaaattatatgaagcacttcagcgagactatgtagcggagtgttgttagtttgaatgtgtctggtgttatacgtttagtacgtatatagattattctactataaatgataaggagcctatcgattgagcatggatattgtacacgaaccgataaactgatacctatatagtcagtcttgattattatgtgatccgtccatgctgtcatgattggcgtgtgctaaataccttgaattctaatgcataccctattgccttaccaactttccctataat

SEQ ID NO: 36025 - DNA, 408 bp, Glycine max
  Clone ID: LIB3054-009-Q1-N1-C8
gttacttgcggaaaaaagctccacaggcaaggaaaaaacgacaccgagccaaaacaagtccctatttacaccaaactagcctacatattaggccttcgtgtttctccacatcacaggagaatgggaatagggatgaagcttgtgaagaaaatggaggaatggttcagggataacggggcagagtatgcatacatggctacggagaaggacaacgttgcatccgtcaagttgttcaccgacaaatgtgggtactcaaagtttcgtaccccctgcattctcgcgaatcctgttttctcgcatcctgctagaatctctcacaaagtgactatcattgaactctctccgagcgatgccgaaatactctaaccgaacaagttttccacaacggagttcttcccgcgcgacgta

SEQ ID NO: 36026 - DNA, 369 bp, Glycine max
  Clone ID: LIB3054-009-Q1-N1-C9
cttacctcggctttcaactccgccataggaggtttctttctgaagtgtgcctttctcaaaacaggttggacgaagtcaatcatctcgttcttcaagccattctctgacaccaacttactcatctaaatgttctaactgtcctaaatgaacattctgcaccctgaacagactaacaccctactgctaccatgccatatgcgtcacacgattgtctccatttacaggtacaaacttctattccactgcacattttcacacaatctgcagtctcttaataataatacctgacatcgctcaccggttaagccatactattgccttgcgctttatccctatcttcctcactgtctaacgtatctgcttctatct

SEQ ID NO: 36027 - DNA, 392 bp, Glycine max
  unsure (1)..(392): unsure at all n locations
  Clone ID: LIB3054-009-Q1-N1-D1
tcaactttgagatattgcatgctcggtgggctatgcttggattcgtcggtgctctgaatcctggaatattaaaactattgggagcctttcactttgtagaaccaatgtggtggcgtgttggatattcaaagctcaagggagatactctagattaccttggtatccaaagtcttcactttgctggaagtcagggagtggtcgtgattgctatttgccaagcactccttatggttggacctgaatatgctagatattgtgggatcgaggcattggagcctcttggaatatatctgcctggtgatataaattatcctggaggagctntgtttgatcccttgaatctgtccaacgatcctgaagcttttgaagagctgaaggtaaaagaaataaaa

SEQ ID NO: 36028 - DNA, 375 bp, Glycine max
  unsure (1)..(375): unsure at all n locations
  Clone ID: LIB3054-009-Q1-N1-D12
caccctnctatccaattacttctcgggcacaatcccttgggtccataaccacctggaaatcactgcaatctcttgacctcgcacacaattccctatgtggggatctccgcaactcaatgaactccctcaccacactccgcagactcgatctcaggttcaacagactaaccggttcaatcccgaagctgccacccaacttgctcgaactcgcgatcaaggccaattctctatctgggtctctccaaaaacaaagctctgaagggatgaagcaattggaagtggtggagctcagcgagaacgcgctcaccggaaccgtcgagtcgtggttctttcttttgccatcgctgcagcaagtggacttggccaacaacacct

SEQ ID NO: 36029 - DNA, 409 bp, Glycine max
  unsure (1)..(409): unsure at all n locations
  Clone ID: LIB3054-009-Q1-N1-D2
tcaactgtgttatattgcatgctcggtgggctatgcttgcgtccgtcggtgctctgattcctgaaatattagacctattgggagcctttcactttgtagaaccagtgtggtggcgtgttggatattcaaagctcaagggagatactctagattaccttggtatccaaggtcttcactttgctggaagtcagggagtggtcgtgattgctatttgccaagcactccttatggttggacctgaatatgctagatattgtgggatcgaggcattggagcctcttggaatatatctgcctggtgatataaattatcctggaggagctttgtttgatcccttgaatctgtccaacgatcctgaagcttttgaagagctgaaggtaaaagaaataaanaatggacgcttgcaatg

SEQ ID NO: 36030 - DNA, 170 bp, Glycine max
  Clone ID: LIB3054-009-Q1-N1-D4
tcagctttcattggtgtggcctagctgttttcttaatgagaaagccttcatctctgcatagcgcacttttgcgcttaggggttcccttgaagctagttatcaccttctggtatgctacttgtactgctgcagcaacaactcaagtttcagggaatgaagagctgccaaag

SEQ ID NO: 36031 - DNA, 406 bp, Glycine max
  unsure (1)..(406): unsure at all n locations
  Clone ID: LIB3054-009-Q1-N1-D5
tggccgaacaacaatcaccaatggcagtggcgaatctgcagagactgtcctcgcaagtgcaccgcctcccctccgtctcgttcttctccaaatccctgatctcccgcacctccacctcttcctcctccacgaagaaggtcgcggaccgcatcgtgcggctgtcggcgatcgacttcgcgggtaagaagcacgaggtggtgggcctggccggtcagaccctgctgaaggcgctgataaacacgggcctggtcgacccggagtcccaccgcctggaggagatcgacgcctgcgcggcccactgcgaggtcaacatcgcgcaggagtggctcgacaagctacccnctcgctcctacgacgaggagtacgtcctcgttcgcaattcccgagcaagggtcctcaacaaaca

SEQ ID NO: 36032 - DNA, 339 bp, Glycine max
  Clone ID: LIB3054-009-Q1-N1-D6
tggcctaactacaatcaccaatggcagtggcgaatgtgcagagactgtcctcgcaagtgcaccgcctcccctccgtctcgttcttctccaaatccctgatctcccgcacctccacctcttcctcctccacgaagaaggtcgcggaccgcatcgtgcggctgtcggcgatcgacttcgcgggtaagaagcacgaggtggtgggcctggccggtcagaccctgctgaaggcgctgataaacacgggcctggtcgacccggagtcccaccgcctggaggagatcgacgcctgcgcggcccactgcgaggtcaacatcgcgcatgagtggctcgacaagctac

SEQ ID NO: 36033 - DNA, 395 bp, Glycine max
  Clone ID: LIB3054-009-Q1-N1-D9
cagaaattcatggagattgggattgaagctatttcaccagatgatgactcagctaagtgtagcagtgcatctgctggtactactattgatcttggacttaataaatcaagccaatctggtcagtctggtgcagaagaaattagacaaactgcttcaagttcctcagatcctcaggtattgagcctgacacaaaatataaatattttggaaagcaagttggaggatttacagggtgtgcttgctctgaaggactctaggattgctgaactcgaagcatccttgagtagtgttaagatttctagggaagaatctgcaagcaccataaatttgtccgagaaaaaatgtgaaggggttgagtcggagctcgaggggcctttcaagctaaggattgaagc

SEQ ID NO: 36034 - DNA, 97 bp, Glycine max
  Clone ID: LIB3054-009-Q1-N1-E10
cacaaagagaagcattagcactaggagcagcaacaactagtctcagctgaaatggcctcttcagtgatggcatctgtggccctcaaacctgcccctt

SEQ ID NO: 36035 - DNA, 407 bp, Glycine max
  Clone ID: LIB3054-009-Q1-N1-E11
ctgaaaacaaagcagtgtctgctgtgggcaaagctgctggagcaaaatggaagaccatgtctgatgctgaaaaagcaccttatgtggcaaagtctgagaaaaggaaagtggagtacgagaagaacatgagagcctataacaagaaacaggcggaaggtcctactggtggggatgaagaagaatctgagaagtctgtatctgaggtgaatgatgaagatgatgatgaggaaggcagtggcgaggaagaggatgacgattagagaatggactgataattgcatttatgtaggttctgatgattttgatcatctgttgtaggtggtctggtcatttcctgataaacatatttcttgcttccaaaaaatatttccctgctccctccgtaaattggttgtctttccaaaacg

SEQ ID NO: 36036 - DNA, 399 bp, Glycine max
  unsure (1)..(399): unsure at all n locations
  Clone ID: LIB3054-009-Q1-N1-E12
ctgtgttaaccactaaaatctctgaagcagaaggcattggctactggcacaagcatgggtgaagaaaagaaagaccaagggaacaaagaagaagccaaagaggaaaagaaggaagaagagaagaaagaagagccaccaccggaaatagtgctcaaaggtgatatgcattgtgaggcctgtgcaaggaaagttgcaaaagcattgaaaggattccaaggagtggaagaggtgagtgcggatagcaggacaagcaaagtggtagtgaaaggaaaggcagcagaccccataaaggtgtgtgagaggctacaaaagaaaagtggtaagaaagtggagctgatttcacccttgccaaaacctncagaggagaaagaagaaccacccatagaagaaccaccaaaa

SEQ ID NO: 36037 - DNA, 236 bp, Glycine max
  unsure (1)..(236): unsure at all n locations
  Clone ID: LIB3054-009-Q1-N1-E2
ggtcaatcaatatagagagagagcaacagttactaactgagctaatactgntggtatgttttggagtctgcaggaaggttgtacatctgtccatatttatgcaatgggcttggatgtctatgcatactcgagtataatactaattggatcaaagtgacattactattcattatggtctcattaccacactgcagggctaaaggtggacctgcgacactcaagcttgtagactggtg

SEQ ID NO: 36038 - DNA, 228 bp, Glycine max
  Clone ID: LIB3054-009-Q1-N1-E3
gcccgattacgcattttcaagaaatcatgaggcttaaatggtcatatatcaattggaattagttggactgttattacgcctatcctgaagcccaatggcttgagatcggcatacctcggtggtaccgagcttgcattcgctatagtgaggtcgcttagctacggcatcatgtgatagctgattgctgagtgaaatcgatattcgatcacaattacagacatcatacga

SEQ ID NO: 36039 - DNA, 416 bp, Glycine max
  Clone ID: LIB3054-009-Q1-N1-E8
tctctatattccattgccacccagttttgaatatatttgtattccttctttgtgtcttcactttcttccatacacataaccatgtcttctcagactgttgtcctcaaagttggtatgtcatgtcaagggtgtgctggagcagtgaacagggttttgggaaaaatggaaggtgttgagtcatttgacattgatctgaaggagcagaaggtgacagtgaaaggaaatgtggagccagatgaagttctgcaagccgtttccaaatctgggaagaagactgcattctgggtggatgaagcaccacaatctaaaaacaagcctttagaaagtgcacctgttgcctcagaaaacaagccttcagaagctgcaactgttgcctcagctgagcctgaaaacaagccttcaaaagctgcaattgt

SEQ ID NO: 36040 - DNA, 398 bp, Glycine max
  Clone ID: LIB3054-009-Q1-N1-E9
ctcttttcgtggaagaccttcatctgagttcaccagggtgggctcatatgtaagtctctttgccaggaagaccttcatctgagttcacactggtgacagcagatgtagaggagaaatcggttataattggtgagagaaatagagtagcaatagaggccctgagagcagcaatggacaagggacacaataaaattgcaatactatatgggggtggccacatgccagatcttgggaggagattgagagaggattttgatttagtcccatctaatgtacagtggataacagcttggtccataacgaaaaaggacctaaatactgattcatttccatttctgaagacaattgctaaggcctcaggctggccattgaaccgctatcagaccttggcattgctc

SEQ ID NO: 36041 - DNA, 382 bp, Glycine max
  unsure (1)..(382): unsure at all n locations
  Clone ID: LIB3054-009-Q1-N1-F10
aaaagttctgccaaatcaagaggggttttaagatcatagtgtgtgttttgcaacaatggctaagttctntgctgctatgatcttggcactctntgccatttccatacttcaaacagtggtaatggctgctaatgaacaaggaggccacttgtatgacaacaagagcaaatatggaagtggaagtgtcaagagttaccaatgcccatcacaatgctcgaggagatgtagccagacccaataccacaagccctgcatgtttttctgtcagaagtgctgcaggacatgcctgtgtgtgcccccggngtattatggtaataaagctgtgtgcccttgctacaacaactggaagaccaaggaaggaggacccaagtgcccttgagct

SEQ ID NO: 36042 - DNA, 363 bp, Glycine max
  Clone ID: LIB3054-009-Q1-N1-F11
ggtgaaattcaacgtactcgagaggccatctccgacaacaatgggtgttcacgacaatctggctacctctcaaagtcgctatcatccccgcactttttgacatcccagtcctgattacattcactactgcagttaaggcatcagtgcgtactccatatagacacatgagcgatatggaagtggatgagtcgagacttagcaactggacagacactgctataggagcattagccagacccacttgcacaacagatcattgtggttctgtgaaagagagcatagcgacatgcgatgctcattggccaagtctattaccatggtctagctgtgcacaactgactccacaactgcacgaccgatcat

SEQ ID NO: 36043 - DNA, 405 bp, Glycine max
  Clone ID: LIB3054-009-Q1-N1-F12
ctggccaacacgaagccgtgggggttaatgggggtcaagtgggagaatcgcgaaggcccgtacgaaagaagatggtacgactcctgaacaatgtggaaaggctacatgttccatttcattgaagcatgctggtccttcgtgattctccaatacaaggtattatcaggaggaacagagaaacttcaacatatactgttgtacattggactggttccatcggagaacgagactgatacgtcgttattagctgcacaataggtaagaagggcaacaggcacagacttcatcatatctttggccgcagatgatatttctcgctccagctacacatatgttgcaatactgacgtgtaagattatgggtaccaagatcactatttatgacagccaacccccacatggagct

SEQ ID NO: 36044 - DNA, 92 bp, Glycine max
  Clone ID: LIB3054-009-Q1-N1-F2
caattcattgtcctttactttagctccaagattatgatgtaatatattcgcctagcaatagaatatatcatatattgtttgcagtaactttt

SEQ ID NO: 36045 - DNA, 317 bp, Glycine max
  Clone ID: LIB3054-009-Q1-N1-F3
cattacaggctccggtttttttactggaaaattatgacccaatatatgagggtaacattggaatacattacataccaattgcagtaccatccttaacttaatcaaaatcgttatgccgcaattttgttttggggctatcactgactagcgaccttttctacttgcccaaagcgtacttgccaatacattaaattaacacatgaattctcatgtcaagcattattatatctggggagtacatggtaagagtagcacaccatgaaatctgaatgcctattatcatgtctaacgttcattatcgcacgtgccacgatgcc

SEQ ID NO: 36046 - DNA, 370 bp, Glycine max
  Clone ID: LIB3054-009-Q1-N1-F4
gctgaggaagtgttgatggtaaaatcagcacaatgtttttgaagatggctttggattcaatctccgaacaagttgatttccctccttgaactcaagcagatggattatgccagaattttgttttgcaaatataactgcgttccgattctttctatttgcccaaagcgtacttgtaaatacattaaattaagacatgaattttcttggcagcagttcttagattgttggagtaggtggtaagagtagcacaccatgaaatctgaatgcctattatcatgtttaacgttaattatcgcacgtgccacgatgccaggatggtatagaacctgaaatagataatcaagtattgggtggggcacaaaataaaaag

SEQ ID NO: 36047 - DNA, 293 bp, Glycine max
  Clone ID: LIB3054-009-Q1-N1-F6
caactctactctaactaatttgctatagcaaaatcagcacaatattatggatagtgctctttagacagtctccgaacaaatcaatttccctccactaactcaatcatattaattattccacaatttaattatgcaaatataactactttccgattctttctatttccccaaaacatacttttaaatacattaaattaatacatgaattttcttaacatcatttcttatattagttcattaatttatatagattaacacactcaacaaatctgaattcctactatcatatttaa

SEQ ID NO: 36048 - DNA, 275 bp, Glycine max
  Clone ID: LIB3054-009-Q1-N1-F7
ctgaaaagtgtaggaggctcatgggccacaaagcggtttgggcttccggaagactgtgattgtgtctcttgggttagggtttatgaggtgcacttgcaatgcgttttacaatttacatcacatttcgttgcgcctctgttctctgtcactgctgcgtctctcgtaaccatgcctaagcaaatccacgagattaaggatttccttctcactgctagaaggaaggacgcaaggtcggtgaagatcaagaggagctgagatgtagttaagtacaaggt

SEQ ID NO: 36049 - DNA, 223 bp, Glycine max
  Clone ID: LIB3054-009-Q1-N1-F8
ctgataagttgaggaggctcatgggccacaaagcggtttgtgctttcggaagactgtgatggcgtctcttgagttagggtttatgacgtgcacttgcaatgcgttttacaatttacatcacattttgattcgcctttgatctctgtcactgctgcatctctagtaaccatgcctaatcaattataccaaattatggatttacttcttacttctataatgaaag

SEQ ID NO: 36050 - DNA, 365 bp, Glycine max
  Clone ID: LIB3054-009-Q1-N1-G1
agacctgctaccatgcatgcacgcctactttagctgatactctggctcaaggcgactatcacattaacaaggcatatcgatgctcaaccgtaccatatacgaattgaagatatctgccttcttaactgtccatcctgaagccacttgaaatgcgatacggcattcctatgtgaatatcaacaacacattttaacgatatattgccgcccctaagatcaaactgtaatcgcaatgatggtgaaaggtaatatggctatcctgaatccataggcaatgctagctgcaaaacgtgattgaacactgtttcacatcaccaagaggtagggatgcctacatgggcatatcttaagagtcatcatgagtga

SEQ ID NO: 36051 - DNA, 393 bp, Glycine max
  Clone ID: LIB3054-009-Q1-N1-G12
catcatgaagcatgggtgagatcgggaatcttggttgggatggtggtgtctatgccatatatggtcaataatcatgcttaacccccagtgcagaagataatgtctatcacatggcacccgacgaagaagctctatgagtcatttgttcaataatatacaatgtgttcattgtgcgatggttaaaatgtatccagcaaattagctgctattccttctgttacgaatgtccatcttgtatgaataactatctggctatactagctactagattgtatatgatatggtcaagttagcatgtgtatgatgtatctcttgtatactacttcatagacaaagaaaaatcatcatgtagctcgcgcgagttataagtggatccatcttttgcatatgttg

SEQ ID NO: 36052 - DNA, 417 bp, Glycine max
  Clone ID: LIB3054-009-Q1-N1-G2
cctgtgtcctacagaagggtaccctgcaggagaaggggaggcataaggttcacaatcaatggccactcctactttaacttggtcctcataacaaacgtaggaggtgctggagatgttcatggtgtggccatcaaagggtcaagaactgggtggatgccaatgtccagaaactggggtcaaaattggcaaagcaacaactatctcaatggccaaagcctctcattcaaggtcaccactagtgatggccgtacagtggtgtcctacaatgttgcccctgctggttggtccttcggccaaacctacactggtgctcaattccgctagagaggccttaataattgttcacaagttgaagttccaaatatatttagttacactacatatggtatatgctataattcctcaatttaagtgtta

SEQ ID NO: 36053 - DNA, 342 bp, Glycine max
  unsure (1)..(342): unsure at all n locations
  Clone ID: LIB3054-009-Q1-N1-G3
ggggaaaatcctcatttttctgagcagccaaacactctctctctggctctcgaaaattctcagtttgcagagaaaatctgaatcatgtcgtggcaagcgtatgtcgacgatcaccttctgtgtgacatcgaaggtaaccacctgactcacgctgctatcatcggccaagacggcagcgtttgggctcagagtaccgacttccctcagttcaaacctgacgagataactgccatcatgaatgactntaatgagcctggatcacttgctccaactggattgtatctcggtggcaccaaatatatggtcatcccgggtgaacccggtgctggcattcgagggaag

SEQ ID NO: 36054 - DNA, 236 bp, Glycine max
  Clone ID: LIB3054-009-Q1-N1-G4
ggtttcaagaagattcacttggcacaatttattgggggaccacagaaagatcaagcattttatggaagaaataaccgtgtcctttaatttgtattcatagtcagatgtgtggtagttgctcacgaacatgtttaagttaatcaagccagctgacatagaatatatgtatttaggatcaattctaccctcaaaagcctattacgaggcttgctcagtgttacacctgtgggtggatt

SEQ ID NO: 36055 - DNA, 412 bp, Glycine max
  Clone ID: LIB3054-009-Q1-N1-G6
gggcgttttgagatagtgtgcctgtcaggctcttacttggttgctgatagtggtggcacccgcaatcgaactgttgcattaagtgtttcacttgcaagtcctgatggtcgtgtcatcggtggaggagttggtggagtgcttattgctgcaagtccagttcaggtgatacttgggagcttttcatggggtgcatcaaagacaaagataaagaaaaaagaaggttcagaaggtgcagaagttgctatggagactgatcatcagacggttcataatccagttgcagtgaatagtatttccccaaatcaaaatcttactccaacctcatctctaagtccttggcctgcatctcgaccattggatatgcgcaattcccatattgacattgatttaatgcgcgggtgacaatttattt

SEQ ID NO: 36056 - DNA, 339 bp, Glycine max
  Clone ID: LIB3054-009-Q1-N1-G7
gttcgataattgtgctgaagtgcgcaaactctatgaaggtggagttacattgcctacaaactttcttagcaatatcactcctataccaataattaaggaactttttcgaactgatggcgaacagttcctcaagtatccaccacctaaagtgatgcaagtcgacaagtctgcatggatgactgatgaagaatttgcaagagaaacaattgctggtttgaatccaaatgtcatcaagattattgaggagttcccactaagtagcaagctagatactcaagcctatggtgatcatacctgtataataacaaaagagcatttggaacctaacttaggtggtct

SEQ ID NO: 36057 - DNA, 402 bp, Glycine max
  Clone ID: LIB3054-009-Q1-N1-H10
ggcaccactttaacttatactataatattataaaatacagggttggataacacggtaactcacatggcacacccgcgtggtactaggttcgtcccgatcaatgtttagtataaactccctgaatcctcacaagggacgacggataagcgttgctgttccacctaagtttccaagcttccggagggaagcagctctgcaggggaatttggaggctgttagagtcccaacttcggtgcctgtgcgtgtagcatacgaacttcttctagctggtcatcgatatttggatgtaaggactccagaagagttcaatgctggacacgctcctggcgccattaacataccttatatgttcagagttggatcagggatgactaagaatagcaactttattagacaggtgtc

SEQ ID NO: 36058 - DNA, 394 bp, Glycine max
  unsure (1)..(394): unsure at all n locations
  Clone ID: LIB3054-009-Q1-N1-H11
ctcttcttccccaccatcacaccaaccaaacctcactctgggtgccatggtcatgggagcctttcgccacttcaaaccggtttccaaatgcagcaccgaaaaccggtttaaccaaaccgtggcctcggacttggacggcaccctcctgggtgtcccctagcgcctttccttactacatgctcgtcgccatcgaaaccggcagcttcctccgtggccttgtcctccttggatccgtccctttcgtgtacttcacgtacatattcttctccgagaccgcggccatcaagtccctgattttcattgccttcgcgggcctgaaggttaaggacattgagatgggcgcgtnctcggtgctgcccaagttctacaccgaggacgtgcaccccgagagctg

SEQ ID NO: 36059 - DNA, 104 bp, Glycine max
  Clone ID: LIB3054-009-Q1-N1-H12
acctggggcaaggtccgcttaaaggtattccggaccttgtgattggaaacctaaggaagcttagattaacccttccaaggggattaccggtggattcccaagga

SEQ ID NO: 36060 - DNA, 192 bp, Glycine max
  Clone ID: LIB3054-009-Q1-N1-H3
ctgtgaaagtgctgtccgatgatttcattacctgtgggcttctgtcaatggtatctgaatgaatggaatttgccatgtatggaatattggttttgatttctttatggccagttattgcatgaatgttaatcatgaaagcagaattctttgtggttatgctgttcaaatatagacgagatttggttctaatcc

SEQ ID NO: 36061 - DNA, 304 bp, Glycine max
  Clone ID: LIB3054-009-Q1-N1-H6
ggcttccttaagctccttagtgctgctccttgcagctcgaattctatcccctcaagttcttgcaaactatgagaatcccccagtgtacaagcctcccactgagaaaccaccagtttataagcccccagttgagaagcctcctgtttacaaacctccagttgaaaaccccccaatttataagccttcagtagagaagccaccagtgtacaagcccccagtcgagaaacccccagttgataagccctcagttgagaaaccaccaatgtacaagctcccaagtgaaaaacccccaatgtacaagccc

SEQ ID NO: 36062 - DNA, 393 bp, Glycine max
  Clone ID: LIB3054-010-Q1-N1-A10
tttagtcacaccaagatcaacttttcagttgagaggtttagccttgattactaagagcaccaagccaacccatatgagcaaaaacaccaagtagtgttttcactcacactgtttaacaaattcttgctccaatggagagcatattttttcagtctctctcccttgcaaagattccaaagtctcaaacttcacctctgctgaattcaccactcttgtttcactccaatgcaacctcagttgctttcagttcggtaccctatcatcaccaccatttgctcaagtgctttctgtttagatccaaagcaaacgaatagcagaacctggtgggagttttacgtgcctctgaggctgcaacatccctaacaaccaatgatgcagaaagatggcttcttg

SEQ ID NO: 36063 - DNA, 388 bp, Glycine max
  Clone ID: LIB3054-010-Q1-N1-A11
caagcctccagatgcttttgtaactcgtgtgcattcagctcagagaacagaagacgaagactatgctgagggaagtgagacagggttttctgagtcacctgcaaatcctgctaatggtcctgcatccccacctactgccaggcaatcagcacctacatctgcaataggtgcaccagccacacctccacctgttgcacctgtgccagatttacttggagatttgatgggcatggataattctattgttcctattgatcagccagctactcctactgggcctccattacctattttactacctgctgcaactggtctgggtttacaaattagtgcacaactgactagacaagatggtcaaatattttatagtttggtgtttgagaacaac

SEQ ID NO: 36064 - DNA, 383 bp, Glycine max
  Clone ID: LIB3054-010-Q1-N1-A3
ccccttggggaattccaattccacattttcaaaaattaaggaggcaaaatggtgcttttttaaatgggaataattggtttcctaattaggcctatcctgaacccaaaggaaatgagatcggaaattcctcggggaattccaattccacattttcaagaaataaggaggcaaaaatgttcatatatgaattggaattatttgttttcttattaggcctatcctgaagccaaaggaaatgagatcggaattcctcggggaattccaattccacattttcaagaaataaggaggcaaaaatgttcatatatgaattggaattatttgttttcttattaggcctatcctgaagccaaaggaaatgagatcggaattcctcgggggta

SEQ ID NO: 36065 - DNA, 409 bp, Glycine max
  Clone ID: LIB3054-010-Q1-N1-A6
gacgagaggggtgccactattatctatgcaacacatatatttgacggcctcgaggattggccaacaaatattgtttatgtagcccatgggaagctgcaactagcaatgcctatggacaaagtcaaagaaattagcaaattatcactaatgagaacagtagaaagttggctgcggaaagaacgagatgaagatagaaagaaaaggaaagagagaaaagcagctggtcttcctgaatttggaaagcgagttgaggaaagccgtgtaacaggggatccagcgcgtgctgcagttcgagtaattaataatggttgggctgcaggacgattaacttccaccgttgctggtgaggaaaactttctcctgagctcaaaccgagtattgaggcagtagataaatttcaaatgctatt

SEQ ID NO: 36066 - DNA, 410 bp, Glycine max
  Clone ID: LIB3054-010-Q1-N1-A7
gactataggtttgccactattatctatgcaacagatatatgggacggcctcgaggattggccaacaaatattgtttatgtagcccatgggaagctgcaactagcaatgcctatggacaaagtcaaagaaattagcaaattatcactaatgagaacagtagaaagttggctgcggaaagaacgagatgaagatagaaagaaaaggaaagagagaaaagcagctggtcttcctgaatttggaaagcgagttgaggaaagccgtgtaacaggggatccagcgcgtgctgcagttcgagtaattaataatggttgggctgcaggacgattaacttccaccgttgctggtgaggaaaactatctcctgagctcaaaccgagtattgaagcagtagataaatttcaaatgctattg

SEQ ID NO: 36067 - DNA, 409 bp, Glycine max
  Clone ID: LIB3054-010-Q1-N1-A8
gactttaggtgtgccactattatctatgcaacacagatatgggacggcctagaggattgggcaacaaatattgtttatgtagcccatgggaagctgcaactagcaatgcctatggacaaagtcaaagaaattagcaaattatcactaatgagaacagtagaaagttggctgcggaaagaacgagatgaagatagaaagaaaaggaaagagagaaaagcagctggtcttcctgaatttggaaagcgagttgaggaaagccgtgtaacaggggatccagcgcgtgctgcagttcgagtaattaataatggttgggctgcaggacgattaacttccaccgttgctggtgaggaaaactttctcctgagctcacaccgagtattgaggcagtagataaatttcaaatgctatt

SEQ ID NO: 36068 - DNA, 401 bp, Glycine max
  Clone ID: LIB3054-010-Q1-N1-A9
gattagaggtctgccactattatctatgcaacgcatatatgtaactgtctaaaggattaggcaacaaatattgtttatgtatcccatgggaagctgcaactagcaatgcctatggacaaagtcaaagaaattagcatattatcactaatgacaacagtacaaagtttactgcagaaagaactatatgaatatataaagaaaatgaaagagagaaaagcaactggtcttcctgaattctgaaagcgagttgaggaaagccgtgtaacaagttatccagcacgtgctgcaattcgagtaattaataatgattgtactgcatgacgattaacttccaccgttgctgatgaggaaaactttctcctgagctcaaaccgaatattgaagcaatacataaatttcaa

SEQ ID NO: 36069 - DNA, 383 bp, Glycine max
  Clone ID: LIB3054-010-Q1-N1-B1
attggtttctgctatccatgctatgatgcataaccggccaccacattttagtgggatgttaatggcttaaccacctgtccaagttgacattctgagggtgtgtgccatgaagatgtgaagcttacatgtaaagaaattaccagctctggttgcattctttggagagtgtgttgttctgaggtatatacatgcacagagagtattttacatttggtggcaatagatcttatttgtaagagttaagttaggagtttgctgcaaaacaaacacaaagtaaaggttccttactcattttcacttattttacttgtttttagacaatattttggttttatttggctccatgtcatcttaatatagtttcaagtataatcgagtttatc

SEQ ID NO: 36070 - DNA, 399 bp, Glycine max
  Clone ID: LIB3054-010-Q1-N1-B10
gaaatgttgctaacattgtcccaccatatgaccagtcaaaatacgctggaactggggcagcagttgagtatgctgttttgcatcttaaggtgtctgagattgtggtcattggacacagtgcttgtggtggtattaaggggcttctgtctttcccatatgatggaacctactctactgattttattgaggagtgggtcaaaattggcttgcctgcaaaggcaaaggtgaagacacaacatggggatgcaccttttgctgagttgtgctcacactgtgagaaggaagctgtgaatgtttcccttggaaaccttctaacatacccatttgttagagatggcttggtgaacaagacattgtcactaaaaggaggatactatgactttgttaagggatcttttg

SEQ ID NO: 36071 - DNA, 412 bp, Glycine max
  Clone ID: LIB3054-010-Q1-N1-B11
aattatgtacttattgtgaaaccatcagggtttgcttgtccttctattattgttgcttttaggtttctgaagagctcttggaaggcaaggagttggagttttacaaatgggaaggagatgtacctgaattgttgaaagatgttcatgataagctcaacatgctttcagagcattggtctctagatgacaagaatagatgtttaaaagaaactactaaggcattccgttatatgggacaaattgttcgtctaattgtctcataaatagacatttgttctccttttttgttgttgaccttctttgatgtttcaatgttttgtagctgcctggccaaggtgccttacatctgtgatagatctgcacaatcttattgataaggatattaagggcatagcacaaccgataaagacac

SEQ ID NO: 36072 - DNA, 396 bp, Glycine max
  Clone ID: LIB3054-010-Q1-N1-B12
ggaaaaaacattgattctggtggtgagttaactgaaaaggaaattatcagagctgagaggaactctgggtttatcagtaacagagtgagagaaattcaaatgctaaatgctttgaggaaaagggaacaaaaagagcgcagggaaaaggatttgagggaaggattacaactatataagaatggcaaatatgatgaagcactagagaaatttgagtctattttaggatcaaagccagaacctgaggaagcagcagttgcaagttacaatgttgcttgttgttactctaagctaaaccagattcaagctgcactttcttcactagaagaagctctgaatactggttttgaagacttcaagagaataagaactgatcctgacctggctaacgcaagggca

SEQ ID NO: 36073 - DNA, 357 bp, Glycine max
  Clone ID: LIB3054-010-Q1-N1-B3
aaaccctagtctccatacatcaacttgggaggttaaagagacggcaacgttgtgctgtccgccttgaccgagccagagcttcgtcttggccctcgattttgccctgtaaaactaatcccagtaacaacagaaataatcaatggcaccgaaacagaccaaggctgagaagaagatcgcttacgatgcgaagctgtgcgacctaatggaggagtacggccaaatcctcgttgtaaactccgacaacgtgggatcgaaccagctccagaacattcgcaagggtcttcgcggcgactctgttgtcctcatggggaagaacaccatgatgaagcgctctgtcaggatgcacgctgagaaaac

SEQ ID NO: 36074 - DNA, 410 bp, Glycine max
  Clone ID: LIB3054-010-Q1-N1-B5
ctttctcacacaatctgggaaccacacacacaaaccattcccttttctcactacggcaatgaccacccaagcttccaccttcgccgtcgccgttccctccgtcgcaacccctttccgccgccaccggaatcccttcgttgttcgagcccaagcggaaccttcagataaatccgttgaaattatgaggaagttctcagagcaatacgcccgtaagtcaggaacatacttttgtgttgacaagggggtcacttctgttgttatcaaggggttggctgaccataaagatacgttgggtgcaccactgtgcccttgccggcattacgatgataaagctgctgaggttgcacaaggattttggaattgcccttgtgttcccatgagagagaggaaagagtgccactgcatgctat

SEQ ID NO: 36075 - DNA, 173 bp, Glycine max
  Clone ID: LIB3054-010-Q1-N1-B6
gctttttctcctccaaagccaagatagaggcaaattttggaatgtaattaataattatctactagtaactcgtggaacacaagtgttccttaaaagacaagttaaagtctagaatgaggagcggaaaacaatttggaaaagtggatatttctgtatgaagcgaacattgtgag

SEQ ID NO: 36076 - DNA, 403 bp, Glycine max
  Clone ID: LIB3054-010-Q1-N1-B8
caaattctcattatctctctctctctgtttcgctttcaccgaagaataacttgactttcccgaactccacctgagaaaaagatacccttaattcgcaggcgcgtcttgtgttggacaacaaccacaagatgattaacttcgaagaaaccgagttgcgactcggcctccctggcaacgactcagcactcaagggaagtgctgccaagagaggcttctctgaaactgcttctgttgatttgaagcttaatctttcttcttgtattaacgactctgcctcggattcaccctcatctatgtctacagagaagcccaaagagaacaagactaccactgctgaacctcctccagctaatgatccagcaaaaccacctgcaaaggcacaagtggtgggttggccaccagt

SEQ ID NO: 36077 - DNA, 394 bp, Glycine max
  Clone ID: LIB3054-010-Q1-N1-B9
ctatatcctcattatctctctctctctgtttcggtttcaccgaagaataacttgactttcccgaactccacctgagaaaaagatacccttaattcgcaggcgcgtcttgtgttggacaacaaccacaagatgattaacttcgaagaaaccgagttgcgactcggcctccctggcaacgactcagcactcaagggaagtgctgccaagagaggcttctctgaaactgcttctgttgatttgaagcttaatctttcttcttgtattaacgactctgcctcggattcaccctcatctatgtctacagagaagcccaaagagaacaagactaccactgctgaacctcctccagctaatgatccagcaaaaccacctgcaaaggcacaagtggtgggtt

SEQ ID NO: 36078 - DNA, 398 bp, Glycine max
  Clone ID: LIB3054-010-Q1-N1-C11
gagttctcatatctccttcaaaagatgttgaagcagctgtcaattgggttattggtggtgaggagaatcctgacatctcattgcatatgcggatgcttatgaataggtccataagagctgtacaggctgcattgcattgcatcaaaaaagtcatagagagtcagcacctaacttctagaccaaaggtggttgtggtgtcagatacaccttctcttgttaaaagtatcatgcccaacataagcgaatttgcacaggttctttattttgattatgaaaagttcaaaggaaatatctttgaaggtttgcccaagttagattttagagtgaaggattggggtccagcacccagatgggttgcttttgtggatttttttcttgcatctcgagctaaatatgct

SEQ ID NO: 36079 - DNA, 399 bp, Glycine max
  Clone ID: LIB3054-010-Q1-N1-C12
cacagaatcaagaatcgggatagcacagataagtccagctgctacagaagtttgcacgcacgcattttccttctgtaaaatacatggagtatgctgttgaagttgaaaaccacaaccacagttaaaatgtttttgcagcagaaatcaaatcctcctaataatgcttgactgttacattgagtttaagtgtagccatgagactagcaatatccataaacaccgtttacataatcccataccccttcacaaacctgaaataccccgttccagacacaaccccaaattcccgttccttcatcgtgaagatatctgatccttgaatctccaagctgcttcctttgaatttcccattggtgaagatcacggagaaaaccatgtacaagcctttgccatcaagct

SEQ ID NO: 36080 - DNA, 407 bp, Glycine max
  Clone ID: LIB3054-010-Q1-N1-C5
ggaagtccctcaagaacatcaaagctatcttgtccaagggacaaaattccaagctgcacaaaactgcaagacctggatcgatggtgagtggatcacgccaggagagcaatactgggcaccacgtggaacccattatcatcaatatgttgtcccaccaattttatcatttagaaaagattgcacttatggtgacctggcagccatgagattaccagaagacgtggaaggacttgggtgttgtgagtacacgatggataggggagtggttcacgcgtgccatgcaggaggagtggtacatagccttgaaggttggtctcatcacgaagttggggccatagatgttaacagaatcgatcttgtgtgggaagcagcactcagacatggcctaagaccagtgtcaagtttca

SEQ ID NO: 36081 - DNA, 416 bp, Glycine max
  Clone ID: LIB3054-010-Q1-N1-C6
cgagctaggaaattactttgcaaagatgaaagatatcttgtggaactggcaaaataccaagctgcacaaaactgcaagacctggatcgttggtaagtggatcacgccaagagagcaatactgggcaccacgtggaacccattttcatcaatttgttgtcccaccaattttatcatttagaaaagattgcacttatggtgacctggcagccatgagattaccagaagacgtggaaggacttgggtgttgtgagtacacgatggataggggagtggttcacgcgtgccatgcaggaggagtggtacatagccttgaaggttggtctcatcacgaagttggggccatagatgttaacagaatcgatcttgtgtgggaagcagcactcaaacatggcctaagaccagtgtcaagtttcac

SEQ ID NO: 36082 - DNA, 409 bp, Glycine max
  Clone ID: LIB3054-010-Q1-N1-C7
tagggtatcccctctagaaaatcaaagctatcttgtgcgacttgcaaaataccaagcgtggcaggactgcaagacctggatcgttggtaagtggatcacgccaagagagcaatactgggcaccacgtggaacccattttcatcaatttgttgtcccaccaattttatcatttagaaaagattgcacttatggtgacctggcagccatgagattaccagaagacgtggaaggacttgggtgttgtgagtacacgatggataggggagtggttcacgcgtgccatgcatgaagagtggtacatagccttgaaggttggtctcatcacgaagttggggccatagatgttaacagaatcgatcttgtgtgggaagcagcactcaaacatggcctaagaccagtgtcaagtttc

SEQ ID NO: 36083 - DNA, 395 bp, Glycine max
  Clone ID: LIB3054-005-Q1-N1-F11
gaagcacatagagaagcattagcactaggagcagcaacaactagtctcagctgaaatggcctcttcagtgatggcatctgtggccctcaaacctgcccctttcactgttgagaagtcctcagtgagaggccttccctctctctcaaggaactcttcttcattcagagttgtggccagtggcaagaagatcaagactgacaaaccttatggaattaatggtggcatggctttgagggatggaactgatgcatctggcaggaaaggaaagggaaagggtgtttaccagtttgtagacaaatacggtgctaatgtcgatggttacagtcctatctacgacaccaaagactggtctccataccgtgatgtctacgctggcggtacgactggcttggcta

SEQ ID NO: 36084 - DNA, 354 bp, Glycine max
  Clone ID: LIB3054-005-Q1-N1-F12
cagagaaaaatcggttggggttcgtagtgatgcgctgcgtatttgtgaaattgatgcggcgcggtgcacgctgaagtgaagaatcactatgaatatgactaagggaataactccaagagattattctctgttgctcaagccctgccctttatcttctcttggtttactccattctctccaggtaaccttttatttatttccctcattaggtgggaaagaaatagatggcaacgtggtttgctttgtccagtatatttcccaaacgtaagttggttcaacttttgattcgtcgcttctcattttccctaaattaattgcttcattgcgtcagtgttctctggtcaattggtaacc

SEQ ID NO: 36085 - DNA, 413 bp, Glycine max
  Clone ID: LIB3054-005-Q1-N1-F3
caaaaaaagacaaaaactacttccttctctcctttgctgtgttttctttctcaaaaatgggtcgtacctatgttcttatgatggttgctgcattgttgttgagctccaccatggctcaatctccagcttcgtcgccggctttgtcccccacccacacgccggtggccactccacctaggagggcgttgtcgccgtctccgtcgtctgtgtcaccagcggcttcacccgccaccggaaattctcctccggcaccacctacttcttctccttcggaatcgccacttccatcagctgctactcccaacatctctccctcgaccatctcgactccaccatctgaaggaccagctgcaaacggtgccgttttcaacagagtttccggatctgctctgcttctcattttcgctgcggct

SEQ ID NO: 36086 - DNA, 400 bp, Glycine max
  Clone ID: LIB3054-005-Q1-N1-F4
aaagatctcagttgggaaagaaattcgagagaaattttctggtgcagttgaagtgttctcctggaggaaccctgcaaatgctagtcctcgtggtgatcacaccaaacatagaagttttgaggatgcaccagtgcaaaaggatttgcactatgcgcaacacaattccactcgatatggcagcagttcaagaagagccatgatctcatcgaacaggccaatatcctcaggtgaccatactggcaggcaaaccataactgggagccgtccatctggtgctcacagagttcaaccagtgtatgacaccaaacaagcaacttatacgcatggtggctctataagaggccgtgatgatcctctgcggaactttgagctcctcaatatcaagaagtaattaagtaaa

SEQ ID NO: 36087 - DNA, 104 bp, Glycine max
  Clone ID: LIB3054-005-Q1-N1-F5
aaaaggaatggttcgctacccatattcttatctatcctgaagccaaaggaaatgagatcggaattcctcgaggaattccaattccacattttcaagaaataaag

SEQ ID NO: 36088 - DNA, 395 bp, Glycine max
  Clone ID: LIB3054-005-Q1-N1-F6
ctcgagccgtcattgttcactttcaaatcaactcaagagagtcaaccaagaaatatagaagctagggttttgttacatttgtgttagcacgcaatactttgcaaatatggagagcagcttaggagacatgttggttaaggttgtggtgttcattctagttcaagccttggtttaccttatcctctccaattcatcaaacgtgttcaacaagaacatgaagaaatctaacagcttcaggccggcacgttcggtgagcattcgccggatgctcgctttgatctctgattttcctccagaagaagaaccctctccttcaccgaagggtgctaaaacaacatcacttcatcaaagtgatcaataattgtaaggatttaattaaattggggctgcaatta

SEQ ID NO: 36089 - DNA, 395 bp, Glycine max
  Clone ID: LIB3054-005-Q1-N1-F9
cggctcgagctattataaccaaacactcttcttcatatgcttcttcttcttcttgttcttgttctatctgtgacgagcatcatggcctcgagagcagtgctattgttggctatgtgtgtgcttccggccatggttgtggccattcgcccagcaaagaaccctttttgcgtgaagggtcgcgtctactgtgacccttgccgtgctggttttgagacctcagcaaccacctacattgccggtgctgagattatgttgcaatgcaagagcagggttagcaacgaggttgtgtacaccaagaaggggtacactgactcaactggagcatacacaatgtacgtggacgaggatcacgcagatcaaatatgcagtgccaagcttgtaagcagccctcaccc

SEQ ID NO: 36090 - DNA, 302 bp, Glycine max
  Clone ID: LIB3054-005-Q1-N1-G11
ctcactcaatggcttggcactcgttcctcttattagcgacggccattctcgccgttgtgtgctccgccgtgagcggttgctcgccatcggatagggcggcgctgctggccttccggaaggcgctgagcgagccctaccttggcctgttcaactcgtggacgggcttcaactgctgcctcgactggtacggcatcagctgcgactccacctcctgtcgtgtcaccgacatcaaccttcgcggagagtcctaatacccgatttccgtgaatgcctgtcgttccgattacatgacaggaaaactc

SEQ ID NO: 36091 - DNA, 428 bp, Glycine max
  Clone ID: LIB3054-005-Q1-N1-G12
tacgatgcctgcacgcctactctagcatgatcctctggctgaagcccaattccacatcttcaagaaataaggacgcgcgatgcgttcatatagtcgaattggagcttattcagttacacttattaagcctatcctgaatccaaaggaaatgagatcggaattcctcggggaattccaattccacattgtcaagaaataaggtggcatatatgttcatatctgaatcggaattattcgttatcttattaggcctatcctgaagccaaaggaaatgatatcggaattcctcggtgaattccaattccacattttcaagaaataaggaggcaaaaatgttcatatatgaatcggaattattcgattacttactacgccgatccatgagccaaaggacatgagatcggaattcctgggcggtaccaagctcg

SEQ ID NO: 36092 - DNA, 414 bp, Glycine max
  unsure (1)..(414): unsure at all n locations
  Clone ID: LIB3054-005-Q1-N1-G2
cttgaaattggaatttgatgacagcattggaatgagtggcgaggatgtaaagccattgcctgatcatataaaaaatgctctgcataccatttttgatcgctactccacctatttgaattcctttggacccgacgagagctatctacggaagaaggtggagacagagttgggtgcaaagatgattcacttaaaaatgagatgcagtggccttggtgccgagtggggaaaggttacggttcttggaacttctggacttgcaggttcatatgttgagcaaagagcataaaagcaatattttagaaacagtgcatgtaattgtttgtctctgttttatatcatgcttttgaggatgcctgtagactcnnttgatttgttttgcctgaccctttttgtcccaagcgtttgatagcatgg

SEQ ID NO: 36093 - DNA, 406 bp, Glycine max
  unsure (1)..(406): unsure at all n locations
  Clone ID: LIB3054-005-Q1-N1-G3
cttggaaaacccacaggcacgctgagcatggaacacagaaccctagaactcaacctggcttcagcaaaggatctcaaagacttgaatatattctcaaagatggatgtatatgctgtgctttcactctccggcgatcaaaagaccaagactcccgtccacagaaacggcggcaccaacccaacatggaattttccggtcaagttcacttttgatgaatcggtggcgcggcagaaccgtttggccctcgaaatcaagatccgctccgagcgcgccctcgccaccgataaggacatcggccaggtccacgttcctctcatggaactcctcaagcaacctggcgacgataaatccttccagcacgttagttaccaggtcagaaaaccctncggcaaacccaagggagccc

SEQ ID NO: 36094 - DNA, 401 bp, Glycine max
  Clone ID: LIB3054-005-Q1-N1-G7
cttctaaaaaaataaaattaagaaattttcatggtaaccattcgtgcagatgaaattagtaaaattatccgtgaacgcattgagcaatataatacggaagtaaaaattgtaaatacgggtaccgtacttcaagtaggcgacggtattgctcgtatttatggtcttgatgaagtaatggcgggtgaattagtggaatttgaagagggtactataggcattgctttgaatttggaatccaaaaatgttggtgttgtattaatgggtgatggtttgatgatacaagagggaagttcagtaaaagcaacaggaagaattgctcagatacctgtaagtgaggcttatttgagtcgtgttataaatgccctggctaaaccaattgatggtcgaggagaaatttcagc

SEQ ID NO: 36095 - DNA, 115 bp, Glycine max
  Clone ID: LIB3054-005-Q1-N1-G8
caaaaaccttatttctgatgtttacatttcaggaatttgtggcagttatttagtacgtgaggaaggaaactctgaaaatgtataaaatttgactgaggcttatttaattgatgag

SEQ ID NO: 36096 - DNA, 244 bp, Glycine max
  Clone ID: LIB3054-005-Q1-N1-G9
attgaaatggggcacaaaaatattagctctatcctgaagccaaaagacatgacatcactattcctacaccaactgcaattccacatttccaagatatacagctgcacaaatgtacatatatgaatagcaattacctgttttctatattatgcctatcctgaacccaaactaaatgatatctgaatctctcggtgaattacaattccacatttccaagaaataaagtggcatatatgttcatata

SEQ ID NO: 36097 - DNA, 413 bp, Glycine max
  Clone ID: LIB3054-005-Q1-N1-H1
gtttttctccgtttgcagcacaacgaatttcgaaatcccgtggagaacgtaacgtgctctggtttctggactcgaagatgaaggccacaaaggaattgagcgagcaagtggaggaaaacgaggtcaaggttttggttgaggaggacgacgaagaatacgagtccgtggatgaagtagtagacgacgcagaagatgatgaagacgaagaagaggacgatgacgacgacgaaggagacgacaatgacgacgaggaagatgatgctcctgacggcggtgacgacgacgacgacgaagatgatgaagaagaaggtgatgtccagcgtggtggtgagcctgacgatgacgataacgactcagacgacgactcagacgacgacgaagatgaagacgaggaggacgaggaggagcaaggg

SEQ ID NO: 36098 - DNA, 215 bp, Glycine max
  Clone ID: LIB3054-005-Q1-N1-H10
tagcttcgagatttcgttttggaaacccgaccaccttaaaggggaggggtcgaacttaagagaggcgaggacaacactaaaccaaccttagaagtggctgtacatcctaagaattgtcctacaaactgaaaacacagacgcttctattgttcacatcactgaattaccatacatgctggacctgataatcaatagataatattaccatagcctta

SEQ ID NO: 36099 - DNA, 304 bp, Glycine max
  Clone ID: LIB3054-005-Q1-N1-H11
cctttttcttatactattgttggcaataacaatgatgggtgtgattgctgcaagggcaggacaagagaaatggaactgttctcgttagagtgtagcaagaaacctaagattattggtgctttgtaacgttacgttaggttttttttttctttttatttttcggcagtttctgtaactgatgaaagaaagaaggtacaagaactgcggtgtagtgacatgacaagttgctgcaaattgcaaaatgtcaattgtatattacttaatattattagatgttgaaattaggtgtaatgtaacaaaaact

SEQ ID NO: 36100 - DNA, 390 bp, Glycine max
  Clone ID: LIB3054-005-Q1-N1-H12
cccggttcagatactattgttggcaataacaataatgcaagtgggtgctgcaatggcaagagaagagaaatggaactgttctcgttagagtgtagcaagaaacctaagattattggtgctttgtaacgttacgttaggtttttattttcttttgttttttcgggagtttttgtgactgatgaaagaaagaaggtacaagaactgcggtgtagtggcatggcaagttgctgcaaagtgcaaaaggtgaattgtatattacttaatattattagatgttgaaattaggtgtaatgtaacaaaaactgtacaagatgatgataaaaggttctaagaaggggagaagaataatatacataaaagatatcatatgaaaactcgttaatggtaaaa

SEQ ID NO: 36101 - DNA, 121 bp, Glycine max
  Clone ID: LIB3054-005-Q1-N1-H2
ctctttttcttatggcagcgcaaccaataacgaaagccaggctattttctaacgtgctctggtcatctttactccaagatgaatgccacaaaggaatttatcgatcatgtgaacgaaaact

SEQ ID NO: 36102 - DNA, 414 bp, Glycine max
  Clone ID: LIB3054-005-Q1-N1-H5
ggaaaaggcacgtacacgaccaccgtttagctgtgtttgaagttcgaacgttgaaattaattgagctgcgcctgcgcgtgtcactgtttgagagcacacaaacaatgtcctccgaatcacacgccgttgattgtaacttgaaggagacggagctcaccttaggccttcccggcaccaaaactactgccacaaaacgtggcttctctgatacccttcctccttctcaaaataaaatcttgcgccccacctccaaattcccaacacccaacagggaacaactggtggggtggccgccggtgagggcaagcaggaagaatgctatgaagagctgttgcaagttggtgaaagtggcggtggatggagctccttatctaagaaaagtggatcttgacatgtacgatagttatgagcatt

SEQ ID NO: 36103 - DNA, 288 bp, Glycine max
  Clone ID: LIB3054-005-Q1-N1-H6
cgcatactcttgtgttcgaacacacggtagctagaataggaatcgtgacgttcctaaccattcataggctcctgcacatgtcgctgacacagaccacacatacattttcctcttaattacacgcttatgatatacctttactggaaaacatgatctgctcaaaccttgaccatcccagaaccactggcacaaacttcgaattctatggtctcctaactgcctgataacattcatgcccgagcactacctgcacattccaaagatcgaacaagcttcacctaatgagtt

SEQ ID NO: 36104 - DNA, 391 bp, Glycine max
  Clone ID: LIB3054-005-Q1-N1-H9
cgacggtggcacaggaaagacaaccttcgtgaagaggcatctcactggtgaattcgagaagaaatatgaaccgaccattggtgtggaggttcatccgttggattttttcacgaactgtggaaagattcgcttctattgttgggatactgctgggcaagagaagtttggtggcctcagagatggatattatatccatgggcaatgtgcgattatcatgtttgatgttactgcccgtctaacatacaaaaatgtccctacctggcaccgtgatctttgccgggtctgtgaaaacatcccaattgttctttgcggtaacaaggttgatgtcaagaataggcaagtgaaagcaaaggcagttacttttcacaggaagaagaattgcagtactatg

SEQ ID NO: 36105 - DNA, 428 bp, Glycine max
  Clone ID: LIB3054-006-Q1-N1-A1
agctaccactgttcagaagtgctacattgagcttgccaagcaagtcaaggaaaagctttccaaggtagatccttactttgacaagttggcagatgccatggtcacttggattgaagcttgggatgagcttaaccctgcgggagcatcagtggccaatggcaaagcgtgaatcggtttttggttaactgcataacagccacaaaacttggaagtggaactatttatatactgtattttttttccttagtatttatcttcaacttagctgttattctcggcttaaaatttgcagcattgttagctgtaattctgtttaataacttcatcatttgagcttagaaacaataagtacacccatagggcgttactttctttttattattggttgatgggtaaagatcacatggcagcatttcggtacatgtgaa

SEQ ID NO: 36106 - DNA, 121 bp, Glycine max
  Clone ID: LIB3054-006-Q1-N1-A11
gccaaacttgtttaatgtgattaatttcttgctttcttgtgtaagctttgtgcatcattttctcagacactttgttgactgatattttaagaaaatcaaatgatgagggaaaattttctat

SEQ ID NO: 36107 - DNA, 421 bp, Glycine max
  Clone ID: LIB3054-006-Q1-N1-A12
gtctaagcagaaatggcctcttcagtgatggcatctgtggccctcaaacctgcccctttcactgttgagaagtcctcagttagaggccttccctccctctcaaggaactcctcttcattcagagttgtggccagtggtggcaagaagatcaagactgacaagccttatggaattaatggtggcatggctttgagggaaggagttgatgcatctggcaggaaaggaaagggaaagggcgtttaccagtttgtagacaaatacggtgctaatgtcgatggttacagtcctatctacgacaccaaggactggtctccaaccggtgatgtctacgctggcggtacgactggcttggctatctgggctgtgactctacttggtcttcttgctggtggtgcacttcttgtctacaacacaagtgctt

SEQ ID NO: 36108 - DNA, 371 bp, Glycine max
  Clone ID: LIB3054-006-Q1-N1-A2
gcaagctagctaggttgaaaatagtttggttttgtagtaagtgaggtgaggtgccaaaatggtgaagataactcttggtactttcgatgactcttttggtgttgcctctcttaaggcttatttggcagagttccatgcaactctgattttcgtgttcgctggtgttggttcagccatcgcttacaacgagcttacaaaagatgcagccttggatccaacggggctggtggcagtagctgtggcccatgcatttgcactgtttgtaggtgtctccgtcgcagccaacatctcgggtggccatttgaacccagctgttacttttggattggccattggaggcaacatcaccctcattactggtttcttatact

SEQ ID NO: 36109 - DNA, 291 bp, Glycine max
  Clone ID: LIB3054-006-Q1-N1-A5
gcataaatgctacattgagctatccaagctagggacggaaaacctgtgcatggtagatccttaatgtgacaagttagcagacgccattgcctctcgaattgaaccttgtcattagcttaaccctgcgggagcatcataggacaatgactgacatgaatatgcacttaattaactgcataacagtcacaaaactagtaaatgcaactatatatatactgcatgtaatttgcttagtccagatcttcaacttatccgctaatcatggctaaaaattccgagcattataagact

SEQ ID NO: 36110 - DNA, 402 bp, Glycine max
  Clone ID: LIB3054-006-Q1-N1-A8
ctcgatcgatcgatctcgaacatgagcactggggagcttgtcaacatcgaacctctcgaactcaagttcccctttgagctgaagaagcagatctcatgttctcttcaattgtccaataagaccgatagctatgtggccttcaaggtgaaaacaaccaatccgaagaagtattgtgttcgtccgaacactggtattgtcacgccacgatctacgtgtgatgttatcgttaccatgcaagcgcaaaaagaggctcctgctgatatgcaatgcaaggataagtttcttcttcagagcgtaaaaactgttgatggtaccagtccgaatgatatcactgcagacatgttcaacaaggaggcagggcatgtgtgtgaggagcgcatattgatagtgctttatgttttt

SEQ ID NO: 36111 - DNA, 411 bp, Glycine max
  Clone ID: LIB3054-006-Q1-N1-B1
catatatccattaggagacagctacaactaatcgaagaggaagagcaggggcgatccctggaacttaagaagagaagtcttgcacagctgccgtttgcccaaaaatatttcttcagttcacctcattttggcttctccatggatgagtcaaggatttcagatgatcacttcaatttccagcctgcagaagaatctttcagttttccactgcatgccaaatccaggcatacagactccaattactctgatgaggacagcaatcaaggactcaatctcccggacagtccattcgcatttccactagatagtgggatgtaaacagtcatagtttcagatacatatacaagaaatatagagttcacaaacagaaccaggccaatggtagcagctttcttttgatacacaattctt

SEQ ID NO: 36112 - DNA, 404 bp, Glycine max
  Clone ID: LIB3054-006-Q1-N1-B2
gcagagaagtgagatacactaagttatcctcataaatacactctaattaggtggcaagataagtgtctaaccttagtaacattgccacatattgtgttcattttggaattgtgccactaaaattctattcaattcatctatggctgcctcttcttatgctatgcaatcaatcctggcaaaccctttgatccgcatttccagcgggtctagggtgaaccaatttggcgttcctgctttgcacatgagaaggaatgttggcctgagagttaggtccatggctaaggaagaacaaccaagtgagcctgcaaccccagttacaccgtcaccatcagtagaacccaagccacagccagtctctgctccttcaccaaaagtgagcactaagttttctgatgtgttggcat

SEQ ID NO: 36113 - DNA, 402 bp, Glycine max
  Clone ID: LIB3054-006-Q1-N1-B4
taggataattcttattcctcattttcaagaaataatgaggcgaggatgtgcatatatgaatcggaattatgtgttttcttattaggcctatcctgaagccaaaggaaatgagatcggaattcctcggggaattccaattccacattttcaagaaataaggaggcaaaaatgttcatatatgaattggaattatttgttttcttattaggcctatcctgaagccaaaggaaatgagatcggaattcctcggggaattccaattccacattttcaagaaataaggaggcaaaaatgttcatatatgaattggaattatttgttttcttattaggcctatcctgaagccaaaggaaatgaaatcggaattcctcgggggtaccgagctcgaatttcctatagtga

SEQ ID NO: 36114 - DNA, 257 bp, Glycine max
  Clone ID: LIB3054-006-Q1-N1-B6
ggtaataccaaatttgacaaagctttttaggggaagaaaaacactagggatacatagtgaaattaaatagaaaaagtgataattatggctcttgatatttatcactgctaaaatttagaagcagggaagagtgtgtgtgaggcaacatatctattagtgagtgtcatgtaattcccatcacagaacccatgttctcactatgtcccttcttcccttccttttaatattatcattcccacctggctcgagtgtttttc

SEQ ID NO: 36115 - DNA, 354 bp, Glycine max
  Clone ID: LIB3054-006-Q1-N1-C10
gtaccacttttagttgctctaaaaaattagggggatattggggtacctgatgatgtagctccgacatttcccattggcaacaaaatattgcaatgaaagcaagcgaaccaatgtgtaaaaaattgccagcctggaaaatttattcaattagtatattttcactagttgttactgtgaaataatggaatgcttgtttctttgggatgttgctgttttctgttgattgatttaaaagaaaatcaaataatggtcttagaaaggagttttagaccttgtcttaattacagggttattatgccaatgatgaatgacccaactgatattgaattgtatcgattgcaaagttttgaatcc

SEQ ID NO: 36116 - DNA, 203 bp, Glycine max
  Clone ID: LIB3054-006-Q1-N1-C11
cccctcggggaatttctatagctcattatcaagaaataaagaagcggaaaagtgcatatatcaatagggattatgtgacttcttattatgcctatcctgaaaccacaagaaatgagatcggaattccttcggggtaccgagcttcaaattccctataatgaggtctattaaaatcctaaacattttataaatgatttcttggg

SEQ ID NO: 36117 - DNA, 413 bp, Glycine max
  Clone ID: LIB3054-006-Q1-N1-C12
gaaattaaacgtctgcggaaagcaacaatgtcaggacctgagtgttgctcaaacccaccagttctgaaccccaatgcaggagctggccatgttgaaaaactcgctggtctcaattcctatctctccggttcccctaattccattgccattcttctcatctccgacatttatggctatgaagcaccaaatttgaggaatattgcagacaaggttgcagctgctggttattatgtggttgttcctgacttcttccatggtgatccatataatcctgagaatgctagcaggtctatccctgtttggttaaaagatcatggcacggacaaaggatctgaagctgcaaaatccataattgaagctttgaaaagtaaaggtgtgatggctattgcggctgctggattttgctggggggc

SEQ ID NO: 36118 - DNA, 328 bp, Glycine max
  Clone ID: LIB3054-006-Q1-N1-C2
gaagagttttactgtttaagtgggacggttatcatcaacagaatgcgtatcttttggagtggagtctgctgttgccgtatttggcctatcatgaagacaagggacatgtgatcggtgttactcggggaattccaatttcacattttgaagaaatacaggaggcaaaaatgttcatatattaattggaattatttgttttcttattaggcctatcctgaagccaaaggaaatgagatcggaattcctcggggaattccaatttcacatttttaagatataaggaggcaaaaatgttcatatatgaattggaattatttgttttcttatt

SEQ ID NO: 36119 - DNA, 405 bp, Glycine max
  Clone ID: LIB3054-006-Q1-N1-C3
gtccctcaatacagccttcatggaatggctgaggcctttatgtcaattggacacttggagtttttctatgaccaggcccctgagagtatgaggagcactgccatggcattattttggactgctatcgctgctgggaactatgtgagtaccattatggttactttggtccacaagttcagtgctgggtctaatgggtcaaattggctccctgacaacaacctcaacaaagggaagttggagtacttttactggcttatcaccatattgcagtttctcaatcttatttactacttggtttgtgccaaattgtacacctacaagccaattcaggtccatgacaaaggggatagcaattcagaagggaaccaaattgagctctctaccacggtttaagtgtggtgttgt

SEQ ID NO: 36120 - DNA, 409 bp, Glycine max
  unsure (1)..(409): unsure at all n locations
  Clone ID: LIB3054-006-Q1-N1-C5
caaaatgactaggagctcagagtaagagctaacatcttggaatatatcagcatgtgctaaatctttatactggcaggcatgctggaggcttctgttctcatttacttccctaaaatgattgagctgaggtagccaattggcgagccacatttttgtcattaacacgatcccccatgcgttttcattgctaaattttattatcaaataacatgtattagtgttttattttatttttttacctcatccatattgtaaatttaataggcattggtgtagattgtagcgtttattgttgtaatcaccatatggtatggtgcagcttccaatatagtttgacagcgggaagctttgcttgtaactgacgtacataaatntatccaatgaaaatgcaaatataagtattttctat

SEQ ID NO: 36121 - DNA, 277 bp, Glycine max
  Clone ID: LIB3054-006-Q1-N1-C7
taatggctagagccaacatgtcagtatatctcatcaagtgctaaaactacaaactggcatgcgattctgaaggccactgccatgacatacattcctaacagcaatcacctcaggtaactatttgactaccaacatggttactattaacaacatcttcaatgcttggtcaaagctaacaaatatgatcaaataccacgtcttaaacaattataagattgagttaccttactcacatagcaccataaatcagcatcgcagtctaatgtactacttattg

SEQ ID NO: 36122 - DNA, 175 bp, Glycine max
  Clone ID: LIB3054-006-Q1-N1-C9
atccctacttcaaggatccatttccctcataaaatgctgcggttccttgtagggttcaactgaaaccattccaagccttaatctgtctattctgctgccctctgcaccgagattgacattcttcctcagtcccaagctgtgattacgtataccgagtcgtgttaaatgtctgatc

SEQ ID NO: 36123 - DNA, 393 bp, Glycine max
  Clone ID: LIB3054-006-Q1-N1-D1
gtccctcaatacagtttttcatggaatggctgaagcctttgtgtcggttgtacacttggagtctatctatgaccagtcccctgatagtatgaggagcactgccatggcattatttttgactgctatcgctgctgggaactatgtgagtaccattatggttactttggtccacaagttcattgctgtgtctaattggtcaaatttgctccctgacaacaacctcaacaaatgtaatgttgagtacttttactggcttattaccatattgcactttgtcaatcttatttactacttgtgttgtgcctaattttacaccttctatccaattcatgttcatgactatagttattgcatttcataaagtaacccaattagatctttttaccatgttta

SEQ ID NO: 36124 - DNA, 385 bp, Glycine max
  unsure (1)..(385): unsure at all n locations
  Clone ID: LIB3054-006-Q1-N1-D11
atccctcactaggagctcttctccattggttcttcatctgcatgcacacacttgcatagttttggaaaccaagaatttttgaagggtagcatcaacaagaagttctgaaaatggagatcaccaatgtcagcgagtatgaagctattgcaaagcagaagttgccaaagatggtgtttgactactacgcatctggtgcagaggaccagtggactctgcaggagaacagaaatgccttttccagaattttgtttcggccacgtattcttattgatgtgagcaagatagacatcacaactactgtnctgggctttaaaaaatccatgccaatcatgcttgccccaacagccatgcagaaaatggctcatcctgagggagaatatgcaac

SEQ ID NO: 36125 - DNA, 60 bp, Glycine max
  Clone ID: LIB3054-006-Q1-N1-D3
ttcagataatgtgaattatcttgtgtatccgaatccaacttaatgttacttgctttttac

SEQ ID NO: 36126 - DNA, 243 bp, Glycine max
  Clone ID: LIB3054-006-Q1-N1-D4
gttaaagcatatatttatttatggaaatccaattccaaaggtatggtttcaaactttgatggaactattacaaaatcttattcttttaatcaattcattcctttatttgtcaaatatttacacaatctattatataatgcttttctgtgctatcaatgaaaatttataccaactactttttcttaatacccatacaattatttcagtcatatttaatcttaaactattttcttaaccttaaac

SEQ ID NO: 36127 - DNA, 325 bp, Glycine max
  Clone ID: LIB3054-006-Q1-N1-D5
attttatctttccctaaatatgatgtacagtatcgtactgttcccttaaaaaaaaaaaaaaaaaaaaaaaaaaaaaaaaaaaaaaaaaaaaaaaaaaaaaaaaaaaaaaaaaaaaaaaaaaaaaaaaaaaaaaaaaaaaaaaaaaaaaaaaaaaaaaaaaaaaaaaaaaaaaaaaaaaaaaaaaaaaaaaaaaaaggatagctcctccaaattaaacattttaaccccttaaataatttctaaacctaatccatacgtaaaaaaaaattacaaaatttaggatattttaaaaatttacctaaataagtctaaaatctattccctc

SEQ ID NO: 36128 - DNA, 436 bp, Glycine max
  Clone ID: LIB3054-006-Q1-N1-D6
ctatgacgcacacgcacgcatacttaaactgggactccaggttgatacttttatttatttatggaagtggaatgcaagaggtttagtttcatacgttgatggaactattacaaagtctgatgttttggggcaattcatgcctttagttggcaaagattggacacaatctgtagtggcaaggcttttctgtgctattaatgaaaatggataccaactactttttctgagtgcccgtgcaattgtccagtcatatctaaccataaacttcttgcttaacctgaaacatgattgaaaaaccttaccaaattgacctgttgttatatcacctgatggattattttcctcgctttaccgtaaatttattaataataacacctttattaattcaaaaatgcttgattaaatgatttattataaactttttcccaatttactt

SEQ ID NO: 36129 - DNA, 54 bp, Glycine max
  Clone ID: LIB3054-006-Q1-N1-D7
gttcactgtacattatttatggattacctccataaaagaaaagagcgttaatcg

SEQ ID NO: 36130 - DNA, 228 bp, Glycine max
  Clone ID: LIB3054-006-Q1-N1-D9
acatctaatgcacgccatgcacacctgcgtaatctggctatacatctcgagttcaaagcttcttaacatattgacgattaatcgtatctggttaaatacaaaattgcagccgccactgacatatttcgtgatgaatataaagcgaatgagattgaataagctgcccaggcctacatgtgacagtatttgtccccagtggactttattaatgtccaacaatttgcacat

SEQ ID NO: 36131 - DNA, 368 bp, Glycine max
  Clone ID: LIB3054-006-Q1-N1-E10
gctgtgatgtctcttacgtcagaaattgttgcggcacttggtgcaacccttcccttggagatcaagggagaaattgaggagtttctcaaagtggttttcactctgtttcaagacctggattttactttcttagagatgaatcctttcacattggttgatggaaagccttatcctttggatatgagaggcgagctagatgacactgctgctttcaagaacttcaagaaatggggagacattgaatttccactgccatttggaagggttatgagtgccaccgagtctttcattcatggattagatgaaaagacaagtgcatccttaaaattcacagtgttgaacccaaagggccgaatttggacaatggt

SEQ ID NO: 36132 - DNA, 421 bp, Glycine max
  Clone ID: LIB3054-006-Q1-N1-E2
gttgatgctcatatttatttatggaagtggaatgcaagaattgtaatttcagacgttgatggaactattacaaagtctgatgttttggggcaattcatgcctttagttggcaaagattggacacaatctggagtggcaaggcttttctgtgctattaaggaaaatggataccaactactttttctgagtgcccgtgcaattgtccaggcatatctaaccagaaacttcttgcttaacctgaaacaggatggaaaaaccttaccaaatggacctgttgttatatcacctgatggattatttccctcgctttaccgagaagtgataagaagagcacctcacgagttcaagattgcttgtttagaggatatcaaaagacttttcccatctgactataatccattctatgctggatttggcaata

SEQ ID NO: 36133 - DNA, 434 bp, Glycine max
  Clone ID: LIB3054-006-Q1-N1-E3
gcagaacagttatctgcagttgtgtaatttcctagtcatggatttctgaagactgaacagcattgataatctttccccctcatcagatggatggctactgtatataattttcctctgggccctgtggtgcataagattggctttgcttagattctgagaaggaagttcctgagctctgccattcaaatatctgatttattttcatgaacatgaagcttagcttcccttctgagatgaaaagctggttactatctcccttgcaccgaggtttctgctaaagctttgccatctgtaaaacagtaagttatgaaattcccataaatatgtatggaccttgattatgaggttttttggtcatactgcccgcttaaagtattttaattcaatcttttttttcatccattctggatgtttttagcttcctatattatttt

SEQ ID NO: 36134 - DNA, 253 bp, Glycine max
  Clone ID: LIB3054-006-Q1-N1-E4
aaccttaaccgttcatcggttaattttcaaccagaactatgattaaactctctaaactaaaggcaaaacatataaaactggcataaaatgcgaattttggaccacccattaagaagcaaagtgccggcaagattcgtcttctcaaaaatataagcgagctgaatctaccaaaatcatgtaccatacaattccccaatggcaaagatgacccgatgaacttccaagcttcaattccctctaatgatggatatta

SEQ ID NO: 36135 - DNA, 192 bp, Glycine max
  Clone ID: LIB3054-006-Q1-N1-E6
ggatcaactttccaggcttccccatgcacccagtgcaccgtttcaaacaacaccatcggtcatcgaagttccagaagaggaagaggaggacatggatgtaaggccaaaacgtcgtatatggagtggtgaagattttgaatctgatcatgatgatgtcatgttttgttcattgaaattttatgtatctttatt

SEQ ID NO: 36136 - DNA, 357 bp, Glycine max
  Clone ID: LIB3054-006-Q1-N1-E7
gttttctctttcttcctctctatcacactcacctatggctcccatctcaaaactcattcctttcctattcttaacaacccttttagtgtctctccaagttaatgccagagacagccaattcttcagcaaagtcacccctctcaacatcaacattaaagagactgaggttcccaaatatgaaggccaagtaaacaagccagaacaacaaccagttttcaccccagaaacagaaaacagctatggtctatatggtcatgagactggtctgcaccctgccaccactacattaacttatgctgctccctacaccaccgtcaccatctacaagccattcaaaactaccacagctgaagagga

SEQ ID NO: 36137 - DNA, 419 bp, Glycine max
  Clone ID: LIB3054-006-Q1-N1-E8
gaaaacccctaaccccaacctcaaccttaacctctcctcactttcttttcaaccagaactatgattaagctttttaaagtaaaggaaaaacagagagaactggcagaaaatgcgagtggtggaccacccgttaagaagcaaagtgccggcgagttgcgtcttcacaaagatataagcgagctgaatctaccaaaatcatgtaccatgcaattccccaatggcaaagatgacctgatgaactttgaagtttcaattcgacctgatgatggatattacttaggtggcacatttttgttttcctttcaagtgtctcccatctatccacatgaagcaccaaaggttaaatgcaagacaaaggtctatcatccaaatattgacttggaaggaaatgtttgtctcaacatcttacgagaagattg

SEQ ID NO: 36138 - DNA, 206 bp, Glycine max
  Clone ID: LIB3054-006-Q1-N1-E9
gccacttgcttatgtagttgcactgtttcagtgcaatgctatggatttactatgctttcgtcaaaagggaagctgcccttcttctcattaccattaacacatttggaattgttgtggagtcaatttaccttgcaatcttcctactttatgccccaaggaagcctaggcttaacaccataaagctgtttctcttactgaatgtgttt

SEQ ID NO: 36139 - DNA, 347 bp, Glycine max
  Clone ID: LIB3054-006-Q1-N1-F1
gatcccctcgcgaatgctatactttattttcaagaaataaagaggcgagaatggggatatatgaattggaattatttgttttcttattaggcctatcctgaagccaaaggaaatgagatcggaattcctcggggaattccaattccacattttcaagaaataaggaggcaaaaatgttcatatatgaattggaattatttgttttcttattaggcctatcctgaagccaaaggaaatgagatcggaattcctcggggaattccaattccacattttcaagaaataaggaggcaaaaatgttcatatatgaattggaattatttgttatcttattaggcctatcctga

SEQ ID NO: 36140 - DNA, 266 bp, Glycine max
  Clone ID: LIB3054-006-Q1-N1-F10
ctcgagccgttatgactctggtttcaacaagccatcgtgtgagtctgctggcggtggctatgaaggtggttacaacagaacatctgattctaaggatgagccagttaccggtgaaggctttaaaaggggcatttttaaatcaggggagaaatttgaaggaaaatattaccaattgttaatttttaactttccttactttggcctttaattacaacaagaacttttggtttaacaagggtgaaaatttttagggccttggtccaaaa

SEQ ID NO: 36141 - DNA, 271 bp, Glycine max
  Clone ID: LIB3054-006-Q1-N1-F12
gtgcttcactatgagcttctgcaaatgggctgatatcattgtcatctgtgcattttcagcagacacccttggcaagattgctggagggttgtgtgacaatctactgacatgcatcgttcgagcctgtgactactgcaagccattctttgttgcaccagtcattaacacttttatgtggatcaattctattacagatcttcatcttcattttctttgtttatctttgctttttttttcaatttagttttttacatttattttattttttttt

SEQ ID NO: 36142 - DNA, 342 bp, Glycine max
  Clone ID: LIB3054-006-Q1-N1-F3
tcgctgtagagatcccctcgggaatgtctatcctctattgtcaagaaataaggaggcaagaatgggcatatatgaattggaattatttgttttcttattaggcctatcctgaagccaaaggaaatgagatcggaattcctcggggaattccaattccacattttcaagaaataaggaagcaaaaatgttcatatatgaattggaattatttggtttcttattaggcctattctgaaaccaaaagaaatgagatcggaattccttggggaattccaatttcacattttcaagaaataaggaagcaaaaatgttcatatatgaattggaattatttgttttctt

SEQ ID NO: 36143 - DNA, 386 bp, Glycine max
  Clone ID: LIB3054-006-Q1-N1-F4
atcacagggccagttttgcactatgacaatgggagaaccataaaagacgcttatgaccaaagggtcgcttcctcaattcgtctctccacattgtttccatagagtgcagcaacccactaacataaaaactacctcagaaacatataagggtatttcacaacaagacaaacatccactcccatcccagcagtgtagcatgcaggggaagagcgatcacttaaatgatcctgttgcttccattgatgcgaaactgctgcaggcacaatctcaatttggtgctgtcgatgctgctgcagtagctgttgctgctcacaggcattcaagggcctttcagtatggattgtcataagttgtgaggttttagagagatgcatacaataaatatg

SEQ ID NO: 36144 - DNA, 404 bp, Glycine max
  Clone ID: LIB3054-006-Q1-N1-F6
atcacagggtcagttttgcactatgacaatgggagaaccagaaaaggcgcttatgaccaaagggtcgcttcctcaattcgtctctccacattgtttccatagagtgcagcaacccactaacataaaaactacctcagaaacatataagggtatttcacaacaagacaaacatccactcccatcccagcagtgtagcatgcacgggaagagcgatcacttaaatgatcctgttgcttccattgatgcgaaactgctgcatgcacaatctcaatttggtgctgtcgatgctgctgcagtaactggtgctgctcacaagcattcaggggcctttcagtatggattgtcataagttgtgaggttttagagagatgcatacaataaatatgcatgctttatgtaattgc

SEQ ID NO: 36145 - DNA, 299 bp, Glycine max
  Clone ID: LIB3054-006-Q1-N1-F7
atatatgaatcggagctatgcagatctcttattacgctctatcctgaagccaaaggaaatgacatcggaattcctcggtgaattccaattccacattttcaataaataaggaggcaaaaatgttcatatatgaattggaattatctgttttcttattatgcctatcctgaaaccaaaagaaatgagatcgtaattcctcggggaatatcaattccacattatcaagaaataatgaggcaaaaatgttcatatattgaattggaattatttgttttcttattaagcctatccttgaacca

SEQ ID NO: 36146 - DNA, 398 bp, Glycine max
  Clone ID: LIB3054-006-Q1-N1-F8
atcacagggtcagttttgcactatgacaatgggagaaccgtgaaagacgcttatgaccaaagggtcgcttcctcaattcgtctctccacattgtttccatagagtgcagcaacccactaacataaaaactacctcagaaacatataagggtatttcacaacaagacaaacatccactcccatcccagcagtgtagcatgcacgggaagagcgatcacttaaatgatcctgttgcttccattgatgcgaaactgctgcaggcacaatctcaatttggtgctgtcgatgctgctgcagtagctgttgctgctcacaggcattcaggggcctttcagtatggattgtcataagttgtgaagttttagagagatgcatacaataaatatgcatgctttatgt

SEQ ID NO: 36147 - DNA, 275 bp, Glycine max
  Clone ID: LIB3054-006-Q1-N1-F9
ctgatctgctgaaacacgccacactcttcttaccatgggcgtcctcgatcacttgtgggatgacaccgtcgccggtcctcgcccggagaacggccttggcaagctccgaaagcaccacaccttcgctttccgatctgcctccggcaaggaatcagacagcggaagcgtgaaatcgtacggtgaagatttgccggaggatgcggtgagagtgacgcgaagtatcatgatcgtgaaaccacctggtggtaaccagagtccgagcggatccgatccgg

SEQ ID NO: 36148 - DNA, 376 bp, Glycine max
  unsure (1)..(376): unsure at all n locations
  Clone ID: LIB3054-006-Q1-N1-G1
gattcaaaaggaagcccctcctgaatatcagagctatcttgtccaagtgacaaaataccaagctgcacaaaactgtaagacctggatcgttggtaagtggatcacgccaagagagcaatactgggcaccacgtggaacccattttcatcaatttgttgtcccgccaattttaccatttagaaaagattgcacttatggtgacctggcagcgatgagattaccagaagacgtggaaggactagggtgttgtgagtacacgatggataggggagtggttcacgcgtgccatgcangatgagtggtacatagccttgaaaggtggccttatcacgaaagtggggccatagatgttaacagattcgatcttgtgtgggaa

SEQ ID NO: 36149 - DNA, 389 bp, Glycine max
  Clone ID: LIB3054-006-Q1-N1-G12
atgcttaatttagttgtgaacaacagcaacgacataaatgaagccgatgcatgagggttttggattcatttcattaagatgatctggttatctgtcttcttatttttaaaatttaaagtctttgtgtgatgtctgtaaggcattctaagtatgattattatgagcagcttgattcgcgtcatgggccaatgatatcctctgcttataagctttaataagcccaacttatgtgtgatgtacggttgtgattagaggattgaatgtgcagactctagcattgcagcaaagtcatatatatgcatcatttaatttactgtaaggctattatggcagtctacggctaatgagcttgatgaccctgtaattaattgctgaccgttacctgcaag

SEQ ID NO: 36150 - DNA, 408 bp, Glycine max
  Clone ID: LIB3054-006-Q1-N1-G2
tctagatcacagggtttagtttttgcactatgtacaatgggcagaaccagtaaaagacgacttatgaccaaagggtcgccttactcaattcgtactctccacattgtattccatatgagtgcatgcaacctcactaacatataaaactactctcagaaacatatataagttatttcacaacaagacaaacatccactcccatcccagcaatgtaacattcatgggaagagcgatcacttaaatgatcctgttgcttccattgatgcgaaactgctgcaagcacaatctcaatttggtgctgtccatgctgctgcaataactgttgctgctcacaggcattcaagggcctttcattattgattgtcataagttgtgaggttttagatagatgcatacaattaatattca

SEQ ID NO: 36151 - DNA, 217 bp, Glycine max
  Clone ID: LIB3054-006-Q1-N1-G5
ttcttgaaatgggactctaggattcaaatttaagcttcctcctgaatatcaaatctatctggtccagtttacataataccaagctgcacaaaactgttatacctggatcgttggtaagtggatcacgccaagagagcaatactgtgcaccacgtgtaacccattttcatcaatttgttgacccgtcaattttaccatttataaaagattgcacttat

SEQ ID NO: 36152 - DNA, 368 bp, Glycine max
  Clone ID: LIB3054-006-Q1-N1-G7
ctgaagagaataagtgaaggatctcttttttggggagtttgtcttggaaattcatcaacatcgctctattgatttgggaaattgaaagtatccgaagccttttgtacagttagcttactattgttgttattacgaattactattattattatcatgtgctatgttacttaattaactctatcgtgtctgttattttcacttacttgctaatctcatctcattgatgtacaaatgtataaatatgtaggatccaagaggaatcttgttattcaaaaaaaaaaaaaaaaaaaaaaaaaaaaaaaaaaaaaaaaaaaaaaaaaaaaaaaaaaaaaaaaaaaaaaaaaaaaaaaaaaaaaaaaaggggcggc

SEQ ID NO: 36153 - DNA, 355 bp, Glycine max
  unsure (1)..(355): unsure at all n locations
  Clone ID: LIB3054-006-Q1-N1-G9
aaataaaggaagcgggaaatgtgtcatatattgaaattggaattatgttgttttcttattaaggcctaatcctgaaagccaaagggaaatgaagatcgtgaatatcctccggggaattctcaattctcacaattttcacagaaataagtgaggcaanaaatggttcatatattgaattggaattattatgttttcttattaaggcctatcctcgaagcccaaaggaaatgagatcggaattctctcggggaaattccaattccacattttcaagaaataaggaggcaaaaatgttcatatatgaattggaattatttgttttcttattatgcctatcctgaaaccaaaggaaatg

SEQ ID NO: 36154 - DNA, 395 bp, Glycine max
  Clone ID: LIB3054-006-Q1-N1-H10
ccgtgaactcgaagtgatccactccaggtgggccatgctcggagccttgggctgcgtcttcccggagttgctgtcccgcaacggggtgaagttcggagaagccgtgtggttcaaggccgggtcccagatcttcagcgagggtgggctcgactacttgggcaacccaagcctgatccacgcccagagcatcctcgccatctgggccacacaagttatcctaatgggtgccgttgaaggttaccgtattgctggtggccccctcggtgaggtcactgacccaatctacccaggtggcagcttcgacccattgggccttgctgatgacccagaggcttttgctgagcttaaggtgaaggaactcaagaacggacgattggccatgttctctatgtttg

SEQ ID NO: 36155 - DNA, 312 bp, Glycine max
  Clone ID: LIB3054-006-Q1-N1-H12
atgcttaatcaagttgggaacaacaacaacaacaaaaatcaagccaatgtttgtgggttttggtttcatttcattaagatgatctgtttatctcttttcttctttttaaaatttaaagtctttgtattttgtatgtaaagatgtaaaattatgattattaggtggtgcatgtgtcgcgtcatgggccaatgttatcctctgcttttaagttggaagaggcccaactcatgtgtgatgtacggctgtgattgtgtaatttaatttgcaaaatcaaaaataacaccagagtcatatatatgcatctctttattt

SEQ ID NO: 36156 - DNA, 255 bp, Glycine max
  Clone ID: LIB3054-006-Q1-N1-H2
gtgatgacatatggaaagcaccaaagtccaaacccttcatgtttgacagaattgagtttttaaggaggtttgtgtaattaaggaggggataccatgagtgccatgtgatttttgtatgtattggttgtaccatatgttttcttcttttacttttcattgttttgccccctctgttctgtaatttaattagcaaaggacaaacgttgacatagtatctgaacttttacaggatatatcgaatatgttgaatttcac

SEQ ID NO: 36157 - DNA, 264 bp, Glycine max
  Clone ID: LIB3054-006-Q1-N1-H3
acataacataaaatcttcctccgggtcaagcttcatctctatctgtgtattcatctccgttaagcataaatcatgggttcgatggtgctgagccaactcgccaccggtcttagcgttctaaccggagcggatctggtgaaatcggttatggaccataagcccatggcaggcccattcactcgctgccccacgtgcaacagaacccgtcgagtcacgtacctctgctcgcgtttgtccgacagctacgtctgatgcttcacgtgc

SEQ ID NO: 36158 - DNA, 419 bp, Glycine max
  Clone ID: LIB3054-006-Q1-N1-H5
acacttcacatacataacataaaatcttcctccgttcaatcttcatctctctctctctattcatctccgttaagcaaaaatcatgggtccgatggtgctgagccaactcgccaccggtcttagcgttctagccggagcggttctggtgaaatcggttatggaccagaagcccatggcaggcccattcactcgctgccccacgtgcaacggaaccggtcgagtcacgtgcctctgctcgcgttggtccgacggcgacgtcggatgctccacgtgctccgggtcgggtcgcatggcctgcagcagttgcggcggctccggtaccggtcgacccttgccggcgaaaatcgcgattcgcccgccgaaaccgccaattaattagttcaccaattcgttgggctcgctcgctcgcttgctactac

SEQ ID NO: 36159 - DNA, 409 bp, Glycine max
  Clone ID: LIB3054-006-Q1-N1-H6
aactcactcactggaagccttgttgtgagtaagggaaaggcttcctgcactgagcaccaagttgaaacctcttgattctttgcttagaattccacagaatatggagactgttcttttcaatgactccccacctttggagttcaagggtatgagcaaggaggaggaagactcattgctagggcaagttgaaatatggaggtacatgacatgcttcacggactccgtggccttgaaatccgtcatagagctgcgcatagccgacataatagaccgttatgggaaaccactatccttgtcacaaatcgtggagaacatagatgatgcacccttcccagatgcctctcttctacagagagtgatgagagtgatggtacgtagaaagatcttcagtgcagaacaatcagagact

SEQ ID NO: 36160 - DNA, 422 bp, Glycine max
  Clone ID: LIB3054-006-Q1-N1-H7
ttgaattcttcagagagaagaagaaacttaatcgatcatcacttcacttcactaatacatcatggcagacgagacccagaacaagtatgagagctctgaggttgaggtccaggatcgtggtgtttttgactttctcggtaagaaaaaggatgaagaagacaagcctcatcctcaggaggaggtcatcgccaccgagtttcaaaaagtcactgtctcagaccaaggagagaacaagcacagcctcttagaaaagcttcaccgatctgacagcagctctagctcttcaagtgaagaagaaggagaagatggagagaaaaggaagaagaagaagaaggaaaagaaagggctgaaagagaagatcgaggagaaaatagagggtgatcatcatcatcacaaggatgaggacacaagtgtccctgttg

SEQ ID NO: 36161 - DNA, 133 bp, Glycine max
  Clone ID: LIB3054-006-Q1-N1-H9
aatcgttgttaagtaataaggtgccaaaaaaaagggaaagaaataaaaataaagttgagaaggaccactcggttggtggaatttcatgcattttattattttgaagcttgaagctgaatgtaccagtttgagg

SEQ ID NO: 36162 - DNA, 274 bp, Glycine max
  Clone ID: LIB3054-007-Q1-N1-A12
ttttcaagaaataatctggcgaccatgtgcacatacccaattggctttatagaaatctcttattatgaccgaccttgattcctattaaagaactaccctttattcataagtatagccaattccacctagaatatcaataatgacgaaccttattgcatttatggatgcatagcttttaaggaattagtatatccatcctgcagcaaaaggaaatgaaaacgcaattacccatttaatgacaaattcccatctaaaatacatagtgacactccta

SEQ ID NO: 36163 - DNA, 238 bp, Glycine max
  Clone ID: LIB3054-007-Q1-N1-A3
cactcactgtatttttatttttattttttgttttgtttctgccaccaaattatctttagtaggtggtgcattaattgagggttgcataattattgcaactcgttgcaactgtgaagttatgtatgctaaggaaatgaaaaagtttctttgttgctctattaatgtaaagtgtgaattacactattatagtataaattctatcaaaggtatcaattgaatttgaaaggtttcacttttt

SEQ ID NO: 36164 - DNA, 173 bp, Glycine max
  Clone ID: LIB3054-007-Q1-N1-A4
aaaacttcccaccgtattctcattctcctctattaagttactcacctcctcatctaattttattaattcttttctgtacacccaaaagatgaaaactgctacttataattatgtatgtatgtttgtactctgttgtatgcttctgtatgatattcaatattggtactttgatg

SEQ ID NO: 36165 - DNA, 428 bp, Glycine max
  Clone ID: LIB3054-007-Q1-N1-A5
atggcttctgcttctgttcccatggctttctcgctgagctctgttatcaacaacaacaagccttcatccgaagccttcttcaggccactacccctacggcaaccaaagaggaccctcttcaccacaaaggcagtgtcaaactccaaggctcaaatcaatgcatctttgaaggagaaggcagttgcaggactcacagcagcttctgtgacagcatctatggtggttccggaggtggctcatgctgctggatatgagttctccccttccctcaagaactttctgctaagcatctttgctggtgggtttgttctagtagccatatttggagccgttattggggtttccaactttgatccggttaagagaacttaaagcccgcatgctccaatgctgtttaatttcatatggctttgtcactactcttctat

SEQ ID NO: 36166 - DNA, 414 bp, Glycine max
  Clone ID: LIB3054-007-Q1-N1-A6
gtggagcaacacactggtgttatgcatgcagacagccaattgtgcttgatgggagagatcctgtttgcccttactgtgatggaggatttgtgcaagaacttgacgagttgcgaggaattgcacccaaccataaccataccttttcgtcacagtcaggagactttcatcaaatgcctgacattttcgatgctatacatgcttttatggggcagagaggttctgaccagagatttgggcttatggacgccgttgataatttcatgaggcatagaatggccggaagaaactcaaactttgatgttagaaggaggtctggttcttttccagttcctgaacagagttggggcgtttatagttccggtccttatttaatatttcacggtcaagttcctggattcaccttgtctgctggca

SEQ ID NO: 36167 - DNA, 378 bp, Glycine max
  Clone ID: LIB3054-007-Q1-N1-A8
ggcatcagcattatcttctctctcctccacctcttcttcactgttacagcacagtttcaccggaaactcgaaggctcctcccactactcaattccccaacagaaatgtacgcttttcggtcttcgctcaaaagaaggcatggaaacttcgaaagattattttgaaggaagatgtggcttatgtaggaaagcaatggcaacttcttgatgtgaaggctggctttttcataaattacctgcttcctatgggaaaagcacaacttgttactccacagcttctcgaggaaatgaagattgaagaagaaagatttgaggctgagaaaaaacgggtaaaagaagaggcacagcaacttgctctaatttgtgaaactgttggggc

SEQ ID NO: 36168 - DNA, 420 bp, Glycine max
  unsure (1)..(420): unsure at all n locations
  Clone ID: LIB3054-007-Q1-N1-B11
actgaaggtgtgcaattcagtggagaagtatgcaaataagtgcaagagaatggttttcgagtatggacccttgatttttgaccatgcagagaaaatcctagagacgacagatatatgcaatataatacatgcctgcaaatcttcagatgtagctggacagcaagcctttctttcggtctcttaattatagaaacaaagctctaccagatttatgcttcacttgttggctgaaagattgccatatattcaaatataataagggggaggggagtacaaattcgatccgtattcagcgcaaaatttttaatactatctaaatttctaattatgtgtcagcacatcatcaaaaaagttgaaacttaagttgaaacttcctgtgtagtagtggctgtgatactcatgcttngttaattattttac

SEQ ID NO: 36169 - DNA, 155 bp, Glycine max
  Clone ID: LIB3054-007-Q1-N1-B2
cttgcaaaattaaaaataacacaatggcagcgagcgctcgcactccacgcgaagagttcgtgtacatggcgaagctggcggagcaggccgagcgctacgaggagatggtggagttcatggagaaggtctccgcctgcgtcgagagcgtggagctg

SEQ ID NO: 36170 - DNA, 338 bp, Glycine max
  Clone ID: LIB3054-007-Q1-N1-B3
gctggcttgggcttggcgtggttccatccatggcagactacgaaaccagcaccagccacaaccaccactcgaaagaaacagccttccaggccctgaacaccataatccagctccacttcgagaaaaccctggagaagaagcgcgccatcgacctccagaagaaggagcttcacaagctcttccagatattcttcatcttcttgggcctcgtcttcctggcccaggcccagtcccctcgcctccaatgccgccactgctggatccccatcactctcctctccatgggccacctcatcttctacgtgtccgtcggccaaaccctaaggtgcatcaacgcc

SEQ ID NO: 36171 - DNA, 415 bp, Glycine max
  Clone ID: LIB3054-007-Q1-N1-B5
tgggcatacggcatgaatgtttttgatttggtccagtggaagaggcaaaacatcaccgatgtgtaccacaactggcaaaagatgaatcatgatagacaactatggaagttaggaacactgccgcctggtcttataacattctggaaacgcactttccaactgcaccgatcttggcatgtgttgggtcttggctataaccccaatatcaaccaaaaagaaattgaacgggctgctgttatacactacaatggaaacatgaaaccgtggctggagataagtattcccaagttccgaggttattgtacaaagtatgttgactacaatcttgtgtatttacgagaatgcaacatcaatccataaaaagatctggtggcatgtgtagagcatgaaatttatttaaagcttttatgattat

SEQ ID NO: 36172 - DNA, 108 bp, Glycine max
  Clone ID: LIB3054-007-Q1-N1-B7
ctattctattagactcaggtactgcgtgtcggaagcagactcagattgctcgtacgaagcagaccgttcgtaagtccacaggaggaaaggctacgagcaagcagcttg

SEQ ID NO: 36173 - DNA, 389 bp, Glycine max
  Clone ID: LIB3054-007-Q1-N1-B9
ctcactcactgcagatctcaattgcatcgctgtccatggctaccatcgttagcatcaaggcccgccagatcttcgacagtcgtggcaatccaactgtcgaggtggatttgacttgctccgatggtacttttgccagagctgctgttccaagtggtgcatccactgggatttatgaggcccttgaattgagagatggaggatctgactaccttggaaagggtgtatcaaaggctgttgacaatgtgaacaccgtcattggccctgctttgattggcaaggacccaactgagcagactgctattgacaacttaatggttcaacagcttgatggaactgttaacgaatggggttggtgcaagcaaaagctaagagcaaatgccatattggca

SEQ ID NO: 36174 - DNA, 308 bp, Glycine max
  Clone ID: LIB3054-007-Q1-N1-C1
tggtcatcgttgggatctccatacgccggatctgctaaaatacgcttgatccatatgggcctcctcgaccacttgtgggacgacaccgtcgccggcccaaggccggaaaacggtctcggcaagctccgaaaacaccacaccttcactttccgacctagctccggcaaggaaacggagggcgggagcgtgagatcgtacggagacgaatcgtcggaggaagcgacgagagtgacgcgtagtatcatgatcgtgaaaccgcccgggtaccagagtgggatcgctccggtttcttccggcgggtctactac

SEQ ID NO: 36175 - DNA, 354 bp, Glycine max
  Clone ID: LIB3054-007-Q1-N1-C10
gaaccactaaaagttgctctaaaaaatttggaggatattcaggtacctgttgatgtagctccgacatttcccattggcaacaaaatattgcaatgaaagcaagcgaaccaatgtgtaaaaaattgccagcctggaaaatttattcaattagtatattttcactagttgttactgtgaaataatggaatgcttgtttctttgggatgttgctgttttctgttgattgatttaaaagaaaatcaaataatggtcttagaaaggagttttagaccttgtcttagttacagggttattatgccaatgatgaatgacccaactgatattgaattgtatcgattgcaaggttttgattcc

SEQ ID NO: 36176 - DNA, 396 bp, Glycine max
  Clone ID: LIB3054-007-Q1-N1-C11
gccaaagttgcaaaatttattgaggataaatcaaagctgtctgaagacaagattgcagccgtaactgacatagttcgtgatgaagataaagcgaaggagattgtggaagctgccaaggcctccatgggacaatatttgtccccagtggacttgattaatgtccaacaatttgcacagagagtaatggacctatccaagtacaggcggaagttgtatgattacctggttgctaaaatgaatgacatcgcactaaatttggcctctttaattggtgaagttgttggtgcacgattaatttcccatgcaggtagcctcacaaatttagctaaatgcccttcttcaactcttcaaattcttggtacagagaaagctctgttcaggttcctgcttcacaca

SEQ ID NO: 36177 - DNA, 270 bp, Glycine max
  Clone ID: LIB3054-007-Q1-N1-C3
ctgaactctacatcttcaagtggacatccttgttgatccctcccttgaccctactaatcttaaacatcattggagtcattgttggtgtctcagatgccataaacaatggctatgattcatggggtcctttgtttgggaggctattttttgccctttgggtcattgtccacctttaccctttcctcaagggtgtcatgggaaaacaagaaggtgttcctaccatcattttggtttgggctattcttctggcttccatattgacactacttt

SEQ ID NO: 36178 - DNA, 364 bp, Glycine max
  Clone ID: LIB3054-007-Q1-N1-C4
cctgaacattgtaaagaagccagtgctaggatttgttagtgaagcaatggctcaaaccatgttgctcatgtctagtgtctctagcagttattccgtggatttgaagaaagaccttttcctccaattgcagagtcaaagtttaaggcctaagttctctcagctctcattcaacccacttccatcatcaacttcttccttttcttcaccccgtacattcacaactctggccctcttcaaatctaagaccaaagccgctcctgctaagactaaggttacaaagccaaagcagaaggttgaagatggtatctttggcacttctggaggatttggttttactaagcagaacgagctctttgtgggtcgt

SEQ ID NO: 36179 - DNA, 252 bp, Glycine max
  Clone ID: LIB3054-007-Q1-N1-C5
tgcgtcatcgttgggatttacatacgccggatctgctaaaagacgctggatccatatgggcctactaggaccacttgtgggacgacaccgtcgccggtccaaggccggaggacggtctcggcaagctccgaaaacaccacacgttaactttccgacctagctacggcaagggaaacgtacggcggaagcgtgagatcgtacagggacgaatcgtcggaggaagcgacgagagtgacacgtgagtatatgatc

SEQ ID NO: 36180 - DNA, 419 bp, Glycine max
  Clone ID: LIB3054-007-Q1-N1-C8
caatgtgcaggcctccgcttctagagagcagatgggttacacttttgatgccttgaaaacctatgttcctgaaatggtcgagctacttgttgattgtgtcaggaaccctgttttccttgattgggaggttaacgagcagcttctgaaagtgaaggctgagattggtgaagcttccaaaaatccccaagacttgcttttggaagcaattcattctgctggtttttctggtgccttggcaaatcctcttttagcttcagaatcagctctaaatagactaaatggtacaattctggaggagtttgttgctgagaactatacagcacctcggatagtacttgcagcatctggtgttgaacatgaggaattgttatctgttgcagaacctctcttgtctgatctacccagtgtcccacgtctag

SEQ ID NO: 36181 - DNA, 423 bp, Glycine max
  unsure (1)..(423): unsure at all n locations
  Clone ID: LIB3054-007-Q1-N1-D11
gagagaacttcaactgagggtgagagtgacacaaatctagggagcactactctaaaagttctattagattcttcaaaacatgaccatgcatcgcgagtcttgggcttttgtcttcggcgttatgggcaacatcatctcctttggagtgttccttgctccattgccaaccttttaccaaatctacaagaagaaatccactgaagggttccagtcacttccttatgttgttgcactgttcagtgcaatgctttggatttactatgctttcgtcaaaagggaagctgccctccttctcattaccattaacacatttggaattgttgtggagtcaatttaccttgcaatcttcctactttatgccccaaggaagcctangcttacaaccatcaagcttcttctcttactgaatgtgtttgggtttgg

SEQ ID NO: 36182 - DNA, 304 bp, Glycine max
  Clone ID: LIB3054-007-Q1-N1-D12
ctgaagcgtctcttacggcagaaattggtgcggcactttgtgcaaccctaaccttggagatcaagggagaaattgaggagtttctcaaagtggttttcactctgtttcaagacctggattttactttcttagagatgaatcctttcacattggttgatggaaagccttattctttggatattataggcgagctaaatgacactgctgctttcaagaacttcaagaaatggggagacattgaatttccactgccattttgaagggttattagtgccaccgagtctttcattcatggattagatta

SEQ ID NO: 36183 - DNA, 421 bp, Glycine max
  Clone ID: LIB3054-007-Q1-N1-D4
attttagtacttgtgcttgtaaccttttcatccatgatcattgactcaagggttgcagaggcacgtaccctgccaaaatcagccttattgccttccaaagttgatatacctactgttgttcctcttccactggtggcaccactgccaaatttgcctgttactctccctccagtgcctgaactacctgcagtacctaaagtaccaattcctgaagtaatagttaataacgccaaaataatcccttgagtacctatgatctatccagtcactactacttattttgtcacttgctaaattaacttgttgttgccatcccagggtggttctggttctgttggggtttaatttctgtcattcaattacatgctatgttcaagttatatgttgcttcagtcagttgaacttcagcatattatttatt

SEQ ID NO: 36184 - DNA, 264 bp, Glycine max
  Clone ID: LIB3054-007-Q1-N1-D5
cgactttgaagggggaaaggtaatagggacatactttagagggaggatgggatagtctggaaaaccaattgggtggtgatgggtaagaccccaagaaaggaaccaacttaaagaatggaacattatttgagactaaagatgaataattcgggaataacattcttacattaattaccctgagactgaatacattcttggaagacacttataccagcgaggtgagagtttatcaatcccttgagtaagcttgttaaataaatatgt

SEQ ID NO: 36185 - DNA, 422 bp, Glycine max
  unsure (1)..(422): unsure at all n locations
  Clone ID: LIB3054-007-Q1-N1-D9
ccgactatgatgacgatgatgattttggcggtccggtgtcggcacatttcgtccgaccggatcggctatcggactccggtgttttggaagacatcacgatggactcgacggctttctcactgcactaccagagtcttgctggctcagactccggcgacatcaagacgcgccagttcgtcaggcttggaactccaagctctcagggaagttacatggagctcacggaggcgacaaagaggcctgccgaagtggtactcgacgcaaatagtgccggcaaagactccaacgacatgagcattgaggtagaccaccaaatgagttttggctatgacataccctcttctgcgtttgatgctgctgctgcaattntggcagaaggagcacctanggaatcaccacatcacaggtttggaaggttcggt

SEQ ID NO: 36186 - DNA, 402 bp, Glycine max
  Clone ID: LIB3054-007-Q1-N1-E10
caggagtgtctcttacgtcagaaattgttgccccacttgttgcaacccttcccttggagatcaagggagaaattgaggagtttctcaaagtggttttcactctgtttcaagacctggattttactttcttagagatgaatcctttcacattggttgatggaaagccttatcctttggatatgagaggcgagctagatgacactgctgctttcaagaacttcaagaaatggggagacattgaatttccactgccatttggaagggttatgagtgccaccgagtctttcattcatggattagatgaaaagacaagtgcatccttaaaattcacagtgttgaacccaaagggccgaatttggacaatggtagcttggggaggtgctagtgtcatttatgctgata

SEQ ID NO: 36187 - DNA, 247 bp, Glycine max
  unsure (1)..(247): unsure at all n locations
  Clone ID: LIB3054-007-Q1-N1-E11
ccctgtaacgtcgcaacgcaaagcaaattgttgtccatttttgaaacagagaaacanannataaaaaaaaaaacttttcaaaagtaaaggcaaaaaatctgaaagctagggttgggaatgccaaaaaacaaggaaaaggaaggaaagaaccgaaaccccgtaagaaccaagccgaccaacaaaaaccggaacttgtattcaaggaagaacgacaggaatacccgcaagttcttcgaatgctcggaaa

SEQ ID NO: 36188 - DNA, 418 bp, Glycine max
  Clone ID: LIB3054-007-Q1-N1-E12
cacatcaaaccaacattcagttcataatttcttccaacaaattatatttttcttacaaaaaaaatggcaggtgaggtggtgaagaaggaagagtctctcaacctgaaagtcactaacaagagccatgttcaatcagaggagaaaattggaagaaaagagtaccaattggtcacttttgatcttccctacttggccttttactacaaccagaagctcttgttttacaagggtgaagatttcgagggcatggtccaaaaactcaaagttggacttggagtggtgctgaaggagttccaccaacttgctggcaagttagggaaagatgaagagggggtgttcagagtggagtatgatgatgacatgcttggtgtggaggttgttgaagctgttgtagctgatgatgaaattggggtggatg

SEQ ID NO: 36189 - DNA, 378 bp, Glycine max
  Clone ID: LIB3054-007-Q1-N1-E3
ttcgaatcatctacccagttccactattgaacttagtggccatcctattaccagacaattgggaaaaatgtgaaatcaaagttggatttgtcaattattttcatgccgcgccaggaggttctctgtgctgtttgtgatgctcatcttggacatgtgtttgacgatggtccttcacccacgggaaaacgtttctgtatcaatagtgctgcccttaagctcaaaccaaagcagtagacagtgaaatacctacctatcactcggaagcagatggtataatattctaaatatgtgatatactttgtggctgtttttctatttatggagaacaacaatgaatattgtcttgaactggtgatgtataaaacacaaattttatag

SEQ ID NO: 36190 - DNA, 371 bp, Glycine max
  Clone ID: LIB3054-007-Q1-N1-E7
agagttctgagtttcataggagaaaaaaaatgacagaagaacaaaccaaaacggttgagtcagaatcagtaacaccaccacctgctgctgctgctccttcacaggttcctcctgctgctgaggctgaacatgttcctgaggctccaaaggatgtgactgaggagaaatctgtaattccagtgccttcttctgatgacaagcctgatgaatccaaggctcttgtcttggttgagaagactcaagaagttgctgaagtgaaaccaactgaaggctctatcaaccgagatgcggtgcttgcaagagttgcaactgagaagaggttgtcattaatcaaagcatgggaagaaagtgaaaaatcaaaagctgaaaac

SEQ ID NO: 36191 - DNA, 399 bp, Glycine max
  Clone ID: LIB3054-007-Q1-N1-E8
gcaacaacaagttctggtactcttaaagcaactcctttccttggccaaggcaagggtgccaatgccaatgctcttagggatgttgtctccatgggaactgggaagtacaccatgggcaatgatttgtggtatggaccagacagagtgaaatacttgggacccttctcagctcagaccccttcatacttgaaaggagaattccctggggattatggatgggacactgctggcttatctgctgacccagaagcatttgccaagaacagggctcttgaggtgatccatgggcgatgggccatgcttggagcactaggatgcatcaccccagaggtgctagagaagtggttgagagtggacttcaaggagccagtgtggttcaaagctggagcccaaatattc

SEQ ID NO: 36192 - DNA, 196 bp, Glycine max
  Clone ID: LIB3054-007-Q1-N1-F1
ggcacacccacatcatacagagcctccagtatcgctcatgatcatatattcatagctaacagtagatgggttatatcgcctgttctgttacctagggcattgtcatcgggatctctacttggttcttagctcggatacattatcattagtcgtatgaaattaatcactatgtgaaagctgagtcctgtgaggaatg

SEQ ID NO: 36193 - DNA, 414 bp, Glycine max
  Clone ID: LIB3054-007-Q1-N1-F12
cctcactttacttctcttcttcggcgcttcgcggcctcggtcctcctctgcccttctcaattcaattgcgacgctcgcgggggcgccctgcaattcgatgtgcttcctcttcctcagactcagatgcttccaacaaagtctcgtctcgtctgtcgcaagttcagcatcttcttcagcaggccgaacaccgcgctctctccgccgaccagggcccacctgctaaaatcaccttagatcatgttaccgtgagctttgccagaagtggaggacctggaggtcagaatgtcgatatagtgaacaccaatgtggacatgcgcttcaatgttaaaaatgcatattggttgagtgacaggatcagagaccagattttgcaaactgagaaaaactcgtataacaaggatggggagcttgtga

SEQ ID NO: 36194 - DNA, 352 bp, Glycine max
  Clone ID: LIB3054-007-Q1-N1-F4
aagaagcagaaagagaagcattagcaaaagcaagaagaactagtctaagcagaaatggcctcttcagtgatggcatctgtggccctcaaacctgcccctttcactgttgagaagtcctcagttagaggccttccctccctctcaaggaactcctcttcattcagagttgtggccagtggtggcaagaagatcaagactgacaagccttatggaattaatggtggcatggctttgagggaaggagttgatgcatctggcaggaaaggaaagggaaaggggcgttaccaggttgtagacaaatacggtgctaatgtcgatgggtacagtcctatctacgacaccaaggactggt

SEQ ID NO: 36195 - DNA, 330 bp, Glycine max
  Clone ID: LIB3054-007-Q1-N1-F7
tgggaagtggtccacgctgcggtcttggggagctcattcttcctgaaaacgaaccaggaagcagtattatgcctgggaaggttaacccgacccagtgtgaggctttgacgatggtgtgtgcacaggtcatgggaaaccatgttgcaatcacagtgggtggatcaaatggtcattttgagctcaatgtgttcaagccaatgattgccaattgtctcctgcattcgctgagactgcttggagattcgtctgcttcctttgaaaagaattgtttgagaggtattcaagctaatagggaaagaatttcaaaattactgcatgagtcacttatgc

SEQ ID NO: 36196 - DNA, 420 bp, Glycine max
  unsure (1)..(420): unsure at all n locations
  Clone ID: LIB3054-007-Q1-N1-F9
ctttctattataatggacagagggttaataggaatgtatcatgattggtgtgagtcctttaacacctatcctcgcacatacgatcttcttcatgctagctttcttttcaaatatcttgagcaaagatgtgacatcgtagatgtggctgtggagattgatcgcatattgagaccaaatggatatctcgtggttcaagattctgtggaaatacttaacaagctcaatccaatcttgcgttcacttaactggtctgtaacgttgcatcaaaatcagtttcttgtaggtagaaaaggtttctggcgtcctacgagctcttgagactgaatgtatattaggttaataaaaatgacgtattcttcaatcacccgtgtatcagtatattctggataaaaattaggtgcaaaaagaatgaattntaag

SEQ ID NO: 36197 - DNA, 421 bp, Glycine max
  unsure (1)..(421): unsure at all n locations
  Clone ID: LIB3054-007-Q1-N1-G12
ccacacttcacttctcttcttcggcgcttcgcggcctctctcctcctctgcccttctcaattcaattgcgacgctcgcgggggcgccctgcaattcgatgtgcttcctcttcctcagactcagatgcttccaacaaagtctcgtctcgtctgtcgcaggttcagcatcttcttcagcaggccgaacaccgcgctctctccgccgaccagggcccacctcctaaaatcaccttagatcatgttacggtgagctttgccagaagtggaggacctgggggtcagaatgtcaataaagtgaacaccaaggtggacatgcgcttcaatgttaaaaatgcatattggttgagtgacaggatcagagacaagattttgcaaacggagaaaaaccgtattaacaaggatggngagcttgtgatttcttc

SEQ ID NO: 36198 - DNA, 273 bp, Glycine max
  Clone ID: LIB3054-007-Q1-N1-G2
ccttattcttcgggaacaactggtcttcccaagggagtgatgctgagccacaaggggctggtgaccagcattgctcagcaggttgacggtgataatcccaacctctattaccactgccacgacaccatcctctgcgttctttccctatttcacatttactttctcaacttcgttcttctctgtggcttgcgtgccaaggctaccattctccttatgcccaagttcgatattaacttcttgcttgctctcattcacaagcacaaagtcactatt

SEQ ID NO: 36199 - DNA, 85 bp, Glycine max
  Clone ID: LIB3054-007-Q1-N1-G3
tcgggggttggcttggccataagaagccgggctcgtgtcatgcaccgagattgatccatttgtgcccttagctctaaggaggtct

SEQ ID NO: 36200 - DNA, 268 bp, Glycine max
  Clone ID: LIB3054-007-Q1-N1-G6
gttgaagatgagaagttaagaagcctcaagcaggaatggggggatgagatatattcagctgatgttacagccctaaaagaaataaatgaatacaatgcaagtggtgggtatactggtaaagagctatggaacttcaaggaaaaaggaaaggctacattgaaagaagttatgaattatattatgaatcatatcaagccgcttaagcgcaagagagcttaggcaaaagtctttgcatgtgataaatgcctgatagctcaaacagtagatg

SEQ ID NO: 36201 - DNA, 355 bp, Glycine max
  unsure (1)..(355): unsure at all n locations
  Clone ID: LIB3054-007-Q1-N1-G7
gaacaaaacaattcccgagcacctagattccaacaaaacaaagggcagaaaaccggttgaccgttcctcatgtggttcccacacggcctctagcagcgatgtggaaactgatgcactagagaagggtgagaaagggaaggaagagcctgaaacacctgatgctaaccaattagccattgactntagtaatcgtcgtagaagtgttagcaatcttactgattcttggaaagaggtctctgaagaggggagactggcctttcaggctctattctccaaagaggtgttgcctcaaagcttttcacctgctcatgctttgaagaataagaatcagcanatggacaacgccaataataac

SEQ ID NO: 36202 - DNA, 397 bp, Glycine max
  Clone ID: LIB3054-007-Q1-N1-G8
atttggttctcactggttgccaatatgtctatcacggggatgaactttagcctcatgctcaactccgttggattctaccaaatatcaaaactgagcatgattccagtggtttgtgtgatggaatggatacttcacaacaagcactactcaagggaagtgaaaatgtcagtggtggttgtggttattggtgtcggtgtttgcactgtaactgatgtaaaagttaacctcaaaggtttgatgtgtgcctgtatagcagttttgtcaacatctttacagcaaatttcaataggttctcttcaaaagaaatattcaattggatcttttgaattgctgagtaaaactgctcccattcaagcgctttttcttgttattcttggtccattggtggattactacc

SEQ ID NO: 36203 - DNA, 412 bp, Glycine max
  Clone ID: LIB3054-007-Q1-N1-H10
aaagattcgaaacgaagaaagaaagcgttgtgaagaatggcggaagagggacaagtgatcggtgtccacagcgtagaggagtggaaggaacatctcaagaagggagaagagtccaagaaattgattgtggtggattttactgcttcttggtgcggtccatgccgtttcattgccccaattcttgcagagtttgctaaaaagttgccgaatgtcaccttcctcaaggtggatgtggatgaattggagactgtttccaaggagtggggaattgaggctatgccaaccttcctgttcttgaaagaaagcaagctggtggacaaggttgtgggtgccaagaaagaggagctgcaattgacaatagccaaacatgccgcaattgctgctgctttgagtgccatatgaatatgttaag

SEQ ID NO: 36204 - DNA, 363 bp, Glycine max
  Clone ID: LIB3054-007-Q1-N1-H12
ctcgactcatccacccaattcatatggggggtgctccagcaaaacgctggtgctgatagaaaagatgtgcaaaaagttaactaggtcgtggatgacatggatggcgttgcatataccagtaacgattagatacatttgagtgcaagatatttcaatgactatagtggtgacctgaaaacacagatcacaggtgtgttgtaccatgaaatggtccacgtttgacaatggaatgacaatggccaaactcctagtgtattagttgaaggtattgtagactatgtgaagcttatagccaattatgcacctagtcactgggtgaaagcagggcaaggacatatatgggaccagggatatgaagttact

SEQ ID NO: 36205 - DNA, 316 bp, Glycine max
  Clone ID: LIB3054-007-Q1-N1-H3
tgcaactgctgatgacgagggctatgagtatgaagatgaggaagaacctcaggaagatgaggcttaaaacagtgtagtagtgttttgcagggtgttcttgtttgtgtgttttgttgtgatactctgtttaacgttgtgttttttttcatcatcccttgacctgaatatctttttcgggattttggattgctttgggggcactctctggcttcgtggcttatctcttctagtttagggattttatttttctgcatgttttcattattggtaacatggtggtcgccctttgatggaacgtagttgatatattcttagt

SEQ ID NO: 36206 - DNA, 265 bp, Glycine max
  Clone ID: LIB3054-007-Q1-N1-H4
agaaaatgatagggcatagtagagaatttcttgagtccggttcctcatcggtggtctcaaacgcggttcagcagcgcctgcaattcattctgcagagccgtcccgagtggtgggtatatgccatcttctggcaagccacgaaagacagtgattcgcgtctcaaattagaatatggcgacggctactttcggggcaaagaggagaatggagaggaacaaacgaggaacgtgaacgacatctaatgggtctacagaatgttgcaaac

SEQ ID NO: 36207 - DNA, 238 bp, Glycine max
  Clone ID: LIB3054-007-Q1-N1-H5
tgatctgcatgaggctctggctgccttggagaatcaaaaggaagaaaccatcaagtcccttgattcccagatcgcagcccttagccaggaaattgttaataaggttcttgccactgtttaatatgtctgtgtaattttgattttaatgccctcaccatacgattcatagtttctacttttgaatggctctattctgtattctcgatacttctgaatgtataataccgtattcaaggta

SEQ ID NO: 36208 - DNA, 173 bp, Glycine max
  Clone ID: LIB3054-007-Q1-N1-H7
caaccctggtgtgccggcccaggggttgaatcccgtgcttggacaggcgttgactgcattgattaatcaaggagctggattggggcttgtgaatcttattggagggcttggtcgtgcgaccgtgaaccaaagggggccgtctagtccatatgcgaatcaacctgctatggggt

SEQ ID NO: 36209 - DNA, 426 bp, Glycine max
  Clone ID: LIB3054-007-Q1-N1-H9
ccggcatattactatcaaagatccagcactggaaaccaagaaaggccagcgacagaagccaacaagagtgtgcctttgcaggcaaaacatgcacagcaacaatgcggagttaatgccaagatggcaccagacatagctattaatattgatacaaatcccttttttatgacaagggcaggagttaacaagttagagcaaggtgatcaaatagccatagagacaaacatgctgcagccaaaggcacatcaatatggtggaatcggtgctgcagctggggccactgctcatagaaaagttggtcctgttcagtatggtatgacaagaatgttctagaagaagggtgtttttcttgtgaatattttggccagggggagcaatcctgttagagaaaaagacactttttagggatggagctgttgtagtctc

SEQ ID NO: 36210 - DNA, 407 bp, Glycine max
  Clone ID: LIB3054-008-Q1-N1-A10
cgcaaacactctgttcctacaatcattccaaatgtgcccttccggtcgcaccctcctcccttcctccgtctccgatttccgaccggcattcgacgtcctcgatgccgaccgcgacggcaaaatcagccgcgacgacctccgcgccttctacgccggagtcggcggcggaggagatgacgtgatcggggcaatgatgacagtggctgacaccaataaggacgggttcgtggagtacgaggagttcgagcgcgtggtctcggcggagagaaagcccgtggggtactgtggggccatggaggacgtgttcagggtcatggacaaggacggcgacggcaagctcagccaccatgatctgaagacttacatggcctgcgctggttttccggccaccgacaacgacatcaacg

SEQ ID NO: 36211 - DNA, 410 bp, Glycine max
  unsure (1)..(410): unsure at all n locations
  Clone ID: LIB3054-008-Q1-N1-A11
cgcaaacactttgggcttacaatcattccaaatgtgccctgccnntggcaccctcctcccggcctccgtctccgatttccgaccggcattcgacgtcctcgatgccgaccgcgacggcaaaatcagccgcgacgacctccgcgccttctacgccggagtcggcggcggaggagatgacgtgatcggggcaatgatgacagtggctgacaccaataaggacgggttcgtggagtacgaggagttcgagcgcgtggtctcggcggagagaaagcccgtggggtactgtggggccatggaggacgtgttcagggtcatggacaaggacggcgacggcaagctcagccaccatgatctgaagacttacatggcctgcgctggttttccggccaccgacaacgacatcaacgcca

SEQ ID NO: 36212 - DNA, 88 bp, Glycine max
  Clone ID: LIB3054-008-Q1-N1-A12
gtcagtgtatcttataaatgtattgttatttgttaatcatcggttcgttgaacatttgcagcagtgttaaatcatcgattcatttaac

SEQ ID NO: 36213 - DNA, 417 bp, Glycine max
  unsure (1)..(417): unsure at all n locations
  Clone ID: LIB3054-008-Q1-N1-A2
gttttctccactatggctgcacaacgaaacttccaagactacttgcctgtgatggccaacaagcttggtggggatggcctaattgatgaactgtgcaatgggttcaatctgttgaaggattctgataaaggggtcatcacctttgagagcctcaagaggaactctgccttgtttggccttcagggtcttagtgatgaagatcttcggtccatggttttggaaggtgactttgatggtgatggtgcactcaatcagttggagttctgtgttttgatgttcagactcagccctgaattgatggagggctcaaagatgtggcttgaacaagtccttcaacaagagcttaaggattatttctaactntcctttnttttttttctcccttacccttttcattcatttgtcattttgggctat

SEQ ID NO: 36214 - DNA, 379 bp, Glycine max
  Clone ID: LIB3054-005-Q1-N1-F10
cattctccttcttgagatccaggacactctagagtctcctccaccagaaaatcaaacaatgaaaaaggcttccatggttgcaatcttcattacaacattcttctacctgtgctgtggatgctttggatatgcagcttttggaaatgatacaccaggaaacctcttgacagggtttggattttttgagcctttctggctcattgaccttgctaatgcttgcatcattcttcacttggtgggaggatatcagatttacagtcaaccaatatacagtactgttgacagatgggcttcaagaaaattccccaacagtggctttgtgaataatttctacagagtgaaacttcctttgcttcctggttttcagctaaatcttttc

SEQ ID NO: 36215 - DNA, 345 bp, Glycine max
  Clone ID: LIB3054-008-Q1-N1-A3
tcgtgtgcgtgcacgtctaacatgttcacgatcgtgaattccaattccacattttcaagacataaggacgcaaaaatgtgcatgtatgaattggaattatttgttgtcttattaggcctatcctgaagccaaaggaaatgagatcggaattcctcggggaattccaattccacattttcaagaaataacgaggcaaaaatgttcatatatgaattggaattatttgttatcttattaagcctatcctgaagccaaaggaaatgagatcggaattcctcggggaattccaattccacattttcaagaaataaggatgcacaaatgttcatatatgaattgggatta

SEQ ID NO: 36216 - DNA, 196 bp, Glycine max
  Clone ID: LIB3054-003-Q1-N1-B1
tctcaacctactctgacaaccagcccggtgtgttgattcaggtctatgaaggtgaacgaacgaggactcgtgacaacaatttgcttggcaaatttgagttatctggaattcctcctgctcccagaggtgttcctcagatcactgtttgcttcgacattgatgccaacggtttattgaacgtgtctgcggaggacaa

SEQ ID NO: 36217 - DNA, 398 bp, Glycine max
  Clone ID: LIB3054-003-Q1-N1-B10
gggaaagaaaagccacttcaaatttcagccccataccataggcattaaagtccacacacacagagcaacactgcactgtgtggaaacgaaacatggcaagagtggtggcactccaacagaaccaactatctttctctaccttagcttcctctctttctgacttcagtggaaccagacttcaaactcaacttcagttcaagagaaagcaatgccatccaaaagggtctttctacgtctccgcatcgagcaccaagaaaatcctaataatgggaggcaccaggtttattggtgtgtttttgtctaggctccttgtcaaagagggtcaccaggtgactttattcacaagaggtaaagcgcctgtcactcaacagttgccaggtgaatcagacagtgattat

SEQ ID NO: 36218 - DNA, 398 bp, Glycine max
  Clone ID: LIB3054-003-Q1-N1-B11
gggaaagaaaagccacttcaaatttcagccccataggataggcattaaagtccacacacacagagcaacactgcactgtgtggaaacgaaacatggcaagagtggtggcactccaacagaaccaactatctttctctaccttagcttcctctctttctgacttcagtggaaccagacttcaaactcaacttcagttcaagagaaagcaatgccatccaaaagggtctttctacgtctccgcatcgagcaccaagaaaatcctaataatgggaggcaccaggtttattggtgtgtttttgtctaagctccttgtcaaagagggtcaccaggtgactttattcacaagaggtaaagcgcctgtcactcaacagttgccaggtgaatcatacagtgattat

SEQ ID NO: 36219 - DNA, 371 bp, Glycine max
  Clone ID: LIB3054-003-Q1-N1-B12
tcactttaaagttacatagtttttcattgttttacttaatgtacaatggctgcttcaacaatgactctctcttcatcatcattggctggccaagctatcaagcttgccccctccacccctgagcttggtgttggaagggttagcatgaggaaaacagcctccaagactgtttcctcaggaagcccatggtacggcccagaccgtgtcaagtacttgggcccattctctggtgagcccccatcctacctcactggtgaattcccaggtgactatggttgggacactgctgggctttctgctgacccagagacttttgccaaaaaccgtgaactcgaagtcatccactccagatgggccatgttaggagccct

SEQ ID NO: 36220 - DNA, 327 bp, Glycine max
  Clone ID: LIB3054-003-Q1-N1-B2
tataatggctcgggaacttatgaatgagattaggtgccctggtgatcaatcatgaacgacagttcacgcttggatcactgagatggcatcttacctgaaatccatagatggaaaccacttgctggaagctggtctggagggtttctactgccagtcaaagcctcagtctaacccaaacttcaatgtaggaaccgatttcattggcaacaaccaaatcccaggcattgatttcgcaacagtgcactcctacccggaccaatggctatcaagttctagttatgaggaccaaatctcatttttaggccgttgggtggattaacacattcc

SEQ ID NO: 36221 - DNA, 232 bp, Glycine max
  Clone ID: LIB3054-003-Q1-N1-B4
cactctatatatcaaacaatactccaacacaccacataactagggttagttattatcactatttacactacctctctcactgactcctttagctgagtcttaaatctagctatatatacatacaatcactcacagtctcatacacatcatacactaaaaattacaacctcacacaatacataacacgttaccaaatatccaacaaaacacacatcaacaataataactcaca

SEQ ID NO: 36222 - DNA, 177 bp, Glycine max
  unsure (1)..(177): unsure at all n locations
  Clone ID: LIB3054-003-Q1-N1-B7
tgtttgtccaaaggttgttgcaaaaggtttcaggtgcattgacagggatcanggtgtctggtatcttgaccatctggatgtaccttgngatgaggtctacactactgagccactacagggaatacatatagcttctgaacaagagcttgtaattggaggagaagttgcatgtggggt

SEQ ID NO: 36223 - DNA, 291 bp, Glycine max
  Clone ID: LIB3054-003-Q1-N1-B8
tgttggtaaaaaaaaaaagacagagaaaacgcaagtttctggtaggacttccccctttatgtatatttgtgaatgtgataagggatttaactggaattaaaaaaaggggggattcacgaagatttaattactaaatgaataacttacccatgaatcatttccccggggtatgtttcaagttcccttatataattaatgcaaattggattttgattataggatatgtttccaaaaagattcaacgtactttttatgggtatacgattaaaaaaaaaaataataccttaatag

SEQ ID NO: 36224 - DNA, 104 bp, Glycine max
  Clone ID: LIB3054-003-Q1-N1-C1
aacaactcctattaagttttcagttctcacaaatgaaaaagtaaaaatattatatatacatatatatatatatatatattctcttcgagtccgtcgaaaaagaa

SEQ ID NO: 36225 - DNA, 288 bp, Glycine max
  Clone ID: LIB3054-003-Q1-N1-C2
aacaactcctattaaacttacaaatctcacaaattagccagattaatcattatatatacacatatatatctatatacactctcatcgaatcctacctaaaatacatcaatggcaacccctagctgcaaactgccatagaagcatactacttccaatcactacctaagtctcccacagacttaattgtacaaaccgatatccttaacaacactaccctacaacccatagatgattcaacagtgatcctacaacaccaccaataactaccaacgtgcctttaacacgacc

SEQ ID NO: 36226 - DNA, 451 bp, Glycine max
  Clone ID: LIB3054-003-Q1-N1-C6
atgagacccgctaacacgtacagaattaataggtctcataggtgagttcatgttctctactgcgactcatccggtgctcttaagcgaactgaataggaacccttcaagtagttcatgaacactgcattttgattgaccattctgaccgattcaaacaaccaagattgtagatgggttttgatcacatgaactctaattgctgaacatggattggatgctgcatcaaataagacaagttctctcagcatatttgcttaatatggtgtggcatagcatcttaaacattgcttttagacatgaaaagattaatgacatattcattactcagttgtaagatatgctaatatgaactgaaaatttcatcaatattggcgtatctgttacctaagtccattttttgaaaataatgatttttactgtatgatatacaattaccattttaaaattaatt

SEQ ID NO: 36227 - DNA, 101 bp, Glycine max
  Clone ID: LIB3054-003-Q1-N1-C7
cttcatgcctgcagtgtacttacagatctctcgtgaattcaattcacattttaagaaataagagcaaaatggcatggttcaattgaattatttgcttctta

SEQ ID NO: 36228 - DNA, 214 bp, Glycine max
  Clone ID: LIB3054-003-Q1-N1-D1
agaaaaccaaaaaataatgtcaatggaaatgatggcaacggaacgtgtttgttatgttcactgcaacttctgcaacaccattctagcggttagtgttccattacagcagtttggctaacattagtgaccggtaaaattggaccatggtcccatttggtaataagttaccatggaaccttaatttaaaccttttccccttaagaaccttaaaaac

SEQ ID NO: 36229 - DNA, 105 bp, Glycine max
  Clone ID: LIB3054-003-Q1-N1-D3
tccaacaacaccctcttctcgcgttgtctccaaatcgctccgaattacccacacgcaaacgacaacaaccgttctcgtttcacacctgcataactcggaataaca

SEQ ID NO: 36230 - DNA, 314 bp, Glycine max
  Clone ID: LIB3054-003-Q1-N1-D4
cgctctccaacaacagcagcaccatgctccgtctcacactgcgtcgcggctttggccgtcgtcgccctctccgggagcgcgttcgctggttttgaaggacaaacccagaacaagttcatcgtgacctacaatgtcgtccccgacgtgttcggtctcttcgccttctacaccatgccccgcaccctccgagaggccaaggatctccacttcgactgggcttctgagcgcaacgccgtcgacaacaacaccgacctctactgccgcaagggagaccaccgcgtctgcgtgctcttcgacaaggctggcagcgtggc

SEQ ID NO: 36231 - DNA, 85 bp, Glycine max
  Clone ID: LIB3054-003-Q1-N1-D5
ctgtaaagaaaaagtatggaggaatgctgcccaaaaagccgccacgcatatctaaggaccatgaacgtgcttacttcgattctgc

SEQ ID NO: 36232 - DNA, 149 bp, Glycine max
  Clone ID: LIB3054-003-Q1-N1-E1
tatatatatatatatatatacacacttgcgattttgtacgtgctttagtatggattacagtttaaaagttgtatcagaacaggtaggctctctattctgtaaattgtgctaagttttataatttataatatagagtttaaatgcctttt

SEQ ID NO: 36233 - DNA, 366 bp, Glycine max
  Clone ID: LIB3054-003-Q1-N1-E10
ataaattatactccatgcactctactaactcggaattcgctcgacataaaccttccatcctctatcataacataataggcagtatcaatatccttaactctaccttccgataactaagactatctttcatagcatacaataattatcatctctaatattaacacagattcactaattccattttttaaaaaaaattaaaaataccatcaaatacctaatgatctcatcgatcctaaaattaattctataactctacttaacaacttcctacttttccttatatataatactataaaagctaacattattcatgacctaaggtttttcctattataaatcgtaatccattcacatttccaaacaaaa

SEQ ID NO: 36234 - DNA, 278 bp, Glycine max
  Clone ID: LIB3054-003-Q1-N1-E11
tctacatccgttctcatcatttgcatacgcatcgagagcatagttacaatatcggttccccttaccttcccataatcaatattatatttactattcattacaattatcattttctctaatatataaacaacctaatcactactctctctaaaacaaattatatataccttccactccataatgatctcatccacccaataattaatacattaactctacctgacaactttccacctttccatctatttcatactattatatcctacattattcatcta

SEQ ID NO: 36235 - DNA, 297 bp, Glycine max
  Clone ID: LIB3054-003-Q1-N1-E2
caagagcagtgttattgttggctatgtgtgtgcttccggcgatggttgtggccattcgcccagcaaagaaccctttttgcgtgaagggtcgtgtctactgtgacccttgccgtgctggttttgagacctcagctaccacctacattgctggtgctgagattatgttgcaatgcaagagcagggttagcaacgaggttgtgtacacgaagaaggggtacaccgactcaaccggagcatacacaatgtacgtggatgaggatcacgcagatcagatctgcagtgccaagcttgtaagca

SEQ ID NO: 36236 - DNA, 340 bp, Glycine max
  Clone ID: LIB3054-003-Q1-N1-E3
tgaagtgactgattgcagcgatcataccagcttctttatggatgtgtacattgaaggcattccgtatgattaataactcaactcgatagctcatgatagttatcacgaattagtaaagactattgcacatatgtttgacactaccattctgatgtggacttaaatggattgaattcaacccgtaaaatgtcatgttctaacttattaagattgaaaaggaaatttgaatattgatggtgatttacctttgaaaaatttattataaactgttaataagtttaaaatctcaaatgtggatgcattcatgtgataaattcattcaccttaaaaaacttttact

SEQ ID NO: 36237 - DNA, 172 bp, Glycine max
  Clone ID: LIB3054-003-Q1-N1-E5
atatatatatatatatatacacactttctatttgggtcagtctatattatagattacgatttaaaagttttatcataacaagttcgctctctattctgtaaattgttctaagttttaatatttataatatatagtttaaattcctttttaaaaaatataaatatttataatt

SEQ ID NO: 36238 - DNA, 378 bp, Glycine max
  Clone ID: LIB3054-003-Q1-N1-E8
ctggaagtctcgttgactttgttgaataattgtgtgaggattgaagcttgatgcatacgtatgggtagttgaattttttttccctgtcatttgatgtctacctttgaagcgaaccaatatatgattcttgagggaattagggctcaaaatgttcagagttaaccaatctattatctaactaggtaaaaatctctcccagatgtcaaatgttgcgaactcgacaaatattatgtggcatgactgtccaattcagaaacaagatagacagcagctgcttcagcaaaaaggctgtgttatatggctaactggcctcagtggttcaggaaaaagcactattgcatgtgctttgagtcgaagcttgcactccaaaggaaaact

SEQ ID NO: 36239 - DNA, 393 bp, Glycine max
  Clone ID: LIB3054-003-Q1-N1-E9
agacgaatgagctggtggcggttaagaagatagcgaacgcggtcgacaatcacatggacgctaagcgtacgcttcgtgagattaagcttcttaggcatttggatcatgaaaatgtaattggtttgagagatgtaattcctccacccttgcgtagagagtttaatgatgtctacatagccactgaactcatggatactgatcttcaccatatcattcgctccaatcaaaatctgtcagaggagcactctcaatacttcttgtaccagattcttcgtgggcttaagtatatacattctgcaaacgtaatccatagagatttaaaaccaagcaacctgctgctaaactcaaattgtgacttgaagattattgattttggtcttgcgagaccaactt

SEQ ID NO: 36240 - DNA, 272 bp, Glycine max
  Clone ID: LIB3054-003-Q1-N1-F10
cacgttcaccacaactaagaaatagacgctatactgggtcgcttaaatctctgggccagctcttaccactattattcgtcccagtaccctcattctagcttcaatcatttccattattcccatcgctggcttctccacttcaacgaccatcaataacccaatctccatttctagatacatttctagacttcaatgcacgcacctttcaaatccatatagccagaaattcactccatctcctaaatacctaccaaaccttacttattcacaat

SEQ ID NO: 36241 - DNA, 359 bp, Glycine max
  Clone ID: LIB3054-003-Q1-N1-F12
cgaaaaatactgacagcattgtgttgtgcggttacagaagatgagtgaagacgaggagatgaaagatcaggctacgccttcacacttgctttcttcagttcctccatctacattgcaccatttgaagggaatagcatcaattattgaaaccggttcgtactcaaaggaagttcgtcgaattgctcgtgccctgcgccttacatttgcatttaggcgtgaattgacaacaccagttctctcatcttttcttgattatgttcttactcccgcttctgaacctcacactaagttatcctcttatctgcctaatcctaaggaaggtgatcgagagatggaagtggacagtgcaacatctacta

SEQ ID NO: 36242 - DNA, 149 bp, Glycine max
  Clone ID: LIB3054-003-Q1-N1-F2
ctcgagccgctcgagccgtttgcatatgcaagggtaaggttgtgtacaatatccctcccccataccttcgcatagcgaagagtctctgggcaatggggtacgaattttattttttttaatgttgaaacagtttgtccaggtctctctct

SEQ ID NO: 36243 - DNA, 391 bp, Glycine max
  Clone ID: LIB3054-003-Q1-N1-F7
cacgatcaccaccgcaaagcgatccaaaatccgtgtgcgagcttgttgtcaaggatgctaacggagatgatgtagatctctacttttacaagggagaagtccttctgattgtcaatgttgcttctcaatgcggcttgaccaactccaattatacggagctgaatcaattgtatgacaagtataaagaccaatgcctggagattctggcattttcatgtgatcaatttggtaagcaagaaccagaaagccctgattaaaatgtggattttgtctgcaatcgcttcaaatctgaattccccatctttgataagattgaagtgaatggggacaattctggtcctttgtacaaattcttgaagatgtggaaatggggaatttttggtgatgatat

SEQ ID NO: 36244 - DNA, 371 bp, Glycine max
  unsure (1)..(371): unsure at all n locations
  Clone ID: LIB3054-003-Q1-N1-F8
ggtactgcngctcaaggctgaagcataccattaccaccatagatccaaaatccgtagactagtttaatggcaaggatgctaagggagatgatgtatatctctacttctacaatggaaaagtccttctgattgtcaatgttgcttctcaatgcggcttgaccaactccaattatacacatctgaatcaatcgtatgacaagtataaagaccaatgcctgtatattctggcatttccatgtaatcaatttgttaagcatgaaccataaagcactgattaaattgtggattttgtctgcagtcgcttcaaatctgaattccccatctttgataagattgaagtgaatgcggacaattctgctcctttgtacaaa

SEQ ID NO: 36245 - DNA, 342 bp, Glycine max
  Clone ID: LIB3054-003-Q1-N1-F9
cacgatcaccacaactaagaaggagaagctattggtggtcgcttagatctctgggccagatcttaccacagtcaaccgtgccagagccgtcatggtagcttcaatcactggcattatgtccatcgctggcttctccactagaacgacctacaataacctaacctgcattgctagatacatttgtagagtgcaatgcatgcacgtgtcaactccatatagccagaaaaacactcagactctgaaatacctaccagaccttactgatgcacaatcgacataggaagaatgagataccatgtttacgaaggagatgtaatgccgtagcttgatagatccacagtt

SEQ ID NO: 36246 - DNA, 277 bp, Glycine max
  Clone ID: LIB3054-003-Q1-N1-G1
cacgatcaccaccgcaaagcaatgggcgctatactttctgccttaactggcggtgccgcaacggcggcgacgtcttcgccggagagttctgcttctagggtccagtctttccactcttcggcgcgctggcagctccacttcaacgagctcaaagaaaccaataagctcgttgtgatagatttctcggcgtcgtggtgcggcccttgcaaattcatagagccagcgattcacgccatgttcgaaaagttcaccgacgttgacttcgtcaagatcgacg

SEQ ID NO: 36247 - DNA, 398 bp, Glycine max
  Clone ID: LIB3054-003-Q1-N1-G10
ctcgagccggaaaaaactaatagagttatttaagtcctatgaacatgtcttgtcagaggattctgttatggaccatttcaggaacatactgaacaagggaaagaagtttgcaaaacttgaacttaaagcttgcattgaagagtttgaggataagctgaataagtttcacacagataaaaaggaacaggaagttactgctcgaaatgctcaaatccatcaacagaagattggcagcagggaaggttttaccgtgactataaattctgaagatcacttgtcatctaattcttcttcagatgaaacagaaggtgaaataattgatgcttacactgaagaggcaactatgcctttaaatgagagatcagaatctaaacttgtgtcagaatcacattctggtg

SEQ ID NO: 36248 - DNA, 394 bp, Glycine max
  Clone ID: LIB3054-003-Q1-N1-G11
ctcgatccggaaaaaactaatagagttatataagtggtaggggcatgtcttgtcagaggattctgatatggaccatttcaggaacatactgaacatgggaaagaagtttgcaaaacttgaacttaaagcttgcattgaagagttcgaggataagctgaataagtttcacacagattaaaaggaacaggaagttactgctctaaatgctcaaattcatcatcagatgattggcagcagggaaggttttaccgtgactataaattctgaagatcacttgtcatctaattcttcttcagatgaaacagaaggtgaaataattgatgcctacacttaaaaagccactaatccctttaatgagagatcagaatctaaacttgtgtcagaatcacattct

SEQ ID NO: 36249 - DNA, 412 bp, Glycine max
  Clone ID: LIB3054-003-Q1-N1-G3
cgtcgaacagggtttaaaccttacaaaagatgttcggtagaggccaatgaaaacaggatcggaacagcctgcatccaaggtgaagaaaaaggtcccaagagattacgcttgaatggggaggcttcaacttgatgcctgatattcccatgcaaccacacaaagaaaatctctagttttgcatatatttctaagtttccttgttcattgtctgtattgcttattttctaattctgcagctcacgaaacttgtcgtgtaagtctgtgtaccatattaaattactacatacacactttttactttcttggcctgatgttactgcagttaaaaactccgcttaaatagacttttaccagaaacatttagtaccgcttgagcatttgatcatcttaaggatttatgatgcttcattct

SEQ ID NO: 36250 - DNA, 303 bp, Glycine max
  Clone ID: LIB3054-003-Q1-N1-G4
cttcaccttcttccctcaacgtgtcttctttctaaggttgcaggatcagatctcgttccctcgccactcatcctcggccgcgcgtcgctcgccacgcgccaccatcaaccgcacctctcgccgtgaatgatcaataatatattcaatattttattgcaacttggaactagcaatggcatctgaagaagttctgaaggctgttttccctttcctggacggtgttgatcttgcttcttgtatggctgttgataagcagtggaaagacatagctagcgatgatttcctttggaaatgtctgtgtgc

SEQ ID NO: 36251 - DNA, 344 bp, Glycine max
  unsure (1)..(344): unsure at all n locations
  Clone ID: LIB3054-003-Q1-N1-G7
cacaatcaatcacatttcanaggcatgtttttttcaacagagttcgttctacccacgagtcgattcaacaaacccagacgctaattctcccttctctatccccgcaccatcttcttcttcttcttccatttatccctcagtggaaacaacagagaatctcatttgggaagagccaaacacgactacagaagaagccatggaaaacgttctggtcacggtcccgggtgcgattctgcatctgatagaaaaggattccagcgtgcaccttgcttcgggcgacctcaccatatcgaccctcggagaaggcgacaaagtggtggcggttctggcatgcgtcggcgatc

SEQ ID NO: 36252 - DNA, 353 bp, Glycine max
  Clone ID: LIB3054-003-Q1-N1-G8
caaatacatatgtgacatcctctgcatatgggaaccttacgaatgcatattcttctatgtcaatgctaccacaggctcagtcaggagttcttatgcgacagcctctgctttctcgctatgaagcatctcttggtgttatgaatcctgtgagcaagtctgtggacttagttaagcctcttacaatgactccccaggaaaaaattgaaaaattgaggaggcggcaacaaatgcaagcaatgcttgctattcagaaacaacagcaagaattcggccatcaagttcctagcactaataaatcaatgaatgaaaaatgtgccatagaaatccatagtcaactctgtgatggggctgat

SEQ ID NO: 36253 - DNA, 405 bp, Glycine max
  Clone ID: LIB3054-003-Q1-N1-G9
atggggcgagagctggggagagaatggatattacaagatctgcagaggtcgaaatgtgtgtggagtagattccatggtctcaactgtagctgctatatatccatccagccattaaatacaaagatatgcctgattgtggttgtgatgtgatactggactaaggggagtttgtataaatatttatgttgcgaactttatcatttggtactggtaaaattatctccgtataggatcaggaaactgctaagaccatgttgcttatgtagtatgtaatttctgtatgtatgcttgacatatacaagtgggaaatccaaggaaatgtgtggtcctaaaaatggtgcaagataagcaactctctatggagattggcagggtaaggctgtccaaactgcaacaggggaatac

SEQ ID NO: 36254 - DNA, 250 bp, Glycine max
  Clone ID: LIB3054-003-Q1-N1-H1
attcaactctatcttcacctttttccctcaacttgtctattttctaaggttagattatctgatctctttccctccacactcatcctctacctctcaacactctccactctccaccatcaaccacacctttctccattaataatcaataatatactcaatattatataacaactcttaactcacaatctcatccaaataaattcttaaaactatttttcctttcctttacaatttacatcttacttcttat

SEQ ID NO: 36255 - DNA, 293 bp, Glycine max
  Clone ID: LIB3054-003-Q1-N1-H2
cttatctcaagatttatttatcccgaaaatcccgtgtctgagcccgaaaaacccgaaactcccaagaatcccgctatttaaatctcccccaccgccaatgtaccgtttacaactaaagtccgatcccccaccgccaatgtaccgtttacaaccaaagtcccctaccccactgccaaacgcaccaccgaagcaaatcaatattaagggcctgtccgtcgtcaaagattacttatctgactacggctacattgaatcctctgggccatttaacgattctttcgatcaggaaataa

SEQ ID NO: 36256 - DNA, 366 bp, Glycine max
  Clone ID: LIB3054-003-Q1-N1-H3
tcagaaccctcgatcactcccacgcgctcctatatcctctgcttcaccgtcgctctctccaacgatcacaacaacatcgtcatcccatggcaaacgccgcatctggtatggcagtccatgatgactgcaagttaaggtttttggagctgaagacaaagaggacacaccgtttcatagtttttaagattgaggagcagcagaagcaggtcattgtggagaagcttggtgagccagcccaaggctatgaagatttcactgccagccttcctgctgatgagtgccgatatgctgtttatgattttgagtatctgactgaagggaatgtccctaaaagcccaatttttttcattgcatggtcccctgaca

SEQ ID NO: 36257 - DNA, 385 bp, Glycine max
  Clone ID: LIB3054-003-Q1-N1-H4
ggtttttgcaattaaagctcaaaatcatggcatcagtgcgattggaaaattgcaacaaggaataaatcctccatcatggaatatgttgctctttcatggaagtcacctaggcctagttatgaaaacagggcttatcaccgggattttgtccctcactgaaggtattgcagtaggaaggacatttgcagctctcaaaaactacaaagtggatggaaataaggaaatgatggcaattgggtttatgaatgtggttggctccttcacttcctgctatgttacaacaggtgctttctctcgatcagctgttaacaattacgcaggagccaaaacagctgtgtcgaatgtagtgatgtctgtgacagtcatggtaacactcctttttctc

SEQ ID NO: 36258 - DNA, 354 bp, Glycine max
  Clone ID: LIB3054-003-Q1-N1-H6
attgtttgttgttgtaactcgttcttcttcttttgttgttgtgtggttgtgtttgttttttctctcacctgaaaatgtcttgctgcggtggtaactgtggttgcggaagctcctgcaagtgcggcaacggctgcggaggctgcaagatgtacccagacttgagctacactgagtcaaccaccaccgagaccttggtcatgggagtggcacctgttaaggctcaatttgagggtgctgaaatgggtgtgcccgctgagaacgatggctgcaaatgtggaccaaactgctcctgcaacccctgcacttgcaagtgacgtgttgggagagcaagcttcaagcagagatagcccttaa

SEQ ID NO: 36259 - DNA, 390 bp, Glycine max
  Clone ID: LIB3054-003-Q1-N1-H7
gctacttgattccgttgtctctgcagattcttaatctctgtctggttaaaagtttctagaggatggtcatgctgcagttgaattttgaagtttggactcaatgcatagcctttgtttttttaacaagctcttattagtctgccatttttccttctatgtaaattatggaatatattttccttacctactcctggggcatattttcagacaagggtttgccaacctgaaggtaaataattttgcatgaaatgggttggtttaccaagttgcttaagggctctgattataaaattttacgagggcaataccatggcaaatatggagaggacagaatttgggataatcatcatagatcgatggatgatttgacagatattgagaaagaagaca

SEQ ID NO: 36260 - DNA, 210 bp, Glycine max
  Clone ID: LIB3054-003-Q1-N1-H8
accaacacgcttggacccaattgaaccgggccagaattaaatggcccgaccatttggcaacgggccttccagggccaaactgaaggtggcacgcccattaagaaccaacggttggcccgccagtggttggcccccccggttggaatggaaatcaagttcggccatggccgtttcaactttttccggggtttcccaaaaaccgtggttggc

SEQ ID NO: 36261 - DNA, 359 bp, Glycine max
  Clone ID: LIB3054-004-Q1-N1-A1
gccatggatccttacaagctccggccatccagcgccttcaattctcccttctggactacaaattctggtgctcctgtttggaacaacaactcctctttaaccgttggagctagaggtccaattctgcttgaggattatcatcttgtggagaagcttgcaaactttgacagggaacgtatcccagaacgtgttgtccatgccaggggagctagtgcaaagggtttctttgaggtcacacatgacatttctcacctgacatgtgcagatttccttcgagcccctggagttcagacgcctgtaattgttcgtttctcaactgtcattcatgagcgtggtagccctgaaaccttgagggaccc

SEQ ID NO: 36262 - DNA, 80 bp, Glycine max
  Clone ID: LIB3054-004-Q1-N1-A11
ttattatgcccttccttaatccaaaatgaaatgacatccgaattcctcatggaattccaattccacattttccacaaatc

SEQ ID NO: 36263 - DNA, 370 bp, Glycine max
  Clone ID: LIB3054-004-Q1-N1-A12
cgagccaggctagccactcccatccgcactgttcagaagatatacagtgaggctgactcagaaaatataccctttggggacaccattttcactcgatctagtgcgggaaatcgcccattcctactgatagaaccactatataaagttaatggtgaagataaaactaagccttcaacacgttcaactcgtgcaagtgaggaaaaagatttcaagattgatgaaaccatggcatctgacaccaaagaagatgagaactttgcagcaacattaacctcctcacctgatgtaaattccaaggataaatccaagtcactgtctgaagcccagccaaaaaaggaaaatgcagtagatgcaggaaagggacctacag

SEQ ID NO: 36264 - DNA, 365 bp, Glycine max
  Clone ID: LIB3054-004-Q1-N1-A2
aaaaaggagcatgttgattatatagaaagtaaagggcaagaatcatttttgtttaccatgggtaaggacaccatcgctgacataataacctatataagaaatgctgacatgaataaaaaaggaatggttcaaataccatttactaacataacagaaaacattgtaaaaatacttttacgcgagggttttgttgaaaacgtcagaaaacatagagaaaacgacaaatattttttagttttaactctacggtatagaagaaatagaaaaggatcatataaaagttttttaaatttaaaacggatcagtacacccggtctacgaatatattctaattatcaacgaatccctcgaattttaaggggcat

SEQ ID NO: 36265 - DNA, 319 bp, Glycine max
  Clone ID: LIB3054-004-Q1-N1-A3
tgattgatgttcatcccacgatgtgtcaatatcgggaaggatgcatgaagaacgggatgggcaaatgctgccctctgtattcgcatcctgaaagagagtatggatggagaattaactctaactctgaagccgtaataacataactgaagatgcctacaacatctgccgcgcgacctggtatgacgactgaaaaagtctcacactgagatgcacttactacttcgaataaaagaatgattcatgcaatatggacttattgactgcaactaagattgtgcatgatagttcacagtggcttttacaacctgcaattaatgtc

SEQ ID NO: 36266 - DNA, 401 bp, Glycine max
  Clone ID: LIB3054-004-Q1-N1-A4
gccaggtggttcactttcgatctctggagagaccgaaggaggaggactttttcttggagatgtcaaggctttttacatatgatgatgtggtggagagagtagcccaacatcttggtttggatgatccgtccaaaatacggcttacaccacacaactgctactctcaacatccaaaaccccagcctatcaaataccgaggggtagaacatttgtctgatatgttagttcattacaatcagacatcggatatactatactatgaagtacttgacatccctctaccagaattacaagggttgaaaactctgaaagtcgcatttcatcatgccactaaggatgaagtggttattcatactattcgacttccaaagcagagcattgttgggatgttcttgatgatc

SEQ ID NO: 36267 - DNA, 409 bp, Glycine max
  Clone ID: LIB3054-004-Q1-N1-A5
gccaggtggttcactttcgatctctggagagaccgaaggaagatgactttttcttggagatgtcaaggctttttacatatgatgatgtggtggagagagtagcccaacatcttggtttggatgatccgtccaaaatacggcttacaccacacaactgctactctcaacatccaaaaccccagcctatcaaataccgaggggtagaacatttgtctgatatgttagttcattacaatcagacatcggatatactatactatgaagtacttgacatccctctaccagaattacaagggttgaaaactctgaaagtcgcatttcatcatgccactaaggatgaagtggttattcatactattcgactcccaaagcagagcattgttggggatgtccttgatgatcttaaaac

SEQ ID NO: 36268 - DNA, 404 bp, Glycine max
  unsure (1)..(404): unsure at all n locations
  Clone ID: LIB3054-004-Q1-N1-A6
tgattaaggaacatcccaagttatgtcaatctcatgatgaatgcatgaagaaagggagtggcaaattttgcgctcgttatccgaatcctgagagtgagtatggatggtgtattgactctgattctgaagccctaaaaggcttcttgaagatgcctacaacatttgccgagtaacatggtatgcccaatgaaaaagttgcacacaaagatgcgtctactacttcgaataaatgtgtgctccatgcaataagtagtttttgtttccaactcaatttntaaatgatggttcatgtttgtttttgagcctacaagtaatttttcttttggatcttgatatccaagtattctttggatatatgaattattaattatagcctaatgtcagtgtatattggtctcttgtgt

SEQ ID NO: 36269 - DNA, 332 bp, Glycine max
  Clone ID: LIB3054-004-Q1-N1-A8
tgattaatttcatcccaagttatgtcaatctcatgatgggtgcatgaagaaagggagtggcaaattctgcgctcgttatccgaatcctgaaagtgagtatggatggtgtattgactctgattctgaagccctaataggcttcttgaagatgcctacaacatttgccgagtaacatggtatgcccaatgaaaaagtcgcacacaaagatgctcttactacttcgaataaatgtgtgctccatgcaataagtactttttgattgcaactcaattggtaatgatggttcatgtttgtttttcagcctacaagtaatttttcttttggatctttat

SEQ ID NO: 36270 - DNA, 388 bp, Glycine max
  Clone ID: LIB3054-004-Q1-N1-A9
gccaggtgtttcactttcgatctctggagagaccgaaggaagatgactttttcttggagatgtcaaggctttttacatatgatgatgtggtggagagagtagcccaacaacttggtttggatgatccgtccaaaatacggcttacaccacacaactgctactctcaacaaccaataccccagcctatcaaataccgaggggtagaacatttgtctgatatgttagttcattacaatcagacatcggatatactatactatgaagtacttgacattcctctaccagaattacaagggttgaaaactctgaaagtcgcatttcatcatgccactaatgatgaaatggttattcatactattcgacttccaaagcaaagcattgttaggga

SEQ ID NO: 36271 - DNA, 66 bp, Glycine max
  Clone ID: LIB3054-004-Q1-N1-B1
ataactctgtaacgactgtgggataccgagaaagattacgattgaatacttaacggaccggaacct

SEQ ID NO: 36272 - DNA, 398 bp, Glycine max
  unsure (1)..(398): unsure at all n locations
  Clone ID: LIB3054-004-Q1-N1-B10
gcagagagtgcggtaggctcttccgagacccgaagcaggcatggggatcgatctcaaggccggaggtaagagcaaaaagaccaaaagaacagcacccaagtccaatgatatctatctcaagctcttggtcaagctttatcgcttccttgttcggagaactggcagcaacttcaatgctgttatacttaagagattgttcatgagcaaggttaacaaacccccattgtctttgtcaaggttgattaagtatacgaaggggaaggaagataagattgcagtggtggtggggtctataaccgatgatattcgtgtttatgaagttccaccattgaaagttacagcactcangtttacagagactggccgtgcaagaattgagaaaggcaggcggtgaatgc

SEQ ID NO: 36273 - DNA, 370 bp, Glycine max
  Clone ID: LIB3054-004-Q1-N1-B12
gttgtattttggagggaatctcaaaaatgcacttgacggcatctgaaatgggagagggagccggtgtcgcgcaagttgtagattcattttaggaattagggaccatttccatcatggaattctgtataatgctttgttgctgcttgttcaataactgtgtatagttgggtgtttattattattattagccattaggctcttcctattgtttgtagtgctttgtctgtaaggtggctttcattattcattctaagatggtgaacttgctgcaatttaatcattgtaatattcttaaacatatatttttattgttttaaaaataaaagcggtgaaaactgaagaccacatctgctttgtggccttgtttcgc

SEQ ID NO: 36274 - DNA, 375 bp, Glycine max
  Clone ID: LIB3054-004-Q1-N1-B2
gttacactgctctagttacaaacttatccccaagagcagcgagaggatgatgtgagaaatggttttacatactgtggtttaattgagcatattgaaatattaagatctggtgaaaatgcgtctactgcatatgtgacttatcgggatgcttatgccctggaaactgcattattgctaaatggatccatgatcttggaccaatgtatattcatttcacgctatgaagcttatgtaaatgactatgataattggagtagtcatgcatcaaagcctgaatacagtattacaacctcacaggatgttcacatggataagtttgttggttcccctggagaagcactaactatggctcaagtggttgtcaaaacaatggtg

SEQ ID NO: 36275 - DNA, 388 bp, Glycine max
  Clone ID: LIB3054-004-Q1-N1-B3
gtggcttctttggtgttactaatacttcttctgaacaattgtgtagtgctttttccctcaaaatgtcgtgtcccaaatcagtaccccaatcttctttgtaaatgcagcctatgactcatggcaggtcagattattctctttctcaagaaacattctatttttggaatggtgttcatttggaattttggtcctacttaaaactgataatatgtttatattcattgatcaattgattggcttgtttataaggttaagcaacgttggttatatatgaggatttatacagaacaacataatatataatagactttagattttaactttgaattcccagtgaaaaatactatgattgcttaattatctcaatattgaaaattctgcttacata

SEQ ID NO: 36276 - DNA, 416 bp, Glycine max
  unsure (1)..(416): unsure at all n locations
  Clone ID: LIB3054-004-Q1-N1-B4
agggaagggtcctaccatcatctatgtttggtctggattgctctgcattattatctctntgctntgggtgtacataaaccctccttcaggaagaacacaagattacatgaatttccaattcccttgagtttgagggtagatagatgaagttcctctgcttcatcatctatgtttggtctggattgctctccattattatctctttgctttgggtctggattactctgcttcatcatctcgtagtaatagtagtactgtgcctttgttgtgctagattgattacattcaattgtgattatatcttactttctgttatgtgtgggccacactctcaatatgtgtccgagaaaaacaagtaggtatctgttaactttttttggtaatatctcataatgactgagatattaactcaatca

SEQ ID NO: 36277 - DNA, 252 bp, Glycine max
  Clone ID: LIB3054-004-Q1-N1-B9
cgcactactttgcatcatatggagcacattttaacatacatctatactcctgctgtctcggtcactctagttcatgccttggattaccttatcctatccaattcatcaatcattgatcaacccgaacatcattaaatctaacagcttcatcactgcacattcattgaacattcgtccgatgctcgctgtgatctctgaatctactccagaagacgatccctatccttcacctaatactgctaacacaacatc

SEQ ID NO: 36278 - DNA, 392 bp, Glycine max
  unsure (1)..(392): unsure at all n locations
  Clone ID: LIB3054-004-Q1-N1-C10
ctttctctctcttctttttactctctctctgtctctctgtacgctttctcgttcgagatccctcaagggatccactaactgaaggagaaatggggttgacattcaccaagcttttcagccggcttttcgccaagaaggaaatgcgaattctgatggtgggtctcgatgcagctggtaagaccaccatcctgtacaagctcaaacttggagagatcgttaccacaattcccaccattgggttcaatgtggagactgtggaatacaagaacattagtttcactgtctgngatgttggtggccaggacaagattcgtcccttgtggaggcactacttccaaacacacagggtctcaattttgtggttgaccagcacgacagggacagagttgttg

SEQ ID NO: 36279 - DNA, 390 bp, Glycine max
  Clone ID: LIB3054-004-Q1-N1-C5
tgattaaggaacatcccaagttatgtcaatctcatgatgaatgcatgaagaaagggagtggcaaattttgcgctcgttatccgaatcctgagagtgagtatggatggtgtattgactctgattctgaagccctaaaaggcttcttgaagatgcctacaacatttgccgagtaacatggtatgcccaatgaaaaagttgcacacaaagatgcgtctactacttcgaataaatgtgtgctccatgcaataagtagtttttgtttccaactcagttggtaatgatggttcatgtttgtttttgagcctacaagtaatttttcttttggatcttgatatccaagtattctttggatatatgaattattaattatagcctaatgtcagtgtatat

SEQ ID NO: 36280 - DNA, 375 bp, Glycine max
  Clone ID: LIB3054-004-Q1-N1-D10
caaatccctacattcctatctcgcctacttcggctccgaataatttgctaggcaacaggatgtggaggtatgctacaacagaatctatatcacacctgtataatgtcctcatgactcaaccacccaaaggatgcatacatattcacgaagcgatacaccgaatatggaacttcgcactttcgtagaccacatgataacaatattacactgatcactgaagagctaagagacgttggatcagaactctaactcgatctggatccaatggatgcgtaaacaaagtagctctttgctggcagcacgttatagataccctgatgtcagcactagacggactttaccgaatgcatttgcaacagcaccatacatgtggac

SEQ ID NO: 36281 - DNA, 420 bp, Glycine max
  Clone ID: LIB3054-004-Q1-N1-D11
gtaacctgggatttcggttcgaggtgaggaagtggatttctggtgttggtgttgacagtggggggaagaagcttgtgaactcaaaagatggacctccaacctttgagcagcccaagatgactctggagaagctcttgctgtatggtaacatgcttgtccaagaacaagagaatgtcaagagagtccaattggctgacaagtacttgaacgaggctgctcttggaaatgctaacgaggatgctattcagaggggaactttcttccagtcttgaattggaggcaaagcaaacttggcaagtaaatatttctgttcgtgaaggttgttgtactaatccaagtgctagaagttgtgatggaacttgcgtgtaacattcttagcattctcaatgtcttaagtgcaaagagaagatgctaagtttg

SEQ ID NO: 36282 - DNA, 367 bp, Glycine max
  Clone ID: LIB3054-004-Q1-N1-D12
gtgaggaataggatttctggtgttggtgttgacagtgggggggataagcttgtgagctgaaaagatggacctccaacctttgagcagcccaagatgactctggagaagctcttgctgtatggtaacatgcttgtccaagaacaagagaatgtcaagagagtccaattggctgacaagtacttgaacgaggctgctcttggaaatgctaacgaggatgctattcagaggggaactttcttccagtcttgaattggaggcaaagcaaacttggcaagtaaatatttctgttcgtgaaggttgttgtactaatccaagtgctagaagttgtgatggaacttgcgtgtaacattcttagcattctcaatgt

SEQ ID NO: 36283 - DNA, 198 bp, Glycine max
  Clone ID: LIB3054-004-Q1-N1-D4
tagaatgcgaaacccgacagagctgttcagataccagccctcaaaccctggagactcccatgtaccctcttctagtgccacacttcacgttacacgattccaacatatactcaactaactaattaacgtatcggcattcatacatgtcatccttttgctatttaatgtcggatgatgtgatgatatattttctgttca

SEQ ID NO: 36284 - DNA, 351 bp, Glycine max
  Clone ID: LIB3054-004-Q1-N1-D5
gaagaagattaagattaaagtgtgatttgatgattatgagttgaagtgtgagaggtgaagagatgaacgttagccatgcttcggttcacccagttgaagaagcatcagctactgaaggtggtggtgacttacacgtttacgctacttagggaaggatgaatgatgatatatgaattgctatcatttgctgtcttattaggcctatcctgaagccaaatgaaatgagatctgaattcctcggggaattccaattccacatcttcaagaaataaggaggcaaaaatgttcatatatgaattggaattatttgttatcttattaggcctatcctgaatgcctaggaaatgagat

SEQ ID NO: 36285 - DNA, 414 bp, Glycine max
  Clone ID: LIB3054-004-Q1-N1-D7
ccccttccttagcctgggattccggttcagggaacccattgccggcctttccaggaaggaaaaccaaaggggaggttccgtctttccatcatgaacgctcttcccattctcctcttcttcctcttcgtttctgcattagtttctgcgaagaaaactggtgatgtgacggagctgcaaattggcgtgaagcataaaccagtatcatgtgaagttcaggcacacaaaggtgacagagtcaaagtacactatcggggaaaactcactgatggaactgttttcgattctagctttgaaagaaataatccaattgaatttgagcttggtactggtcaagtgatcaaaggttgggaccagggattattgggaatgtgtcttggtgagaagcggaagctgaaaataccatcaaaacttggc

SEQ ID NO: 36286 - DNA, 359 bp, Glycine max
  Clone ID: LIB3054-004-Q1-N1-D8
tgaccgcagtatgtgctgtgggactcctccagattgtgagtggaaggcacaagcaggtaacatatgtgttgcatcctttgactggagctgtagtggaatctgcaagtcggtagagaagatcaaatatgtgcactcaaagtgtggtgaaggggatggagctgtttggagtgccttagtttaggtttgatgggttcaacagaaagccaactaactaattcacgtgttggtatgcatacctcccagctttttgtttttgggtgtgggaggatatgatgatatatttttggttcaactatagtctatacttggtattatgtgacatagacctctcttgttacatgtatctctttatatttttg

SEQ ID NO: 36287 - DNA, 386 bp, Glycine max
  Clone ID: LIB3054-004-Q1-N1-D9
aagatgtataactttccacttcgcagagataaaggatcgctttcagaaaataatgtaagaggtcgaataatgcttgaaaagaatggaaaaaccacaaattcctttcctggggatgtgaccacagaaaggattgctgctcttcaggaagcatactggagtatggcatcagcactttctgaggcagatggaatcgattacactgatcctgaagagcttgagttgttggtcagaactcttatagatctggatgcaatggatggtaaacaaagtgtttctttgttggcagagtgttctagttcccctgatgtcagcactagacgggctttagcgaatgcattggcagcagcaccatccatgtggactcttggaaatgcaaggatgggggc

SEQ ID NO: 36288 - DNA, 209 bp, Glycine max
  Clone ID: LIB3054-004-Q1-N1-E1
accaatctatgccaagcccaatacatgcaatctctatcggaatcacttacactcaagtgtgcatggctagcctcacagttggattcatatctgttgcattatgaagtgatgtggtgaatgcactgatggagcatgcgcatatacagtaccagcaggtgccgagtgaagcggacagttgggtctgctagattgaaaaagtagaagctcgc

SEQ ID NO: 36289 - DNA, 382 bp, Glycine max
  Clone ID: LIB3054-004-Q1-N1-E11
gcttccatgaaagagcatgttgtaaagagaattgcagacgcgacatgtcatgcaagtgcttagtttcaatttcagcttggaattcagtgagcttcaagttcaatgagcaagtgcgtaatacttcaatgcactctaagtgcttattgcaaattgtattcttgcggttagttttaattaaagttgtttatgtttgtctcagattacagatactctactattttatattattttattccatttgctcccctcccacatttacatagcgtttgaatttgtggattggacctcaatgggttcacacatttagtctgatattcatgacctcaattgctataataatgttagaccggttcgcccagacatcgataatgattatatggtg

SEQ ID NO: 36290 - DNA, 342 bp, Glycine max
  Clone ID: LIB3054-004-Q1-N1-E7
tggatatgtttaattatttcgcttctgtcgattctagtagtcctgtatatactgatgatggatgatataacctgaatggtcggtatgttgatggaaatcggattattgtggaatttgcaaaaaggtcttctcgtgggtcccgggaatattcagggcgaggtcctcctcctggctctggacgctgcttcaattgtggccttgatggccattgagcaccagattgcaaagctgctgattggaagaataagtgttaccgctgtagagatagaggacatatagaaaggaactgcattaacagccccaaaaaatttaggcgaagactgaaatattcacgctcaccaa

SEQ ID NO: 36291 - DNA, 215 bp, Glycine max
  Clone ID: LIB3054-004-Q1-N1-E8
gatgaatggtccgaagcaatgacgggtatgttagaatggttagccccgcttgctcacaacatgctaagatggcaatccgagagaagctatgagcaacactgctttgtttccagggcaaatgttttgctggtgcaaaccctttattttgctagtcaagaaaaaacagaagcaataatcactgagcttcttgtgggtttgaattatgtgtggagata

SEQ ID NO: 36292 - DNA, 381 bp, Glycine max
  unsure (1)..(381): unsure at all n locations
  Clone ID: LIB3054-004-Q1-N1-F2
ctcctcgcatactggagttgaaagggagcatagacattgctgacggagatcaaggcgataccaactctgctgggaagacagcaaagaagatctatgacaagaaatttgcagaactttcagggaatgacatattcaaaggggatgcaccgncttcatctgctgagaaatcattgagcggggccaaactacgagagatgagtggcagtaacatctttgctgatgggaaggtagaagctagagactacctaggtggtgtacggaagccacccggtggcgagagcagcattgccttggtataatttattagggtctaacttatcttcatactggtcttgtttggtttaattaatttttagtggggatgtgttattatattatttg

SEQ ID NO: 36293 - DNA, 333 bp, Glycine max
  Clone ID: LIB3054-004-Q1-N1-F4
cataacgcttgctttcttagatcgcagcatagatcttggtcgggttactaaggtgaggctaagtacattaaccacaagggtgatattctctatgaccctagctttggagacctgtcatctattcgcttattgaatcgatatacatcatcttaacctactatttaattatagctatgaaccctacttcacaagatgactgtcaccttcttcagaactggcgcgaaaatagaatcttgataatacttatggatgatacagtatccagaagctgtgaaaagcactgatgatatgacttacttgattacggaacatattatattcatagtgtcttga

SEQ ID NO: 36294 - DNA, 404 bp, Glycine max
  Clone ID: LIB3054-004-Q1-N1-F5
aataacttgtaactcgcgtagtgcacgggacagcttaagggacgccgcgctgatcaacgactccttacgtaaacgacgacggtgtcagacaaacggtgccggttggtggtgccgtcacgctattacgctaatcgtatgcatcagcctcatcaaaaccccttctttctcttaatttagaaaccctaattcagaagaagaaagtcaccttcttcagaatttgcgcggtaatggcatcttcttcagactcatggatgaaggaatataatgaagctgtgaaacttgctgatgatatcactggcatgatttctgaacgtagttcattccctgcatctggaccagaaacccagcgacatgcatctgctataagaaggaagatcacgatattggggaccagacttgatagc

SEQ ID NO: 36295 - DNA, 372 bp, Glycine max
  Clone ID: LIB3054-004-Q1-N1-F6
agcttgctttcatcatcaagaaatattgacgcaggggtgggcatatatgaatgggggttatttgttttcttattacgcctatcctgaagccaaaggaaatgagatcggaattcctcggggaattccaattccacattttcaagaaataaggaggcaaaaatgttcatatatgaattggaattatttgttttcttattaggcctatcctgaagccaaaggaaatgagatcggaattcctcggggaattccaattccacattttcaagaaataaggaggcaaaaatgttcatatatgaattggaattatttgttttcttattaggcctatcctgaagccaaaggaaatgagatcggaattcctcgggggtaccg

SEQ ID NO: 36296 - DNA, 376 bp, Glycine max
  Clone ID: LIB3054-004-Q1-N1-F8
tgctcgtccactctcaagacctctctccctctctgctcgccttctctcacaggcccatttctagaaccaccttctctctctatcctctccttttgaagccctccaaatggctccacatagagcccaaatccaggacttgccatgccctcgtcgccgctttgtctgcagaggtccaagtgcccgaaactttcgacgacacggatgaggacgactgtgctgatggctccaccgccaccaacaccgtccccaccaccaagcctaagaaaggcaaggccgcattgcctctcaagagggacaggacgagatctaagaggttcttggaaattcaacaattgagggagcgtaagaaagagtatgacttgaagacagcaatatc

SEQ ID NO: 36297 - DNA, 399 bp, Glycine max
  Clone ID: LIB3054-004-Q1-N1-F9
gttttaacaatttcctagaagtattttgtacaaaagtgagaccctcaaggaacaatttccgagcttttgttcaagaggaggtaccgaggccaccccctccggtcatttcccgggaacccgaaccagatctgggtggtggagatccacgttctaaagttgaagacgatctagatatcggtgaagacctgttaaagatatcacagcgtcggaatattgatgaaattgacgaggacatccggagcagaggaagcaatggacctccccataatacttctgaagtagattcagttttgggttcagatcgccgggccccaacaattcgatctgaagcaaggcactcaagtgagggaagaagtgaaagctgggaaatcgggtctgaggtccttgccaattcaactg

SEQ ID NO: 36298 - DNA, 356 bp, Glycine max
  Clone ID: LIB3054-004-Q1-N1-G1
gcatgcaaaacatgcacagcatcaatgcggagttaatgccaagatggcaccagacatagctattaatattgatacaaatcccttttttatgacaagggcaggagttaacaagttagagcaaggtgatcaaatagccatagagactaacatgctgcagccaaaggcacatcaatatggtggaatcggtgctgcagctggggccactgctcatagaaaagttggtcctgttcagtatggtatgacaagaatgttctagaagaagggtgtttttcttgtgaatattttggccagggggagcaatcctgttagagaaaaagacactttttaaggatggaactggtgtagtctctggtgat

SEQ ID NO: 36299 - DNA, 394 bp, Glycine max
  Clone ID: LIB3054-004-Q1-N1-G11
ccaatctcacccatttcaaaaaaaggccgttagtgttactattcgtaaaatggccactcttgttctttaccaattctttctcaaactcttgctcctaatttcagtctttcagctttcctttgctgctaggagactcaaccagctggttcaggaccagtcacagttactccattaccacaacggtcctcttctatacggcaaaatcgccgtgaacctaatctggtatggtcacttcaaaccatcccaaaaggccatcatcaccgatttcgttacctcactgtcatccccatcgtctcagagcagccagccatctgttgccacgtggtggaaaaccacggagaagtactaccacctgagtcccaagaacaagaaagctgcttcttctctttctcta

SEQ ID NO: 36300 - DNA, 361 bp, Glycine max
  Clone ID: LIB3054-004-Q1-N1-G12
ccaatcgatcaccgtttcggcaaaacggcgtctatatgggtatgatgaaaatggtcacgcttcaatggctcctatactctctatagctattaatgctaatgctaatcatacagatttgcttcgcaattaaaatacttatacagagttctcatctaccaaatgagggttacttcattcccatatgctgctttttgtatactgcgaaacttctttgaacctaatcatcgctctcaacgtggaaatatcgctcattactaacatgatcaactacagaaactcactgtcatggacatcctgtattatcagacaatcatctgtcactactatgtgcaataccattgacatgtactaccatcagaat

SEQ ID NO: 36301 - DNA, 296 bp, Glycine max
  Clone ID: LIB3054-004-Q1-N1-G3
gccttcggtttcagcccaggtacactgcctacaggctcgctcactttaccaggacagctgggttaatcttgcatacaaataccagcgttatgcctagagcacgtgctagcacggaacagcacgttgatcaaatcgccatagattcatacatgcttcagccaatatctcattagcatgtatgcatcagcgcattaactctatcctgagctcatagaaaatgagatcgctatcactatggtatttccagtttcacatttaaaagaggtaatgatcctgatatgttcatatctaaaatt

SEQ ID NO: 36302 - DNA, 307 bp, Glycine max
  Clone ID: LIB3054-004-Q1-N1-G5
aaacactcttatcacaaagcacacagcaaagctcattcgggagcggaaaaatggcagcagcgttttacatggcatctgttattcgcatcactggctggcaaggctcgaaagctagtcccatcagccttagtaggagaaagaggttagcatgagataagaccgtgatcaaacacgtctacaaatgacgccgatgcattagtgcatacagagttacacagctgtggcatactgtttatccagccggatagtctaatcgatcaggccagtgaccagtcgagcgagactattgcacatcctcgctttacag

SEQ ID NO: 36303 - DNA, 346 bp, Glycine max
  Clone ID: LIB3054-004-Q1-N1-G6
ggctgcggttgcagccgaggagcctgtcctgcagtcgggggctctggaactggcagcgtaagtcatattgctacaaagaccagggttagacctagagcacgtgctagcacggtacagcacgttgatcgtatcggcgtagagacatccatgcttgagccaatggctcatcagcatggtggcatcagtgctgcatctggtgccactgctcatagaaaagttgagcgtgatcagcatggtatgacaggaatgctctagaagaagggtgtttttctggtgaatattttgtccagagtgagcaatcctgttagagaaaaagacactttttagggatggagcttttgtagtc

SEQ ID NO: 36304 - DNA, 130 bp, Glycine max
  Clone ID: LIB3054-004-Q1-N1-G8
gagcggaaaagccgggctggcgttcataggctgccctgacgcataaaaatactataagtggaaaccgcgactataagataccagcgtctgaagctctgccttctgtcactgcgtaccgatacgcgctttc

SEQ ID NO: 36305 - DNA, 128 bp, Glycine max
  Clone ID: LIB3054-004-Q1-N1-H1
cagtttctttatcaaaagcaagaagaactagtctgtccagtttcaattcgaaggaggggtggccttatcaactctatccttctacccctaagaactgaattcagtatttctacgacaactccaatttc

SEQ ID NO: 36306 - DNA, 405 bp, Glycine max
  Clone ID: LIB3054-004-Q1-N1-H10
cttgttttttgcaaattcgcaacccacacagcaagggaaggtgcgagtgagtgagtatggcgtctccattatcagctcaattggttcaatgtcagaactcacttccacctcttcagggtaattttagccaagatgtgtctaaggttcaaaggtcgcgtgtggtatgttacggtaccagatcaccgcttggttattatggtaaagcattgacatcaagatcacataacgccctgaggttttctgtcacgcgacaatctgaagcacggtcaattggatataggagaatgacatgtgtcaatgctgcagacaatgttgtagagcttcaagccaaggtgacaaccaagtgtttctttgatgtaaaaattgggggtgaacctgtgggccggattgttttggccctatttg

SEQ ID NO: 36307 - DNA, 304 bp, Glycine max
  Clone ID: LIB3054-004-Q1-N1-H11
cttaaagttttcgaataggcaacgcacacactagatgggggggctattgattatgagggtgctatggcttctaaactcacaattgctaataacgtaactgattaacacctagatatgatacttaaatccagtacctttaatgagttcaaagctcacaatgaggattggacgaaaccctatgatgctttctgtatcatgctgaactatttacatacatatcatctcactcaatgaggtcatctggctcactactcacaagatcaccgtcaaaaacttgtatccaaatacagtctgcattatcaga

SEQ ID NO: 36308 - DNA, 403 bp, Glycine max
  unsure (1)..(403): unsure at all n locations
  Clone ID: LIB3054-004-Q1-N1-H12
cagaaagagattgaaaaggcaaagcagcaactagatgggaaggatgttgattatgaggctacaatggctactaaactctcaattgctaagaaagtttttgctcaagagaaagatttgatacttaattcaagttcctttaaggagttcttttctgagaatgagggttggttgaaaccctatgctgctttctgtttcctgcgggacttctttgaaacatcagatcgcactcaatggggtcattttgctcattactcagaagataagctagagaaacttgtatccaaggacagcctgcattatgagataatttgcttccactactatgttcaataccatttacatttacaattatcagaagctgcagaatatgcaagaaagaanggagtgatactaaagggagatc

SEQ ID NO: 36309 - DNA, 166 bp, Glycine max
  Clone ID: LIB3054-004-Q1-N1-H6
caatatgagctcactcaaatgcaataatactactattcacagaatcattttataactcattaaataacattttatcaaaatcccatcatattgccattaaccttataaattccatgtttccagcattttttccatattcttcatctccctaactatcattacttaa

SEQ ID NO: 36310 - DNA, 232 bp, Glycine max
  unsure (1)..(232): unsure at all n locations
  Clone ID: LIB3054-004-Q1-N1-H7
aaaaagaatggttcaatccatttactaacatacagaaaacattgtaaaatacttttacgcgaggttttgttgaaaactcgaaaacattagaaaacgacaaatattnttagttttaactctacggtatagaagaaatagaaaaggatcatataaaagttttaaatttaaaacggatcgtacacccggttacgaattattctaattataacgaatccctcgaattttaggggca

SEQ ID NO: 36311 - DNA, 292 bp, Glycine max
  Clone ID: LIB3054-005-Q1-N1-A1
gaatcggctcgagccagtccacgaaaaggcttccaaaacccacggagaggaaaatcaagcgacattggtcccttgaaacttcgagatcggaaaacctctcggtaggggcaaattcggtagagattacgtcgccagagaagataagagcatatttgttgaggcgttgaaggttatatttaaggaacaaattgataagttcagagttcatcaccaactgatgagagagatgggagatcagaccagtctacggcacgcaaacatcctgcgtctttacggttggttgcatgatgct

SEQ ID NO: 36312 - DNA, 394 bp, Glycine max
  Clone ID: LIB3054-005-Q1-N1-A11
atactacacaattcacaatcccaacacccattgtggagaatcagaatctaactagccaatagccatgaagagacagagagagaacgaagtaacaacgttggaaagctgggacatgcaaatttgttcaacttcaatcacacccgacacaagtgtttccagttccaccatatctccggaagatgtatttgagtgcaaaacgtgcaaccgcaagttcaactcttttcaagcgctgggtggccatagggcttgtcacaacaagagggtgaagatggaaggtgaagaacaacaactcaaaacaagggcaaaatatctgggtttgggaaaacacagtgagcccaaaatgcataattgctccatttgtggtcaaggtttctctctgggccaggccttggga

SEQ ID NO: 36313 - DNA, 396 bp, Glycine max
  Clone ID: LIB3054-005-Q1-N1-A12
ctgaacaccccttcatggtacactgctggagagttggagtacttcacagacaccaccacactcttcatagttgagctctttttcatcggttgggccgagggtagaaggtgggctgacatcatcaagccaggctgtgtcaacactgaccccatctttcccaacaacaagctcacaggaactgatgttgggtacccaggtgggctttggtttgacccacttggctggggaagtggttctcctgagaagatcaaggagttgagaacaaaggagatcaagaatgggaggttggccatgttggctgtgatgggggcatggttccagcacatttacactggcactggtcctattgacaacctctttgctcaccttgcagatcctggccatgctactattttt

SEQ ID NO: 36314 - DNA, 290 bp, Glycine max
  Clone ID: LIB3054-005-Q1-N1-A2
aagattaattcctcattatcttacaaatgtcacttcaaggttagttcttttatactttggttatacccccccatatctctcattaacacttcatttagatatatgtaatcattcactttacactaataatataccttctctctacatcatgaactaatatacatctcatacatactattctaccatttacttaatacatgaacacatacccaacttctttcattctctctataacataactactgctataattaaatatcacctaatacaatatgacaaccaatacaccc

SEQ ID NO: 36315 - DNA, 361 bp, Glycine max
  Clone ID: LIB3054-005-Q1-N1-A3
cgcatttccacgaaaatggcttcccaaaacccagcggaggaagaaaattcaaagcgacattggtcccttgaagacttcgagatcggaaaacctctcggtaggggcaaattcggtagagtttacgtcgccagagaagttaagagcaaatttgttgtggcgttgaaggttatatttaaggaacaaattgataagtacagagttcatcaccaactgaggagagagatggagatacagaccagtctccggcacgcaaacatcctgcgtctttacggttggtttcatgatgctgaccgtgttttcttgattcttgagtatgctcataagggagagctttacaaggagctgagaaaaaagggtcatc

SEQ ID NO: 36316 - DNA, 348 bp, Glycine max
  Clone ID: LIB3054-005-Q1-N1-A5
cgcatttccatttaaatggcttcccaaaacccagcggagggggaaaattcaaagcgacattggtcccttgaagacttcgagatcggaaaacctctcggtaggggcaaattcggtagagtttacgtcgccagagaagttaagagcaaatttgttgtggcgttgaaggttatatttaaggaacaaattgataagtacagagttcatcaccaactgaggagagagatggagatacagaccagtctccggcacgcaaacatcctgcgtctttacggttggtttcatgatgctgaccgtgttttcttgattcttgagtatgctcataaaggagagcttttacaaggagcttag

SEQ ID NO: 36317 - DNA, 408 bp, Glycine max
  Clone ID: LIB3054-005-Q1-N1-A6
cagctggagtaactggcagacccaatgtcgattggtgtgaatctcataagacggaaaccattcgcaccaacgttgctgggactttaacattggctgatgtcagcagagagcatggactcttgatgataaattatgctactgggtgcatatttgagtatgatgcagctcatccagagggttctggcattggctttaaggaggaagacagacccaacttctttggttctttctattccaaaactaaggctatggttgaggagctcttaaaagaatatgacaatgtgtgcaccctcagggttcgcatgccaatttcatctgacttgagcaatccacgcaatttcatcaccaagatttctcgttataacaaagtggtcaacattccaaacagcatgacccatttggatgaac

SEQ ID NO: 36318 - DNA, 406 bp, Glycine max
  Clone ID: LIB3054-005-Q1-N1-A7
cgcatttactttcagacccaatgtcgattgctgtgagacgggtaaaaccgaagccacattgacccacgttgctcttactttaacattggctgatgtcagcagacagcatggactcttgatgataaattatgctactgggagcataatttgattgtgctgcaaatgatatatatagtgatcgcattgacttttacgaggaagacagacccaacttctttggttctttctattccaaaactaaggctatggttgaggagctcttaaaagaatatgacaatgtgtgcaccctcagggttcgcatgccaatttcatctgacttgatcaattcacgcaatttcatcaccaagatttctcgttataacatagtggtcaacattccatacagcatgaccattgttgatgaact

SEQ ID NO: 36319 - DNA, 176 bp, Glycine max
  Clone ID: LIB3054-005-Q1-N1-A8
ccccattattccctttcctccttaccttgtttcccagtaggtcgaatcacatattctcaacgcggaccctaaattctaaccttctaaaaatctacaccaccctccaatttttttccaatttcataattcctacaccatactcacgcatattctacgcccacaaaattatttcaccc

SEQ ID NO: 36320 - DNA, 371 bp, Glycine max
  Clone ID: LIB3054-005-Q1-N1-B11
atggatttgaccctctgggactttcggaccctgaaggaacaggagggttcattgagccgaaatggctagcatatggtgagataatcaatggtcgttatgcaatgttgggtgcagttggtgcaatagcacctgaaattctaggcaaggctggtctgatccctcaggagacagcactcccatggttcagaaccggtgtgttcccacctgcaggaacctacaactactgggcagactcctacacactgttcgtgtttgagatggcactgatgggatttgcagagcacagaagattccaagactgggccaaaccaggctctatgggcaaacaatacttcctaggactagagaagggtcttggaggttctggtgag

SEQ ID NO: 36321 - DNA, 291 bp, Glycine max
  Clone ID: LIB3054-005-Q1-N1-B2
tcccattgtttcctttcctcctttccttgtttccgaggaagtccgaccacatatgctaaacaaggaaactaaattctaacctccttcagatctacaccacccttctctttttttccagtttcataaattctacaccatgggcacggaggttctactgccacaagattgtttcacccaccgcatcgctgttccaccggctgggttttcccggagaagaacctctgagacacacatcaacaattacttcatggtcacgcataaacccggttacccaacccgaacagataaaac

SEQ ID NO: 36322 - DNA, 240 bp, Glycine max
  Clone ID: LIB3054-005-Q1-N1-B6
tcccattttgccccttcctcctttccttgtttccgaggagggccaaccacatatgctaaacaaggaaactaaattctaacctccttcagatctacaccacccttcctctttttttccagttcattaaatcttacaccttggccacggaggttttacggccacaagattgtttaaccaaccgaatcgttgttccaccgtcggggttttcccgaagaagaacctctggcacacacaacacca

SEQ ID NO: 36323 - DNA, 412 bp, Glycine max
  unsure (1)..(412): unsure at all n locations
  Clone ID: LIB3054-005-Q1-N1-B7
gacacttagtgcagaagaaataaggagaatacttctcccatatcgggaaggatggctgccagaacaacaggaacaagaagcagcagaaggggatctggtgttggtgtaattgttctctccacttcctgtctattactgtactattttaagggaagcactgtacagtatacctagaagccctacaggtatttttcttaatctggtttctgcagcttccctcctttgtgcatgccattctcgttgtatgatgcatataggaaaaaggatacgcagcgttggatatctgcgaagcaacgattcctgtgtacaacagcaagggtctgctattagagtatgatcgccctttgctaagggcctgagggcaatattttttggtgagaactgtgtaatatgtangaatttgacattttca

SEQ ID NO: 36324 - DNA, 393 bp, Glycine max
  Clone ID: LIB3054-005-Q1-N1-B9
gattagtgtggcctagttgttgttttctcgatgagaaaggcttcttccactatgcattgcgcacttctgcgcttttgggttcccttgttgctgcttgctagcttcagctatgctccttctgtttcggccacaactgaaatttcagggaatgaagtgaacacagatgggaaggtgataaatgaagagttagcaaaaccaagtctaaaaggacatgatgaagaagcaaagttcaaaggattttttccaaaaccaattcctatagttaaaccaattccaaagccaattcctattattaaacctattccaattccagtttataagcctattccaaaaccaattcccattgttaagcctattccaaagtcaattccagttgctaagccaattcctaat

SEQ ID NO: 36325 - DNA, 341 bp, Glycine max
  Clone ID: LIB3054-005-Q1-N1-C10
tagcctttaagtgaaatcctgagcttccattgtgcgcactggtctattacaacgaagccctctccatcctgttctatctgtgactagcatcatggcctcaatagcagtgttattgttggctatgtgtgtgcttcctgcaattattgtggccattcacccagcaaataaccctttttgcttgaagggtcatgtctactagtacccttgccttgctgatttcgataccttatctaccacctactttacttgttctgatattatgttgcaatgcaatagcattattagcaactaagtttgctacacgaaaaaagtttacacctacttaaccctaacatacacaa

SEQ ID NO: 36326 - DNA, 301 bp, Glycine max
  Clone ID: LIB3054-005-Q1-N1-C11
ccttttattgaaatcctgagcttccattgtgcggactgagtctcttacaacgaaaccctcttcatcttgttctatctgtgacgagcatcatggcctcaagagcagtgttattgttggctatgtgtgtgctttcggcgatggttgtggccattcgtccagcaaagaaccctttttgcgtgaagggtcgtgtctactgagactcttgccgtgctggttttgagacctcatctactacctacattgctggtgcttagattatgttgcaatgcatgagcagggttagcatctaggttgtgtactc

SEQ ID NO: 36327 - DNA, 387 bp, Glycine max
  Clone ID: LIB3054-005-Q1-N1-C12
gtcccaaagagctaacaagagattcaagaccggcatggctaatgaagaggaacagaaaaaccacctcttcggcatcaaagatctcggtcacaagactctccttcagagtgatgcactctatcagtatatacttgaaaccagtgtctatccaagagagcacgagtgcttgaaagagatacgcaagatgactgcaaaacacccactgaacatcatggcaacaccagcagacgaaggacaacttctgagcatgcttgttaagctcacgaattcaaagaacgccttggaaattggtgtattcactggttactctctgctctccactgccctggctcttccccctgatggaaagatcttggctttggatgtgaatcgcgaatactatgagtt

SEQ ID NO: 36328 - DNA, 410 bp, Glycine max
  Clone ID: LIB3054-005-Q1-N1-C2
gtgaattagctatgaacaatgatgagctacatgtggttatgttcccattccttgcatttggccacattagtccatttgttcagctctccaacaagttgttctctcatggtgttcatgtcactttcttgtcagctgcatccaacattcccagaatcagatcaactcttaatctcaatccagccatcaatgttatctcactaaagttcccaaatggtataaccaacactgctgaattgccacctcacttagctggaaatctcatacacgcccttgacctcactcaagatcaggtgaagtcccttttgttggaactcaaaccccactatgttttctttgactttgcacaacattggctcccaaaattagcttctgaagttggcatcaagtctgttcatttctcagtctactct

SEQ ID NO: 36329 - DNA, 402 bp, Glycine max
  Clone ID: LIB3054-005-Q1-N1-C4
ggtgcactgatggccagagtatatgatgatgaagtgaggaagtggatttctggtgttggtgttgacagtgttgggaagaagcttgtgaactcaaaagatggacctccaacctttgagcagcccaagatgactctggagaagctcttgctgtatggtaacatgcttgtccaagaacaagagaatgtcaagagagtccaattggctgacaagtacttgaacgaggctgctcttggaaatgctaacgaggatgctattcagaggggaactttcttccagtcttgaattggaggcaaagcaaacttggcaagtaaatatttctgttcgtgaaggttgttgtactaatccaagtgctagaagttgtgatggaacttgcgtgtaacattcttagcattctcaatgtct

SEQ ID NO: 36330 - DNA, 408 bp, Glycine max
  Clone ID: LIB3054-005-Q1-N1-C6
ttcgaatcccaattccatattttcaagaaataaagaaccacaaatgtgcatgtttcaattccaatcatttggtctcttattacgcctatcctaaatccaacacaaatgagatcggaattcctccatgaatcccaattccacattttcaacaaatttcctagcataaatcctcctatatcaattacaataatctgccatcttattacacctatcctacaaccacttgaaactcagatctccataccaactactaactccaattctacattttcaggaacttacctaccactctttaatagtatgcaaatcaaacttgtcaagtaaataattctgtccatgaaggatgctgtactaatccaagtgctagaacttgtgatggaacttgcgtgtaacattcttagcattctc

SEQ ID NO: 36331 - DNA, 380 bp, Glycine max
  Clone ID: LIB3054-005-Q1-N1-C7
gggtactggtatctaaaaaatgggttctaaaactaatgctgtcgggccatagagcacgaaggccgctgtcaatatttgctgtgcttggtctttgctgtttcttttatcttttgtgagcatggcaaataagtggatctgtgtagggtgattaccttgcattgaaagttaataacctgatgactgactgcactgttttacccaatttgagttttgaatctcatcacaatgatgtagaaattgtcgaacctgctgagccaaaagctaaagagttcaagccgtgtgatgtgaaatatactgattatacaccttgccaagagcaagaccgagcaatgacatttcccagagagaatatgatctatagagaaaggcattgtcccgct

SEQ ID NO: 36332 - DNA, 284 bp, Glycine max
  Clone ID: LIB3054-005-Q1-N1-C8
cctatcatactctcatccacaaaaatcaattacatatactctatcaaacaacataataccacattgtcaactaatatccattaaccttaaataatcctcctttctcacctatttccatattcttctcccccctcaccatcatcacataaatcaacactcaattcaaaattttctaaaccctactatactataaatataccaatccttttccccctgaaacctccttcttcccctctcctgttccaacccttcctcttaccctatacctttcccactttcttcct

SEQ ID NO: 36333 - DNA, 404 bp, Glycine max
  Clone ID: LIB3054-005-Q1-N1-D1
tttctgagcagccaaacactctctctctgtctctcgaaaatgctcagtgagcagagagagcctgaatgatgtccaggtaagcgtgtgtcaactaacggcttgtgagagacatcgaaggtaaccacctcactcacgctgctatcatcggccaagacggcagcgtttgggctcagagtaccgacttccctcagttcaaacctgaggagataactgccatcatgaatgactttaatgagcctggatcacttgctccaactggattgtatctcggtggcaccaaatatatggtcatccagggtgaacccggtgctgtcattcgagggaagaagggtcctggtggtgttactgtgaagaagaccggggcgggcctgaacaattgcatttatgatgaaccaatgactcca

SEQ ID NO: 36334 - DNA, 375 bp, Glycine max
  Clone ID: LIB3054-005-Q1-N1-D11
tggtgacaatggatttgaccctctgggactagctgaggacccagagaacttgaggtggtacgttcaagccgagcttgtgaatggacgttgggccatgttgggtgttgcaggaatgctacttcctgaggttttcaccaagattggaatcatcaatgcccctcaatggtatgatgctgggaaatcggagtactttgcttcatcgtcgaccctctttgtgatcgagttcatcttgttccactacgtctagatccggagatggcaggacatcaagaaccctggctctgtcaaccaagaccccatcttcaagcaatacagcttgccccatcatgagtgtggataccctggtagtgtgtttaaccccttgaactttgcacc

SEQ ID NO: 36335 - DNA, 298 bp, Glycine max
  Clone ID: LIB3054-005-Q1-N1-D12
gtacatcatagaaggtagcacagtcagcgtaatgggagttgttcaaagaaacgacaatgtgcttatgattgtccctcctcctgagcctttgactaccggatgccaatgggctaaatgtatatttccagctagccttgagggtattattttgagatgtgaggatacatcaaagattgatgtcattccagtgtagttgcactctccagacacctcttaggtattcttctttaaagaagtattttcttacctcatttaaaaaaatggtggttgatgtttgtatattgtaagtgttattggt

SEQ ID NO: 36336 - DNA, 409 bp, Glycine max
  Clone ID: LIB3054-005-Q1-N1-D3
gttggcgtatgttgaagaagaagaagagagagagagagagagagagagagagagagagagagagagagagagagagaagggtaaggtaaccctagagtggtgaatcgaattcgaaacgatggaaagtgtttctcgaagaagaggtggaggcattttcgaaagcctctacaaggtcgttatgcgtcgcaactctgtctatgttacctttgtcatcgctggcgccttccttggagaacgggctgttgattatggagtccacaagctctgggaggcaaataatgttgggaaacgatatgaagacattcctgtgctagggcaaaggccgtcagattagtgaccagcttgttagccattttgaagttttattattttcataaagatttgaagtgattaagagctggaagcagtt

SEQ ID NO: 36337 - DNA, 412 bp, Glycine max
  Clone ID: LIB3054-005-Q1-N1-D5
tggagcgagtacttgtacgcatagccactatgactatcaccttcgcgaccgttgcaggactcggtggtgcatcactgtcatccacctcatctcgtctcacctcagggtttgtgaaatcgccagtgagtgctaggaatcccttgaggaaagctgtggcaatgggaaatgggagggttacatgcttcgagaggaattggctgcgggcagattacagtgtcattgggtttggattgattggttggctagcaccctcaagcgtaccggctatcaacggtaaaagtctgactggcctcttctttgagagcattggagctgagctagctcacttgcccacccctcctgcccttacttcatccttttggttatggcttggtaccgtggcaccttggcttggtcatctgcctcacttttg

SEQ ID NO: 36338 - DNA, 403 bp, Glycine max
  Clone ID: LIB3054-005-Q1-N1-D7
gcggcgatgcaccagatagggcatctacttggacttgatcactctcacaaagaggactctgttatgtatccttacatattgtcctcacagcaacgaaaggtgcagctttccaattctgacaaggccaacattcaccttcagtttgctaagcatgattaagatgttctctgctgccaaactcgcatgactcagcaagccacggtgggggtttggatgtgcttttagttaccactttctctcttggatttgcttacgtattgctcctttggtattagtcgttcctgtcccaccttgcttttggaattatgtgctttttatatttctgattggtccaatgttaattggatgtcctcccaaccctgtggtgacttttcggtttattctcacgtggctgtttcttata

SEQ ID NO: 36339 - DNA, 202 bp, Glycine max
  Clone ID: LIB3054-005-Q1-N1-D8
taggcgtctcaattcttttatcgtcatctactagtacttgatggcagtctcaaatagaacgatgctatctatcctcacatataggcctcacaccatctaaacgctcttcttcttaattcttacatgactaacattcatcttcagttcgctaatcatgatcaatatcttctcacttatctaccttccttcactcatccaccca

SEQ ID NO: 36340 - DNA, 375 bp, Glycine max
  Clone ID: LIB3054-005-Q1-N1-D9
aggcaaccttattgatggacctggaagttcaaagcttggttttcggacaactgctgctattatttttgcacggttacttttagtgcctctggttggacttgggattgtcacgttggctgacaagcttggttttcttccctctgatgacaagatgtttcgatttgtcctcctccttcagcattcaatgccaacatccgtccttgcaggtgctgttgctaatttaagaggttgtgggagggatgcagctgctgtattgttttgggttcatatttttgctatattctcaatggcaggatggattattctatatctaaacatactcttctgagactgtatagagcaaattgatccaattcattttgttcattttgatga

SEQ ID NO: 36341 - DNA, 397 bp, Glycine max
  Clone ID: LIB3054-005-Q1-N1-E10
gggcgacgcaccggcattgccagagactcttaaaaattacaacaagctgttgtctcttggcttcaagattgtattcttgtcaggaagatatcttgacaaaatggccgtaacagaagcaaacctaaagaaggctggcttccacacatgggagcagttaattctcaaggatccacatcttatcactccaaatgcactttcatacaaatcagcaatgagagagaatctgttgaggcagggatacagaattgttggaatcattggagaccaatggagcgatctgcttggagaccacagaggcgaaagcaggacctttaagcttcctaatcccatgtactacattgagtagtaccttcacctctctcaacaatctagctagaagttgctcctatctatatgt

SEQ ID NO: 36342 - DNA, 392 bp, Glycine max
  Clone ID: LIB3054-005-Q1-N1-E11
caatcattagcaaaagcaagaagaactagtctgagcaggcatggtacaattagcgatctcatgttcaagacgaggacccgaggccacccactccgatcattccccggcaacaccaaccagatctctgtgatggacatccacgttctaaagtcgaacactatctagatatcggtgaagacctgttaaagatatcacagcatctgaatatcgatgaaattgactaggacatcctgagcagacgaagcactggacctccccataatacttctgaagtagattcatttttgggttcagatcgccgggccccaacaattcgatctgaaacatggcactcaagtgaggcaagaagtgaaagcttggaaatcgggtctgaggtccttgccaatttaact

SEQ ID NO: 36343 - DNA, 396 bp, Glycine max
  Clone ID: LIB3054-005-Q1-N1-E12
atttagcaatacggaatcccaatgagcctaaagcaaaccttgttactcctggaaaagaggttcatcgccctcaatccactttcaattacctatgcaggttaaagcctccatctgaatcccttggtgctgcttctttagccctgcactatgcaaatgttatcatcatgatcgagaagttagcaacatctccatacttgattggtgttgatgcaagagatgatctgtacaacatgttaccgagacgtttgagatctgcacttaggaccaagctaaagccatattccaaggccatggctgcagcagtctacgatgcaggtctagcagatgaatggaccgaagcaatgacgggtatgttagaatggttagccccgcttgctcacaacatgctaagatggc

SEQ ID NO: 36344 - DNA, 417 bp, Glycine max
  Clone ID: LIB3054-005-Q1-N1-E2
cagcaactgttgcacaccaccacatgacccctctactgcggcaccctcagtcccaacaacaccatcaaccccaacaacaccatcaaccccatcaacaccatcacaccctccctcaggaggaggtgggtactataactcaccaccaacttatggaggtggtagccccccaacaccaatcactgtgagcccaccttcaaccccaattgaccccggcacccccactatcccctccacacccccttaccttccttccccaactcccttcactggtacatgcaactactggaacactcacccaggaatcatttggggattgctaggctggtggggaaccttaggccatgcatttggtgtctctagtatgccaggatttggtgccagtctcagcttgccacaagcactttccaacactagaac

SEQ ID NO: 36345 - DNA, 410 bp, Glycine max
  Clone ID: LIB3054-005-Q1-N1-E3
tgaatctctcagcccctcaaaccttccgctctaaggaaatctccaagagcaatgttgttgacgatatggtcaacagcaacgccatcctctatgagcccggtgaacatccagaccatgtggttgtcattaagtacgtgccttatgtaggggacagcaagagggccatggatgagtacacttctgagatattcatgggtggaaagaacacaattgtgttgcacaacacatgtgaggattcactgttagctgctcctattatcttggacttggtccttcttgctgagctcagcactcgaatcgagtttaaagctgaaaatgagggaaaattccactcattccacccagttgcgaccatccttagttacctgaccaaggcccctctggttccaccgggtacaccagtggtgaat

SEQ ID NO: 36346 - DNA, 276 bp, Glycine max
  Clone ID: LIB3054-005-Q1-N1-E4
aagcccatcagtattaattctctttcggtgtctgtctagtctttataagattgcagaaataaatggtcgcaagctgaaagttgtactaaaatttattttttataaaaaaatccaaggttgtattaaatattgcttaaatttagaaaattctacagtaaatggacatctttatatatttatttatgtataataccgtaacattcttgcaagcatttaactcattattgtcattctactcattctacgatatatttatatttattcctattacctttt

SEQ ID NO: 36347 - DNA, 272 bp, Glycine max; identical to SEQ ID NO: 35908
  Clone ID: LIB3054-005-Q1-N1-E6

SEQ ID NO: 36348 - DNA, 272 bp, Glycine max
  Clone ID: LIB3054-005-Q1-N1-E7
aagcccatcagtattaattctttttcggtgtcggtctagtctttataaggtgacagaaataaatggtcgcaagctgaaagttgtactaaaatttattttttataaaaaaatcgaaggtagtattaaatatgttatatgtatgtatagtgcggaataaatgcagccacgtactatatataatggtacatacggtgtagggctgtacaagttgggcatcctatttcaatattaacgaccactaataaatattaccattggagttattacgtatt

SEQ ID NO: 36349 - DNA, 358 bp, Glycine max
  Clone ID: LIB3054-005-Q1-N1-E9
ttcacaatctctgtttcagctttctctcttttctacaatggcttgcaccaccgtcgtgttgacgctagtcgccgcattgttggtaacctccgtcgtggctcagtctccggcgtcctcaccagctctgtctccaaagcgcacccccgtcgccacacctcagaagtctccctcgccggcgatttctccctccgccgtgtcgccgtcgtcctctcctcccgctccggtggtgaacactccgtctccgtcaccaaactcagtcgactctccgccatctcctccgcagtctccgtccgtgtcaccagccggtgttccctccgtcactccttcagcaatctccgctcctcccactggagcaccg

SEQ ID NO: 36350 - DNA, 361 bp, Glycine max
  Clone ID: LIB3054-001-Q1-B1-A12
gtcaagttctgtaagtggtggtcagggccttatttttggaaacaagaatatgaataagttgttggagaaagaaaatgatcaaagtggcagttttcttaaaaagccccaccatgagaagtatgctccattgaagttaattatcatgtctgctagtcttgatgcacgtgctttctctgagtactttggtggtgccaaagctgttcacatccaagggagacagtttcctgtagatatattttatacccgtgatggagagacagagtatgtagatgcttccttgataacaatattccagattcagttagaggagggccctggtgatatactagtatttctgacgggtcaagaagagattgaatct

SEQ ID NO: 36351 - DNA, 377 bp, Glycine max
  unsure (1)..(377): unsure at all n locations
  Clone ID: LIB3054-001-Q1-B1-A7
gtcgaggagaagctccggctcaagccggagaaactccagtccacccggcatgtgctgagtgagtacggaaacatgtcaagcgcgtgtgttttgttcattctggatgaaatgaggaagaagtctaaggaggaagggaagagtaccactggagaagggttagagtggggggtgctattcggattcgggccgggtctaaccgttgagaccgttgttcttcacagtgttcccttggagggataaatcttgctgatgcggtgactagtgatttaagagtgatcaataaggaaccctcggaaataccagggaaagtttgttattattactagtttcacttgtggatttatcgtancataatgttgtacaagaataatttaata

SEQ ID NO: 36352 - DNA, 384 bp, Glycine max
  Clone ID: LIB3054-001-Q1-B1-A8
caaggaaaaagcaagctcaacctaaaattttaaaaatgggaacaacctcctccaagggtctctcctccccaaccttggctggcaaaggccttaaactgggcccaacaacccccgaaattcggaaggttaacattaaggaaaacgttaacaaacaaggctcctccggaaacccaatgtacggcccagaccgcgtcaagtacttgggcccattctctggcgagcccccgtcctacctcactggcgagttcccaggtgactacggctgggacactgctgggctttcggccgacccagaaaccttcgccagaaaccgtgagctcgaagtgatccactccaggtgggccatgctcggggccttgggctgcgtctttcccgaactattgt

SEQ ID NO: 36353 - DNA, 316 bp, Glycine max
  Clone ID: LIB3054-001-Q1-B1-A9
ctcgagccgcaagtattaacccttttctctctgaatactctctactcaatacattgcgctctagtctcgtttcaaatattaattttaggttcttcgttacgcgttgtgttgcgttgtgcgtgagaaagtgcgcgtggtgaaaaagcatgggttctcagctcctgagacgaaccttcggaagtcgtttccttgcaaacccgagggccttctcctccgctgcgtcgactccgatccgcgccactctcttccgcggcgacggcagtgggcgccgagatcgccggttccgtcaaacaggtagtccgagcagctgatgtcc

SEQ ID NO: 36354 - DNA, 314 bp, Glycine max
  Clone ID: LIB3054-001-Q1-B1-B10
agtgaagccccaaaacaggatccttctccacttccatacttgactgagaaagaacccaaaatctatgatatttccctagaggctcacataaaacctgctgggcatgaagattcgggtgtggtgtcacggactaatctaaagcacttagagtggacattgacccaacaacttgctcacgatacaatcaacggttgcaaccttaggccaggcgatctccgtggaactgggacagttagtggtcctgagcgagagtcccgtgcaggcgggcgagaattaacatggaatggacaaagcagagtcgcagtgaatgagtt

SEQ ID NO: 36355 - DNA, 294 bp, Glycine max
  unsure (1)..(294): unsure at all n locations
  Clone ID: LIB3054-001-Q1-B1-B11
gcanatcacanaccttcccccggtaaccaaactccgaccagcgttctcccggacgtctccggcgagtggtccgaagtcgccgccgccgccgttgacgtgcggtgggacctcgcgcaagccttgcgcctcatcgaccgcgacaacgacggcgtcgtcacgcgacaggacctcgagtcgcttctcacgcgccttggcgcgtcgccgagccccggcgacgtggcgctcatgctcggcgaggtcgacggcgacggcatcacggttgagtcgctcatgagctacgtcgggtcgggtctc

SEQ ID NO: 36356 - DNA, 277 bp, Glycine max
  Clone ID: LIB3054-001-Q1-B1-B2
tgtctgcgttctatggtcctcccaagcctgaccccgatatgattgctctcatccaccacgctgttcagactggtgtcacttttcttgacacttctgacgtctatggtcctcacaccaacgaactccttctaggaaaggctctgaatggaggggtgagagatgaggttgaattggctacaaagtttggaatcaacgttgctgaaaggaatagacagatccgtggtgatccggcatatgtgatggctgcttgtgagggaagcttaaagagacttgggat

SEQ ID NO: 36357 - DNA, 382 bp, Glycine max
  Clone ID: LIB3054-001-Q1-B1-B4
caagcttgttgacaccttccctggccaatctattgatttctttggtgcactcagggctagagtatatgacgatgaagtgaggaactggatttctggtgttggggttgacttgattgggaagaaccttgtgaactccaatgaatgacctccaaccattgaccaaccgacgatgactttgagcaagctcttggagtatggtaacatgcgtgtccaataacaagagaatgtgaagagagtataactggcagacacgtacttgaacgaggctgctcttggtgatgctaatcaggatgccatcaaaagaggaactttctatggcaaagcagccgagcacgtaaaaattcccgttcctgaaggttgtactgatccaaatgcctcaaac

SEQ ID NO: 36358 - DNA, 355 bp, Glycine max
  Clone ID: LIB3054-001-Q1-B1-B5
caagcttgttgacaccttccctggccaatctattgatttctttggtgcactcagggctagagtatatgacgatgaagtgaggaagtggatttctggtgttggtgttgacttgattgggaagaagcttgtgaactccaaggaatgacctccaacctttgaccaaccgaagatgactttgagcaagctcttggagtatggtaacatgcttgtccaagaacaagagaatgtgaagagagtataactggcagacaagtacttgaacgaggctgctcttggtgatgctaatcatgatgccatcaaaagatgaactttctatggcaaagcagcccagcacgtaaaaattcccgttcctgaa

SEQ ID NO: 36359 - DNA, 374 bp, Glycine max
  Clone ID: LIB3054-001-Q1-B1-B7
caacgctgtgagcttcaatgcagatggtgacattctggtctctggttccgatgattgtgggattattctctgggactgggaaactggccgcattagactctccttccattctggtcattctaacaatgttttccaggccaagatcatgcctcactctgatgatcgaaccattgtcacctgtgctgccgatggacaggtgagacatgctcaacttcttgaaaatggacgagtcgaaactaagtgtctggccaagcatcaaggaagggctcataagttggctattgagcctggtagccctcatattttgtatacctgtggtgaagatggattagtgcagcgttttgatctgagaactggggctgcaacagaacttt

SEQ ID NO: 36360 - DNA, 273 bp, Glycine max
  Clone ID: LIB3054-001-Q1-B1-B8
tcacttcaggttacacatttacgaacttggccatcgaagtagcaagattgctcgtggcaacaatttctggcacacgaaatgcgaatctagtcttatgccgttgctctggtgctaatgccgatgctcctagggatgtcgtttccatgggatctgggaagtgcagaatgggcaatgatttgtaggatgtactagacataatgaaatacgtgtgaccctttatcaggacatagtgcttcatatatgactggagaattcccattggatcaatgctgc

SEQ ID NO: 36361 - DNA, 293 bp, Glycine max
  Clone ID: LIB3054-001-Q1-B1-C10
aagctttgttcaagagtgatttccccactgagcttatcacgcagaccactttcattgatgctgcagttgtcaagaagctcaagggtgttcttggagggtcaggttaattaaatatggttaacgcgtgttgatgtgtttttaattaaacggagttgttcattcaaaacacaagagtctagagtgtgttgtgttgtgtcatttttgtgaaatttgtttgtgttggttttgtactgttgtggatttagcacgatcgatgtaatttggtggactatgaaggtaggggtttcttcttc

SEQ ID NO: 36362 - DNA, 313 bp, Glycine max
  Clone ID: LIB3054-001-Q1-B1-C11
ttaagaaaaaaatagaagcattttcagagactatggagaatttaagtactcatgcggataaatgctgtcgacagataacgagagcaaggactgtggttatacaaaatagaattaaaaaacctgagtgagatccctttggaatgtttcattgattacttacactttctcttgctggaatcttcctttgcttcaaataggtagaatacttcaataagctgcgtgcgtagaaagataaatgaatatagaacttgggcagaagattgctgtactttctaggtagagatagttggattacagatgattacaaatatgt

SEQ ID NO: 36363 - DNA, 379 bp, Glycine max
  Clone ID: LIB3054-001-Q1-B1-C3
gaaaattgttagaagagttttcacgtcttttgagaaatgggtgcctcgctatcggtctcggaaaaatccatccatgaattcatggtcaaggatgctaagggcagagacgtgaacctcagcatctacaaagggaaggttcttcttgtagtaaatgtcgcttcaaaatgtggatttacgaataccaattacacccagttaactgagctttacagcaaatacaaagacagaggccttgagatactggcatttccatgcaaccagtttctgaagcaggagcctgggagtagccaggacgtagaggaatttgcctgcacaagatacaaggccgcgtatcccatttttggaaaggtacgtgtcaatggacctgatacagcacctg

SEQ ID NO: 36364 - DNA, 124 bp, Glycine max
  Clone ID: LIB3054-001-Q1-B1-C4
caagtgaggagacacggtaactatgctgtccctcgaagtcatgggattactcctgacggaaattgatgcgatgcgaagtgtggacccggccttaggcagtgggtctagacctgatcgggacaaa

SEQ ID NO: 36365 - DNA, 377 bp, Glycine max
  Clone ID: LIB3054-001-Q1-B1-C5
ggagggaagggaaacgggaaacaggctgcaagtggaagtgatgagaatgcttctaacggaaaatgaaagggtgcgaaatgtggatatgggcttggtacttgcacctatgtcaaagcaaggcatatcttatgtaataaacaacgtaagatcaatgaagcctacaagaagctgcaagattgttggctttgcaacggagataaggtcacaccagctgagtttgcaaagatagctcatgagtattcagaatgtccttcacgaaagaagggtggagaccttggatggtttcaccgacgaaagatggctgggccatttcaggatgttgccttcaacacacctgttggagctactattgctcctttcacatcaactcatggcta

SEQ ID NO: 36366 - DNA, 370 bp, Glycine max
  Clone ID: LIB3054-001-Q1-B1-C7
cagaagagcactgagctcctaatcaggaagcttcctttccataggttggttcgtgaaattgcccagtatttcaagactgatctgcgtttccagagccatgctgtgcttgcattgcaagaggctgctgaggcataccgtgttgggctctttgaggacactaacttgtgtgccaatcacgccaagcgtgtgactattatgcccaaggatattcagctggcaagaaagattcgtggtgagcgtgcttgagttggtgcgttctgtgtttgtgaagatggattgttggtggctgcggatggtgttttgttactaagttatctttatgttgaagcctatatgttattacggaaaaatacgtgtttacttggtagtc

SEQ ID NO: 36367 - DNA, 379 bp, Glycine max
  Clone ID: LIB3054-001-Q1-B1-C8
tcacctatggtttcagacctacgaagttggacatcatggcagcaagattgatcgcagccgtaagtactggcactcataatgcgtctccttgcttaggccagtgcaatggtgccactgcaaatgcacttagggaagttgtttccaagagatctgggaattacaccatgggcaatgatgtgtgggatggactaggcatagtgaaatatgtgggacccttttcagctcagactccttcacacttgagcagagaattcccactggatgttggatgagacacggcaggcttacctgcataccctgaatcatttgagatgaacatggctcttgacgttatccatgggagatgggctacgcttggtgcactaggttccatcacccc

SEQ ID NO: 36368 - DNA, 344 bp, Glycine max
  Clone ID: LIB3054-001-Q1-B1-D10
aagtgatgatgaagatgacattgaatttgtggggggttcaggcacaaccaatccaaccacagaaaaagatgctagcagctttcaaatctttgacatcattggccattttgctcaacccaatccccacacagttttgccaaagacaccaattagttgcaaaccatcagaaaatgccattgagttggccctcaagatagccaaccttaatccacaaagaactttgttctttgaggatagtgtccgcaacacacaaggtggaaaacgtgggggtcttcacactgtgctggttggaaaatctcagacgattaaaggagcagattatgcattagaaagcatccacaacc

SEQ ID NO: 36369 - DNA, 385 bp, Glycine max
  Clone ID: LIB3054-001-Q1-B1-D2
caaaaacgaagtactactacaagggaagaacaacttagctactagtgaaggatcaaagagaatggctcaagcaatggcatcaatggctggcttgcgtggttcctctcatgctgtgttggaaggtacccttcaagtgagtggctccacacgcttggatgtggggagtggtaccagggtggcctcagtcatacgtacaaggttcacagttagagcacagcaacaacagatgagtggtgaggtacaaagcatccgtacggcactgctttcacttgtatgctgctggtttggccactggctcttttgttcaaactgtgcttgctgatgccaaatctatcaaagttggaccagctcccccagcttctagtggattgcctggaacgttgaa

SEQ ID NO: 36370 - DNA, 367 bp, Glycine max
  Clone ID: LIB3054-001-Q1-B1-D3
gattccggtccaacaacgcttgaaggcaagcaagaaccccaactcctggcaagcggccgaatttcgaatttggaatttccaagcccgggaaccccggttaagcgacgggctaagtccaataattccaacagaatgttgaaagtcgtcactatgaagggaccacctgttctgttgcactctacactgatgtgacgacttcataaggactcttggaaagtatgcaagctgggacattggagcgagaagttgcattcctcaatgctttacctatcccagataatttccctgttcgagcagctgcacacaggacacatgtagccaagtctcgagacacgttgaccacacacactcttcattcagagcttgt

SEQ ID NO: 36371 - DNA, 147 bp, Glycine max
  Clone ID: LIB3054-001-Q1-B1-D4
cacttctacatactctgtgaggatcatggatctcgcagtagtgggtttacttggtacagcatcacatcccactcaaatttcaggtccagctataggcaattggtccgtagcggctcggcacattcctagagaagtggaggtcgcgat

SEQ ID NO: 36372 - DNA, 61 bp, Glycine max
  Clone ID: LIB3054-001-Q1-B1-D5
caactctgcatactcagtctcaatcctgtgcatcgaagtagttagatcacgcactggcggc

SEQ ID NO: 36373 - DNA, 387 bp, Glycine max
  Clone ID: LIB3054-001-Q1-B1-D6
ttacactctctctgtgtatttcactagctctcccttcaagatgcagatcttcgtcaagatcctcaccggcaagatcatcacccttgacgtggaaagctctgacaccatcgacaacgtcaaggccaagattcaggacaaggaaggaatccccccggaccagcaacgtctcattttcgccggaaagcaacttgaggacggccgtacccttgctgactacaacattcagaaggagagtactcttcacctcgtcctccgtctccgtggtggcatgcagatcttcgttaagacactcaccggcaagaccataaccctacaggttgaaagctccgacaccatcgataacgtcaaggccaagatccaggacaaggagggtatccccccggacca

SEQ ID NO: 36374 - DNA, 240 bp, Glycine max
  Clone ID: LIB3054-001-Q1-B1-D7
aattccagtgttcccatgtctcatgctcactgaagtcgaaccccgaatggcttctcaagttcttcatcacaaggcactgtttgcccccacgctaagtatcccttcttcatctcgtaacgtcacgttaatttctagggttccttccacctcaatttcatggcattgcactcctctcattgctaagcttagtttcgctgtgaaaactgactccaacgtagaacgcccaggtgatgccatcga

SEQ ID NO: 36375 - DNA, 324 bp, Glycine max
  unsure (1)..(324): unsure at all n locations
  Clone ID: LIB3054-001-Q1-B1-D8
aagctcttgatgcgcagactcactcatatgccttgtcagagagagaaatggcactgatggcagtcgtgctccgcgaagttcgtgtgacactccaagccgctccanaagtgcaaccaaggagtgccaatgtagcacacggtgacgatcatcactccaactatgacgtcctcgacagagtcctcgacgtcgtcaaagatctcgccaaagtcgatccctccagagattagtccagatgtacacatccacaaagtacttagtttggatagcttgtacaatgtggcaattgatatggcactagaagatgagttcaagctacagatacag

SEQ ID NO: 36376 - DNA, 302 bp, Glycine max
  unsure (1)..(302): unsure at all n locations
  Clone ID: LIB3054-001-Q1-B1-E1
caaggtccagcagaaagcacctgaatctcaatgattgacatcaatggaagagtggcataattcatgttcccacttgcagattggagagctttgcttgttgccttaaaatatanaacaaacaanaaataataataaaaaaactcggtcttatcattttgtaattaaaaaatagctcctaccactactttccctactgctccatttcgtttatggttatgctgctgctaggtgtcatcaaaatttaattgtttcataaaaatggctaagcgtgtatattatagttcttttttcttttcccttat

SEQ ID NO: 36377 - DNA, 387 bp, Glycine max
  Clone ID: LIB3054-001-Q1-B1-E10
cgtacactggcagactacaacatccaaaaggagtccacccttcaccttgtccttcgtctcaggggaggtatgcagatctttgtgaagactttgacaggcaagactattaccttggaagttgaaagctcagacacaatcgataatgtcaaagcaaaaatccaggacaaggagggtatcccaccagaccagcagaggttgatatttgctgggaagcaattggaggatggaaggactcttgctgactacaacattcagaaagagtctactcttcaccttgtgttgcgtcttcgtggtgggttttaaaagtctgagaatgttctgtaggtgtcttgaagtctaagcatgtgggagttccgaagatccttgggttttttttttttaaaggtc

SEQ ID NO: 36378 - DNA, 396 bp, Glycine max
  Clone ID: LIB3054-001-Q1-B1-E11
gtcgacctagagatccctcggggaattcgaattcgacattttcaagaaataaggaggcaaaaatgttcatatatgaattggaattatttgttttcttattaggcctatcctgaagccaaaggaaatgagatcggaattcctcggggaattccaattccacattttcaagaaataaggaggcaaaaatgttcatatatgaattggaattatttgttttcttattaggcctatcctgaagccaaaggaaatgagatcggaattcctcggggaattccaattccacatttgcacgatataaggaggcagaaatgttcatatatgaattcgaattatttgttttcttagtaggcctatcctgaagccaaaggaaatgagatcggaattcctcggggaaat

SEQ ID NO: 36379 - DNA, 271 bp, Glycine max
  Clone ID: LIB3054-001-Q1-B1-E2
cactagagtattcagatctagcatgctcaatgaagtagtaccgggaatagcagctcaagttcgtcatcacaaggcaatgtcttgtccaacgctaagtatcccttcttcatctcgtaaggtcatgttaatttatagggttgctgcgatctcaagttcacggcgttccgctcctctcattgatacggtcaatttcactgtgagagctgagactacctgcgatcgcacattcaatgccatcgtcgatgtgccgtcgtatactgtggatgaagtt

SEQ ID NO: 36380 - DNA, 378 bp, Glycine max
  Clone ID: LIB3054-001-Q1-B1-E4
gaacatggcacagtgcctatcctacctgatgcagggaggaacaccttcaacactttgctgcagcggagtcaagaacattcttggctctgctgtcaccaccgttgacaaacagactgtgtgcaactgtctcaaggcggatgctgcaaggtacaacatcaatgaccagtatgctcaggcactccctggtttctgcaaggtcaatgtcccttacacgatcagccgctccactaactgtgcaagcatcaggttctgaacaagccatggacagatttgctcatttctgcagcgggatactgaggcagctgtgacccatttactatcagaataagagaactctagtgtgactgtacggcttcacttatgcgacccttttattgt

SEQ ID NO: 36381 - DNA, 240 bp, Glycine max
  Clone ID: LIB3054-001-Q1-B1-E5
ctccggcttcgggtcgcggctctccgcacccgcagcctcctggttggcatcagtgggcaggtggcatgcttcatgttcccacttgcagattggcgagctttgcttgttgccttcggctctcctccgccggggtggtgtgcgtggcccactcggtcttatcattttgtccttgtggcgtagctcctaccactgctttccctactgctccagttcgcttatggttctgctgctgctaggtgt

SEQ ID NO: 36382 - DNA, 375 bp, Glycine max
  Clone ID: LIB3054-001-Q1-B1-E7
tggcaacagatggattctccagatcaaatcttcttggtcaaggtggttatggctatgtccataaaggagttctcccaaatgggaaaattgtcgcagtcaagcagttgaaatctgagagtacacaaggggagcgtgagttccatgcagaagttgatgtcattagccgtgtgcatcagagacaccttgtttccctaattggatactgcgtcacagacagccaaaagatgcttgtcgacgagtatgtgggaaatgatacactacaatttcacttgcatggaaacgacagactacctatggattggtcaacaaggatgaagattgctataggatctgcaaaaggattggcatatttgcatgaatactgtaatcccaaaa

SEQ ID NO: 36383 - DNA, 332 bp, Glycine max
  Clone ID: LIB3054-001-Q1-B1-E8
ccaccgtaattgacaagatcatcaataaggaaattccttctactgtggtctatgaagatgataaggtccctgcctttagggacatagatccataggctcctacccatattctaatcattcctaaagttatggatgggttaactggtctgtccaaggctgaggagaggcactgtgagattctaggtcgacttttgtgcactgctaagctggttgcaaagcaagaatgtcttgatgatggcttcaggattgtaattaatgatggacgagacgggggccaatcagttttacacattcatgtgcaccccattgggggacaacaaatgggctggccc

SEQ ID NO: 36384 - DNA, 286 bp, Glycine max
  Clone ID: LIB3054-001-Q1-B1-E9
ctttgcgagtggagctgctcatattggtgccatgtttactgcatttttgtctgtggccactgctctggggactccgccattctttggagccatagtgctgtccttcctctccagccttatgggtggccttactcattatggaattggatcagctcctgtgtttttcggtgccaacgatgttccccttgctaaatggtggggcgatggattcctcagtagtagtgttaacattgtgatctggctagggcgacgaggagtggggcggggaattcattgggttgtggta

SEQ ID NO: 36385 - DNA, 360 bp, Glycine max
  Clone ID: LIB3054-001-Q1-B1-F12
agcaaaacatattattttcattttcatctttttttgagtatcaacaaatggcaaccactgtgatgaccactctcccccaattcagtggtcttagaccccaattctcagctgcccctgtgaagaacttggttgctgtgcaacccatgagtcgcaaggggaagggtgcattgggagctcgatgtgactacattggttcatccactaatctgattatggtggcttctacaaccctgatgctgtttgctggaaggtttggattgggtccatcagcaaacaggaaagccactgcagggctaaagctggaggtgagggactcaggcttgcagactggtgaccctgctggcttcacccttgctgaca

SEQ ID NO: 36386 - DNA, 205 bp, Glycine max
  Clone ID: LIB3054-001-Q1-B1-F2
caattgcgaccgattggttccccaccttcaaacctcctggaccaaggtgtttttggctatgtccattaatggatttctcccaattgggaaaattgtctcagtcatgcatttcaattctgaaattacacatggggatcgtgagttccatccatattttgatgtcattacccgtgtgcatcacagacaccttgtttcccaagttgga

SEQ ID NO: 36387 - DNA, 270 bp, Glycine max
  Clone ID: LIB3054-001-Q1-B1-F3
atcggcgttcctcggggaattccccttccacattttcaagaaatacggaggcaacactgttcatatcctccactggaattatttgttttcttagtaggcctatcctgacgccactcgaaatgggatcggccttcctcgggggtaccgagcgcgaagtcgcttctcctgagtcggtccggcttacgccttgggttatccagggtcacagctgttcccggggtgactttgttacccgcccaaaattccacacaccttacgacccggaaccat

SEQ ID NO: 36388 - DNA, 87 bp, Glycine max
  Clone ID: LIB3054-001-Q1-B1-F5
caattttatgatttcaaaattttatacaatattgttcaagattgtcttatttttagaatgaagtgctgatgaatgttttgctttctt

SEQ ID NO: 36389 - DNA, 359 bp, Glycine max
  Clone ID: LIB3054-001-Q1-B1-F9
tcactctagagatccctcagagaattcgaattcgacattttcaagaaataacgaggcaaaaatgttcatatatgaattggaattatttgttttcttattaggcctatcctgaagccaaaggaaatgagatcggaattcctcggggaattccaattccacattttcaagaaataaggaggcaaaaatgttcatatatgaattggaattatttgttttcttagtaggcctatcctgaagccaaaggaaatgagatcggaattcctcggggaattccaagtccacatttgcacgatataaggaggcaaaaatgttcatatatggattcgaattatttgttttccgagtaggcctagcctgaa

SEQ ID NO: 36390 - DNA, 287 bp, Glycine max
  Clone ID: LIB3054-001-Q1-B1-G11
ggtcaagcctaaaggttcccctaggggaattccaattccaaattttcaagaaataaggaggcaaaaatgttcatatatgaattggaattatttgttttcttattaggcctatcctgaagccaaaggaaatgagatcggaattcctcggggaattccaattccacattttcaagaaataaggaggcaaaaatgttcatatatgaattggaattatttgttttcttattaggcctatcctgaagccaagggaaatgagatcggaagtcctcggggaatgcgagttccac

SEQ ID NO: 36391 - DNA, 367 bp, Glycine max
  Clone ID: LIB3054-001-Q1-B1-G12
gtttgaggcttgagggataagaagggattctcctgttgtggcgtgggagagagaatgggagaggagcagaggagcatagcaaggctacccttgttctccatacagtctccagagacagagagatcaggaatggccactcctccacttgagaccttagcatcagtcccatttcggtgggaacaagtgcccggaaaaccaaggccatccactgccctcgtgcctttctccaacccccctgacttgttgcccaacggcttagaacgttcctcccaggttgctcagaccttctcccgccactgtctgttaaggtttccaccaagaattgctatggttcggatacaaaactgcttggtgccatggttctcac

SEQ ID NO: 36392 - DNA, 387 bp, Glycine max
  Clone ID: LIB3054-001-Q1-B1-G2
cagcttcaaatcaaatccaattgaaatcaaaaataaaaaggaaaaaagaaaaagtaaagacctctcaacacatggctgcttcaatcccatttacaggtatcaactcctcaagggtgcttcccattcctagagaaccacaccacccattttcccatttgctctcaaacatgtcaaagtttgcatctttgagaaccccttcttcttcttctgcttcttcttcgtcttcttctgtgtcttgctctctcagcaaagacccttactctgttgtgccattggaggaacatagcacaatggataatgggtctgttctgcttcagagacccgattcgtttgggacgtttggcaagtttggatggaagtatgtccctgagactctgatacatgctc

SEQ ID NO: 36393 - DNA, 182 bp, Glycine max
  Clone ID: LIB3054-001-Q1-B1-G4
aaacattaatgctaatgcaatcatgtggaacttttcactgcttttctgagacttgtttcaatcttaaaaagctgttaatatgtaatgtgtttttctatccatgggatgcagtatgcgactgatggatgtgtttcgctgtattattaaaaatatttgggatgattagataaaatgctgttaat

SEQ ID NO: 36394 - DNA, 376 bp, Glycine max
  Clone ID: LIB3054-001-Q1-B1-G5
ttccttttcatcattctcatatcctcaatcaccccccctcgcactcgctcttcccttcctctggtggcgacaatgtcgactcctgctaggaagaggctgatgagagacttcaagaggctgcaacaagacccgcctgcagggatcagtggtgccccccaggataacaacataatgctgtggaatgctgtcatatttggtcctgatgatactccatgggatggaggcacgttcaagttgacactccaatttactgaggactatccaaataaaccaccgactgtacgatttgtgtctcgcatgtttcatccaaatatttatgctgatggaagtatttgtttggatatattacaaaatcagtggagtcctatttatgatg

SEQ ID NO: 36395 - DNA, 384 bp, Glycine max
  Clone ID: LIB3054-001-Q1-B1-G7
acccaaccctagattgagagaaaaatccccaaaaacaaaacacacatctctttcattctctccctcaccaaaccctagattgaaagaaaccctaacacaccatgggaacacccgagacatcgcgcgaaccctgccccgatcgcatcctcgacgacataggcggcgccttcggcatgggagcggtgggtggctccgccttccattttctcaagggtctctacaattcccccaagggcgatcgcttcgtcggcgccacccaggccgtgcgcctcaacgccccccgcgtcggcggcagcttcgccgtctggggcggcctcttctccgccttcgactgcaccatggtctacgcgcgccagaaggaggacccctggaactccatcgtcg

SEQ ID NO: 36396 - DNA, 187 bp, Glycine max
  Clone ID: LIB3054-001-Q1-B1-G8
gcccaatcctacattgtgataacaatcttgatagcaataacagagatcttgttcagtctctccctcaacaaatgctaggttgatagaaactcttagacaccatgggaatatctgaattatcgagcgaatcctgctctgatcgcatcctcgaatacataagcggcgccttcggcatgggagccgtggg

SEQ ID NO: 36397 - DNA, 378 bp, Glycine max
  Clone ID: LIB3054-001-Q1-B1-H1
caacattaattccaatccaatcatgttcaacttttcactggatttctgacacgtgtttcactctcagtaaactgttgcttcatgcccagttatacgtaccatctcgacacagtgtcctaccattcgaagtgtttcactgtactcattttcctatttgcgctcactcaagtcaaatgcttgtatctgtgagaacagattctgcttattccgcatcatcgacgtcgtctactctgtcatgagttctcaacaggtacctgcacgctgtcgagctattgctagaataattcgtaatggataatgggtctgtactgcttcacatatttcctgctgtagagatgtttggcatcataggtcggaagtatgtaccagacacactga

SEQ ID NO: 36398 - DNA, 110 bp, Glycine max
  Clone ID: LIB3054-001-Q1-B1-H10
tacgttggtatctctgtgttgtaacccgattcgttacaaaatgttacatggaattagacaggtagctattgaaacaaataggtgagttggttttttcaggagctacctgt

SEQ ID NO: 36399 - DNA, 303 bp, Glycine max
  Clone ID: LIB3054-001-Q1-B1-H12
aactcttcatcatattcttcttcttcgtcttgttcttgttctatctgtgacgagcatcatggcgtcgagagcagtgctattgttggctatgtgtgtgcttccggccatggttgtggccattcgcccagcaaagaaccctttttgcgtgaagggtcgcgtctactgtgacccttgccgtgctggttttgagacctcagcaaccacctacattgccggtgctgagattatgttgcaatgcgggagcagggtgagcagcgaggttgtgtagaccaagaaggggtagactgacgcaactggagcata

SEQ ID NO: 36400 - DNA, 227 bp, Glycine max
  Clone ID: LIB3054-001-Q1-B1-H3
gtgtgtgttcgaaacccaatgtggggccaccgtctgctccggacaccggtttctctgcgttgttctgcattcgactcgtccccgactcagctacccgactcggtcgcgacccgttccggttcaacttggatccgtgtttgtgtcaaatggtaatggcgatagtaagcggttcagctccaagttgagcctcattcccagagccgttgattcttccaccgcacaatctt

SEQ ID NO: 36401 - DNA, 389 bp, Glycine max
  Clone ID: LIB3054-001-Q1-B1-H4
gttttaagagagagagagagagagcgaataattaaaaggcccttgccttcacctttggtgtccaaagatattgctagagagaagaactagttgttcaattagcttcttcttcttcttcatcttcttccacccttcttgtttgagtaaattaagaagcttgagatcagacatgtcgagctgcagcatcgatgttgcgcctgagcaactctgctacatcccctgcaacttctgcaatattgttcttgcggtgagtgttccatgcagtagcctgtttgacattgtgaccgttcgatgtgggcactgcaccaatctatggtccgtgaacatggccgccgcgtttcagtcactgtcatggcaagatgttcacggatctgggcactgcaatccaa

SEQ ID NO: 36402 - DNA, 379 bp, Glycine max
  Clone ID: LIB3054-001-Q1-B1-H5
ctaattcaaccatcgaatacactattgaccattaactagaaaattttgaaatctcatctgatttttttcaattgaaacggagcttcaaagcatggcagcttttacatcaattgttgtgcagtactcatccacatcatctttacagtctttggtaccttctttagaagctacacgcgatcataattcatggtgggggagagtgagatcatacagatccacaggaaaaaattcactccaacagaatatcacaagaggcttaacaatccaaaatgcagccacaaaaccagctaagtcaccagttattagctgaagaagactggaaggttaagcgagaatatctgctggaaaaaagggtaagaagtgtggatgcaaaggaagc

SEQ ID NO: 36403 - DNA, 419 bp, Glycine max
  unsure (1)..(419): unsure at all n locations
  Clone ID: LIB3054-001-Q1-B1-H6
gactcaagaggatcccctcggggaattccaattccacattttcaagaaataaggaggcaaaaatgttcatatatgaattggaattatttgttttcttattaggcctatcctgaagccaaaggaaatgagatcggaattcctcggggaattccaattccacattttcaagaaataaggaggcaaaaatgttcatatatgaattggaattatttgttttcttattaggcctatcctgaagccaaaggaaatgagatcggaattcctcggggaattccaattccacattttcaagaaataaggaggcaaaaatgttcatatatgaattggaattatttgttttcttattaagcctatcctgaagccaaaggaaatgagatcggaattcctcgggnggtacgagctcgaattccctatagtga

SEQ ID NO: 36404 - DNA, 314 bp, Glycine max
  Clone ID: LIB3054-001-Q1-B1-H8
caggtcaactcaagaggatcccctcggggaattccaattccacattttcaagaaataaggaggcaaaaatgttcatatatgaattggaattatttgttttcttattaggcctatcctgaagccaaaggaaatgagatcggcattcctcggggaattctacatccatattgtcaggatatattgagacccttgagatcagacatgtctacctgcagcatccatgttacgcctgagcaactctgctacatcccctgcaacttctgcaacaatgttcttgcggtgaggtgttcaacgcagtaccctgtgtgacattg

SEQ ID NO: 36405 - DNA, 262 bp, Glycine max
  Clone ID: LIB3054-002-Q1-N1-A11
tttattatatctatactgaagccaaattaaatgatatcgaaatttctcttctaattccaattccacattttcaataaatatctattcaaaaatgttcatatatgaattttaatttttattttttttaatatttctatcctaatatccaattaatttttacattttaattcctcttttaattccaattccacattttcaataaataatgatacaaaaatgttcatatattaattataattattagttttcttattattcctat

SEQ ID NO: 36406 - DNA, 382 bp, Glycine max
  unsure (1)..(382): unsure at all n locations
  Clone ID: LIB3054-002-Q1-N1-A2
gcaagctcatcctagagttttaaaaatggcagcagcctcctgcatggctctctcttccccatccttggctggcaaggccgtgaagctgggcccatcagcccccgaagtcgggagggtcagcatgaggaagaccgtcaccaagcaggcctcctccggaagcccatggtacggcccagaccgcgtcaagtacttgggcccattctctggcgagcccccgtcctacctcactggcgagttcccaggtgactacggctgggacactgctgggctttcggccgacccagaaaccttcgccagaaaccgtgagctcgaagtgatccactccaggtgggccatgctcggngccttgggctgcgtcttccccgaactattgtcccgcaac

SEQ ID NO: 36407 - DNA, 293 bp, Glycine max
  Clone ID: LIB3054-002-Q1-N1-A3
aagtgtctttcaaggcttctcaagatgatcagactgacaatacagtgtggtgtaccttatcatcttctgggtttatggctatctcatatgctgaagcatttgacactacataaaaacgctctgctggtgaaccccagaagtctttcaatcatgatgggcaaggtgaccttcatttttcgctgacttcatatcctgtacaacatgatgtgaatcatgctcatgatgtgaagatgttttcagttccaaatcaagcactttcagacatcttgaagaattcattactgaaaaatcat

SEQ ID NO: 36408 - DNA, 415 bp, Glycine max
  Clone ID: LIB3054-002-Q1-N1-A4
tgtctttcaaggcttctcaagatgataagactaagaatacggtggctgataccttatcatcttctgggtttatgtctatcttaagtcaagaagcatttgacactagtcagaaacgctctgctggtgaaccccagaagtctttcaatcatgatgggcaaggtgaccttcatttttcgctgacttcatatcctgtacaacatgatgtgaatcatcctcatgatgtgaagatgttttcagttccaaatcaagcaatttcagtttccttggggaatccattcctgaagaatcattttgcagctgctggtcagaagccgttacttgggggaatacctgttaccacatctcattcagttcttccctctgctgttgctgttgctggaatgaccgaatcatgtgtgaaaccatctgctcaact

SEQ ID NO: 36409 - DNA, 263 bp, Glycine max
  Clone ID: LIB3054-002-Q1-N1-A6
gaagcgggaaaacattcaaccagtttggcaatcacgggggccgttgaatgtcggacctggttctggaaaaacatcctaggaatttgaggcatagatatctttactcacataggatctgaggatggcgacacactgctttcttctgtaactacaaaatatcaggcgtacttgaggactgctgatgtcactggatatgttgagttgaccgtaaatgttaaaatgatacatgcctggatacaatgttactgccatgtttgaattga

SEQ ID NO: 36410 - DNA, 383 bp, Glycine max
  Clone ID: LIB3054-002-Q1-N1-A8
atcagcgagtgagagtgagtgagtggttctcttgcagggagatggtttagtgacaccaaacagactggaaatgggtcgtggggtcagtgctggtggtggacagagttccttggattatctctttggcagtggggtacctgccagcagtgcaaatggtgctcgcactcaaaatgcaagtgctccttcaccaccggttgataagcaaagtccagcaccagcagcagcagcagcacctgcacctgcagcagcagcagcaccagcacctgcaccagcaccagcaccagcaccagctgataagcaaattccagctggaattcctggaagtctcaaaaacaattaccatcgcgctgatgggcaaaactgtggcaactttctcactgatc

SEQ ID NO: 36411 - DNA, 346 bp, Glycine max
  Clone ID: LIB3054-002-Q1-N1-B12
cgattgagcccttcttgaattatccaaatatggtccatgaaaaattttgggtagtcaaaaaaaggttaaaatatccccttacatgaaatggatggactgcctatgtaagcattcttttggaaattggcaaagggtaacatatgcacacttcatgtattactgaagctgtggttttttagtcgggggttaatatcgatggtaatgcttgtgcacgtacatgttctaaataatgttcgcattgcattgcttcgttaaatcatgaattgtgcaagtttgattgccttaattcgccttctaactcggatgtatcatgaaacatcgtctaattttatcattatgtccatat

SEQ ID NO: 36412 - DNA, 396 bp, Glycine max
  unsure (1)..(396): unsure at all n locations
  Clone ID: LIB3054-002-Q1-N1-B2
ctgtgttctgtttatctatccagatttttcgatttcttagcggtagcatgttctcacgccttcgtcaaccttctgcgttttgccacactcattaatctataatcttgaggcttcgattcaccacagaccctgaattttgaattgctcttaaacttcaaacttcccacttttttgtttttgtttttgtcgtttggatttggtgttttcaagatcatggggtggtacagaaggggaaagctcgctcttgatcattttcgtagattggcttcaagggttacccctcaaaatccaatttttcagcgtggtgcgaggatttgctcatctgggtatttggattcaggttctaaagtagctagctntaatgggttctcttctttttgttcaacttctcagaga

SEQ ID NO: 36413 - DNA, 323 bp, Glycine max
  Clone ID: LIB3054-002-Q1-N1-B3
ctcacatacctttcctacctaagaataatttcaattcatattcaccctccatctctccatctattcacttcactactctcaaatctaactctacatttctacaatctctaacacttctttcaaatcaacactaaacatttcacaaacaaacaatacttcactcataaccacatctaaaatttttaacaaccttaaaaaattcctcacaaaaacaacaccaccataaatattaatcaacttataaatatccatcttataatcactaataacaatttcctttaaaaacaaaaccccttttatttctcaaacaccaaattttaata

SEQ ID NO: 36414 - DNA, 408 bp, Glycine max
  unsure (1)..(408): unsure at all n locations
  Clone ID: LIB3054-002-Q1-N1-B4
acatgacctagttgaagaacttaccattggctatttaacacggggaaaatccattggtgaccataagtttcttctggaatctgctgcaaaggttggtatagaaggagcagaagagtttcttaaggaccccaacaatggtttgaaggaagttgaggaggagctcanaacttactcaggaaacatttcangggttccatattacgtgattaatgggaatcacaagttgagtggtggacaaccccctgaagtcttcttgagagcttttcaagttgctacaaattagaatttcaccttctcacattttctgcttccctctataagaatgaaaccttggaaataaaaagttggccattcactgctntataatactctatcaaatgtgaaacttgtatggatataatgtaagac

SEQ ID NO: 36415 - DNA, 257 bp, Glycine max
  Clone ID: LIB3054-002-Q1-N1-B5
tagctctcacattatgtgctccttgttaagatctgcggggcgagtcatcttaaccaaccggaaaaccatcaaatgatgaacacctaccattactatcgacaccattagacgaacaccttcacacatctcacaacacacaatcatctcattaccgatcgctatcaaaccataccgattaaggctcatcacccactcttgcattaacacaaaattccgattctccatgcaccccaacatgaaatctcaaccttaattaa

SEQ ID NO: 36416 - DNA, 419 bp, Glycine max
  Clone ID: LIB3054-002-Q1-N1-B6
acatgatctacttgtataacttaacattggctatttcacacaggagaaatacattggtgaccataagtttcttctggaatctgctgcaaaggttggtatagaaggagcagaagagtttcttaaggaccccaacaatggtttgaaggaagttgaggaggagctcaaaacttactcaggaaacatttcaggggttccatattacgtgattaatgggaatcacaagttgagtggtggacaaccccctgaagtcttcttgagagcttttcaagttgctacaaattagaatttcaccttctcacattttctgcttccctctataagaatgaaaccttggaaataaaaagttggccattcactgctttataatactctatcaaatgtgaaaccttgattgatataatgtaagacaatattcatta

SEQ ID NO: 36417 - DNA, 417 bp, Glycine max
  Clone ID: LIB3054-002-Q1-N1-B8
ctttctcacacaatctgggaacaacacacacaaaccattcgcttttctcgctccggcaatgaccacccaagcttccaccttcgccgtcgccgttccctccgtcacaacccccttccgcagccaccggaatcccttcgttgttcgagcccaagcggaaccttcagataaatccgttgaaattatgaggaaattctcagagcaatatgctcgtaaatcatgaacatacttttgtgttgacaaaggagtcacttctgttgttatcaaggggttggctgaccataaagatacgttgggtgcaccactgtgcccttgccggcattatgatgataaagctgctgaagttgcacaaggattttggaattgcccttgtgttcccatgagagagaggaaggaatgccactgcatgctaattcttac

SEQ ID NO: 36418 - DNA, 401 bp, Glycine max
  Clone ID: LIB3054-002-Q1-N1-C11
gccaagtgtttctttacacctataggacccatgccagggccacctgctccacttggtaccatcgctgccgcaccatggggctcagcactcatattgccaatctcttacacttacatagccatgatgggttctaaaggactcaccgatgcatcaaagatagccattttgaatgcaaactacatggcaaaacgattggagaattattatcccgttcttttccgtggagtcaatggaacagttgctcatgaattcatcattgacctgagaggctttaagaatactgctggaattgagcctgaagatgttgcaaagcgcctcatggactacggttttcatgcaccaacaatgtcatggcctgtgcctggcacactcatgattgagccaactgagagtgaaagcaa

SEQ ID NO: 36419 - DNA, 371 bp, Glycine max
  Clone ID: LIB3054-002-Q1-N1-C12
gccaaattcctgttttgcaatggattggcaattcgaaacgagacttgggttccaagatcatggtataatttcggacctatatgaatcttaatcttaattggaacgaaatctttcaaaattggatttctaattcttaatgatattctcgtgcattcgatcttttctttttcttagattataattcgaaaaccaaagagttaagtgaattaaaaacccaagggaggttcatggccaaacgtaaagatatgcgagtaattgtgatcttggaatgtaccggattgcgataaaagagtgtccataaggaatcaacgggtatttctagatctataactaacatgaatcgacagaatacgcctatgcgattggaattg

SEQ ID NO: 36420 - DNA, 406 bp, Glycine max
  Clone ID: LIB3054-002-Q1-N1-C3
ccgagcagccacacctcccgcagcagccatggttctcaaagctgagctatgccgattcagtggtgccaagatctacccaggaaagggcatcagatttgttcgtggtgattctcaggttttcctgtttgcaaactcaaaatgtaagaggtatttccacaatcgcctgaagccttcaaagctcacctggactgcaatgtacagaaagcaacacaaaaaggacattgctcaagaagctgtgaggaagaggagacgtgctgccaaaaagccttactctaggtccattgttggtgcgaccttggaagtaatccagaaaaagagagctgagaagccagaagttcgagatgcagctagggaagctgctcttcgtgaaattaaggagaggatcaagaaaacaaaggatgagaag

SEQ ID NO: 36421 - DNA, 376 bp, Glycine max
  Clone ID: LIB3054-002-Q1-N1-C4
gccaaatgaagatggtaaacttgagctgcttcactcacacgaagcatatgagatgattcaaaaccacctggctctcattctcggtaacagagctggagatttaacatcaatagctgaaatcagcaaattcagggtagggcaggtctacgcagcatcagtgatgtatggttattttcttagacgagttgaccaaaggttccagttggagaagacaatgaaagttcttccaaatgcaacagaaaaagagaatagtgctcatcaaactacaatggacaatgcaagacccagtattgaagaggacacttctcaagtgatgtctcatcctgaagtatctacctggcctggtggtgatgtccgtccccgtggatttggctat

SEQ ID NO: 36422 - DNA, 107 bp, Glycine max
  Clone ID: LIB3054-002-Q1-N1-C5
ctcgagccgctctatctttgttcctgctgactaatttgagagcaggctatctatgctatgcatgcatgtaaaataatataaagttatcgaagtattttctttgtacc

SEQ ID NO: 36423 - DNA, 107 bp, Glycine max
  Clone ID: LIB3054-002-Q1-N1-C6
ctcgagccgctctatctttgttcctgctgactaattggagggcaggctatctatgctatgcatgcatgtaaaataatataaagttatcgaagtattttctttgtacc

SEQ ID NO: 36424 - DNA, 412 bp, Glycine max
  Clone ID: LIB3054-002-Q1-N1-C7
gttaatcgccaccgccagcaccaagggtacgctgattcggagtttcgacacagatcacggcacgcttcttcaggaagtgagaaggggtgcgaatactgctgagatttgtagtttggcattctcttctactgctcagtggctagcggtctcaagtgataagggtactgtccatgtattcagccttaagaaacattctaacatccccgagctggaaaagacacaaagttcatccaattcagaggctgccgttaccctatctaactcatctcgctccttcattaaattgaaaggagtgttgcccaagtacttcaattctgagtggtcagttgctcagtttcacttacaagagggctctcattacacagttgcatttggtctccaaaagaatacagtcattattcttggcatggat

SEQ ID NO: 36425 - DNA, 405 bp, Glycine max
  Clone ID: LIB3054-002-Q1-N1-D1
gattggaaaaggtttcagtcccttccctctgcgaattgaagaattggcaaaaattgtctcttcgtatgtgtaatacaaggcaggcttttgaaaactgttctatccaaatctcaaatgcaatgccatgtcttgaggaaatgagcattgactattgcaatgatttgattacattacctgatggactgtgtgagattagcccattgaagaaacttagtatcactaactgccacaaactttctgcactgccacaaggtattggaaaactggagaatctggaagtgctaaggctatgttcctgctctgatttgctagagatgccaaattcttttgaagggcttaacaagctaagctgtcttgacatctcagactgtgtaagtcttaccaaattaccagatgatattggtg

SEQ ID NO: 36426 - DNA, 438 bp, Glycine max
  Clone ID: LIB3054-002-Q1-N1-D11
tatcatgcctgcgcggggactctagcagatccccgtcgtgaattccaattccacattttcaagaaataatgaggcaaaaatgttggtatgttaattggaatcgtttgttttcttattaagcctatcctgaagccaaatgaaatgagatcagaattcctacgcgaattccaatttcacattttcaagaaataacgaggcaaaaatgttcatatatgaattggaattattcgttttcttattaagcctatcctgaagccaaaggaaatgagatctgaattcctcgatgaattccaattccacattttcaagaaataaggaggcaaaaatgttcatatatgaattggaattatatgttttcttattaggcctatcctgaagccaaaggaaatgagatcggaattcctcgggggtacctagctcgaattccctataatgagt

SEQ ID NO: 36427 - DNA, 417 bp, Glycine max
  unsure (1)..(417): unsure at all n locations
  Clone ID: LIB3054-002-Q1-N1-D3
gcctgtccctttgtttcaagttccctctgcttattctgcacgggagcgatgtctgagaaaaccacagctgagaaccttattgaaaaccttgtggacacatttgttgataagaaaaaatctgtatcattctttgaggatgataagtcagactcagtgagttctcagatcaatagactgtttggacgccagaaacctgtgcaccatgttttagggggtggaaaatctgcggatgtcttgctatggaggaacaagaagatttctgctagtgttttagcatgtgcaacgattgcatgggtgcttttcgaatggcttaattacaactttcttactatcttatgctatggtttggttcttgtcatgcttgcacagtttctatggtcaaatgcttncagcatgtttaacaggtcaccatctaat

SEQ ID NO: 36428 - DNA, 408 bp, Glycine max
  Clone ID: LIB3054-002-Q1-N1-D8
ccaacaacaccctcttctcgcgttgtctccaaagcaggcgggattacccacacgcaaacgacaacaaccgcgcgcgtttcacacctgcataactcggagtagcatacgcagcgtcgttgactcgcaactcgtaacttggcctcgcgcgccgatggcgtcggtccccagcaccgtcgctccccgtaccttactgccgtcgattcccaagccgagagctcctcttcacgccgcgaaatccgtcgccagcgccgcgcgcaacttcccgagactttcgcacaacctcattctctccggaaacaaacgcgcggtggcggtgaactcggcgtcggaggagttcgacgtgatatcggtgcagagcgaggacattaccgaccagcaggagggcgtcgtggtgagccgcgtccagat

SEQ ID NO: 36429 - DNA, 392 bp, Glycine max
  Clone ID: LIB3054-002-Q1-N1-D9
cgactctctcgaagttagtttaggtttagggttaagttttgttttgcttcaatcttgcaagaaattcttctccgcacgatgcctcccgggcctctctgaaatccccatgacgtgaacgccccgatgcacgtgccaaatcgccgccgttcgtgttgcagtttagccccaattttcccacggttgatctgtgtcaaagtaacggcgaaattcctctttttcaatttctctctcttagtttcgatttggtgttgaatggatgcttgctgaattcgccttgctataccttcagcttcttttcgaacaccacacgtgttctctgaaaacggagctagtcctaaaggcgtaaatcgaaacgcggtcgtttttcaccttggggcgagggttcttctttt

SEQ ID NO: 36430 - DNA, 285 bp, Glycine max
  Clone ID: LIB3054-002-Q1-N1-E12
gaacctaactttattctcactatatcttacacccaaatcaaagtaaggtttctaagtaggtcgattccctttaatttttcaacacatactatcacccaatttatcattccactactcatatttcacattaacacaaattcacttatcttattataacaataccaaatatcatttcaataaattcataaatcaacaatttattctatatcaatactaccaacatttattatcaatatatttatatctcatctacatttcataaatataaaacaatataataccaat

SEQ ID NO: 36431 - DNA, 111 bp, Glycine max
  Clone ID: LIB3054-002-Q1-N1-E2
aaaataatcaaatgaaattttgtaatagcattcagttagcgtacgtatcaggataaagtgataaaaccaagtgtgtgggtgtaaatgataagaactgaaataagtgggtgc

SEQ ID NO: 36432 - DNA, 398 bp, Glycine max
  Clone ID: LIB3054-002-Q1-N1-E3
gcgatctctctctattctttgaaaccaaagttcaaactctggctggcctgggttctatttcgaaatcaacgacgatgagttccacagaggcagcagccacagagaagaaaggtggaagagggaaaccgaagacttcaaagtccgtttcccgttcctccaaagctggccttcagtttcccgtcggccgtgtcgctcgctacctcaaggccggtcgctacgcccagcgcgttggctccggttcccctgtttatctctccgcggttctcgaatacctcgctgccgaggttttggagcttgcggggaacgctgcgagggacaacaagaagacgaggatcgttccgaggcacattcaactggcggttaggaacgacgaggagttgagcaagctgatgggatct

SEQ ID NO: 36433 - DNA, 377 bp, Glycine max
  unsure (1)..(377): unsure at all n locations
  Clone ID: LIB3054-002-Q1-N1-E8
tgaagtgaatgattgcagcgatcataccagcttctttgtgagggtgtacatggaaggcattccgattggtagaaaactcaacttgttagctcatgatggttatcacgagttagtaaagactcttgaacagatgtttgacactaccattctgtgggggactgaaatggatggagtgcaaccagagagatgtcatgttctaacttatgaagatggagaaggagatttgattatggttggggatgtcccttgggagatgttcttatcagctgtaaagaggttgaagatcacaagggtggaggcattcgggtgataaatgcatacatatgaagaagctntgcctctcctgtgacttcaaatttagtcctatagagtgagag

SEQ ID NO: 36434 - DNA, 408 bp, Glycine max
  Clone ID: LIB3054-002-Q1-N1-E9
ggttcagggcctggtggggtgaccggggtattaatccgaaaaaaccggtgaccggcttccgataggtagagaagcagcaaaccattaaccacaacacatggcgctatgttcctcactctcacttgtctctcccatcaaactcacttccaagtccttcttatctccaacaccagtcagttggcatggcatcttgataaagaataacacctcaacaagattcttgctgaaagctgtttttaatgagattgaacctgacctcagtgaagatcctagagaccaatttgccaccaatggcgttgacgctgatgattttgtgtatggaatatatgatgaccaccacacttaccatgaaggagaacagaaaggaacattttggggctcaattaaagaagagatggcagaagcaga

SEQ ID NO: 36435 - DNA, 420 bp, Glycine max
  Clone ID: LIB3054-002-Q1-N1-F1
gaggttgagattgaagtagcaaccaagtttgctgcactgccgtggagatttggccgtcaaagtgttctcaatgcccttaaagattccctttgtcgactaggactgacttcagtggatctttatcagctacattggcctggagtttggggaaatgaagggtatattgatggtctgggagatgctgttgagaagggacttgtgaaggccgttggagtttcaaactatagtgagaagcgactccgtgaggcttatgagaagcttaagaagagaggtattccattagctacaaaccaagtaaactacagcctcatctaccgggcccctgaagaaaatggtgtaaaggctgcctgtgatgaacttgggataacaataattgcatattcaccaattgctcaaggtgctctcactggaaagtatact

SEQ ID NO: 36436 - DNA, 282 bp, Glycine max
  Clone ID: LIB3054-002-Q1-N1-F12
ctcgagccgctcgagccgcaacacagttatccattcacattgcacagttagcacttagcgagactctgctgcagtgaggtgaggggaggtttgtttgttgtttcgtttttcctttcctttccgccagaatccgttgagaatggcgttgccggtagtcgtcgatgcagagtacctcaaggaggtcgacaaggctcgccgcgatctccgcgcactcatcgctaacaggaactgcgctcctctcatgctccgattagcctggcacgatgccggaacttacgatgc

SEQ ID NO: 36437 - DNA, 367 bp, Glycine max
  Clone ID: LIB3054-002-Q1-N1-F2
ctgagtctcactctctctcccatggcgaaagacatcgaaactgaggtccaaagtgggctgccacacaaggactaccacgacccacccgccgccgcattctacgaccccgccgagctccgcaagtggtccttctaccgcgccctcatcgccgagtttgtcgccactctcctcttcctctacgtcaccatcctcaccgtcatcggctacaatcaccagaccgccaccggcagccccgacctctgcaatggcgtcggcgtcctcggcatcgcttgggccttcggaggcatgatatttgtccttgtctattgcactgctgggatatcaaggggacacataaacccggcggtgacgtttgggttggttctgg

SEQ ID NO: 36438 - DNA, 365 bp, Glycine max
  Clone ID: LIB3054-002-Q1-N1-F3
ctgagtctcactctctctcccatggcgaaagacatccaaacggaggtccaaagtgggctgccacacatggactaccacgacccacccgtcgccgcattctacgaccccgccgagctccgcaagtggtccttctaccgcgccctcatcgccgagtttgtcgccactctcctcttcctctacgtcaccatcctcaccgtcatcggctacaatcaccagaccgccacctgcagccccgacctctgcaatggcgtcagcatcctcggcatcgcttagggccttcagaggcatgatatttgtccttgtctattgcactgctgcgatatcagggggacacataaacccggcggtgacgttaggattgtttc

SEQ ID NO: 36439 - DNA, 344 bp, Glycine max
  Clone ID: LIB3054-002-Q1-N1-F4
actaactctcactctctctcccatcacaaaatacatccaaagttagatccaaaaccatcttccacacctccactaactttaaacaccccactccacattctaccacccctcctatctcctcaatccttccttctaccactccctcatctccaaatttatcaccactctcctcttcctctacttcaccatcctcaccatcatcaactacaatcaccacaccaacaccatcatcccctacctctccaatatccttcatcatactcaacataccctttcacctatcatacacatgatatcctctccttatctattccactcctaccatatcatacatacacataaac

SEQ ID NO: 36440 - DNA, 409 bp, Glycine max
  Clone ID: LIB3054-002-Q1-N1-F5
gagagagaacttcaactgagggtgagagtgacacaagtctggggagcactactctaaaagttctattagattcttcaaaacatgaccatgcatcgcgagtcttgggcttttgtcttcggcgttatgggcaacatcatctcctttggagtgttccttgctccattgccaaccttttaccaaatctacaagaagaaatccactgaagggttccagtcacttccttatgttgttgcactgttcagtgcaatgctttggatttactatgctttcgtcaaaagggaagctgccctccttctcattaccattaacacatttggaattgttgtggagtcaatttaccttgcaatcttcctactttatgccccaaggaagcctaggcttacaaccatcaagcttcttctcttactga

SEQ ID NO: 36441 - DNA, 315 bp, Glycine max
  Clone ID: LIB3054-002-Q1-N1-F8
tacataatctattttcacctgacgatcataacaacactcgtcaggattatattctactcttcgaatcccatcacaactataaaaacaccaccattcatccccagtattctccttctttctctctccttttccaacccttcctcttacttttacctttcttccttcattcctaacctaataccaaatctacatcataacttacactctaagtatctaatcactttcttatctttttgctctaatctattctatattcacgatctactattctatccttaccacttaacctgaccccctatctattaccattaacac

SEQ ID NO: 36442 - DNA, 302 bp, Glycine max
  Clone ID: LIB3054-002-Q1-N1-F9
atctctaattttacaaataaaaaatccttcttattctcaatattccttctcaatacatctacaccaactacaattatacatatctcaatcaatattataacaattataaataccaatacctctatattctttcattatcatataatcaatttattcatcatcaaccataaatcactcatcaaattatccattttatctacaattcctacaaatctaaattccccatcttatataatatttaaaccaatccttacaattatactccttattacaaattcttcaaatattacaaatctctaatt

SEQ ID NO: 36443 - DNA, 171 bp, Glycine max
  Clone ID: LIB3054-002-Q1-N1-G11
gcgcttgaacgggttgagacccatattgcaagccttaccttgggaatggttgaaccaattaccccaaacttaatcggttaagttctcaagggatttcaataattaccggatttgttaaaatttgtggggccttggaaggggaatgtaatggagtccaaaactacccgggtc

SEQ ID NO: 36444 - DNA, 286 bp, Glycine max
  Clone ID: LIB3054-002-Q1-N1-G12
agaatataggaaatcctgatttaccaatggcaatgggcatgggaccagatcaaaaaggtgtgcgtattaaaagaattggacccactggttcaaaatcttatggtctgaaaccatttgatggaattcttaactttgattgggtcaatatttcgaatggatgaaccagggttattcctttccttaccaccacctttgatctggttcatttaaggcttggggagcccatgggttcaagtaacctggcttttcaaaagtccactggggataaagctctattaaaggtttt

SEQ ID NO: 36445 - DNA, 383 bp, Glycine max
  Clone ID: LIB3054-002-Q1-N1-G2
ctgagtggaaactctacatccaaacattggatcccgaaaacgaagacaggcttgactttgacccccttgatgttactaagacctggcccgaggacgttttgcccctccagcctgttggccgcatggtcttgaataagaacattgataacttctttgccgagaatgaacaacttgcattttgccctgccattattgtacctggtgtatactactccgatgataaattgcttcaaactcgcgtattctcctatgctgatacccagagacacagacttggaccaaattatctgcagcttcctgctaatgcccctaagtgtgcccatcacaacaatcaccatgatggtttcatgaatttcatgcacagggatgaagaggtcaattac

SEQ ID NO: 36446 - DNA, 334 bp, Glycine max
  Clone ID: LIB3054-002-Q1-N1-G3
ataatggggacttgtgggattgtcttgttgaccacagcttgccctgaaccatggccacttcggagttcgtcaccacgcgctcttcccgttccccgcattcgctgctgctctgtttcagagctttccccagataagcttccaactagtattgatttttctgtaactggtggggcatatgatttctcaaaagcaacaacatcactaacaaatgagttcatctcttcaccaaagaaagtaactcttttaaggcatggtcttagcacttggaattcagaaagtacgattcaaggaagctcagatttgtctgtattaactgaagttggggaagagcaag

SEQ ID NO: 36447 - DNA, 404 bp, Glycine max
  Clone ID: LIB3054-002-Q1-N1-G4
tacaagagtcatcactgccgcgtcgtactcggattcgctcgagaaaatgggactttcgattgcttgtgacacactcgccggaaccatggccacttcggagttcgtcaccactcgctcttcccgttccccgcattcgctgctgctctgtttcagagctttccccagataagcttccaactagtattgatttttctgtaactggcggcgcatatgatttctcaaaagcaacaacatcactaacaaatgagttcatctcttcaccaaagaaagtaactcttttaaggcatggtcttagcacttgcaattcacaaagtacgattcatggaagctcacatttgtctgtattaactgaagttcgtgaagagcaagcaaaaaggtgcaagaaagccttggaaaatatatac

SEQ ID NO: 36448 - DNA, 395 bp, Glycine max
  Clone ID: LIB3054-002-Q1-N1-G5
tttttcaaaacaaacgccacttcgctggcaagactggttggatgttgggactggaagtggcattcttgctatatggtcggcacaagcgggtgcgaggaaggtgtatgcagtggaagcaaccaagatgtcagaacatgcgcgtgcacttgtcaaagcgaataatctccaggatgtagttgaggtcattgagggatcgatggaggaaattaccttgccagagaaagttgatgtgatcatctctgaatggatgggttattttcttctgcgtgaatctatgtttgattcaggtataaatgctcgtgaccgctggctcaaaccaacaggagtgatgtatcctagtcatgctcgcatgtggatggcacctatccagactgggatagtagatcacaaattgg

SEQ ID NO: 36449 - DNA, 282 bp, Glycine max
  Clone ID: LIB3054-002-Q1-N1-G6
tgcttctgttgatttgaagcttaatctttcttcttggattgactactctgcctcggagtcaccctcatctatgtctacagagaagcccaaagagaacaagactaccactgctgaaccttctccagctaatgatccagcaaaaccacctgcaaaggcacaagtggtgggttggccaccaattaggtcatttagaaagaacatagttcaaaggaacagcaatgaagaagaggcagagaagagcacgaagaatgctttcgtgaaggttagcatggattgtgcacc

SEQ ID NO: 36450 - DNA, 121 bp, Glycine max
  Clone ID: LIB3054-002-Q1-N1-G9
gaccaaaaaaggccaaaacctacttcttttgttccttggcggggtcgccttcttaaaaattgggtggtcccaaggtcctaataagggttgctgattggtggttgaccttcaaccttggttt

SEQ ID NO: 36451 - DNA, 387 bp, Glycine max
  Clone ID: LIB3054-002-Q1-N1-H1
tgaaaactgcacctgctgattttcgttttcctacaacaaatgaagcgagacattgtttcactcgctacatagagtttcacagatgcttggcagcaaagggtgaaaactctggtgaatgtgagagatttgctaaatattaccgctccctttgcccgggtgaatgggttgaaaggtggaatgaacagagggagagtgggacttttccaggacctctttgaaatcatgtggcacttggatatccttctgaggcatgagaagtcttgaacattctgttggctcattttcttcagttgttgagcaattgtgaataaggcagtttgtggatattcattacttcacaaatggttgaaaccattttgctttttgagttgatataattggtctgac

SEQ ID NO: 36452 - DNA, 333 bp, Glycine max
  unsure (1)..(333): unsure at all n locations
  Clone ID: LIB3054-002-Q1-N1-H10
ggggaaggcctgaaatcctaaaggttcatgctagcaccaaaaggtttgatgctgatgtttctcttgaagtgattgcaatgagaacacctggctttagtggagctgatcttgcgaatctgttgaatgaagctgctatattagctggtcgccgtggaaagacagctatttcatctaaagaaattgatgattctattgataggattgtggctggaatggaaggaacagtgatgacagatgggaagagcaaaagtttagtggcatatcatgaagttggtcatgctatttgtggaaacttgactnctggtcatgatgctgtgcaaaaggtaacactag

SEQ ID NO: 36453 - DNA, 371 bp, Glycine max
  Clone ID: LIB3054-002-Q1-N1-H11
tcgcttcaaggtcctttggttcaccagtggcaacttcttgttccaaattgggggtgctcgactgaaatcctaaacgttcatgctaccaacagacagttacacgctgatgaagctcttgaagtgatagccatgacaacacctgactatagtggagctgatctcgcaaatctgtagaatgaaactgctatattagctagtcgccagctatagacaactattctatataaagaaattgatgattatatcgatacgaatgtcgctagaatggaacgaacaacgatgacagatcaggaagagcagaagtttactggcatatcatgaattacatcatgctatatgtgaaactatgactgctgatcatgatgctgtgc

SEQ ID NO: 36454 - DNA, 70 bp, Glycine max
  Clone ID: LIB3054-002-Q1-N1-H5
tgaaaactgcatctactgattatcgcttctatacaacaaatggcacaggtcattggttcagtcgctacat

SEQ ID NO: 36455 - DNA, 400 bp, Glycine max
  unsure (1)..(400): unsure at all n locations
  Clone ID: LIB3054-002-Q1-N1-H6
tgagtattctgatcgctccctgagagagctcgtcgcggcggttgcagaagaagattgcaagatgaagttcaacatcgcgaatcccaccactggatgccagaagaagctcgagatcgacgacgatctgaaactgcgagcattttgggacaagaggatctcacaggaggtcatcggagatgcactcggtgaggaatttaagggctatgtcttcaaaattaccggaggttgtgacaaacaaggatttccaatgaagcagggagtgctgactcctggtcgtgttagacttttgcttcacaggggaactccttgcttccgtggatatggaaagcgtaatggagagcgtaggagaaagtctgttcgtgggtgcattgtcagcccagacctntctgttttgaacttg

SEQ ID NO: 36456 - DNA, 440 bp, Glycine max
  unsure (1)..(440): unsure at all n locations
  Clone ID: LIB3054-003-Q1-N1-A6
ggaagtactgctgcaacccacagcattagaggcagactgagatggcatatgatgcccatgcaccacagcagggtaactcaaaaaggatcagaaagtaagatctctgagtgtttccagatgcaatcatttttaaagagtagaaaaagccgagcttcaagaacaaagatgaaattcaattttatagtgttctaatgttctataacttctgaagtgggggctctaaggttttctattcatctcttctttctttcgttcgttttctcttttgttttattggatttataaatacggtcgaacttgttagaggttctgtgatatgcttttttaggtgctgttcttgtaacttatattgggaccataacatgttgcgttcttatctttaacatatacgtcngtttgagtttttggcagttcaatgaaacttattgtttgcaccatat

SEQ ID NO: 36457 - DNA, 323 bp, Glycine max
  unsure (1)..(323): unsure at all n locations
  Clone ID: LIB3054-001-Q1-B1-A10
tcggggaattccaattccacattttcaagaaataaggaggcaaaaatgttcatatatgaattggaattatttgttttcttattaggcctatcctgaagccaaaggaaatgagatcggaattcctcggggaattccaattccacattttcaagaaataaggaggcaaaaatgttcatatatgaattggaattatttgttttcatagtaggcctagcctgaagccaaaggaaatgagatcggaatgcctcggggaattccatgtccacatttagaggaagtaangaggcagaaatgttcatatcgggattggaattatttggttt

SEQ ID NO: 36458 - DNA, 382 bp, Glycine max
  Clone ID: LIB3054-001-Q1-B1-B1
ctccacccaaccaaccaccttcttaattaataaacgtcgtcgtttcaatctcgttacacacctcaaaacgcagcggcacactcactagaatgcaagccgtttcgctctcacctttgtcgtttaaggattcttccgacgagttcgctggaaagttcgaacacgatttcatggccaagctcaaaatcaacgaagagaaagtcgaaaacgaaaacgaagagaagcataacgaagatgagatagaagaagaagaagaagaagaagaagaagaagaagaggaagagtttagcttcgttctcacgaattccgatggatcgccgatctccgccgacgacgcgttcgacaacggccagattcgtccgatttttccgattttcaaccagga

SEQ ID NO: 36459 - DNA, 204 bp, Glycine max
  Clone ID: LIB3054-001-Q1-B1-B12
atatttttccttctttttcaaaggggtggtcaaagatagttcgttctcataaaaaaaataatgtaattttttgtatcgtttgtctttgaagtttttatttatttatttttatttttcatggaagtgggtcgtgcacatttctttctttgacaatgtatttgtttgtcggttatatgaatgaaacataggaaaaagtttacattt

SEQ ID NO: 36460 - DNA, 225 bp, Glycine max
  Clone ID: LIB3054-001-Q1-B1-C2
gaagaagtttagctttttttatttttaatttccgtagaatttctgttcgagtgggtgggacaggtaacgaggaagacatcctgttggtttctgtgatatgaaaccaatttgggttgaataagcatgttttgtttggggaatgtgtgtgcattttgcttttgctttattaaatactaaattatgtgtttctgtccaccttttcaatatatcaaaagaaaataagag

SEQ ID NO: 36461 - DNA, 388 bp, Glycine max
  Clone ID: LIB3054-001-Q1-B1-C6
catcaacagcaatggcagtatatgtccttgacattctcaaggagcaatggagcccacccctaaccatttccaaggtccttttgtcaatttgctcattgttgacggatcccaaccctgatgatccactcgtaccagagattgcacacatgtacaagactgacagggccaagtatgaggctacggcccgcagctggacccagaagtatgccatgggatgaccatatagagctgtttttcaatgaagcagcaaaatcataatttatgtaaaagaacaaaagatattttgaatgaatttgaatgctttattttatattagtggaactccacagtggtaagaagagacctggtttgccaatttgtgaatattttctttgctatacactggtga

SEQ ID NO: 36462 - DNA, 353 bp, Glycine max
  Clone ID: LIB3054-001-Q1-B1-D12
tcagggaattccaattccacattttcaagaaataaggaggcaaaaatgttcatatatgaattggaattatttgttttcttattaggcctatcctgaagccaaaggaaatgagatcggaattcctcggggaattccaattccacattttcaagaaataaggaggcaaaaatgttcatatatgaattggaattatttgttttcttattaggcctatcctgaagccaaaggaaatgagatcggaagtcctcggggaattccagttccacatcggcaggagataaggaggcaaaaatgttcatatatgaattggaattatttgttttcgtattaggcctagcctgaagccaaaggaa

SEQ ID NO: 36463 - DNA, 158 bp, Glycine max
  Clone ID: LIB3054-001-Q1-B1-E3
cgtgtaatcctgaatggatggaattttgagaagtgattttgggcatgattgttatgatccgtctattttcatgtacagaggaactacgatggttttacattgttatttagactgtccatcaatcagtaatcaagcatgatactttctaaaaatttcaa

SEQ ID NO: 36464 - DNA, 299 bp, Glycine max
  Clone ID: LIB3054-001-Q1-B1-F6
cgactcaagaggatcccctcggggaattccaattccacattttcaagaaataatgaggcagaaatgttcatatatgaattggaatagttgtttctagaggccatctgaagcaaaggaaatgagatcggaattcctcggggaattccaattccacattttcaagaaataaggaggcaaaaatgttcatatatgaattggaattatttgttttcttattaggcctatcctgaagccaaaggaaatgagatcggaattcctcgggggtaccgaactcgaattccctataatgagtcgtatta

SEQ ID NO: 36465 - DNA, 304 bp, Glycine max
  Clone ID: LIB3054-001-Q1-B1-F8
cacgcgagaggatccctcggggaattccaattccacattttcaagaaataatgaggcagaaatgttcatatatgaattggaattatttggtttcctattaggcctatcctgaagccaaaggaaatgaaatcggtattccttggggaattccacttccacatttttaagaaataatgatgcaaaaatgttcatagatgaattggcactatttggtttcttagtaggcctatcctgaagccaaatgaaatgagatcagtattcctcgggggttacgagctcgaattcgctataatgagtcgtatta

SEQ ID NO: 36466 - DNA, 157 bp, Glycine max
  unsure (1)..(157): unsure at all n locations
  Clone ID: LIB3054-001-Q1-B1-G6
gcataatctttcccctttttgattcttttgtagcaatacttgggtccttgtattgcctctttttttatctttgttgggatttgcctattgtttgattcattggatttgttacgattatcaagcgtttataatttgattctttcttgtgatctaaaan

SEQ ID NO: 36467 - DNA, 358 bp, Glycine max
  Clone ID: LIB3054-001-Q1-B1-H9
tcagggaattcgaattcgacattttcaagaaataaggaggcaaaaatgttcatatatgaattggaattatttgttttcttattaggcctatcctgaagccaaaggaaatgagatcggaattcctcggggaattccaattccacattttcaagaaataaggaggcaaaaatgttcatatatgaattggaattatttgttttcttattaggcctatcctgaagccaaacgaaatgagatcggaattcctcggggaattcgaggtccacatttgtgcaggaaataacgaggcaaaaatgttcatataggaattgggattatttgttttcttagtagggctatcctgaagccaaaggaaatg

SEQ ID NO: 36468 - DNA, 310 bp, Glycine max
  Clone ID: LIB3054-002-Q1-N1-C9
tcggggaattccaattccacattttcaagaaataaggaggcaaaaatgttgataggtgaattggaattatttgttttcttattaggcctatcctgaagccaaaggaaatgagatcggaattcctcggggaattccaattccacattttcaagaaataaggaggcaaaaatgttcatatatgaattggaattatttgttttcttattaggcctatcctgaagccaaaggaaatgagatcggaattcctcggggaattccaattccacattttcaagaaataaagaggcctaaatgtgcatatcttaattga

SEQ ID NO: 36469 - DNA, 263 bp, Glycine max
  Clone ID: LIB3054-002-Q1-N1-E11
gaaccgaactcatgctcactatagctggcaccaaaatcaagggtcagtttctatggacggcgattccctttggtttttcaacacatactgtcacccaattgatgattccactgctcatgtttcacattaacacaaattcacttgtcttatgagaagaataccaaatgtcatgtcaataaattcatgagtctacaattgattgtatgtcaatactaccaacattgattaccagtatctttatatctctgtcacatttgataaat

SEQ ID NO: 36470 - DNA, 323 bp, Glycine max
  unsure (1)..(323): unsure at all n locations
  Clone ID: LIB3054-002-Q1-N1-E6
tcggggaattccaattccacattttcaagaaataaggaggcaaaaatgtgcatatatgaattggaattatttgttntcttattaggcctatcctgaagccaaaggaaatgaaatcggaattcctcgggaattcccatttcacattttcaagaaattagggagccaaaatggtcatatatgaattggaattatttggtttcttattaagcctatcctgaaaccaaaggaaatgagataccgaatttcttggggaaatccaaattccacattttaaagatatagggacgcaaatgtgcacatatgaaaatggaatatatgggttc

SEQ ID NO: 36471 - DNA, 322 bp, Glycine max
  Clone ID: LIB3054-002-Q1-N1-G1
gtttgttttttttttttttttttttttttttttttttttttttttttttttttttttttttttttttttttttttttttttatattttttttttttttttttttttttttttttttttatattttaaaaagtttttttttttaaaaaaattgggaatttttaaaaaaatttttaaaatctgtaacacttaaatatcctaaaaatgcaaaataagtttttatcattcaaaaaacttattttcttcagatgttcaccaattgaaaataaaaaaaaaggggggtattcattatttgacatatggttcaacgcatttaaattttga

SEQ ID NO: 36472 - DNA, 57 bp, Glycine max
  Clone ID: LIB3054-002-Q1-N1-H8
aaaaaaaaaaaaaaaaaaaaaaaaaaaacaaaaaagggaaggaaaaaaaaaaaaaga

SEQ ID NO: 36473 - DNA, 400 bp, Glycine max
  Clone ID: LIB3054-003-Q1-N1-A10
tcggggaattccaattccacattttcaagaataagagcaaaaatgtgatatatgaattggaattatttgttttcttattaggcctatcctgaagccaaaggaaatgagatcggaattcctcggggaattccaattccacattttcaagaaataaggaggcaaaaatgttcatatatgaattggaattatttgttttcttattaggcctatcctgaagccaaaggaaatgagatcggaattcctcggggaattccaattccacattttcaagaaataaggaggcaaaaatgttcatatatgaattggaattatttgttttcttattaggcctatcctgaagccaaaggaaatgagatcgggattcctcgggggtaccgaactcgaattccctataatgagt

SEQ ID NO: 36474 - DNA, 183 bp, Glycine max
  unsure (1)..(183): unsure at all n locations
  Clone ID: LIB3054-003-Q1-N1-A5
tcggngaattccaattccacattttcaagaaataaggaggcaaaaatgttcatatatgaattggaattatttgttttcttattaggcctatcctgaagccaaaggaaatgagatcggaattcctcggggaattccaattccacattttcaagaaataaggaggcaaaaatgttcatatatgaa

SEQ ID NO: 36475 - DNA, 385 bp, Glycine max
  Clone ID: LIB3054-003-Q1-N1-A8
tcggggaattccaattccacattttcaagaaataaggaggcaaaaatgtgcatatatgaattggaattatttgttctcttattaggcctatcctgaagccaaaggaaatgagatcggaattcctcggggaattccaattccacattttcaagaaataaggaggcaaaaatgttcatatatgaattggaattatttgttttcttattaagcctatcctgaagccaaaggaaatgagatcggaattcctcggggaattccaattccacattttcaagaaataaggaggcaaaaatgttcatatatgaattggaattatttgttttcttattaggcctatcctgaagccaaaagaaatgagatcggaatttctcgggggtaccgagct

SEQ ID NO: 36476 - DNA, 376 bp, Glycine max
  unsure (1)..(376): unsure at all n locations
  Clone ID: LIB3054-003-Q1-N1-C8
tcggggaattccaattncacattttcaagaattaaggaggcaaaatgtgcatagatgaattggaataatttgttttcttattaggcctatcctgaagccaaaggaaatgagatcggaattcctcggggaattccaattccacattttcaagaaataaggaggcaaaaatgttcatatatgaattggaattatttgttttcttattaggcctatcctgaagccaaaggaaatgagatcggaattcctcggggaattccaattccacattttcaagaaataaggaggcaaaaatgttcatatatgaattggaattatttgttttcttattaggcctatcctgaagccaaaggaaatgagatcggaattcctcgggggt

SEQ ID NO: 36477 - DNA, 327 bp, Glycine max
  Clone ID: LIB3054-003-Q1-N1-D2
tcggtgaattccaattccacattttcaagaaataaggaggcaaaagatgggcatatatgaattggaattatttgttctcttattaggcctatcctgaagccaaaggaaatgagatcggaattcctcggggaattccaattccacattttcaagaaataaggaggcaaaaatgttcatatatgaattggaattatttgttttcttattaggcctatcctgaagccaaaggaaatgagatcggaattcctcggggaattccaattccacattttcaagaaataaggaggcaaaaatgttcatatatgaattggaattatttgatttctt

SEQ ID NO: 36478 - DNA, 353 bp, Glycine max
  unsure (1)..(353): unsure at all n locations
  Clone ID: LIB3054-003-Q1-N1-F6
tcggngaattccaattccacattttcaagaaataaggaggcaaaaatgttgatatgtgaattggaattatttgttttcttattaggcctatcctgaagccaaaggaaatgagatcggaattcctcggggaattccaattccacattttcaagaaataaggaggcaaaaatgttcatatatgaattggaattatttgttttcttattaagcctatcctgaagccaaaggaaatgagatcggaattcctcggggaattccaattccacattttcaagaaattaagaagcaaaaatggtcatatatgaattggaattatttggtttcttattaaggccattcctgaacccaaagga

SEQ ID NO: 36479 - DNA, 396 bp, Glycine max
  Clone ID: LIB3054-004-Q1-N1-B11
tcggggaattccaattccacattttcaagaaataaggaggcaaaaatgttcatatatgaattggaattatttgttttcttattaggcctatcctgaagccaaaggaaatgagatcggaattcctcggggaattccaattccacattttcaagaaataaggaggcaaaaatgttcatatatgaattggaattatttgttttcttattaggcctatcctgaagccaaaggaaatgagatcggaattcctcggggaattccaattccacattttcaagaaataaggaggcaaaaatgttcatatatgaattggaattatttgttttcttattaggcctatcctgaagccaaaggaaatgagatcggaattcctcgggggtaccgagctcgaattcccta

SEQ ID NO: 36480 - DNA, 366 bp, Glycine max
  Clone ID: LIB3054-004-Q1-N1-C12
tcggggaattccaattccacattttcaagaaataaggaggcaaaaatgttcatatatgaattggaattatttgttttcttattaggcctatcctgaagccaaaggaaatgagatcggaattcctcggggaattccaattccacattttcaagaaataaggaggcaaaaatgttcatatatgaattggaattatttgttttcttattaggcctatcctgaagccaaaggaaatgagatcggaattcctcggggaattccaattccacattttcaagaaataaggaggcaaaaatgttcatatatgaattggaattatttgttttcttattaggcctatcctgaagccaaaggaaatgagatcggaat

SEQ ID NO: 36481 - DNA, 376 bp, Glycine max
  Clone ID: LIB3054-004-Q1-N1-C2
tcgggaattccaattccacattttcaagaaataaggaggcaaaaatggtcatatatgaattggaagtatgtgttttcttattaggcctatcctgaagccaaaggaaatgagatcggaattcctcggggaattccaattccacattttcaagaaataaggaggcaaaaatgttcatatatgaattggaattatttgttttcttattaggcctatcctgaagccaaaggaaatgagatcggaattcctcggggaattccaattccacattttcaagaaataaggaggcaaaaatgttcatatatgaattggaattatttgttttcttattaggcctatcctgaagccaaaggaaatgagatcggaattcctcgggggt

SEQ ID NO: 36482 - DNA, 365 bp, Glycine max
  unsure (1)..(365): unsure at all n locations
  Clone ID: LIB3054-004-Q1-N1-C4
cgactaacgttcattccaagatatgtcaatctcatgatggatgcgttaanacagggagtggcaaattttgcagctcgttatccgaatcctgagagtgagtatggatggtgtattgactctgattctgaagccctaaaaggcttcttgaagatgcctacaacatttgccgagtaacatggtatgcccaatgaaaaagttgcacacatagatgcgtctactacttcgaataaatgtgtgctccatgcaatacgtagtcacagtttccaactcaattggtaatgatggttcatgattgtatttgagcctacaagtaatttttcttttggaactcgatatccaagtgttctttggatatatgaattatt

SEQ ID NO: 36483 - DNA, 384 bp, Glycine max
  Clone ID: LIB3054-004-Q1-N1-C7
tcggtgaattccaattacacattttcaagaaataaggaggctaaaatgggcatgtatgaattggaatcagttgttttcttattaagcctatcctgaagccaaaggaaatgagatcggaattcctcggggaattccaattccacattttcaagaaataaggaggcataaatgttcatatatgaattggaattatctgttatcttattaggcctatcctgaagccaaaggaaatgagatcggaattcctcggggaattccaattccacattttcaagaaataaggaggcaaaaatgttcatatatgaattggaattattcgttttcttattaggcctatcctgaagccaaaggaaatgagatcggaattcctcgggggtaccgagc

SEQ ID NO: 36484 - DNA, 393 bp, Glycine max
  Clone ID: LIB3054-004-Q1-N1-D1
tcggggaattccaattccacattttcaagaaataaggaggcagaaatggtcatatatgaattggaattatttgttttcttattaggcctatcctgaagccaaaggaaatgagatcggaattcctcggggaattccaattccacattttcaagaaataaggaggcaaaaatgttcatatatgaattggaattatttgttttcttattaggcctatcctgaagccaaaggaaatgagatcggaattcctcggggaattccaattccacattttcaagaaataaggaggcaaaaatgttcatatatgaattggaattatttgttttcttattaggcctatcctgaaaccaaaggaaatgagatcggaattcctcgggggtaccgagctcgatttcc

SEQ ID NO: 36485 - DNA, 372 bp, Glycine max
  Clone ID: LIB3054-004-Q1-N1-D2
atcccgtcggtgaattccaattgctcattttcaagaaataaggaggcaaaaatagtcatgtatgaattggaagtaggtgttttcttattaagcctatcctgaagccaaaggaaatgagatcggaattcctcggggaattccaattccacattttcaagaaataaggaggcaaaaatgttcatatatgaattggaattatttgttttcttattaggcctatcctgaagccaaaggaaatgagatcggaattcctcggggaattccaattccacattttcaagaaataaggaggcaaaaatgttcatatatgaattggaattatttgttttcttattaggcctatcctgaagccaaaagaaatgagatcggaat

SEQ ID NO: 36486 - DNA, 275 bp, Glycine max
  Clone ID: LIB3054-004-Q1-N1-D6
tcggtgaattccattgcctcattttcaagaaataaggagtcaagaatggtcatatatgaatgggggttatttgttttcttattaggcctatcctgaacccaaaggaaatgagatcggaattcctcggcgaattccaattccacattttcaagaaataaggaggcaaaaatgttcatatatgaattgtaattatatgctttcttattaggcctatcctgaatccaatggaaatgagatcggaattccttctgaaattccaattccacattttcaag

SEQ ID NO: 36487 - DNA, 310 bp, Glycine max
  Clone ID: LIB3054-004-Q1-N1-E6
tcggggaattccaattcctcattttcaagaaataaggaggcaggaatggtcatatatgaattggaattatctgttttcttattaggcctatcctgaagccaaaggaaatgagatcggaattcctcggggaattccaattccacattttcaagaaataaggaggcaaaaatgttcatatatgaattggaattatttgctttcttattaggcctatcctgaagccaaaggacatgagatcggaattcctcggggaattccaattccacattttcaagatataaggaggcacatatgttcatatatgatttgc

SEQ ID NO: 36488 - DNA, 370 bp, Glycine max
  Clone ID: LIB3054-004-Q1-N1-F11
tcggggaattccaattccacattttcaagaaataaggaggcaaaaatgttcatatatgaattggaattatttgttttcttattaggcctatcctgaagccaaaggaaatgagatcggaattcctcggggaattccaattccacattttcaagaaataaggaggcaaaaatgttcatatatgaattggaattatttgttttcttattaggcctatcctgaagccaaaggaaatgagatcggaattcctcggggaattccaattccacattttcaagaaataaggaggcaaaaatgttcatatatgaattggaattatttgttttcttattaggcctatcctgaagccaaaggaaatgagatcggaattcct

SEQ ID NO: 36489 - DNA, 398 bp, Glycine max
  Clone ID: LIB3054-004-Q1-N1-G7
tcggggaattccaattccacattttcaagaaataaggaggcaaaaatgtgtcatatatgaattggaattatttgttttcttattaggcctatcctgaagccaaaggaaatgagatcggaattcctcggggaattccaattccacattttcaagaaataaggaggcaaaaatgttcatatatgaattggaattatttgttttcttattaggcctatcctgaagccaaaggaaatgagatcggaattcctcggggaattccaattccacattttcaagaaataaggaggcaaaaatgttcatatatgaattggaattatttgttttcttattaggcctatcctgaagccaaaggaaatgagatcggaattcctcgggggtaccgagctcgaattccctat

SEQ ID NO: 36490 - DNA, 388 bp, Glycine max
  unsure (1)..(388): unsure at all n locations
  Clone ID: LIB3054-004-Q1-N1-G9
tcggggaattccaattccacattttcaaganataaggaggcaaaaatgttcatatatgaattggaattatttgttttcttattaggcctatcctgaagccaaaggaaatgagatcggaattcctcggggaattccaattccacattttcaagaaataaggaggcaaaaatgttcatatatgaattggaattatttgttttcttattaggcctatcctgaagccaaaggaaatgagatcggaattcctcggggaattccaattccacattttcaagaaataaggaggcaaaaatgttcatatatgaattggaattatttgttttcttattaggcctatcctgaagccaaaggaaatgagatcggaattcctcgggggtaccgagctcga

SEQ ID NO: 36491 - DNA, 364 bp, Glycine max
  Clone ID: LIB3054-005-Q1-N1-B4
tcggggaattccaattccacattttcaagaaataaggaggcaaaaatgttcatatatgaattggaattatttgttttcttattaggcctatcctgaagccaaaggaaatgagatcggaattcctcggggaattccaattccacattttcaagaaataaggaggcaaaaatgttcatatatgaattggaattatttgttttcttattaggcctatcctgaagccaaaggaaatgagatcggaattcctcggggaattccaattccacattttcaagagataacgacgcaaatatgttcatatatgaattggaattatctgttatcttattaggcctatcctgaagccaaaggaaatgagatcgga

SEQ ID NO: 36492 - DNA, 328 bp, Glycine max
  Clone ID: LIB3054-005-Q1-N1-B5
tcggggaattccaattccacattttcaagaattaaggaggcaaaaatgtgcagttttgattgggaataattggtttcctaattaggctattcttgaacccaagggaatgggatcgggatttcttggggaattccaatttcacatatttaaaaaataaggaggcgaaaatgttcatatatgaattgggattatttgtgttcttattatgcctatactgaaacccaaggaaatgagatcggaatttctcggggaattccaattccacattttcaagaaataaagaggcgaaaatgtgcatatatgaattgggattatttgggttcttatt

SEQ ID NO: 36493 - DNA, 148 bp, Glycine max
  Clone ID: LIB3054-005-Q1-N1-C1
tacataaggactgcttttgaatgttgtcacccttcatatgatattgtgatgtatggtttatttcattttggctatgtcttgaaattaaaattctcgttgccttctcccagatttgcacttaataggattgccatattctttttctaaa

SEQ ID NO: 36494 - DNA, 298 bp, Glycine max
  Clone ID: LIB3054-005-Q1-N1-G4
cgctgagttgaaggtcaaggaactcaagaacggtcgcttggctatgttctccatgtttggtttctttgttcaggccattgtcactggcaagggccctattcagaacctttacgaccatgttgctgatcctgttgccaacaatgcttgggcttatgccactaactttgtccctggacaatgagcattgcaattcaatgcaatcttctgctcccattttctctaatgtaactacacctgtgtaccagaagaatctgtatgagaaccattatattatatatattagaaatttctgtcccta

SEQ ID NO: 36495 - DNA, 196 bp, Glycine max
  Clone ID: LIB3054-005-Q1-N1-H4
attaaagctgtattatctttcaaatgtcagtggaagattaattgtgtaatcctttggttatagtcctggttgtctctcatttgagcttcatttagatatatgtaatttttgccttgaggcttctcatatacctttactggaaaacatgatctgatcaaaagctgacattcaatgtgtcacaaatttgaaaatccaa

SEQ ID NO: 36496 - DNA, 439 bp, Glycine max
  Clone ID: LIB3054-005-Q1-N1-H7
tcggggaattccaattccttattttcaagaaataaggaggcaaaaatgtgcatgtatgaattggaattatttgttttcttattaggcctatcctgaagccaaaggaaatgagatcggaattcctcggggaatcccaattccacattttcaagatataatgaggcatatatgttcatatattatttggaattatttgtcttctatattatgcctatcttttatctaattgcttttttacctttatttctttgctcttcttttttttttttttttttttttttttttctctctttttgttttttatatttatttattattttacttttttttatttttttttattctttttttttcttttttaattttatttttcttttttttttcttctttttctatttcatttttattatcttctatttctttcttttttttttttttt

SEQ ID NO: 36497 - DNA, 364 bp, Glycine max
  Clone ID: LIB3054-005-Q1-N1-H8
tcggggaattccaattccacattttcaagaaataaggaggcaaaaatgtgcatatatgaattggaattatttgttttcttattaggcctatcctgaagccaaaggaaatgagatcggaattcctcggggaattccaattccacattttcaagaaataaggaggcaaaaatgttcatatatgaattggaattatttgttttcttattaggcctatcctgaagccaaaggaaatgagatcggaattcctcggggaattccaattccacattttcaagaaataaggaggcaaaaatgttcatatatgaattggaattatttggtttcttattaggcctatcctgaagccaaaggaaatgagatcgga

SEQ ID NO: 36498 - DNA, 377 bp, Glycine max
  Clone ID: LIB3054-006-Q1-N1-A3
tcggggaattccaattccacattttcaagaaataaggaggcaaaaatgttcatatatgaattggaattatttgttttcttattaggcctatcctgaagccaaaggaaatgagatcggaattcctcggggaattccaattccacattttcaagaaataaggaggcaaaaatgttcatatatgaattggaattatttgttttcttattaggcctatcctgaagccaaaggaaatgagatcggaattcctcggggaattccaattccacattttcaagaaataaggaggcaaaaatgttcatatatgaattggaattatttgttttcttattaagcctatcctgaagccaaaagaaatgagatcggaattcctcgggggt

SEQ ID NO: 36499 - DNA, 252 bp, Glycine max
  Clone ID: LIB3054-006-Q1-N1-A9
tcggggaattccaattcttcattttcaagaaataaggaggcaaaaatgtgcatatatgaattggaattatttgttttcttattaggcctatcctgaagccaaaggaaatgagatcggaattcctcgtggaattccaattccacattttcaagaaataaggaggcaaaaatgttcatatatgaattggaattatttgtttccttattaggcctatcctgaatcccaatgacatgcgatctgaattcctcgggg

SEQ ID NO: 36500 - DNA, 298 bp, Glycine max
  Clone ID: LIB3054-006-Q1-N1-B11
agaagagcttggttgatgtttcttggtatggcctatgggatgaatgaacgatataatgcgtttctgtaattcatttacttctctcaaaaaaaaaaatatatgcctgtcatccattactgaacatgttgacatgtgaattaactccagacctttattttcatgtcttccatatttacacaaagctctaccaaatatatgcttcactagacatctgcattattgccattatgttcaaatatgataaccgttacactgattacacaatctatacttcatatacttaaaatttttaatccta

SEQ ID NO: 36501 - DNA, 338 bp, Glycine max
  Clone ID: LIB3054-006-Q1-N1-E11
tcggggaattccaattccacattttcaagaaataaggaggcaaaaatgtgcatatatgaattggaattatttgttttcttattaggcctatcctgaagccaaaggaaatgagatcggaattcctcggggaattccaattccacattttcaagaaataaggaggcaaaaatgttcatatatgaattggaattatttgttttcttattaggcctatcctgaagccaaaggaaatgagatcggaattcctcggggaattccaattccacattttcaagaaataaggaggcaaaaatgttcatatatgaattggaattatttgtattcttattaggcctatc

SEQ ID NO: 36502 - DNA, 354 bp, Glycine max
  Clone ID: LIB3054-006-Q1-N1-G10
tcggggaatttttattcttcattttcaagaaataaggagggggaaatgttcatatatgaattggaattatttgttttcttattaggcctatcctgaagccaaaggaaatgagatcggaattcctcggggaattccaattccacattttcaagaaataaggaggcaaaaatgttcatatatgaattggaattatttgttttcttattaggcctatcctgaagccaaaggaaatgagatcggaattcctcggggaattccaattccacattttcaagaaataaggaggcaaaaatgttcatatatgaattggaattatttgttttcttattaagcctatcctgaagccaaaagaaa

SEQ ID NO: 36503 - DNA, 371 bp, Glycine max
  Clone ID: LIB3054-006-Q1-N1-G8
tcggggaattccaattcctcattttcaagaaataaggaggcaaaaatgtgcatatatgaattggaattatttgttttcttattaggcctatcctgaagccaaaggaaatgagatcggaattcctcggggaattccaattccacattttcaagaaataaggtggcaaaaatgttcatatatgaataggaattatttgttttcttattaggcctatcctgaagccaaaggaaatgagatcggaattcctcggtgaattccaattccacattttcaaggtataaggaggcaaaaatgatcatatatgaactggaattatttgccgactgattaggcctatcctgaatcctttggatatgagatcggaatttcta

SEQ ID NO: 36504 - DNA, 315 bp, Glycine max
  unsure (1)..(315): unsure at all n locations
  Clone ID: LIB3054-007-Q1-N1-A11
tcggggaattccaattccacattttcaagaaataaggaggcaaaaatgttcatatatgaattggaattatttgttttcttattaggcctatcctgaagccaaaggaaatgagatcggaattcctcggngaattccaattccacattttcaagaaataaggaggcaaaaatgttcatatatgaatgggaataattggtttcctaataaggccattcttgaacccaaaggaatgaaaaccggatttcttcgggaattccaatttcacattttcaagaaataaagaggcaaaaatgttcatatattgaattggaatta

SEQ ID NO: 36505 - DNA, 267 bp, Glycine max
  Clone ID: LIB3054-007-Q1-N1-B12
tcggggaattccaattctacattttcaagaaataaggaggcaaaaatgttcatatatgaattggaattatttgttttcttattaggcctatcctgaagccaaaggaaatgagatcggaattcctcggggaattccaattccacattttcaagaaataaggaggcaaaaatgttcatatatgaattggaattatttgttttcttattaggcctatcctgaagccaaaggatatgagatcggaattcctcggtgatttcgaattttaca

SEQ ID NO: 36506 - DNA, 99 bp, Glycine max
  Clone ID: LIB3054-007-Q1-N1-B8
tcggggaattcctattccttattttcaagaaataaggaggcaaaaatgttcatatatgaattggaatgattagatgtcttattaggcctatcctgaagc

SEQ ID NO: 36507 - DNA, 308 bp, Glycine max
  Clone ID: LIB3054-007-Q1-N1-C7
tcggggaattccaattccacattttcaagaaataaggaggcaaaaatgttcatatatgaattggaattatttgttttcttattaggcctatcctgaagccaaaggaaatgagatcggaattcctcggggaattccaattccacattttcaagaaataaggaggcaaaaatgttcatatatgaattggaattatttgttttcttaataagcctatcctgaagccaaaggaaatgagatcggaatttctcggggaatttcaattccacattttcaagaaataaggaggcaaaaatgttcatatatgaatt

SEQ ID NO: 36508 - DNA, 209 bp, Glycine max
  Clone ID: LIB3054-007-Q1-N1-D3
tgtttgcttttgctgctgtatatatggactacgccttcttttgtttgaattatgcaatgtaaagttgcaaaaaactcttgctgtgtatcgattttgtagtttgttgattgtttttggatgaattttgacagctttttgttaacatgaagggaaccatgatgggaattagcacttcgatttcgtgttcggctatgactgccgtgcatatt

SEQ ID NO: 36509 - DNA, 78 bp, Glycine max
  unsure (1)..(78): unsure at all n locations
  Clone ID: LIB3054-007-Q1-N1-E4
tcggggaattccaattcctcatnctcaagaaataaggaggcaaaaatgttcatatgtgaattgtgaataggtgttatt

SEQ ID NO: 36510 - DNA, 370 bp, Glycine max
  Clone ID: LIB3054-007-Q1-N1-E6
tcggggaattccaattccacattttcaagaaataaggaggcaaaaatgttcatatatgaattggaattatttgttttcttattaggcctatcctgaagccaaaggaaatgagatcggaattcctcggggaattccaattccacattttcaagaaataaggaggcataaatgttcatatatgaattggaattatttgtattcttattatgcctatcctgaagccaaaggaaatgagatcggaattcctaggggaatttccaatttcacattttcaagaaatagtgaggcgaaaatttttatatatgaattgtaattattggtattaatattaagcctatcctgaagccaaaggaaatgagatccgaattcc

SEQ ID NO: 36511 - DNA, 310 bp, Glycine max
  Clone ID: LIB3054-007-Q1-N1-F3
tcggggaattccaattccacattttcaagaaataaggaggcaaaaatgttcatatatgaattggaattatttgttttcttattaggcctatcctgaagccaaaggaaatgagatcggaattcctcggggaattccaattccacattttcaagaaataaggaggcaaaaatgttcatatatgaattggaattatttgttttcttattaggcctatcctgaagccaaaggaaatgagatcggaattcctcggggaattccaattccacattttcaagaaataaaggtgcaaaaatggtcatatatgaattgg

SEQ ID NO: 36512 - DNA, 344 bp, Glycine max
  Clone ID: LIB3054-007-Q1-N1-F8
ctttaaaaaaatcattttcctttaaacttcaattttagagttctctctctgattcatccccagcaatggcttgtgcattgcaagcaaccttagcagccaacgcctatgtcttttcttccaggagattctccttgaagctccaaaagaacagtaagagaaggttttctttgttcactgttagagttgattctgatgaatctgattgcaatgaggaagaatgtgccccggataaggaaatagggaagggcagtgtggaatggttagctggggagaagacgaaagtagtgggtacattcccacctcgtcgtaagccgggttggactggctatgttgagaaggacact

SEQ ID NO: 36513 - DNA, 385 bp, Glycine max
  Clone ID: LIB3054-008-Q1-N1-A4
ttggggaattccaattccacattttcaagaaataaggaggcaaaaatgttcatatatgaattggaattatttgttgtcttattaggcctatcctgaagccaaaggaaatgagatcggaattcctcggggaattccaattccacattttcaagaaataaggaggcaaaaatgttcatatatgaattggaattatttgttttcttattaggcctatcctgaagccaaaggaaatgagatcggaattcctcggggaattccaattccacattttcaagaaataaggaggcaaaaatgttcatatatgaattggaaataattggtttcttattaggcctatcctgaagccaaaggaatgggaacggaattcttcgggggtaccgagctc

SEQ ID NO: 36514 - DNA, 397 bp, Glycine max; identical to SEQ ID NO: 35769
  Clone ID: LIB3054-008-Q1-N1-D1

SEQ ID NO: 36515 - DNA, 226 bp, Glycine max
  Clone ID: LIB3054-008-Q1-N1-D12
aggatttctgttagacaaaccctgctgatgaggaatgcagagtttatgaatagaggagagctccttttctaacgtatcatgtgaaaaagaaggaaattgttcagacagtctatctgaggagagattttcaaagtttatatttatttgcagccaataataagttttggcgtgactgaatgaatatcacccatatattgattgatattgaatttctgaattcttgtaa

SEQ ID NO: 36516 - DNA, 324 bp, Glycine max
  Clone ID: LIB3054-008-Q1-N1-E2
tcggggaattccaattccacattttcaagaaataaggaggcaaaaatgtgcatatatgaattggaattatttgttttcttattaggcctatcctgaagccaaaggaaatgagatcggaattcctcggggaattccaattccacattttcaagaaataaggaggcaaaaatgttcatatatgaattggaattatttgttttcttattaggcctatcctgaagccaaaggaaatgagatcggaattcctcggggaattccaattccacattttcaagaaataaagaggcaaaaatgttcatatatgaattggaattatttggtttc

SEQ ID NO: 36517 - DNA, 386 bp, Glycine max
  Clone ID: LIB3054-008-Q1-N1-G6
tcggggaattccaattccacattttcaagaaataaggaggcaaaaatggtcatatatgaattggaattatttgttttcttattaggcctatcctgaagccaaaggaaatgagatcggaattcctcggggaattccaattccacattttcaagaaataaggaggcaaaaatgttcatatatgaattggaattatttgttttcttattaggcctatcctgaagccaaaggaaatgagatcggaattcctcggggaattccaattccacattttcaagaaataaggaggcaaaaatgttcatatatgaattggaattatttgttttcttattaggcctatcctgaagccaaaggaaatgagatcggaattcctcgggggtaccgagctc

SEQ ID NO: 36518 - DNA, 385 bp, Glycine max
  Clone ID: LIB3054-008-Q1-N1-G8
tcggggaattccaattcctcattttcaagaaataaggaggcaaaaatgtgcatatatgaattggaattatttgttttcttattaggcctatcctgaagccaaaggaaatgagatcggaattcctcggggaattccaattccacattttcaaggaattagggagcaaaaatgttcatatatgaattggaattatttggtttcttattaggcctatcctgaagccaaaggaaatgagatcggaattcctcggggaattccaattccacattttcaagaaataaggaggcgcaaatgtgcatatatgaattgggattatatgggttcttattaggcctatactgaaaccccaggggatgtgatcgggatttctctggggtacccagct

SEQ ID NO: 36519 - DNA, 378 bp, Glycine max
  Clone ID: LIB3054-008-Q1-N1-H1
tcggggaattccaattccacattttcaagaaataaggaggcaaaaatgtgcatatatgaattggaattatttgttttcttattaggcctatcctgaagccaaaggaaatgagatcggaattcctcggggaattccaattccacattttcaagaaataaggaggcaaaaatgttcatatatgaattggaattatttgttttcttattaggcctatcctgaagccaaaggaaatgagatcggaattcctcggggaattccaattccacattttcaagaaataaggaggcaaaaatgttcatatatgaattggaattatttgttttcttattaggcctatcctgaagccaaaggaaatgagatcggaattcctcgggggta

SEQ ID NO: 36520 - DNA, 350 bp, Glycine max
  Clone ID: LIB3054-008-Q1-N1-H6
gaaaaattactatgacaaggtttttgaaggacaccatgggctacttaattaatttggcaatcatggaagattaagtgctttaatttgggtgggaattaagtatgaaattgaagccactgcttcttcaactagtttgatgcatgtatgatgtatctattattaggttgtcgatcttctgggaaatatgtgtatttatatctagtactatatatatggtatcttaatcaagtttgtattgattttcttggttgttgagataacatatatgtaatatgctctcctttcagccagcttgaatgtgcacaagtgaacttgttacgctatataatgaaatgatgtattgctcgata

SEQ ID NO: 36521 - DNA, 389 bp, Glycine max
  unsure (1)..(389): unsure at all n locations
  Clone ID: LIB3054-009-Q1-N1-C2
tcggngaattccaattccacattttcaagaaataaggaggcaaaatgttcatttatgaattggaattatttgttntcttattaggcctatcctgaagccaaaggaaatgagatcggaattcctcggngaattccaattccacattttcaagaaataaggaggcaaaaatgttcatatatgaattggaattatttgttttcttattaggcctatcctgaagccaaaggaaatgagatcggaattcctcggggaattccaattccacattttcaagaaataaggaggcaaaaatgttcatatatgaattggaattatttgttttcttattaggcctatcctgaagccaaaggaaatgagatcggaattcctcggngaattccaattccaca

SEQ ID NO: 36522 - DNA, 330 bp, Glycine max
  Clone ID: LIB3054-009-Q1-N1-C5
tcggggaattccaattccacattttcaagaaataaggaggcaaaaatggtcatatatgaattggaattatttgttttcttattaggcctatcctgaagccaaaggaaatgagatcggaattcctcggggaattccaattccacattttcaagaaataaggaggcaaaaatgttcatatatgaattggaattatttgttttcttattaggcctatcctgaagccaaaggaaatgagatcggaattcctcggggaattccaattccacatcttcaagaattatggaggcaaatatgttcatatgtgatttggaattattcgtgttcttatta

SEQ ID NO: 36523 - DNA, 309 bp, Glycine max
  Clone ID: LIB3054-009-Q1-N1-C6
tcggtgaattccaattcctcattttcaagaaataaggaggcaaaggatggtcatatatgaattggaattatttgttttcttattaggcctatcctgaagccaaaggaaatgagatcggaattcctcggggaattccaattccacattttcatgacataaggaggcaaaaatgttcatatatgaattggaattatttgttatcatattaggcctatcctgaagccaaatgaaatgcgatcggaattcctcgagtaattccaactccacattttcaatgatgtagggatgcatgtttcgttcatatatgaa

SEQ ID NO: 36524 - DNA, 220 bp, Glycine max
  Clone ID: LIB3054-009-Q1-N1-D7
gatagacaaatagggagaggaggttggtccgctgccagaggaggattctgtacatgtatatatgtgttgattatataccaaacactggaaaccttagagggagatagaatgagtggtgggtacttaatgggttggtgaaatgaggatgaatatgttgttattgctattatttctctgtcttagccatttaatcaataaaatttcccattttttctgttaa

SEQ ID NO: 36525 - DNA, 221 bp, Glycine max
  Clone ID: LIB3054-009-Q1-N1-D8
gatagacaatagggagaggaggttggtccgctgccagaggaggattctgtacatgtatatatgtgttgattatataccaaacactggaaaccttagagggagatagaatgagtggtgggtacttaatgggttggtgaaatgaggatgaatatgttgctattgctattatttctctgtcttagccatttaatcaataaaatttcccattttttctgataaag

SEQ ID NO: 36526 - DNA, 361 bp, Glycine max
  Clone ID: LIB3054-009-Q1-N1-H7
attggaatgatatgttttcttattaggcctatcctgaagccaaaggaaatgagatcggaattcctcggggaattccaattccacattttcaagaaataaggaggcaaaaatgttcatatatgaattggaattatttgttttcttattaggcctatcctgaagccaaaggaaatgagatcggaattcctcggggaattccaattccacattttcaagaaataaggaggcaaaaatgttcatatatgaattggaattatttgttttcttattaggcctatcctgaagccaaaggaaatgagatcggaattccctcggggtaccgaactcgaattcctatagtgagtcgtttaaattcgtaatc

SEQ ID NO: 36527 - DNA, 417 bp, Glycine max
  Clone ID: LIB3054-010-Q1-N1-A1
tcggggaattccaattccacattttcaagaaataaggaggcaaaaatgtgcatatatgaattggaattatttgttttcttattaggcctatcctgaagccaaaggaaatgagatcggaattcctcggggaattccaattccacattttcaagaaataaggaggcaaaaatgttcatatatgaattggaattatttgttttcttattaggcctatcctgaagccaaaggaaatgagatcggaattcctcggggaattccaattccacattttcaagaaataaggaggcaaaaatgttcatatatgaattggaattatttgttttcttattaggcctatcctgaagccaaaggaaatgagatcggaattcctcggggaattccaattccacattttcaagaaataaggaggcaaaaatg

SEQ ID NO: 36528 - DNA, 418 bp, Glycine max
  unsure (1)..(418): unsure at all n locations
  Clone ID: LIB3054-010-Q1-N1-A2
tcggggaattccaattccatatttttaagaaataaggaggcaaaaatgttgatatgtgaattggaattatttgttttcttattaggcctatcctgaagccaaaggaaatgagatcggaattcctcggggaattccaattccacattttcaagaaataaggaggcaaaaatgttcatatatgaattggaattatttgttttcttattaggcctatcctgaagccaaaggaaatgagatcggaattcctcggggaattccaattccacattttcaagaaataaggaggcaaaaatgttcatatatgaattggaattatttgttttcttattaggcctatcctgaagccaaaggaaatgagatcggaattcctcggngaattccaattccacattntcaagaaataaggaggcaaaaatgt

SEQ ID NO: 36529 - DNA, 197 bp, Glycine max
  Clone ID: LIB3054-010-Q1-N1-C9
tcggtgaatggctattccttattgccaagaaataaggatgcatgaatgtgcatatatgaattgggatcatgtgcttacttattaggcctatcctgaagccaaaggacatgagatcggaatccctcggggaattccaattccacattgtcaagaaataaagacgcaaacgatgtcatatatgaaatggaattatttgt

SEQ ID NO: 36530 - DNA, 406 bp, Glycine max
  Clone ID: LIB3054-010-Q1-N1-E5
tcggggaattccatttccatattttcaagaaatacggaggcaaagctgtgcatatatgaatggccactactgcttctccaattaccactcttcttgaacaccctctattgctcttgctcccttggtgtagtttgtgtaaaagggtatctctatttatagagtttccattgtctctggaggcaattttcgaccttaggtgtgttttggagagtttttttttttttttttgtgttgtttagttgttgaggttggttggtttgtgagagagagaatggtgggtgctctatctgttgtgggatcatcagtaatggactctcacactggcccttgtttgtgtgtggatgctctcccaacaacaactagtgtcaatctcaagagtggtggacatgttgatttgtgcaagaat

SEQ ID NO: 36531 - DNA, 118 bp, Glycine max
  Clone ID: LIB3054-010-Q1-N1-E7
ataggctctaaacgtctctttatttaacttgtccatcagtagaataatcatcattttcaattattggcacacacacacggcttacagatcagagttaggtacaacatccattctgctt

SEQ ID NO: 36532 - DNA, 52 bp, Glycine max
  Clone ID: LIB3054-010-Q1-N1-F4
atcccttccaactcccaatttataatggattttctgctgaatttattttgca

SEQ ID NO: 36533 - DNA, 370 bp, Glycine max
  Clone ID: LIB3054-010-Q1-N1-G8
tcggggaatgcctattccttattttcaagaaataaggaggcagggaatgggcatatatgaattggaattatttgttttcttattaggcctatcctgaagcctaaggatatgagatcggaattcctcggggattcccaattccacatttttatgaaataatgaggcaaaaatgttcatatatgaattgtaattattcggtaacttattaggcctatcctgaatccaaatgaaatgatatcggaattcctcggggaattccaattccacatttccaagaactaccgacgcacatatgttcatatatgaatcgtaattatctgtactcttattaggcctatcatgaagccaagagaaatgagatcgcaattcc

SEQ ID NO: 36534 - DNA, 323 bp, Glycine max
  Clone ID: LIB3054-010-Q1-N1-H3
tcggggaattccaattcccatttttaagaaattaaggaggcaaaatggtgattttttaaatgggaataattggtttcctaattaggcctatcctgaacccaaaggaaatgaaatcggaattcctcggggaattccaattccacattttcaagaaataaggaggcaaaaatgttcatatatgaattggaattatttgtttcttattaggcctatcctgaaaccaaaagaaatgagatcggaattccttcgggaattccaattccacattttcaagaaataaggaagcaaaaatgttcatatatgaattggaattaatttgtttc

SEQ ID NO: 36535 - DNA, 253 bp, Glycine max
  Clone ID: LIB3054-011-Q1-N1-D1
ataagtttctccgttaggtccccttggaagccagacttttttatgcaattggcggatggtattggaactttgtaggttctgattggtttgatttttttccttttattcgattttcttgttgtggccaagaattaggtgcctcgagttaggagaacgatagtctagtatcttttctcccagagggatttttgagtcagtttctgtttatatttattatatgcttaattggtttttatgtttgcattaaactcag

SEQ ID NO: 36536 - DNA, 155 bp, Glycine max
  Clone ID: LIB3054-011-Q1-N1-D10
acgagtttatattactagttccacagaaatggatagaagatcttattcataatttttagcaatttatacatgcatttattgtattttgtaaacatgctttaaggtcattttgtaacatgaatagaatattcaatccaatatttcttattgatatt

SEQ ID NO: 36537 - DNA, 155 bp, Glycine max
  Clone ID: LIB3054-011-Q1-N1-D11
acgggtttatattactagttccacagaactggatacaagatcttattcataatttttagcaatttatacatgcattaattgtattttgtaaacatgctttaaggtcattttgtaacatgaatagaatattcaatccaatatttcttattgatatt

SEQ ID NO: 36538 - DNA, 247 bp, Glycine max
  Clone ID: LIB3054-011-Q1-N1-D2
tttttcgttaggtccccttggaagccagactttgttatgcaattggcggatggtattggaactttgtaggttctgattggtttgatttttttccttttattcgattttcttgttgtggccaagaattaggtgcctcgagttaggagaacgatagtctagtatcttttctcccagagggatttttgagtcagtttctgtttatatttattatatgcttaattggtttttatgtttgcattaaactcag

SEQ ID NO: 36539 - DNA, 138 bp, Glycine max
  Clone ID: LIB3054-011-Q1-N1-D8
gtgctgtgagaataacagtgtgttctggtcatgcatgcatgctgagagaaacaatgtatgtcggtcttaaaaagttcactgtatttgcataaactatatgtactaaataatggatttacaagtgtgttttttttataa

SEQ ID NO: 36540 - DNA, 299 bp, Glycine max
  Clone ID: LIB3054-011-Q1-N1-D9
caacatatggctgtagtagtattcacctaaatgtttcaagtgaagagttggattatatatagcaactaaataccggtatctggttatttttaattagctgctaaggatttcttatgtatctgctggttgttcatgtttgaatcggaagccctgatgttcctaatgtattttatatagttttttaaggcacttcgtggtgcttaaggtggtttactgcactagaagctctaaattatttgttttgaattttgatgtctaaataattgattagtaagcaaataatcttttcttccttgtga

SEQ ID NO: 36541 - DNA, 364 bp, Glycine max
  Clone ID: LIB3054-011-Q1-N1-E1
tcggggaattccaattccacattttcaagaaataaggaggcaaaaatgttcatatatgaattggaattatttgttttcttattaggcctatcctgaagccaaaggaaatgagatcggaattcctcggggaattccaattccacattttcaagaaataaggaggcaaaaatgttcatatatgaattggaattatttgttttcttattaggcctatcctgaagccaaaggaaatgagatcggaattcctcggggaattccaattccacattttcaagaaataaggaggcaaaaatgttcatatatgaattggaattatttgttttcttattaagcctatcctgaagccaaaggaaatgagatcgga

SEQ ID NO: 36542 - DNA, 337 bp, Glycine max
  Clone ID: LIB3054-011-Q1-N1-E10
ctcgagccgattcggctcgagttgtacctgattattggcatttcatgccactgttaagactgtaccattttccactgtttgtgccatatgtgacatccaatgtattactccccatgtgtatgttgtatataactttatcattttgaaaacttgttgtattgttctctaatattgtgaattttatttttatactatgttaaactctgtttttacatctcagttggtcaatgtgaatgtgcaaaattgtcacaattaaaattgtctgcatttttatttttgagtcagttgtctgatggaagtgtgctataattgacacaataaaatagtcttctatcta

SEQ ID NO: 36543 - DNA, 255 bp, Glycine max
  Clone ID: LIB3054-011-Q1-N1-E2
gtctcaggaggttgcttctggctgtgctgaggtcctcaggcaatactaggagttcgacaatgagaattaattacgtaattaatttcagtaatactgttattattaatctactttcgatttgggttttctaatgtctatttaattcaatcttgatgtggagtcttatctcgacattttcatattatcatgttatatatgttgatggaccgaccctgcttaattatattattacatcaagatctatcctggactaaa

SEQ ID NO: 36544 - DNA, 329 bp, Glycine max
  unsure (1)..(329): unsure at all n locations
  Clone ID: LIB3054-011-Q1-N1-F1
tcggggaattccaattccacattttcaagaaataaggaggcaaaaatgttcatatatgaattggaattatttgttttcttattaggcctatcctgaagccaaaggaaatgagatcggaattcctcggggaattccaattccacattttcaagaaataaggaggcaaaaatgttcatatatgaattggaattatttgttttcttattaggcctatcctgaagccaaaggaaatgagatcggaattcctcggggaattccaattccacattttcaagaaataaggaggcaaaaatgttcatatatgaattggaattatttgntttcttatt

SEQ ID NO: 36545 - DNA, 346 bp, Glycine max
  Clone ID: LIB3054-011-Q1-N1-F2
tcggggaattccatttcctcattttcaagaaataaggaggcaaaggtgggcatatttgaatgggaataattggtttccttattaggcctatcctgaagccaaaggaattgagatcggaattcctcggggaattccaattccacattttcaagaactaaggaggcaaaaaggtccatatatgaatgggaattattggtttccttattaggcctatcctgacgccaagggaagtgatatcggaattcctcggggaattccaattccacattttaaagatatagggacgcaaatgtgtacatatgtgaattgagaatatgtgttctcatattaggcctattcttgaccc

SEQ ID NO: 36546 - DNA, 384 bp, Glycine max
  Clone ID: LIB3054-011-Q1-N1-G7
tcggggaattccaattccacattttcaagaaataaggaggcaaaaatgttcatatatgaattggaattatttgttttcttattaggcctatcctgaagccaaaggaaatgagatcggaattcctcggggaattccaattccacattttcaagaaataaggaggcaaaaatgttcatatatgaattggaattatttgttttcttattaggcctatcctgaagccaaaggaaatgagatcggaattcctcggggaattccaattccacattttcaagaaataaggaggcaaaaatgttcatatatgaattggaattatttgttttcttattaggcctatcctgaagccaaaggaaatgagatcggaattcctcgggggtaccgagc

SEQ ID NO: 36547 - DNA, 221 bp, Glycine max
  unsure (1)..(221): unsure at all n locations
  Clone ID: LIB3054-011-Q1-N1-H7
gttgtacataaactcttattcctattcatacagttcttgcgcttgttgaatattgcttcatcatatgtgacaatgatgataatccactgctcttaagtttcatccaatcacagganataaaccaaaagtaattcgtataattgctgctgctattggattttaggaatgtattttaggcctatctgttacagtaatgtgaaaaaatggatttgattcatgta

SEQ ID NO: 36548 - DNA, 296 bp, Glycine max
  Clone ID: LIB3054-001-Q1-B1-A2
agaaggagtatgtcagcctcctcaaatccaatgaccctgttggattcaacattgttgatgtcttggcttggggctccattggccatgttgttgcttactacatcttggccaccactagcaatggctatgaccctgcattctttggctgatttaatttcatcatcatgttgttccaactgtgtttcttgcttactttttagtatgtaatgtaatcaatgtcatgatgtataggttctctctaaagatccaacaagttcagcatatgctaatttgatcactattttcggctgcaaaaa

SEQ ID NO: 36549 - DNA, 295 bp, Glycine max
  Clone ID: LIB3054-002-Q1-N1-B9
ttttggtaaaaaaaaaaagacagagaaaacgcaagtttctagtagagcttacccctttatgtatatttgtgaatgtgataagggatttaactggaattaaaaaaaggggggattcacgaagatttaattactaaatgaataacttacccatgaatcatttccccggggtatgtttcaagttcccttatataattaatgcaaattggattttgattataggatatgtttccaaaaagattcaacgtactttttatgggtatactattaaataacaaaatattaccttaaatacatt

SEQ ID NO: 36550 - DNA, 377 bp, Glycine max
  Clone ID: LIB3054-002-Q1-N1-D6
acccgaattccggacgtgtccctgcacgcgttccaccttcacttactctctgtcctattacagcttgctgtaatcatcgtcataacttcactctgagtcaaatatacatctattcacaaaatcacacaatatcccagccaagaacatataatctaaaggccagcatacctactgaaaccgctaactggccttaattctgtcgttcttacatacgcttcgcccacctgacgaccatcacaaaccatctacgctcaattcataggtcaccacacccgacaagactataaacataccaggcgtttgcctctggaagctccctagtacgctctcctgcaccgaccctaccgcttaccgcatacctgtcccgctattatcct

SEQ ID NO: 36551 - DNA, 267 bp, Glycine max
  unsure (1)..(267): unsure at all n locations
  Clone ID: LIB3054-002-Q1-N1-E10
ttcaaggaaccgacctattgctaattttacctggcaccgaattcaggatggggttgctgtggaggccgattccctttggtttttcaacagatactggcacccagttgatgattccactgctcatgtttcacattaacacagattcacttgtcttatgagaagaataccaaatgtcatgtcaataaattcatgagtcgacaattgattgtatgtcaatactaccaacattgattagcagtatctntatatctctgtcacatttgataa

SEQ ID NO: 36552 - DNA, 434 bp, Glycine max
  Clone ID: LIB3054-002-Q1-N1-F11
tgcccgcctccttagcctgggattccggttgagcttcaacccgttcaacccgaaccacagttttccattcacatttaacggttagcacttagcagactctgctgcagtgaggtgaggggaggtttgttggttgtttcgtttttcctttcctttccgccagaatccgttgagaatggcgttgccggtagtcgtcgatgcaaagtacctcaaggaggtcgacaaggctcgccgcgatctccgcgcactcatcgctaacaggaactgcgctcctctcatgctccgattagcctggcacgatgccggaacttacgatgctaagaccaagaccggtggacctaacggttcgatccggaacgaggaagagtattctcacggagccaataatggcttgaagaaagctattgatttctgccaggaagtgaaggcaaaatatc

SEQ ID NO: 36553 - DNA, 432 bp, Glycine max
  unsure (1)..(432): unsure at all n locations
  Clone ID: LIB3054-002-Q1-N1-H4
ctcggatttcggttcgagaagctgaaatgaataggattcacagcagatttagcaaagcggacactaacatcaatttatgataacaacctcaaaatcaagttatcagtgtgtcaccctgacttttcaaaaacaattatttgttgcttcatatttcactgtgatttcataatagattttcactcatcttacttgactccaagcattctatatatctagtgcctccacgcatctctaccctcaaatcttcaccacacaacactacctcaattactcaactaaagcttcattcattcatcgtgtcgtgttgtgttctttgcaaccatgcttcttagaacagcgtnctctttctctctcttcaacgccaacggcgaccatatactactccttntctctgttcgctactctcagggcaaacactttgttccatgcgct

SEQ ID NO: 36554 - DNA, 245 bp, Glycine max
  Clone ID: LIB3054-003-Q1-N1-C11
gtttggtcttctggttcttgagaattggtttacactgttctgcaacttccgtttggtgttcatcttcctgaacttaatattgagtctatttgcactgctatatagataacaagagataagttttcacaaatcttttcgtcaacacaatatcatcttttttgaaagatgatgtttatataaacacaaagaaagagaaaacttatctcttgttatctatttgcactgctatatagtctagatcgcga

SEQ ID NO: 36555 - DNA, 247 bp, Glycine max
  Clone ID: LIB3054-003-Q1-N1-C12
gggtttgctcttctggttcttgagaattggtttacactgttctgcaacttccgtttggtgttcatcttcctgaacttaatattgagtctatttgcactgctatatagataacaagagataagttttcacaaatcttttcgtcaacacaatatcatcttttttgaaagatgatgtttatataaacacaaagaaagagaaaacttatctcttgttatctatttgcactgctatatagtctagatcgcga

SEQ ID NO: 36556 - DNA, 227 bp, Glycine max
  Clone ID: LIB3054-003-Q1-N1-H12
ctcgagccgagcagacgattctttggacgcctgaaaggatagttatgttaattggatggaaatgctggaattctatttggttgccatcacttataaactttgtagtgtttctgttttgatattatggattctcgggtagtgagttttttttctccttaagttggccaaacttttgtttcagggaagactgatcgtttatttcaaattttgtttatgagtttatctaa

SEQ ID NO: 36557 - DNA, 377 bp, Glycine max
  Clone ID: LIB3054-004-Q1-N1-B5
ctctagtgtctctttgtgttactaatactttttagacaaggttattgcttgttgcctagaaatcgtgtcccaaatcataccccaatcttctttgtaaatgcagcctatgactcatggcaagtcatattattctctttctcaagaaacattctatttttggaatggtgttcatttggaattttggtcctacttaaaactgataatatgtttatattcattgatcaattgattggcttgtttattaggttaatcaacgttagttatatatgaggatttatacatatcaacataatatataatagactttagattttaacttttaaattcccaattaaaaatactatgattgcttaaattatctcaatattgaaaaattc

SEQ ID NO: 36558 - DNA, 292 bp, Glycine max
  Clone ID: LIB3054-004-Q1-N1-C9
gatcaacttgctcttaaagctccacttggccaaaacacggttggtcttagaggtcccaagaatgcgcgtgaggctgtcaagcactttgtaccagctcctggtgtgccccatatccacaccaagccctatgtccgtgcaaagggaaggaaatttgtgcgggccatatgaagaaggaatagctgaggctttagagtttgagtcctggagctcaaacatgtacgacttttccttgtaacctatgatcattatgtattgttttcttgcaactcggatcaatctgataattcaagtt

SEQ ID NO: 36559 - DNA, 403 bp, Glycine max
  unsure (1)..(403): unsure at all n locations
  Clone ID: LIB3054-006-Q1-N1-D8
ccaggttgatgcttatatttatttatggaagtggaatgcaagaagttntgggttcagacgttgatggaactattacaaagtctgatgttttggggcaattcatgcctttagttggcaaagattggacacaatctggagtggcaaggcttttctgtgctattaaggaaaatggataccaactactttttctgagtgcccgtgcaattgtccaggcatatctaaccagaaacttcttgcttaacctgaaacaggatggaaaaaccttaccaaatggacctgatgttatatcacctgatggattatttccctcgctttaccgagaagtgattagaagagcaccctacgagttcaagattgcttgtttagaggatatcaatagacttttcccatctgactattaatc

SEQ ID NO: 36560 - DNA, 226 bp, Glycine max
  Clone ID: LIB3054-006-Q1-N1-H11
tgtgagcaaaagtgtcagcaattggccacgaaccgtcaaaaggccgcgctctgggcaattttccagaggctccgaccccctgacgagcattacaaaaatccacgctcaagtccaaggtggcgaaaccccacaggactatcaagataccacgcgtatcctccttgaaactccctcttgcactactactgttacgaccctaccgcttaccgcatacctgtccaacttt

SEQ ID NO: 36561 - DNA, 100 bp, Glycine max
  Clone ID: LIB3054-009-Q1-N1-D3
gggttggccttttaaggtttccaagagttgagcgtcttcatcctggcaggttttaaggttttgctgcagtgcagtgttatgaaattaagaaattagaaag

SEQ ID NO: 36562 - DNA, 207 bp, Glycine max
  Clone ID: LIB3054-009-Q1-N1-H5
ctgagaagtgtggttagatgatttcatactgttggcttctggcagtgtatcttatgatggatctggcatgtatcgaatattggttttgatttctttatggccagttattgcatgaatgttaatcatcaaagcataattcttcgtggttatgctgttcaaatatagactagatttgattctaatccacttactgtcaactttcaatac

SEQ ID NO: 36563 - DNA, 377 bp, Glycine max
  Clone ID: LIB3054-010-Q1-N1-C3
gcaagctcggcgttgctgattacggtcaacgcgcgttgaagagtcacgtggggtagtgcgacctcttctggttgctggctgaatgactcgatccgctggttcgttcggctgtggcgagcggtttcaagtcagttaaaggcggatatgcggttatcctcagaatcatgtgataacgtacgaatgatcatgtgagcaaatagccagcatatggccaggaaccgcagaaaggctgcgatgttttcgaaagtccatatgcttttggtgcctgaccagactcacattgacctaaatggagttgagacttggaaatcctcgagagtctatccggtatccacgcgcattgatgtgctggccaaatcgtatgaccatggtaatag

SEQ ID NO: 36564 - DNA, 186 bp, Glycine max
  Clone ID: LIB3054-010-Q1-N1-E8
ttcactttgttagggtcatcgttgttattttttggcatatcctctaaacatctctttatctaacttgtccatcactagaataatcatcattctcaattattggcacacacacacggcttacagatcagagctaggtccaacattcattctgcttaaaacataaaaacaaaaagccaacaaaaagcc

SEQ ID NO: 36565 - DNA, 289 bp, Glycine max
  Clone ID: LIB3054-011-Q1-N1-D3
tattaatttccggatcttttactttgttaggtccccttggaagccagagttgggtatgcatttggcggatggtattgtaactttgtatgttctgattggtttgattttgttccttttattcgattttcttgttgtgtccaagaattaggtgcctcgagttaggagaacgatagtctagtatcttatcttccatagggatttttgagtcagtttctgtttatatttattatatgcttaattggtttttatgtttgcattaaactcataaaattattaagaaatgttcgtg

SEQ ID NO: 36566 - DNA, 354 bp, Glycine max
  Clone ID: LIB3054-011-Q1-N1-G5
tttgggtcgaatttcctttaaggccattggccattaatttgggtcctttcggggtttgtggctcaacctcattctcatgctccagctcccactttcaagtactgtgaaaagaatgcagactatgctgtgaaggtgagtggagtggaaatattgcctgaccccgtggagagaggagtgccattcacctttaagatcccagcttatactcctgaaccaattcaaagcggggacttgttatatgaaatttcttatgctggaatagaagcacaacctgctacatttctccatgatctctgtgaggaagcaccatgcccagtacctgcaagcaactttgtgctcgttcacaccgaatta

SEQ ID NO: 36567 - DNA, 181 bp, Glycine max
  unsure (1)..(181): unsure at all n locations
  Clone ID: LIB3054-011-Q1-N1-G8
aaccaaatgtcattcctttccttcttggttggattggttaataaataataaatactttgggtttaaaacagtgtatggcactgcttttgtctctgtcgttgaatgatatcacatgaatgcattntggtttgcaacctgctgcgcttgcaaggngttgtgaagccaattttataataaataa

SEQ ID NO: 36568 - DNA, 69 bp, Glycine max
  Clone ID: LIB3054-011-Q1-N1-H6
gacagagctctttcgtttcactaatacctatataaaaaaaaggggggggtcccacttatgaacctctta

SEQ ID NO: 36569 - DNA, 413 bp, Glycine max
  Clone ID: LIB3055-007-Q1-N1-B11
acaaagccttttcctcttaccaagcactcggaggacacaaggccagccaccggaagctcgccggagaaaaccacccgacctcctccgccgtgacgacgagttcggcgtcgaacggtggtggtaggacccacgagtgctccatctgccacaagacgttttcgacaggacaggccttgggaggacacaaacgttgtcactacgaaggcggtaacagcgccgtaaccgcctctgagggagtggggtccactcacacaggaagccaccgcgatttcgatctcaacctcccggcttttccggacttctcagcaaggttcttcgtcgatgacgaggttaccagtcctcatccatccaagaagtcccgtttcaatttgaccatacccaagattgaaatccctcaatactgatccatagat

SEQ ID NO: 36570 - DNA, 428 bp, Glycine max
  Clone ID: LIB3055-013-Q1-N1-G5
caacgactttgtcttccaatgaccctccaacctcactttccctatccctccccggtgttgactcatccgaagtttccaatcgaacaactgagccgattcatgccgcacctcctccgccgccacagccacagccacagccacagccgttgaatactatccctttgctcccaatgatgacggtgccctcggtttctccgacggggatggcgccgtttaattttagcgcagagtttctggcggtgatgcaggaaatgataaggaaggaggtgaggagttatatggagttgcacaatcagaagaatgggatgtgttttcaggctgcggtgaatgatgggtttagggacgcctcggtgaagcgtattgggaatagcaggggtgattcgtaaatattatcatcgaagaatggaacaacacaagtagagatgagg

SEQ ID NO: 36571 - DNA, 426 bp, Glycine max
  Clone ID: LIB3055-005-Q1-N1-C5
aatcttcttcattacatggcttcttcagatcccatctcttctcgccactacacttacaacagaaaacaaaaatctctaggccttctctgcactaatttcttgagcttgtacaaccgagacaccgttcacttgattggcctagacgatgctgccacccgattaggtgttgagagacggcggatctatgacattgtgaatgtcctggagagtatcggtgtactctcaaggaaagcaaaaaatcaatacacatggagagggtttgccgcaatccctctcactctacaggatctcaaggaagaggggttgaaggagaattctaattccctacgtgggcctggaaaccatgataaagtttccgacgacgaagatgacgaggaaacacagtccaatccccgcgctactggaagtcaaagtgacaagttgaac

SEQ ID NO: 36572 - DNA, 382 bp, Glycine max
  Clone ID: LIB3055-013-Q1-N1-H2
ccagaagggtgattcctgcgagtatgctcatggtgtttttgagtcctggctacatcccgcccaataccggacaaggctttgcaaggatgagacgggctgtgctagaaaagtatgcttctttgctcacaaacctgaagagctacgccctgtgtatgcttccactgggtcggctatgccatcaccaaaatcctattcagctagtggacttgacatgacagtgatgagtccattggctcttagttccacatctttgccgatgccaactgtttcaaccccacccatgtctcccttggcagcagcttcatctcccaagagtggaagcatgtggcagaacaaaataaaccttactccaccatcgttgcagctccctggtagccgactg

SEQ ID NO: 36573 - DNA, 410 bp, Glycine max
  unsure (1)..(410): unsure at all n locations
  Clone ID: LIB3055-011-Q1-N1-G6
aagaatttctatgacgattcgcaaccccatgcgacgaatccgtctcctccactccttctccgtcgtcttcctctactggttctacgtcttctcatgaactaactccctctcaatcccctaccctaattcctccaatttccccattttttttctaattaatcagatttgcaaaatcctaatttctctatcctaacaaaacccccaaattcaaacaaatccaatggcttcgattccgcgtccggcgagttcgggatcttcggagggaggaggagatccggctgcgatggacgagagaaagaggaagcggatggagtcgaaccgcgagtccgcacggcgatcgcggatgaagaagcagaagctgctcgaagacctatccgacgtancgagtcgccttccaggcgagaacgtgc

SEQ ID NO: 36574 - DNA, 409 bp, Glycine max
  Clone ID: LIB3055-007-Q1-N1-C5
caaaaactcccgttttctctctctgtttttccatggccatgtgatcaaacttttcttgattctctctctcagtttttgctattctgagtgatgggtatgccctgccgctgttcccacacctcccacatcactgaaatcatcatcaccagcttcttccgccacaagtcttaaattacaacaatttccctcaattattcatcaaccaaccaccttaatagccttttccaatggttccttaaagatccaacttggtcggagtaaacatggcggctagtggaagttccttttccaacatcactagcttccttcgcaaccaacaaccctcttcccaacctctcgattcttctctcttcctctctgctccttcaatttttgtttcaggttcgagatccatggtgagttgtgaagc

SEQ ID NO: 36575 - DNA, 429 bp, Glycine max
  unsure (1)..(429): unsure at all n locations
  Clone ID: LIB3055-002-Q1-B1-F6
attaaccacaagcataagcacaagcacaagcacaagcacttctctaattccctttcacactctattacagatttcacaagtgcttacacttcaaatggctttggaagctcttcaatcacccaccacagccactccatcgtttagtccctttgaagaaaccagtctcagttacttagagacaccgtggacgaaaggaaagcgttctaagcgtagccgcacggagcaacaactgcaacacccttcatgcaccgaggaagagtacctcgctctttgtctcatcatgctcgctcgcggcggcgccggcagtgtctccaccgccanaaccgctgtctccgacaacaattctgcgccgctatccgccggcaaactgagctacaaatgttcggtttgcaacaaagccttctcctcttaccaagcactcggaagaca

SEQ ID NO: 36576 - DNA, 322 bp, Glycine max
  Clone ID: LIB3055-002-Q1-B1-F10
atagctttgggagcaaaaactgcacaaagctcctcagtgccccccaagttttcctttcaaagcaattttgtgctttgctttgaatgtcttccttttcgatccctacacttcaatttgtagcaagaggaatttgttgtttcctacttagcatgattatttatcaatggcgtctttggtatcttcagcatttactcttccaagctctaaacctgaccagcttcaatcacttgccccgaaacatctttttcatcagtcattccttcccaagaaagccaattacaatggtagctcaaaatcctctctgaaaattaaatgtgctgtc

SEQ ID NO: 36577 - DNA, 410 bp, Glycine max
  unsure (1)..(410): unsure at all n locations
  Clone ID: LIB3055-011-Q1-N1-A4
cagtcattactttgactcanaccccgactaatctggntcagaatctaaggaaagatgggaagaagcctagtgcatacattgctgatacaaccacagccaatgctcaggtacgtacactntctgagacggttagacttgacgcaagaaccaagctgttgaatccaaagtggtatgaaggcatgttgtctactggatatgagggtgtacgcgagatcgagaagagactcaccaatacagtggggtggagtgcaacttcaggccaagttgataactgggtgtatgaagaagccaacacaactttcattcaagatgagcaaatgctgaacaagctcatgagcactaatccaaactccttcaggaaactggtgcagacattcttggaagccaatggacgtggttattgggaaact

SEQ ID NO: 36578 - DNA, 390 bp, Glycine max
  Clone ID: LIB3055-013-Q1-N1-H6
gaaatggagactctctgctctgcattggtgttcccatctttcagaatcacaacttcagctttctccaaatgtggcatcagggctttcattgccgttgagcaacatacttcgcagactaaggttgctctcctcaaaattggtaccagaggaagtccactagctctggctcatgcatatgagaccagagacaatctcatggcatcacatccagagctagcggatgaaggggctattcagatcgtgataataaaaacaactggtgacattatactatcacagccacttgcagacatcggcggtaagggcctgtccacaatcgatatagacgaggcactcattaacggtgacattgacatcgccgttcactctatgaaagatgtacccacttac

SEQ ID NO: 36579 - DNA, 265 bp, Glycine max
  Clone ID: LIB3055-006-Q1-N1-H3
gataaagttgcctatgcacttcaacaaggtctaaaagttattgcatgcattggggagactctcgaacagcgtgaagctggtacaacaacggctgttgtttctgagcaaacaaaagcaattgcagctaaaatatcaaattgggacaatgtcgttttggcctacgagccagtttgggccattggaacaggaaaggttgctactcctgctcaggctcaagaggtccatgctgatttgaggaaatgggttcatgacaatgtgagtgctg

SEQ ID NO: 36580 - DNA, 421 bp, Glycine max
  Clone ID: LIB3055-013-Q1-N1-C3
gttcgcaaaggtggtgcttatactggagaggttagtgctggaatgcttgttaattggggaattccttgggttattattggtcactctgaacggaggcagcttttgaatgaatcaaatgagtttgtgggagataaagttgcctatgcacttcaacaaggtctgaaagttatagcatgcattggggaaactcttgaacagcgtgaagctggtacaacaacggctgttgttgctgagcaaacaaaagcaattgcagctaaaatatcaaattgggacaatgtcgttttggcctatgagccagtttgggccattggaacaggaaaggttgcaactcctgctcatgctcaagaggttcatgctgatttaaggaaatgggttcatgacaatgtgagtgctgaagttgctgcatctgtaagaattatct

SEQ ID NO: 36581 - DNA, 417 bp, Glycine max
  Clone ID: LIB3055-005-Q1-N1-A8
agcacactgtcagagcccttcagagaaccgtgcctgctgcagttcctgctgtcgttttcttgtctggtggccagagtgaggaggaggcatccgtcaacctcaacgccattaaccaggtcaatgggaagaagccatggtcactctctttctcctttggaagggcacttcaacagagcacccttaaggcatggggcggaaaagaagagaatgtgaagaaggctcaggaagcccttttggtaagagccaaggctaactcagaggcaactctgggaacctacaagggtaactcacagcttgctgatggtgcctcagagagcctccatgtttcgaactacagctactgatcaatcgaagttggtgttgtttgaagagactagtgcgagtaggaaatcgtattatgggtacaacaaccgaatt

SEQ ID NO: 36582 - DNA, 413 bp, Glycine max
  Clone ID: LIB3055-008-Q1-N1-F5
gatagatagagtgatacacatcacattttctcaaagtaagttattaattaataaataaatggcggcggcggcggcagtgacggtgctactcccacctaggattccgaccgccaccaacgttacccgctgctctgctttgccttctctgcctcctcgcggcaccaacactaaaaccactttgctcttatcttgcctcaaccacttctcagtgtcccgaaaatcttctctgcttcagaccagagcttcttcagaggaatcatcctcagtagatgccaatgaggtgttcacagatttgaaggaaaagtgggatgctcttgaaaacaagtccacagtacttttttatggtggtggggctttagttgctgtttggctatcgtcgattcttgtgagcgccatcaactctggtcccttgc

SEQ ID NO: 36583 - DNA, 414 bp, Glycine max
  Clone ID: LIB3055-012-Q1-N1-B3
caagcccattgatggacaaaagactggaaccagtgggcttcgaaagaaggtgaaagtgtttatgcaagacaattaccttgcaaattggatccaggctctgtttaattcattgccaccggaggactacaagaatggtttgttggtgttgggaggtgatggtcgatactttaatcaggaagctgcacagataataatcaaaattgctgctggaaatggtgttggaaaaattctggttggaaaggaaggtattttgtcaacaccagccgtttctgctgttataagaaagagaaaggcaaatggtggatttattatgagtgcaagccataatcctggcggacctgaatatgattggggtattaagtttaattacagcagtggacaacctgcaccagaatccatcactgacaagattta

SEQ ID NO: 36584 - DNA, 381 bp, Glycine max
  Clone ID: LIB3055-009-Q1-N1-E5
tgagtcccttatcaaagatttcagcacacatagctgccaatgttgctgctaaggcttatgagcttggcttggccactcgccttcctcaacctaaagatttggtgaagtttgcagagagctgtatgtataccccatcctaccgaagctaccggtgaagcgataataaatagcctatttttctttttccttttcgttttatcattttattgtcaattatttaatttttttaccttctttatgttgctgttctgttcttgtaagttatttgttgggttagtaggttaggacggtggtagttggactaaaaaggtagcttgaaaatttgtgttctgctataaatgttatgtgacagtaatctaaattagaaaaggaagcatttct

SEQ ID NO: 36585 - DNA, 414 bp, Glycine max
  unsure (1)..(414): unsure at all n locations
  Clone ID: LIB3055-011-Q1-N1-G1
gaagtttatgacaagttggcttttgatatggagcacatatcgatggcttctttgcctggaatgttcgaaaggacagtgacattgaactccttggggaagacattctccttaacaggatggaagattggttgggccatagcacccccacacttatcatggggagtgcgacaggcacacgctttcctcactttcgcaactgcccatccttttcagtgtgctgctgcagcggctctgagagcaccagactcttactatgtagagctgaagagggattatatggcaaaagagagctattttgattgaaggattgaaggctgttggcttcaaggtattcccatccagtggaacctactttgtggttgtagatcacaccccttttggactgggaaatgatgttgcattntgtgaatatct

SEQ ID NO: 36586 - DNA, 305 bp, Glycine max
  Clone ID: LIB3055-010-Q1-N1-G4
cgatgctaactcttcaagcttcgtctcgtaaagaaaatgcgaaggctcaatagagagaactcaattgaatcatcaaatgaggacagtgatttcgcgcttgatccattccacgccttacattttcaggctcaatgccacggcagcatccatcacccatacttatatgtgacccttttctatcttactaaatacccaattccttctctaattcacagtctacaggtctgatctctatggctgttgcaattaatgtatctcggtttgaaagcatacctattgctcctcctgatccaatttttagagtt

SEQ ID NO: 36587 - DNA, 413 bp, Glycine max
  Clone ID: LIB3055-010-Q1-N1-G6
cttttgtgttctgttctgttctgttacatctcgtgaatcgtttacaacttcttaaccgttttctgttgcagatggcttcttcgtttctatccgcagcttcgcacgctgtctcaccctcttgttctctgtccaccacgcacaagggaaagcccatgcttggaggcaacactttgagatttcacaaaggacccaattccttctctagttcaaggtctagaggtcggatctctatggctgttgcagttaatgtatctcggtttgaaggcatacctatggctcctcctgatccaattctcggagtttccgaggcgtttaaggcagacaatagtgatgtcaagctcaatcttggagttggggcatacagaacagaagaactacagccatatgtgcttaatgttgttaagaaggcagag

SEQ ID NO: 36588 - DNA, 401 bp, Glycine max
  Clone ID: LIB3055-010-Q1-N1-G7
cttttgtgtatcgttctgttctgttacatctcgtgaatcggttacaacttcttaaccgttttctgttgcagatggcttcttcgtttctatccgcagcttcgcacgctgtctcaccctcttgttctctgtccaccacgcacaagggaaagcccatgcttggaggcaacactttgagatttcacaaaggacccaattccttctctagttcaaggtctagaggtcggatctctatggctgttgcagttaatgtatctcggtttgaaggcatacctatggctcctcctgatccaattctcggagtttccgaggcgtttaaggcagacaatagtgatgtcaagctcaatcttggagttggggcatacagaacagaagaactacagccatatgtgcttaatgttgtt

SEQ ID NO: 36589 - DNA, 331 bp, Glycine max
  Clone ID: LIB3055-010-Q1-N1-G8
gatcagttctgttctgttacatctcgtgaatgatttacaactaattaaccggtgtctgttgcagatggcttcttcgtttctatccgcagcttcgcacgctgtctcaccctcttgatctctgtccaccacgcacaagggaaagcccatgcttggaggcaacactttgagatttcacaaaggacccaattccttctctagttcaaggtctagaggtcggatctctatggctgttgcagataatgtatctcggtttgaaggcatacctatggctcctcctgatccaattctcggagtttccgaagcgtttaagcatacaatattgatgtcaagc

SEQ ID NO: 36590 - DNA, 431 bp, Glycine max
  unsure (1)..(431): unsure at all n locations
  Clone ID: LIB3055-013-Q1-N1-F6
ccgtgtcagagatctcttggactttagcatctacctagacattagcaatgaggtcaaattcgcttggaaaattcagagagacatggcagagcgtggacacagtcttgaaagcatcaaggctagcattgaagcaaggaagcctgattttgaagcatatattgatccacaaaagcaatacgcagatgcagtgatagaagtgttgccaacgcaactcattccagatgacaacgagggtaagattttgagagtgagattgatacagaaagagggggttaagtactttagcccggtttacttgtttgatgatggctctaccatttcatggataccatgtggaagaaagcttacatgctcctaccctggcatcaaattcttctatggacctgagacttactacgngaaatgaggtgtcagttgtagaaatggatgga

SEQ ID NO: 36591 - DNA, 400 bp, Glycine max
  Clone ID: LIB3055-013-Q1-N1-D11
gagagaaagaaattaagaaaaaatggcagcctgcactgtctactcaacacaatctctgagcacaaattgctccatctcaaccccatcaaagacacagctgagtttcttccaccaaaagcaggtagttttctggaggaacagcaacaggggcaacagcagcagcagaagaagctatgtgataacatgtgcagcaggtgactcacagacagtggtgattggtcttgctgcagactcagggtgtgggaagagcaccttcatgaggaggctgacaagtgtgtttggaggagcagcagagccaccgaagggtggcaaccctgactcaaacacactcatcagtgacaccaccactgtcatatgcttggatgattaccactctttggatagaactggcagaaaggag

SEQ ID NO: 36592 - DNA, 391 bp, Glycine max
  Clone ID: LIB3055-013-Q1-N1-H7
gaaaattctctttagagagatagagagaggaagaaagaatggcagcttgcactgtctactcaacacaatctctgagcacaaattgctccatctcaaccccatcaaagacgcaactcagttttttccaccaaaagcaggtagttttctggaggaacagcaagaagggcagctgcagcagcagaagaagctatgtgataacatgtgcagcaagtgactcacagacagtggtgattggcctggctgcagactcagggtgtgggaagagcaccttcatgaggaggctgaccagtgtgtttggaggagcatcagagccaccaaagggtggcaaccctgacttcaacactctcatcagtgacaccaccactgtcatatgcttggatgattaccactc

SEQ ID NO: 36593 - DNA, 388 bp, Glycine max
  Clone ID: LIB3055-004-Q1-N1-F5
tgaaaattctctttagagagatagagagaggaagaaagaatggcagcttgcactgtctactcaacacaatctctgagcacaaattgctccatctcaaccccatcaaagacgcaactcagttttttccaccaaaagcaggtagttttctggaggaacagcaagaagggcagctgcagcagcagaagaagctatgtgataacatgtgcagcaagtgactcacagacagtggtgattggcctggctgcagactcagggtgtgggaagagcaccttcatgaggaggctgaccagtgtgtttggaagaacagcagagccaccaaagggtggcaaccctgacttcaacactctcatcagtgacaccaccactggcatatgcttggatgattacc

SEQ ID NO: 36594 - DNA, 401 bp, Glycine max
  Clone ID: LIB3055-004-Q1-N1-B1
tcaaagtgaagacggtttttggtggtggaccacattgggttaatacttgttgggacgagcagttggcatgggatttgctagctaatcagcttctttttgaggccttaaattactctcatttctgcaagtatgcttgctctgaagaaaatcctgagctcctggacatgggaggtccagttgaaggtggatttagtgtcgcatttgatccccttgatggctccagcattgtggacacaaatttcacagtaggcaccatctttgtgtgtggcctggagataagttgactgggatcaccggaagagatcaagttgctgcagccatgggggttttgggtcctagaacaacatatgtgcttgctctaaaagacttccctggcacccatgaatttcttctgcttgatg

SEQ ID NO: 36595 - DNA, 365 bp, Glycine max
  Clone ID: LIB3055-008-Q1-N1-H3
gccatggaaacaggcatagcatgctacactcgcgggcctttcttgcctagtgtttcttccaagcactctccaccttccatttctccatcttttggcttgaggagtctgaaatcaagctctttatttggagaatcgctaagagtggcctccaaatcaacaataaaggtttcaaagacaaagaatacttcactcgtgaccagatgtgaaattggtgacagtctcgaagaattcctcacaaaagcaacaccagataaggggttgatcaggttgttggtgtccatgggagaagcattgagaacaatttccttcaaagtgaagacggcttcatgtggtggaacacaatgtgttaatacttttggggatga

SEQ ID NO: 36596 - DNA, 406 bp, Glycine max
  unsure (1)..(406): unsure at all n locations
  Clone ID: LIB3055-011-Q1-N1-F4
agccttgaacattgtttgcaccctggaaccaggcttgatggtaaactgggggccttttctgcctaagggttctttcaaacacctttcaaccttcaactctccatcttttggcttgaggagtctgaaatcgagctctttatttggagaatctctaagagtggcatcccaatcaacactaaaggtttcaaagacaaagaatacttcactcgtgaccagatgtgaaattggtgacagtctggaagaattcctcacaaaagcaacaccagataaggggttgatcaggttgttggtgtccatgggagaagcattaagaacaatttccttcaaagtgaagacggcttcttgtgggtggaccacaatgtgttaatacttttggngacgagcagcttgcagtggatttgctagc

SEQ ID NO: 36597 - DNA, 267 bp, Glycine max
  Clone ID: LIB3055-006-Q1-N1-B3
caaggctctactctactgcttcaccttctgctctagaaaattcagtggtgatacatggcttcggctactctctctgtagccaaaccagcccttcaggcaaatgggaaaggcttctctgaattctctggcctccgcagctcatcaggcttccttcccttttctagaagatcttcagaggatttccattctgtcattgccttccagacctatgcagttggaagcagtggaggatacaagaagggtgtgacagatgcataactgaaggtt

SEQ ID NO: 36598 - DNA, 286 bp, Glycine max
  Clone ID: LIB3055-002-Q1-B1-A9
ctagtttcttacaaggctctactctactgcttcaccttctgctctagaaaattcagtggtgatacatggcttcggctactctctctgtagccaaaccagcccttcaggcaaatgggaaaggcttctctgaattctctggcctccgcagctcatcaggcttccttcccttttctagaaaatcttcagaggatttccattctgtcattgccttccagacctatgcagttggaagcagtggaggatacaagaagggtgtgacagaagcaaaactgaaagttgccataaa

SEQ ID NO: 36599 - DNA, 363 bp, Glycine max
  Clone ID: LIB3055-002-Q1-B1-A6
accgcacttctgttccgcaattatcatgggcaaggtcaagatcggaatcaacggatttggaagaattggccgtttggtagccagagtggctctgcagagagacgatgttgaactcgttgccgttaacgaccctttcatcaccaccgattacatgacatacatgtttaaatacgacagtgttcatggacactggaagcatcacgatgtcaccgttaaggacgagaagacccttctcttcggtgacaagccagtcactatttttggacacagaaaccctgaagagatcccatgggggtcaactggagctgacatcattgttgagtccaccggagttttcaccgataaggacaagggcgccgcaca

SEQ ID NO: 36600 - DNA, 406 bp, Glycine max
  Clone ID: LIB3055-004-Q1-N1-F6
gcgagttgttgtaaagctagccttgttgcagccatggccacccacgcggctctagcttctacaaggatccccactaacaccaagttcccatccaaggcttcacactctttcccaacccaatgcgcctcaaagagacttgaggtgacagaattctctgggctaagatccacttcatgtgtgacatatgctaacgatgctagagaatcttccttttttgatcttgtagcttcccaactcactcccaagaccaatggatcatcaactcctgtgaggggagagacagtggccaagttgaaggtggcaatcaatggtttcggacgcattggtagaaacttccttcgctgctggcacggccgaaaagactcaccccttgaggtcgttgttgtcaacgacagtggtggtgtca

SEQ ID NO: 36601 - DNA, 358 bp, Glycine max
  Clone ID: LIB3055-013-Q1-N1-E4
gtatattacaaggctctactctactgcttcaccttctgctctagagaatctactggcgatacatggcttccgctactgtctctgcagccaaacgagccattcatgctaatgggaaaggcttctctgaattctatggcattcgcagatcatcaggctacacttgccgtatgtagaaaatcttcagaggatttgcattctggcattgccttccagacctatgcagttacaagcagtacacgatacatgaaggctgtgacagaagcaaaactgaatgctgctcataaaccgatatgcaaagattggaacgaactacttgacgcgctgtcacagtccgatagacttccgtcttgacgtcatt

SEQ ID NO: 36602 - DNA, 404 bp, Glycine max
  unsure (1)..(404): unsure at all n locations
  Clone ID: LIB3055-012-Q1-N1-E3
ctctacaatggnctcagnccgatccccaacacttctctgtcctcactcggccacctttcttctcctccaccggcacctccgcctccccctccccctcgcgcgtgcagctcacctcctccctccgcgcccgcccgctgcgccgcctgngcttcgccgcggcggacccgctgctcgcggcgagtgtagcggcgcgcgtggcggcggtgagaggaggaggaaagggcgcgagggggntggtgtcgatggcgaagaagagcgtgggggacctgagcgcggcggacctgaaggggaagaaggtcttcgtcagggccgacctcaacgtcccgctcgacgacaaccagaacaccaccgacgacaccagaatccgcgccgccattcccaccatcaaacatctcatccaaaac

SEQ ID NO: 36603 - DNA, 428 bp, Glycine max
  unsure (1)..(428): unsure at all n locations
  Clone ID: LIB3055-005-Q1-N1-A2
ctcagccgcattcnccaccactctctctctcctcactccggcacggttcctcctcctccaccgccacctccgcctccccctccccctcgcgcgtgcagctcacctcctgcctccgcgcccgcccgctgcgccgcctgngcttcgccgcggcggacccgctgctcgcggcgagtgtagcggcgcgcgtggcggctgtgagaggaggaggaaagggcgcgaggggggtggtgtcgatggcgaagaagagcgtgggggacctgagcgcggcggacctgaaagggaagaaggtcttcgtcagggccgacctcaacgtcccgctcgacgacaaccagaacatcaccgacgacaccagaatccgagccggcattcccaccatcaaacatctcatccaaaacggcgccaaagtcattctctccagccacttgggg

SEQ ID NO: 36604 - DNA, 311 bp, Glycine max
  Clone ID: LIB3055-001-Q1-B1-B7
ctaaaattggagtgattgagtcacttttagaaaaagttgaaatccttcttcttggtggaggaatgatcttcacatttgacaaggtacaaggtctttcagtgggttcaacccttgtagaagaagataagttggatcttgctacatcaatacctgcaaaatccaaggaaaagggggtgtctctcgtgttagcaagtgatgtggtgactgcagagaaatttgctcctgatgctaatagcaaagtcgtgccagcatctgccatccctgatggctagatgggatttgctattggtccagattctgttaaatcattc

SEQ ID NO: 36605 - DNA, 261 bp, Glycine max
  unsure (1)..(261): unsure at all n locations
  Clone ID: LIB3055-004-Q1-N1-F1
ctagcaacggtggaagagtgcaatgcatgcacgtgtggccaccaagtgcaagaagaagtttgagactctntcctacctgccagaccttgatgatgcacaattggcaaaggaagtagaataccttcttaggaagggatggattccttgcttggaattcgagttggagcacggtttcgtgtaccgtgagcacaacaggtcaccaggatactacgatggacgctactggaccatgtggaagctgcctatgtttggttgcactga

SEQ ID NO: 36606 - DNA, 397 bp, Glycine max
  Clone ID: LIB3055-008-Q1-N1-H4
gaagaacaagttgttgagaactaagaaggagaagcaaatggcttgctcaatgatctctttcccagctgttaccactgtcaaccgtgccggtgccggcatggttgctccattcactggcctcaagtccatggctggcttacccaccagaaagaccaacaatgacattacctgcattgctagcaactggggaagagtgcaatgcatgcaagtgtggccaccagttggcaagaagaagtttgagactctttactacctggcagaccttgatgatgcacaatcggcataggaagtagaataccttcttaggaagggatggattccttgcttggaattcgagttggaacacggtttcgtgtaccgtgagcacaacaagtcaccaggatactacgatggacgc

SEQ ID NO: 36607 - DNA, 391 bp, Glycine max
  Clone ID: LIB3055-008-Q1-N1-E12
gaaaaacaagtagttgagaactaagaagaaggaaatggcttcctcaatgatctcctccccagctgttaccaccgtcaaccgtgccggtgccggcatggttgctccattcaccggcctcaaatccatggctggcttccccacgaggaagaccaacaatgacattacctccattgctagcaacggtggaagagtacaatgcatgcaggtgtggccaccaattggcaagaagaagttcgagactctttcctacttgccagacctcgatgatgcccaattggcaaaggaagtccaataccttctaaggaaaggatggattccttgcttggaattcgagttggagcacggtttcgtgtaccgtgagcacaacaggtcacctggatactatgatgga

SEQ ID NO: 36608 - DNA, 437 bp, Glycine max
  unsure (1)..(437): unsure at all n locations
  Clone ID: LIB3055-002-Q1-B1-E1
gcagaaaaacaagtagttgagaactaagaagaaggaaatggcttcctcaatgatctcctctccagctgttaccaacgtcaaccgtgccggtgccgggatggttgctccattcagcggactcaaatccatggctggcttccccacgaggaagaccaacaatgacattagctccattgctagcaacggtggaagagtacaatgcatgcacgtgtggccaccaattggcaagaagaagttcgagactctttcctacttgccagacctcgatgatgctcaattggcaaatgaagtcgaataccttctaaggaaaggatggattccttgcttggaattcgagttggagcacggtttcgtgtnacgtgagcacaacaggtcacctggatactatgatggacgctactggaccatgttgaagctgctatgtttggctgcactga

SEQ ID NO: 36609 - DNA, 401 bp, Glycine max
  Clone ID: LIB3055-007-Q1-N1-G11
gaacaagtagttgagaactaagaaggagaagcaaatggcttcctcaatgatctcttccccagctgttaccactgtcaaccgtgccggtgccggcatggttgctccattcactggcctcaagtccatggctggcttccccaccagaaagaccaacaatgacattacctccattgctagcaacggtggaagagtgcaatgcatgcaggtgtggccaccagttggcaagaagaagtttgagactctttcctacctgccagaccttgatgatgcacaattggcaaaggaagtagaataccttcttaggaagggatggattccttgcttggaattcgagttggagcacggtttcgtgtaccgtgagcacaacaggtcaccaggatactacgatggacgctactgga

SEQ ID NO: 36610 - DNA, 416 bp, Glycine max
  Clone ID: LIB3055-008-Q1-N1-A7
aagtagttgagaactaagaaggagaagcaaatggcttcctcaatgatctcttccccagctgttaccactgtcaaccgtgccggtgccggcatggttgctccattcactggcctcaagtccatggctggcttccccaccagaaagaccaacaatgacattacctccattgctagcaacggtggaagagtgcaatgcatgcaggtgtggccaccagttggcaagaagaagtttgagactctttcctacctgccagaccttgatgatgcacaattggcaaaggaagtagaataccttcttaggaagggatggattccttgcttggaattcgagttggagcacggattcgtgtaccgtgagcacaacaggtcaccaggatactacgatggacgctactggaccatgtggaagctggctat

SEQ ID NO: 36611 - DNA, 371 bp, Glycine max
  Clone ID: LIB3055-013-Q1-N1-B2
agaagaacatgtagttgagaactaagaaggagaagcaaatggcttcctcaatgatctcttccccagctgttaccactgtcaaccgtgccggtgccggcatggttgctccattcactggcctcaagtccatggctggcttccccaccagaaagaccaacaatgacattacctccattgctagcaacggtggaagagtgcaatgcatgcaggtgtggccaccagttggcaagaagaagtttgagactctttcctacctgccagaccttgatgatgcacaattggcaaaggaagtagaataccttcttaggaagggatggattccttgcttggaattcgagttggagcacggtttcgtgtaccgtgagcacaac

SEQ ID NO: 36612 - DNA, 293 bp, Glycine max
  Clone ID: LIB3055-001-Q1-B1-G3
tggtaactgcctacgtttggctgcactgaagcttctcaagtgttgaaggagcttcaagaagctaaagacgcataccccaacggcttcaaccgtatcatcgggttcgacaacgttcgccaaatgcagtgcaacagcttcatcgcctacaaggccccatgcttctaagtgtgaaaaatttgcaaagcatttgtagccgccaccccactttgcttgtttggacctaaactacattcccacttgtttttgcgttttgagatttcatcatcctgtatttttggtttctgttttccgac

SEQ ID NO: 36613 - DNA, 276 bp, Glycine max
  Clone ID: LIB3055-001-Q1-B1-H4
cgctcagcaatgctcccaagatctctcccagcgttacaacgtcaacgtcccgtgccggcattgttgctccattcacttggcccaagtccatggctggcttccccatcaggaagaccaacaatgacattacctccattgctagcaacggtggaagagtgcaatgcatgcatgtgtggccaccagttggcaagaagaagtttgagactctttcctacctgccagaccttgatgatgcacaattggcaaatgaagtagaataccttcttaggaagggat

SEQ ID NO: 36614 - DNA, 403 bp, Glycine max
  Clone ID: LIB3055-005-Q1-N1-D8
aagtagttgagaactaagaaggagaagcaaatggcttcctgagtgatctcttccccagctgttaccactgtcaaccgtgccggtgccggcatggttgctccattcactggcctcaagtccatggctggcttccccaccaggaagaccaacaatgacattacctccattgctagcaacggtggaagagtgcaatgcatgcaggtgtggccaccagttggcaagaagaagtttgagactctttcctacctgccagaccttgatgatgcacaattggcaaaggaagtagaataccttcttaggaagggatggattccttgcttggaattcgagttggagcacgggttcgtgtaccgtgagcacaacaggtcaccaggatactacgatggacgctactggaccatgt

SEQ ID NO: 36615 - DNA, 415 bp, Glycine max
  Clone ID: LIB3055-007-Q1-N1-E4
ttgagaactattaaggagaagcaaatggcttcctcaatgatctcttccccagctgttaccactgtcaaccgtgccggtgccggcatggttgctccattcactggcctcaagtccatggctggcttccccaccagaaagaccaacaatgacattacctccattgctagcaacggtggaagagtgcaatgcatgcaggtgtggccaccagttggcaagaagaagtttgagactctttcctacctgccagaccttgatgatgcacaattggcaaaggaagtagaataccttcttaggaagggatggattccttgcttggaattcgagttggagcacggtttcgtgtaccgtgagcacaacaggtcaccaggatactacgatggacgctactggaccatgtggaagctgcctatgtttg

SEQ ID NO: 36616 - DNA, 387 bp, Glycine max
  Clone ID: LIB3055-009-Q1-N1-A9
tgagaactaagaaggagaagcaaatggcttcctcaatgatctcttccccagctgttaccactgtcaaccgtgccggtgccggcatggttgctccattcactggcctcaagtccatggctggcttccccaccaggaagaccaacaatgacattacctccattgctagcaacggtggaagagtgcaatgcatgcaggtgtggccaccagttggcaagaagaagtttgagactctttcctacctgccagaccttgatgatgcacaattggcaaaggaagtagaataccttcttaggaagggatggattccttgcttggaattcgagttggagcacggtttcgtgtaccgtgagcacaacaggtcaccaagatactacgatggacgctact

SEQ ID NO: 36617 - DNA, 411 bp, Glycine max
  Clone ID: LIB3055-008-Q1-N1-C9
caagtagttgagaactaagaaggagaagcaaatggcttcctcaatgatctcttccccagctgttaccactgtcaaccgtgccggtgccggcatggttgctccattcactggcctcaagtccatggctggcttccccaccagaaagaccaacaatgacattacctccattgctagcaacggtggaagagtgcaatgcatgcaggtgtggccaccagttggcaagaagaagtttgagactctttcctacctgccagaccttgatgatgcacaattggcaaaggaagtagaataccttcttaggaagggatggattccttgcttggaattcgagttggagcacggtttcgtgtaccgtgagcacaacaggtcaccaggatactacgatggacgctactggaccatgtggaagct

SEQ ID NO: 36618 - DNA, 414 bp, Glycine max
  Clone ID: LIB3055-003-Q1-N1-D12
aatcgcccttccaattttcttcaattcaagcaccaaaactgcttcctgaagttcccgaacccaaacctccatcgactgcgcaggctcaattgctcagtatcagacggcaccgtttcgtcttcgcttggtgccacggactcgtctcttgcggtgaagaagaaagcagcagaggtgtcttctgagctcaaagggacctccatatttctggttggtttgaagagctctcttaaaactagtttggggaagctgctggctgatgcattgcggtattattatttcgacagtgatagtttggtggaagaagctgtacgtggtgcactggctgcaaaatcattcagagagagtgacgaaaaaggcttctatgagtctgagactgaagtactgaagcaattatcgttcatgggtcgactagtg

SEQ ID NO: 36619 - DNA, 364 bp, Glycine max
  Clone ID: LIB3055-013-Q1-N1-C6
taaaagccttagccttccctacaactccaaacacaaagacatcatcatccatggctgcctccgtctccactgtcggagctgtcaacagagctcttttgaacctgaatggttctggagctggagcttcagctcccagttcagccttctttgggaccagcttgaagaaggttattgcctcaagggtccccaacagcaaggtttccggtggaagcttcaagattgttgctgtagaagagaagaaagagattgaagagacccagcagaccgacaaggacagatggaagggtctggcctatgatatctcagacgaccaacatgacatcacaaggagggaaaggtttgggttgactcccttttccaagct

SEQ ID NO: 36620 - DNA, 404 bp, Glycine max
  Clone ID: LIB3055-013-Q1-N1-C7
ctcgagccgctcgaatattcactatggcagatgaggtggctctgctagatttctggccaagtccatttgggatgagggtcaggattgcacttgctgaaaagggtatcaaatatgagtccaaagaagaggacttgcagaacaagagccctttgctcctcaaaatgaacccggttcacaagaaaatcccggttctcatccacaatggcaaacccatttgtgaatctctcgttgctgttcagtacattgaggaggtctggaatgacagaaatcccttgttgccttctgacccttaccagagagctcaggctagattctgggctgactttgttgacaataagatatttgatcttggaagaaagatttggacatcaaagggagaagaaaaagaagctgccaaaaaggag

SEQ ID NO: 36621 - DNA, 324 bp, Glycine max
  Clone ID: LIB3055-013-Q1-N1-C8
gggttcaccaaatgggccattaacaatgtgtccctaacattgccaccaaccccttacttgggttctatcaagttcaaaataaagaatgcctttgacaaaacacccccaccagttaccttcccacaagattatgacatctttaaccctcccgtgaaccctaatgcatctattggcaatggggtgtacatgttcaaccttaatgaagttgttgatgtgatcttgcaaaatgcaaaccaattatctgggagtggtagtgagattcacccttggcacttgcatgggcatgacttttggattttggggtatggagaagggaaattcaaa

SEQ ID NO: 36622 - DNA, 369 bp, Glycine max
  Clone ID: LIB3055-013-Q1-N1-C9
aaaatggcatagagttttgtttaaaattagtggctctgcattggctggaaactgccagaacattgaccccaaggtggcaatgcagattgctaggtgcatatctgttcttagtttgtctagccatagaaggagaattagcaccaccaccactactgccagccttatcatcatcagaaacagttttcacagacagagagttgccaacaatagcttcaatcttcttaaaccaatgccagtgactagtggcaatgccaccactcccaattctctgaagctccaccttatacctcttcttcaaattatcaatcttattcttacactgctccacgctcttctgatgcttccactctccgccgcatcgttccagca

SEQ ID NO: 36623 - DNA, 208 bp, Glycine max
  Clone ID: LIB3055-013-Q1-N1-D1
gttggagaagtcaagtcatgcctccacaaaaaaatttgatctaatacggacataaattgaggcccaagtaaaaggaacaatgacctcaaatatcataatctatatctgtattagatcaaatttttttgtggaggttggagaagtcaagtcatgccttttttattttattatgtaatgtcacttttctactccattttatagctttctg

SEQ ID NO: 36624 - DNA, 388 bp, Glycine max
  Clone ID: LIB3055-013-Q1-N1-D10
ctctagttttatattcacacaacaaaccactaagaaaagagaggataaaccaatggctacttcactttcagcaactgggtgtgttggaacttccttctatggaagttggggcacttcaattgttggggaggattacaccatgctggccaagtcagtgccatcacaagttcgtatggggaggggaaagccagtgagattgcagcctatgatgaagaatgtcaatgaagggaaaggtatctttgcacctcttgtggtgatcactcgcaacatcgttggcaagaagcgtttcaaccagcttagaggcaaagcaattgctttacactcccaggtgatcacggagttctgcaaatcaataggagcagatggaaaacagagacaagggctgatc

SEQ ID NO: 36625 - DNA, 385 bp, Glycine max
  unsure (1)..(385): unsure at all n locations
  Clone ID: LIB3055-013-Q1-N1-D12
agagagtcctgaaacttgggtgcgattccttcactcacaacaacaacacatcactatggctcttctgagtcgagcctcttcacgcttccctcagctggtttcccctcaaagggtagtttcactccacacaacgctcccatctctgaacgcatccccatccacagccacgcctacaccatatgccccgccaccgcctccgtccgcttcctctcccgccggcgtttcgaaggcggcggagttcgtgatctcgaaggtggacgatctgatgaactgggcccgccgcggctccatctggcccatgaccttcggcctcgcctgctgcgccgtcgaaatgatgcacanccggcgccgccgctacgatctcgaccgcttcggcatcattttc

SEQ ID NO: 36626 - DNA, 414 bp, Glycine max
  unsure (1)..(414): unsure at all n locations
  Clone ID: LIB3055-013-Q1-N1-D2
gggcagtgggcaaatttaccgcctgaattgcttctggacataataaggagggtggaagatagtgagactacttggcctgcacgtgctgttgttgtttactgtggttcggtttgtaaatcatggagggctgttacgaaagagattgttaagactcctgaacaatgtggaaggctcacatttcctatttcgttgaagcagcctggtcctcgtgattctccaatacagtgctttatcaggaggaacagagaaacttcaacatatctattgtacattggcctggtaccatcggagaatgagactgataagttgttattagctgccaaaaaggtaagaagggcaacaggcacagacttcgtcatatcnttggttgcagatgatttttttcgctccagcatcacatatgttggaaaactc

SEQ ID NO: 36627 - DNA, 333 bp, Glycine max
  Clone ID: LIB3055-013-Q1-N1-D3
ctattcttagatccaaaagtggtggtcggaaagcttgctcctatgctgatgcatatgatgtattcgaaagaatggcttattatgggatatcatcaaatttgatcctttatcttacaacaaagcttcaccaaggcacagtatcctctgcaaacaatgtcaccaattgggttggcaccatttggatgacacccatattaggcgcctacgttgctgacgctttgcttggccgctattggacttttgtcatagcctgcaccatttatctctcggttagtctctcaataagctactattgcttctaccaattttttagcctcttataacccccgtaag

SEQ ID NO: 36628 - DNA, 403 bp, Glycine max
  Clone ID: LIB3055-013-Q1-N1-D4
ggaaagagtgggattttcagtccctcacaggcacttcttgtgaagccagtgaagaggcagatgatggggaagagcaagggaatgagaattgcatgccaagccaccagcattcctgctgatagagtccctgacatgggcaaaagacagctcatgaatctgcttcttcttggtgccatttcactcccctctgctggaatgcttattccctacacctacttttttgtccctccaggttcaggttcttcagctggtggtactgttgccaaggatgctgttggaaatgatgtaattgcagagaattggctcaaggcacatggacctggtgaccgaacccttgcacaaggattgaaaggagatcctacctatcttgttgtggagaaagacagaacccttgcaacatatg

SEQ ID NO: 36629 - DNA, 432 bp, Glycine max
  Clone ID: LIB3055-013-Q1-N1-D5
cccaaacatgtaacaccccttttgaaactttttctcatgagccaccccccctttgccccatgccaccacttccttaatcaatttggcatgtgggggtggtgaacatgttgtggatatatggtgtgtttggtgtggctataatggtatcttccttatctttccatgctccttttctttcaaggctaagcgaaaacgctccttcttgaggggcggtttctgttggaaagggcaacttcaatcctttggcatttttcaactcctccatctcacctcacacactgtgatttgggctcttgagggacatctcagaatggcaacacccctttttatgtgtaccgtactattttctagttctttttcttgtacaacgaaatttagatgcagtttcttagatgttggtgttgttttttaatcaaaattagagttttatct

SEQ ID NO: 36630 - DNA, 373 bp, Glycine max
  Clone ID: LIB3055-013-Q1-N1-D7
attagtttggagaacagtgtctgctatcataaccacttgtggagcaatgctgattccattcttcaatgacgttgtgggacttcttggagcactggggttttggcctttaagtgttcttctaccagtgcagatgagtatcaaacaccagaggaccccaaggtggagtggtagatggattggtatgcaaatcttaagtgatgatagcttcatagaatcaggtgcggctgctgttggctcatgtgccagtatcgtgcttgacctacagaaatacataccgtgttatggagactattgaactccattcaccctctgctacataagctaaaaactgatgtggacagttatgcaggtttgcatatcttttgctgagatc

SEQ ID NO: 36631 - DNA, 304 bp, Glycine max
  Clone ID: LIB3055-013-Q1-N1-D9
tgcagctttctccgacagcttcattcaccatggctgatcagaccgagaaggcttttgtgaaacaaccaatagtgtttctcagctcgaagaaaactgcgacgggatagagacccgcaaagggagagaaccgattttggaaatccattgggcttggattgaacactcccagactagccatctaatgaacctacattgacatgacgtgccggttcactgccgctgaccacattcgcgtatggatagtggctgtaacacttgacatagctatgatcatcacgactaccagtgtgaggtggatttacgt

SEQ ID NO: 36632 - DNA, 353 bp, Glycine max
  Clone ID: LIB3055-013-Q1-N1-E1
ctcgagccgctgcagagaatggaggagagagacagttcaatggccttgctgatgtctacaggaagacattgacatctgatggtgtcgctgggctctaccgtggcttcaacatctcatgtgttgcaatcattgcgtatcgtggtctgtactttggattgtatgattacgcgaaaccagttgtcctcaccggatcattgcacgatagctattgtgccagctatgccctctgatggctcatgaccaatggtgcaggtcttgcatcatacccaattgacactgctcgaagaagaatgatgatgacctctggtgaatctgtcaagttcaagagttccttggacgcattcacacagatc

SEQ ID NO: 36633 - DNA, 386 bp, Glycine max
  Clone ID: LIB3055-013-Q1-N1-E10
gagagaaacaatggccaatgtttcaattccactcccacgaaacggtttctccaaacccaattactcgacaaaacgcccatgtttcaccccttcagcttcaacactcagaatttcttgctctggagtggctgagtttgatggatctcatcagaaaaaaggaggtttgtttaatttcaatggaatcaagggcgtggcttgtggtattcttgcagcttgtgctgttacttctgctgcatttcctgttactgctgctactcagaggcttcccccattgtcaactgagcccaatcgctgtgagcgtgcatttgttggcaacacaattggtcaggcaaatggtgtatatgataaaccattagatctccggcaatgtgatttcacaaatgaga

SEQ ID NO: 36634 - DNA, 362 bp, Glycine max
  Clone ID: LIB3055-013-Q1-N1-E11
gaagcaagtagtagaagcagaagagggtggaaaatcaaaaatgggagaagagagagaagatccacagaagctaaagcgattagcggcggattcatacgactacgacaacgactctcgatggcccgattactggaacaacgttctcatccctccccacatggcctctcgtgacgacgtcgtttcccacttcaagcgcaagttctaccagcgctacgttgatcctgattttgtggtggagccaatgtctgttggtggcagttcatcccagccagtgcgttcatcaactaccttcttatcgtcgcccctgacaaataatcaacctcgtgccagaagttctggatcaactaatagaacttcaggga

SEQ ID NO: 36635 - DNA, 154 bp, Glycine max
  Clone ID: LIB3055-013-Q1-N1-E12
ctttctgatggtagagattatattatgtacttgtttctggaatcatcgaattgatttccttgtgatatttgagtggtgagttactcaagaatgatgttgaagatggtatttgatttcctattacaagtttacttgggaaaatatttcatgtttc

SEQ ID NO: 36636 - DNA, 397 bp, Glycine max
  Clone ID: LIB3055-013-Q1-N1-E2
ggcatataaccttcaacggattgcataagcttgtgcatgctgatgacacattgttaaagaaaaaacacaaaaaggctctctcatccctatattaggaccaaaagaatctttttgtcctaatatagggatgagagagccttgaactttttgtcatttcaagaatttcaagcaaatctacacttgtgctacttttggggtacttttatagtcattgaagggcaaagcaagcgcgcattctcatcatttaatatatttgcagcttcctgcaaagtacaagaacataatatattccattattgtatcaatacaagtctgcagtatattctttccccccattcttcctttctgggatcttgaaaacagtaaaataaaaaatgataattgatgtttctttttt

SEQ ID NO: 36637 - DNA, 402 bp, Glycine max
  Clone ID: LIB3055-013-Q1-N1-E3
ggcatatatctgtaatctgagtgcataagcttctgcatgcgtatgaggcattgttaaagaggaatcacataaaggctctctcatccctatattaggaccaaaagaatatctttgtactaatataaggatgagagagccttgaacttttcgtcatttcaagaatttcaagcaaatctacacttgtgctacttttggggtacttttatagtcattgaaaggcatagcatgcgcgcattctcatcatttaatatatttgcagcttcctgcaaaattcactatcataatatattccattattgtatcaatacaagtctgcagtatattctttacccccattgtttctttttgggatcttgtaaacattaaaatccaaaatgattatttaaggttcttattttaaaa

SEQ ID NO: 36638 - DNA, 379 bp, Glycine max
  Clone ID: LIB3055-013-Q1-N1-E5
gcagggagctacagaaattcaaaacgaagaagaagaagaagaagctcgtgtcgtacagtgaaacaaattcaattcccagaaggaaacatgtttactatttgcaacccctcttctctttctctgcaaccgggtatcgtggctccgattccggtaaaacctatcaaacactcttcgaatctctctgtcaccaactccgcctcttccggcgagagaatcagcagtagcaccaggcgaagaaccatttcacccttcgaatcccgaatctcactcatcttcgccctcgcttctcaagccaactctctctcccagcgacttctagcggacgtggctgccgagactgcgagatacgtgtttccgaagagatttgaaagccgcaatc

SEQ ID NO: 36639 - DNA, 285 bp, Glycine max
  Clone ID: LIB3055-013-Q1-N1-E6
catcagtgctgtcatagtcggtctcttatcaagtgtagttgccacgtgttttgccgttcaatcctttacctaagctgtagcttcctatccgtcctgagttgcacttgttgacgtagatttatgttccgtgtagctttattcactttccaatccttactattgaactgttgtcaaatgcacgtgacataatattgtaacgatatgcatggtggtatgagtgtataccctgacgtatggataggtttatcgtgaatttgctcgggtgtctcatgttcgggcttgatt

SEQ ID NO: 36640 - DNA, 416 bp, Glycine max
  unsure (1)..(416): unsure at all n locations
  Clone ID: LIB3055-013-Q1-N1-E7
attagaattggatcattcattccaacatgggtttttcctcaaaagaagagaagtccaaaagaatattgaggggcttgaagactctcttcttcttgatcactatggttatatcgcttcttcttttctccgccccggttctccttgttattgccgatgcacttgttccttctgctctgctctcctcgctttctcaatcttctttctccatggaaactctcgcttcccatttccacaactacgattttcgatactctctcattgatattccccttgtgtcaataatacgatccttcatcatcttctgtgtttatagtttgtgtgatggaccaaggctttcgcatggaccttattnggggatcacgaccatgtgctctgttttgtctctgatgttggtgtcgttcaaagcagtttacatc

SEQ ID NO: 36641 - DNA, 430 bp, Glycine max
  Clone ID: LIB3055-013-Q1-N1-E8
gaagctaaccgccaggcataccgtaccctccttgtgacagttccaggacttggtcagtacatctctggtgccattctctttgaggaaactctctaccaatccacaactgatggcaggaagattgtcgacgtgctcctcgagcaaaacattgttcccggtattaaagtcgacaagggtttggtaccccttgctggttccaacgacgagccatggtgccaaggtcttgatggtcttgcctctcgctcggctgcatactaccagcaaggtgcccgtttcgccaaatggcgtactgttgtgagcatccccaacggtccctctgctctggcagttaaggaagctgcctggggtctggctcgctatgcagcaattgctcaggacaatggattggtcccaattgtggaaccagagatcttgcttgatggggagcatg

SEQ ID NO: 36642 - DNA, 397 bp, Glycine max
  Clone ID: LIB3055-013-Q1-N1-E9
atcacgtttagttcgcacaaggttttaaaaaatggctgatgctgaggacattcaacctcttgttgttgataatggaactggaatggtcaaggcgggttttgcaggtgatgacgctcctagggccgtgttccccagtattattgggcgaccacgccataccggtgtaatggttgggatgggtcagaaggatgcttacgtgggtgatgaagctcaatcaaaaaggggtatactcaccttgaagtatcctatagagcatggcatagtcagcaactgggatgatatggagaagatttggcatcacacattttacaatgagcttcgtgttgcccctgaagaacaccctgtacttcttaccgaggcacccctcaatcccaaggccaacagagagaagatgacc

SEQ ID NO: 36643 - DNA, 365 bp, Glycine max
  Clone ID: LIB3055-013-Q1-N1-F1
attttatccaattgaaattttaaaaatgactgggataaacttaagaattcaattattgaaattgaataagtaaacaatttaattggattggtcgaatggtatcaaaaaaatggagtactaactcccatttcttatttattattgaattaaccgatcaacttgctttgttatcgaacatttctttttgatttcaaaaattttccggaaaaaatttgaatctatttttatatgcgaatcaatcctactacttctggtcctgaggtttctgcgcttgaaaaaaaaaatctgggacgtatcgcccaaataattggtccggtactagatgtagcttttcccccaggtaagatgcctaatatttacaacgc

SEQ ID NO: 36644 - DNA, 391 bp, Glycine max
  Clone ID: LIB3055-013-Q1-N1-F10
gttagagggagggtgaggatgcagggaattaaattagggtttacaataatgttggtggttgctggcattgtagcagtgccacgcatctcgggtcatgtatgcaatggtaattcgggtactattcaagaggaatgcgaggagtactataaacccggagggccaactattccgtcatctacagaatgctgcaacgctctgagaaatgttgatgtgccctgcatgtgccgacttgctaacaattttcagtcatacttcagcggtggaaaagctgtctataccctcaggcagtgtggaaaagatgttccttccggaaccacctgcggatgttaccgtgctccccctgcttatactcaagtgtgatacgtcagcattgaagacgtatgcatacaac

SEQ ID NO: 36645 - DNA, 399 bp, Glycine max
  Clone ID: LIB3055-013-Q1-N1-F11
gaaaaccattgttcaggcccatgaaaatctccgcccaggatcaatatttgtcaataagggagagctcttagatgctggtgtaaatcgcagtcctagtgcttatctcaacaatcctgctgcagagagaagcaaatttaagtatgatgttgataaagaaatgactctgttaaagtttgttgatgatgaatggggtcctttgggaagtttcaattggtttgctactcatggtacttcaatgagccgaacaaactcattaattagcggtgataataagggtgcagctgcacgatttatggaagactggtttgagcgaaaagggtctgtaagaatggattcggttggatttgaaaatgatggaatcccccgaagaatttaaacataattcccagccttcatgat

SEQ ID NO: 36646 - DNA, 394 bp, Glycine max
  Clone ID: LIB3055-013-Q1-N1-F12
cttgctgatcctcatcatgggaaccatttttcctcctcactctctctctccactcctcaacatcaaaccttcaccctcaagaattctcttggctccctgtccccaacccaagtcaaattctctcttttgctccaaacccattgtttcaagtctcagaaagaaccaaacttcatctcccaaaccttcatcgggcacaagctggttggctcatgctcaacagggcctagcagctttggctatctccttggcactcaactttagcccagttttgtttaatggcaatgcattggcatctgagtttgatgtgcttaatgagggtccacccaaagattcttatgtgtttgatgatgcatgagtgcttagtagggtgaccaggtctgatttaaagcagttg

SEQ ID NO: 36647 - DNA, 396 bp, Glycine max
  Clone ID: LIB3055-013-Q1-N1-F2
ctccaaagcgacgctgttcccattcccttcccttccctctgcgcaaccccactggcccacctccgctgcttcctcacgctctccccacgcgccttcaagatcgtccttttcaactccgaccaccaccccgacgacgcctccggaacctccggcaacgccaacaactgggactgcggctctttctctctccactctagggccgtcggcgttcgggttgacaccatggaggagttttgccggattctcgccggaaaaggttggagcttttacaaaaccaagaaagccccatcttccgatcagcgccacggcggggcgttttacctcttcagaagggtggacgtgaaccgggttcgggtcggtggcgtcggagctccggaggatggggcatgtagggtg

SEQ ID NO: 36648 - DNA, 363 bp, Glycine max
  Clone ID: LIB3055-013-Q1-N1-F3
gccgcctctgataattgattactatcaacccaacttcaagttgtgttcttttgtggtgtgtaaccgtattctgtatttgttttcatcaattggaaactgggttttctcgctttttgcagataagcatcaataggatactagatcatggattggtactatgggaacggcattaatgattatctggttcccagagatcaggatttattggacaggcatccttcaccagactattggtcaaactggggaataagtgcaactgaagggattctgtacctgaaggtcttccatgtgttgacgttgaaaacctagacaaatccatcaacatttctcctgaaaaccaatgcagcagtacacctggtatat

SEQ ID NO: 36649 - DNA, 408 bp, Glycine max
  Clone ID: LIB3055-013-Q1-N1-F4
accagatcttgtgcttgtttacggacaccccatctactagctatgtgcatatgagctgtgaaggcgtatgatgtccgaggtgtcatcaattggaaactgggttatctcgctgtttgcagataagcatcaataggatactagatcatggattggtactatgggaacggcattaatgattatctggttcccagagatcaggatttattggacaggcattcttcaccagactattggtcaaactggggaataagtgcaactgaagggattctgtacctgaaggtcttccatgtgttgacgttgaaaacctagacaaatccatcaacatttctcctgaaaaccaatgcagcagtacacctggtatattgcataaagatataccagcttcatagtctgtttttagcaactcag

SEQ ID NO: 36650 - DNA, 430 bp, Glycine max
  Clone ID: LIB3055-013-Q1-N1-F5
cctgcaactgtgtctgcatgtgcgtgtgtcactaccattctctcgggagaacaaaccaccttttcttgttttttccagcattccaatttcccacgaattgtgtagatttctctgcagatatcttcttgtgaagcctctgctactagaagtgcaaacagtaactgtaccatgtattgcagagatcttcctgagcttatctgtacaggaaatacaaggtctcaggtctgcaaaaggccaagtccaagtgaatgttttgtaggttcttattcatcttgaggtagctttctcataattgactgaatgaagttccttaatgatttgataaattatgcttcagcttgtgaaatacccatgtattttccgttggttttattttgttgtattatgaaatgggattcatttcatttaaaaaaataacagtttctctttt

SEQ ID NO: 36651 - DNA, 302 bp, Glycine max
  Clone ID: LIB3055-013-Q1-N1-F7
tctcggtgaattccaattccacattttcaagaaattaggaggcaaatatgctcatatatgaattggaattatttgttttcttattaggcctatcctgaagccaaaggaaatgagatcggaattcctcggggtattccaattccacattttcatgatataaggaggcatatatgttcatatatgaattgcaattattcgttgacttattaggcctatcctgaagccattggaaatgagatcggaattcctagtgtaattccaattccacatcttcaagatataatgaagcacttttgctcata

SEQ ID NO: 36652 - DNA, 404 bp, Glycine max
  Clone ID: LIB3055-013-Q1-N1-F8
aacgaacttcgcatttccacgaaaatggcttcccaaaacccagcggaggaagaaaattcaaagcgacattggtcccttgaagacttcgagatcggaaaacctctcggtaggggcaaattcggtagagtttacgtcgccagagaagttaagagcaaatttgttgtggcgttgaaggttatatttaaggaacaaattgataagtacagagttcatcaccaactgaggagagagatggagatacagaccagtctccggcacgcaaacatcctgcgtctttacggttggtttcatgatgctgaccgtgttttcttgattcttgagtatgctcataagggagagctttacaaggagctgagaaaaaagggtcatctcactgagaagcaagctgccacgtatattttgag

SEQ ID NO: 36653 - DNA, 395 bp, Glycine max
  Clone ID: LIB3055-013-Q1-N1-F9
gtgatccactctctgagccccaatctcttgagcagcagaatcttcaggccaagccaggtaagcaagcacaacacaaccccgaaatggcttctgcttctgttcccatggctttctcgctgagctctgttatcaacaacaacaagccttcatccgaagccttcttcaggccactacccctacggcaaccaaagaggaccctcttcaccacaaaggcagtgtcaaactccaaggctcaaatcaatgcatctttgaaggagaaggcagttgcaggactcacagcagcttctgtgacagcatctatggtggttccggaggtggctcatgctgctggatatgagttctccccttccctcaagaactttctgctaagcatctttgctggtgggtttgttcta

SEQ ID NO: 36654 - DNA, 297 bp, Glycine max
  unsure (1)..(297): unsure at all n locations
  Clone ID: LIB3055-013-Q1-N1-G1
ttggctgacaagtacttgaacgaggctgcacttggaaatgctaacgaggatgctattaacaggggaactntcttccaatcttgaattggaggcaaagcanacttggcaagtaaatatttctgttcctgaaggttgtgctgatccaagtgctagaagttgtgatgggacttgcgtgtaacattcttagaattctcaatgtcttaggtgcaaagagaagatgccaagtttgagatgattttactatatttttcatattggactgtcttcctctataattttgagttaaagtgtccactt

SEQ ID NO: 36655 - DNA, 393 bp, Glycine max
  Clone ID: LIB3055-013-Q1-N1-G10
tgctcccttggcattgttcccttcatcaatgcacagattgttttccagcttcttgcacaagtatatcccaaattgcaagatcttcaaaagagagaaggtgaggctggaagaaagaaagttctgcagtacactcgatatgcttcagttggatttgccattgtgcaggcaattggccaagttcttttcctacgtccctatgtcaatgacttttctacagagtgggttatttcttctgttatcttattgactcttggctctgtgtttacaatgtacatcggagaacgaattacagacctaaaacttgggaatggcacctctcttttgatattcacaaacattatctcgtacttgccagcttcttttggtaggacaattgctcaagcatttaatgat

SEQ ID NO: 36656 - DNA, 327 bp, Glycine max
  Clone ID: LIB3055-013-Q1-N1-G11
caataagggaatggctgatgcgagtgatgatactgtgagcgagaaagctgcatcgacgagagcgtctctggagagaagccaggccatcaccgaccacgtaccttcgattctcggctcctgacgatcatcgtctgtccgacctagaaaccgacatgctctgcacccagatcagaacgcattctattcctaaagcccatgagaatattgataggactaggaagtatgcagatgccatattggctcactccgatcaatatcatcaggcagaagcaaagatagttaacggaccacatgaagatgtgaagaactatcctgaagcaattgatc

SEQ ID NO: 36657 - DNA, 276 bp, Glycine max
  Clone ID: LIB3055-013-Q1-N1-G12
aagagttgagaggcagttaggagatacaggtgtaaatggaaatggcctattgcgataccagcaatgtagtgtttcccctgaaattgttgaagttcaggatgattctgtcaaagttgattccaaagagtcaatgataacagaaggaaccatattatggctggaggattcagattggcaaaagggttatcagataaaagaggtaatcaacactagtgagttgacatacttcattgcatcccatgttgaagagccaggaaaaaatctggtcctatatgt

SEQ ID NO: 36658 - DNA, 322 bp, Glycine max
  Clone ID: LIB3055-013-Q1-N1-G2
gggaaattctccacgaggctttatccaaggttactggagaagctgatgaagatcttgtagatgtagtcaataattctgatcctatccgtgttgctgtgacagtggagtctgtattatttgaaaaatggggcccttctaatggggcacaaaaggtcaagtataggtccttaatgtttaaccttaaggattcaaacaaccctgatttccggagaaaagttctgcttggtgttattgagccagagcaactgatcaacatgagcacagcagaaatggctagtgagcaaaggaagcatgaatatcagaaaatcacagagaaagcttt

SEQ ID NO: 36659 - DNA, 341 bp, Glycine max
  Clone ID: LIB3055-013-Q1-N1-G3
ctctcatggcatcttcttctggtagtttagacacctctgcaagtgcaaactccttcaccaacttcaccttctccacacaccctttcatgaccacttctttctctgacctccttgcttctcccttggacaacaacaagccaccacagggtggtttgtctgagagaactggctctggtgttcccaaattcaagtccacaccaccaccttctctgcctctctctccccctcccatttctccttcttcttactttgctattcctcctggtttgagccctgctgagcttcttgactcgccggttctccttaattctttccaacattctgccatctccaacaactgg

SEQ ID NO: 36660 - DNA, 408 bp, Glycine max
  unsure (1)..(408): unsure at all n locations
  Clone ID: LIB3055-013-Q1-N1-G4
cctaaagatatgccctcctaatggtggagaaactagtcctgtatggccatctgatggaaattctcaatccattgcatttcaaagtagcattcttcgttgcctctctcgtatgcttgatgaggctatacatgctgacctaactatcatgacagccgatggaagcacgttgagagctcataaggcagttctctcagcaagttccccagtgttccagagcatgtttcatcacaacctgaaggaaaaagagtcctccacgatccatatagaagacatgtcactcgagtcctgcacggctcttctaagttacttgtatggagcaatcaagcaagaagatttctggaaacaccggcttgcattgcttggagctgctaataaatatgacattggaagtctcanagacatctgtga

SEQ ID NO: 36661 - DNA, 415 bp, Glycine max
  unsure (1)..(415): unsure at all n locations
  Clone ID: LIB3055-013-Q1-N1-G6
ctttcattaacccaacagtgtcgctgcaggagaagaagatcgaatcgaaacgaaacgcgaataagtttctttctctcttgctggacgaataatggttctgaggaggaagaagatggagcagcgcttcaccttcttctgctgatgttgatttcatggccacctcccagtcccagcatcgctgcgttttcgttgggaatataccgtatgatgccacagaggaacagcttattgaaatctgccaggaggttggcccagtagtctcattcagactagttattgacagagaaactgggaaaccaaaaggttatggattctgtgagtataaggatgaagagacggctttaagtgctcgacgaaatcttcagggttatgaaattaatgggcggcaattacgcgttgattntgctgaaaatga

SEQ ID NO: 36662 - DNA, 381 bp, Glycine max
  Clone ID: LIB3055-013-Q1-N1-G7
tccactatggctcgtcactcctagctcttaaccaggctactgttcaccgtcgtggccccattaaatacgtcggtgtcagcatgaagatgcactggttatgtgcacaaggaagacagcgcaagccttgaccttgtgcagctggtgacatttgaatgaccaagtgtcaatcccagtattcttcgttagtactgtgtaagtataccgaatgacgccgctgatggacagcttattgaaatctgtcatgacgttgtcccagtagtatcattcatactagctattgacggatgaactgtgaaacgcaaacgttatggattctgcgagtataaggatgaagagacggctttaagtgctcgacgaaatcttcagggttatgaaattaat

SEQ ID NO: 36663 - DNA, 384 bp, Glycine max
  Clone ID: LIB3055-013-Q1-N1-G8
ctcgagccgtttttttcctggttcgcgttgcgcaccggcctctatagcgagcttgaaccatcttcagcttcagctactttgcactaacaaagcgccccacgttctgagacaaacccagtatgctatctgccatgggggatcagaaagtttcgatttttcattgattgtgtataactgcacaaagaaggtagtgaagcaatgcgtagagcgatcgcgtttctcgttcacccacgattcctccttctcttccttgttctctcaattttcctcattttcacattttctggttctaccaccaccaatggttttactaatcccaaacaggttgttgagatcattgaggagaaaccagaagaggagccagaaattacacacagagtattt

SEQ ID NO: 36664 - DNA, 365 bp, Glycine max
  Clone ID: LIB3055-013-Q1-N1-G9
gtgttttagcaggatggagtctcaggtgaagcacgcacttgttgtcaaagttatgggtcgtactggatccagaggactagtaactcacgttagagtgaaatttttggatgatcagaaccgtcacatcatgaggaatgtgtaaggacctgtgcgagaaggatacattgtcactctactcgagtctgaaagggaagcacgatgattgcgctagatggtttcttttggcttgcctgcaaattcgaactatacagtgtgattttgatgattctaatggtagcaggtggatgtcataggttttagcacgctatcacatagtctgtctttggtctatagatattcgaattatggcgtgaactttagatgat

SEQ ID NO: 36665 - DNA, 341 bp, Glycine max
  Clone ID: LIB3055-013-Q1-N1-H1
ctcgagccgaatcggctcgaggagtcttgcaattgaagttgaagtcttgcccttctctcttcaactccaaacacaagacatcatcatccatggctgcctccgtctccactgtcggagctgtcaacagagctcttttgaacctgaatgggtctggacctggggtttcagctcccagttcatccttctttgggagcagcttgaagaaggttattggctcaagggtccccaacacaaagatttcctctggaagcttcaagattgttgctgtagaagagaagaaagagaatgaagagacccagcagaccgacaaggacagatggaagggtctggcctatgatatc

SEQ ID NO: 36666 - DNA, 193 bp, Glycine max
  Clone ID: LIB3055-013-Q1-N1-H10
ctgacaactgtgcggaattcctggaaaagatacttctgtaagccatctatctcagtctctatgcgtccatggagtgcagggacgtgaaggagaatagcggagaatctctcaaggctgatccgagcgatgacgagatatccagctagaagatgcatgcctgggggatgtcactatagatagagaaggactacca

SEQ ID NO: 36667 - DNA, 395 bp, Glycine max
  Clone ID: LIB3055-013-Q1-N1-H11
tcgtgacgaagttgctcagaatcttgtaatttccggagaagatgcctcgcaggtggaaagcattgatccgaggtctgagggttcaactgagagtaagaagggatcaaaggatcggagagggtcctataaaagaaggaagactgaacagacatggaccatagttgcccaaactactgatgataatcatgcatggagaaagtacggacaaaaggaaatcctaaattctcaatttcccaggagttacttcaggtgcactaggaagtttgaacaaggttgccgagcaaccaaacaagtgcaacggatacaagagaatcctgatatgtacaccattacgtacattggctttcacacatgcaaagacaccctcaaggctccacaaatggtgacacattctg

SEQ ID NO: 36668 - DNA, 401 bp, Glycine max
  unsure (1)..(401): unsure at all n locations
  Clone ID: LIB3055-013-Q1-N1-H12
ggctttggttgtattcgttgatgccgtggcgatttggctttcgtcttcttccgtttctcagtttgattacagcaattattaattactaattatattattaccactaccagtttcgtgtttggttatttgattntctctttttcatacttttaggatcaatggattttagagatttagctcacaagttctcttcgtgtattgttactgtttgtacagattggaaatctcgggcttcaactgctatggtactttctgcgaataattctcagcgcatggaaaggttcgctaccttgccattgtcatagaaagtgaagaagcttatcagatttccagagttgttaaacttttgcagtggctggacattattggtgtaaagaatgtgtgcctctatgacatgaatg

SEQ ID NO: 36669 - DNA, 350 bp, Glycine max
  Clone ID: LIB3055-013-Q1-N1-H3
gtgtttctgtaaccatggcatccaccactctatcccctacaaccccttctcaactatgctcaagaaaaagtgggattttcagttcctcacaagcacttcttgtgaagccagtgaagaggcagatgatggggaagagcaagggattgagaattgcatgccaagccaccagcatttccgctgatagagtccctgacatgggcaaaagacagctcatgaatcttcttcttcttggtgccatttcactccccactgctggaatgcttattccctacacctacttcttttgtccttcaggttcaggttcttcagctggcggtacctgtgcccaagatgccggtggaaatgatgta

SEQ ID NO: 36670 - DNA, 432 bp, Glycine max
  Clone ID: LIB3055-013-Q1-N1-H4
ctcaaaaacctacacttatacaccttgcattctaatattaagagaggaaaccaactcttaaaataaagataacatttttagatcaaagcaaaatcttacagagttgataatatctttgaatttaaacattatcttaaaaatttgaatttaaaaatttaaattattctcccgagtcccaacactttcttccttctacagtagattgtgtgtgcttgtggacaatttgactgagtttgttgtgttggccccatgaactgaatttatgtctgtgaattttcttttctacgtaggtgtcaagtgctacagccacttttgccatgacattttcagcatctatgtcagtggtggaatattaccttctaaaacggtttcctattccttatagtaagtatgaatgtgaatgggaataaaactaacaaaattaatcttata

SEQ ID NO: 36671 - DNA, 274 bp, Glycine max
  Clone ID: LIB3055-013-Q1-N1-H5
cttgcaaccatactcgtggctcgcgttaccgatggtaggaagaatggtacctgcgcttgactgaagccagatggactgacacaagtgactgatgagtgctacaatgacactggtgccatggtcacaattctggatcacactgcactaactgccacacaacatgatgagactgtgagcactgaccaaattgctgctgaccttagagagcatgttatcaagcctgtcattactgagaagtgcctgtatgagaagaccatcgtccagcttaaccatt

SEQ ID NO: 36672 - DNA, 399 bp, Glycine max
  Clone ID: LIB3055-013-Q1-N1-H8
ctggtaaagcagcagatttgacatattgggagagcgcagctcgcatgattgctgatgtttcgaagtctgacaagatcgttgtagagaaatccacagtcccggttaaaacagctgaggcaatagagaagattctgacccacaatagcaagggaatcagattccagattttatcaaaccctgaattccttgctgagggaactgcaatcaaagatctctttaacccagaccgtgttcttattggaggcagggaaaccccagagggccaaaaagctattcaagcattgaaggatgtttatgctcaatgggtccacgaagaaagaatactaaccacaaatctctggtcggcagaactatctaagcttgctgctaatgccttcttggcccaaaggatttcatctg

SEQ ID NO: 36673 - DNA, 399 bp, Glycine max
  Clone ID: LIB3055-013-Q1-N1-H9
ggcgagtgtcgtttccttcccttccctaacgatctgaggaagacaccaagcttctctccacgcccttcttgggtaatctgaagtgcagcgatggcggatggattgcactcgcggcatccatcagtagttcagaagttatctggacagtcttatttgttgtctaggcttgcccctactcactcaagaaactattccacaactggtagttacttcaatggaggcttgcagtcttcgggtttggttccagtcatggcacatgcaccggctgagaaaggagtgtctggatttttgttggatttcatgatgggaggagtgtcggctgctgtgtccaagacggctgcggctccaatcgagcgagttaagttgctcatccaaaaccaggatgaaatgatcaagagt

SEQ ID NO: 36674 - DNA, 427 bp, Glycine max
  Clone ID: LIB3055-013-Q1-N1-C5
gtttattctctttctctgccctctcatcttcgagctccgatggcgagcctgtggcgcgcggcaaccggcatgacggacaacgccaccgattacgacggcgtcgagttctggtcgaaccccgagcggaccggctggctcaccaagcagggcgagtacatcaagacctggcgccgccgctggttcgtcctcaagcaaggcaagctcttctggttcaaggactccgccgtcacgcgtgcgtctcgtccacgcggcgtggtccccgtcgccacgtgcctcaccgtcaaaggcgccgaagacatcctcaacaagcccaacgccttcgagctctccacgcgctccgacaccatgtacttcatcgccgactccgagaaggagaaggaggattggatcaactctatcggccgctccatcgtccagcactccagat

SEQ ID NO: 36675 - DNA, 412 bp, Glycine max
  unsure (1)..(412): unsure at all n locations
  Clone ID: LIB3055-011-Q1-N1-D1
gtgttgcagtggtatgcctgagtgtaaacttggattaaatgatagaatattattagaagcacaaggtaaaacaaccaaagggaaatcaattgacttggaagacatcaaatttcatcagtgtgtgcgtttggcccgatttgagaatgatcgaacgatttcatttatccctcctgatggatcatttgatttaatgacatataggctcagtacacaggttaagcctttagtttgggtggaagcacaagttgaaaaacattcaaaaagccggatcgagattatggtaaaagctaggagtcaatttaaagaacgcagtactgccacanatgttgagattgagttgcctgttcctgctgatgcaaccaatccaaatgttcggacttcaatgggatctgcatcatatgcacctgaaaaa

SEQ ID NO: 36676 - DNA, 365 bp, Glycine max
  Clone ID: LIB3055-011-Q1-N1-D10
gttttcttcattatcttccttgtcactgcccgtgtgtcggcggcatgtccaccgtcaccacgcaagccttcgacgcaattttccggccatgtacctagaaatcgaggtttttgaccatgtcttacggtaaacgtaaccgcatgagagactatgcgaatccaagggatacaattgttctgaatttgaatgaatatttgcacatgaagaagggtttgccaaaaggcttagctattgggagttgcagcattcttgagactgcaggtcaaggagcactcattcccctctaccagacattgaagtctgccattacttccaaggaatcagaatctttcagttccaataaaattatttggctgcattttggg

SEQ ID NO: 36677 - DNA, 384 bp, Glycine max
  Clone ID: LIB3055-011-Q1-N1-D11
tgggcatttctcccacatggtactggaaatgcaacgatcaaatcctttgtcagttcttcagtttacttgtaggtttctggaaaactggagcttgaacacgctctcattgagctcttcaccaatgcaacacttcaagtacgcggtagagctgctaaggaagctttttgttggttgtcctcctgtggcgttgttgaaaacatttggagtttgctaaattttcacatttttgtctgcagaggaatccaagagtccaagactatgagaaatgaagtttaatattgtcacaacaaattttcattcagactcgatccatttattggattcatttaccctgcgatataagcacacccatatttacaaccccattttacagtaatggtgggt

SEQ ID NO: 36678 - DNA, 373 bp, Glycine max
  Clone ID: LIB3055-011-Q1-N1-D12
cttcgccacatgcaacagtgacgccacgtcaccgcaagatccattcgtttggaatcatcgttccacccaccttggttccatccatcttcaaaaagcaaagaatttgagtaatgggttttgaaattcaagtaatttgagtcgtgggttttgaaattcacgcgatttgggacgtgagtttttgaaattcgaggccatttggttgatgggtttgggaggaatctgaggaaaattttcaatgtcggagagcgatcagcgtcgtcttctcggggcttccgaggatgacgtggagtctggagggtcggaattggctttggcggtcgtcaatggcagcagtggcaacaacaacaacaaccaccaaaggtttaaggatttg

SEQ ID NO: 36679 - DNA, 401 bp, Glycine max
  Clone ID: LIB3055-011-Q1-N1-D2
gtttgagatacaatgcactaagtttcattttcgttcaagtgcgggaactatcatggctgcagtggcatccattcagtgtttcttctagtcctttggatggaaagaatcaccttgctgttctcataaaggttcttggcaaatggacagaaaagttgagacaaaggattactgatgtcgatgcacaaaaagattcatgtgtcataacaacttcagttgaggggccatatgggcatgaagtaccataccacttaatgtatgaaaatcttatattagtggctggtggtattggactctcacccttccttgctatattgagtgacattctccaccgtgttagggaggggaaaccctgtcaaccgagaaatattttacttgtttgggcggtaaaaaaatcaaacgag

SEQ ID NO: 36680 - DNA, 137 bp, Glycine max
  Clone ID: LIB3055-011-Q1-N1-D3
tcattcttcatccatagacatggccaccgtcacttctgcagccggtgctattcccttattcactggccttaaagcaagccccagcaaagtgaatgccccaagtaaaggctcaactccccaagccacaaaggtgggca

SEQ ID NO: 36681 - DNA, 403 bp, Glycine max
  unsure (1)..(403): unsure at all n locations
  Clone ID: LIB3055-011-Q1-N1-D4
atcaagaaccggtttggtatgggtggtttggaatacttgggattgcttgctaattcggaccctgggcttttcgaatggtaccattcgctggcggatctggaccagaagaagctctggcaccagctcactctcaagctcgagcagtttgtggctctcggcggctttcaggctggtgatgctttaatacaattatatcacaatttcatcacagactttgagacgaaaattaaccttctcaagcttgcacattttgctgttatagtttctcggcagtattctgaaaaagaagctgcttgtggttatcttggaggggtcattcagaaacttcaagacactanggagcagcgcatagaagaacctattctttacattaagatgcanatagcaatattcaagcttgagc

SEQ ID NO: 36682 - DNA, 377 bp, Glycine max
  Clone ID: LIB3055-011-Q1-N1-D5
aaaccatgaaagtagacaactaacgcaggtctatggattgtatgatgaatgccagaggaagtatgggaatgctaatgcttggcgatattgtacagatgtttttgactatcttactctttctgcaattatagatggaactgtgctttgtgttcatggtggcctttctccagacattcgatcaatagatcagataagggtcattgagaggaactgtgaaattcctcatgagggaccattttgtgatctgatgtggagtgatcctgaagatatcgaaacatgggcagtcagtcctcgtggagctggttggctttttggatcccgggtcacttctgagttcaataacataaacaatcttgatctggtttgtcgggcacacc

SEQ ID NO: 36683 - DNA, 392 bp, Glycine max
  Clone ID: LIB3055-011-Q1-N1-D6
gcccagaactcgctctctcttaatttcttgggccccaagcccgttcctatgaagcacgttggtgggccggcgaagcccacgaagctgtaccggggcgtgaggcagaggcattgggggaagtgggtggcggagataaggctaccgaagaaccgaaccaggctttggctcggaaccttcgacacagccgaggaagccgctttggcttacgacaaagccgcgtacaggctccgaggcgacttggcgaggctgaacttcccgaacctgaaaggctcgtgccccggcgaggagtacaagcctatgcaggctgcggtggacgctaagctcgacgcaatctgcgcgaacttggcggaaatgcagaagcaagggaagaacgagaagggtgccaggtcggg

SEQ ID NO: 36684 - DNA, 382 bp, Glycine max
  Clone ID: LIB3055-011-Q1-N1-D7
cgcccctcctgataaggagatggagaaggaggatctgcggcataatcactgctcatcgacatgtctcgatgctatagcagaaagatcttagacaccaagcgtgctatgactgactgtaggtgtagttatgaagatagctcatgtttgagctgatggaggcttttcttcatacatatgatcactagatcagatcgtggtgatagagacgaactgcgagttatcttattaggaaccattttgcgatgtcttgacgagctatagctgaatatctcagaccatggtcagtattacatcgtgaagctggtctgctattaggatccggtgtaacttctgagttcaatatcatacacaatgttgatctggtttgttagtcacatcaact

SEQ ID NO: 36685 - DNA, 406 bp, Glycine max
  Clone ID: LIB3055-011-Q1-N1-D8
aattagttcattctctttgcgcagttccctacctctcctttcaagatgcagatcttcgtcaagaccctcaccggaaagaccatcacccttgaggtggaaagctctgacaccatcgacaacgtcaaggccaagatccaggacaaggaaggaattcccccggatcagcaacgtctcatcttcgccggaaagcagctcgaggacggccgtaccctcgccgactacaacatccagaaggagtcaacccttcaccttgtccttcgtctccgtggtggcatgcagatcttcgtcaagactctcactggcaaaaccataaccctagaggtcgaaagctctgacaccattgacaacgtcaaggccaagatccaggacaaggagggaatccgcccagaccagcaacgtctcatct

SEQ ID NO: 36686 - DNA, 339 bp, Glycine max
  Clone ID: LIB3055-011-Q1-N1-D9
tgaaatgatgcctgtgacatggcccagctttagtgatatgcacccttttgcaccagttgactcaggctcaaggttatcaggaaatgttcaacaatttgggtgaactgttgtgcaccatcactgggttcgactccttctctttgcaaccaaatgctggtgctgctggtgaatatgctggacttatggctattcgtgcctatgatttcgctaggggagaccatgatcgcaatgattgcatcatacctgtctcagctcaccggacttatcctgctagctccgatatttgcgctatgaaacatgactctgctgctactgattctaatggtgacatcaatatac

SEQ ID NO: 36687 - DNA, 413 bp, Glycine max
  Clone ID: LIB3055-011-Q1-N1-E1
gcaatggctcaaaccatgttgctcatgtctagtgtctctagcagttattccggggatttgaagaaaggcctttttctccaattgcaaaatcaaagtttaaggcctaagttctctcagctctcattcaacccacttccatcatcaacttcttccttttcttcaccccgtacattcacaactctggccctcttcaaatctaagaccaaagccgctcctgctaagactaaggttacaaagccaaagcaaaaggttgaagatggtatctttggcacttctggaggatttggttttactaagcagaacgagctctttgtgggtcgtgttgctatgcttggttttgcagcatcactgttgggtgaaggaataactgggaaaggaattctagcacaattgaatctggaaactggaattcc

SEQ ID NO: 36688 - DNA, 366 bp, Glycine max
  Clone ID: LIB3055-011-Q1-N1-E12
gacaaacttgagggcagaccactaagttgcaggctcacagacaaagcaaatgatcagttacgtagatggtttgaagatgatgaagcactcgagcgtgctattaatggagaatggattttattaccgcatggagatggaacaggtctttcaaagcctatatctttaagtcgaaatgagatgaaacccttcataatcgggagtgcaccaatgcaagataattcaggcagttcagttacaatttcttcaccacaggtttctccaacgcatgctcgaattaactataaggatggtgccttcttcttgattgatttacggagtgagcatggcacctggatcattgacaacgaaggaaagcagtaccgggta

SEQ ID NO: 36689 - DNA, 412 bp, Glycine max
  unsure (1)..(412): unsure at all n locations
  Clone ID: LIB3055-011-Q1-N1-E2
gcgacgatgtaagcaatgaccgcaacgaccacgtttgatgtctctggcccttgcttccgtgcccctccttcttgttcaccgaatccatgccacaccagtttttcagttataaactccctgaatcctcacaagggacgacggataagcgttgctgttccacctaagtttccaagcttccggagggaagcagctctgcaggggaatttggaggctgttagagtcccaacttcggtgcctgtgcgtgtagcatacgaacttcttctagctggtcatcgatatttggatgtaaggactccagaagagttcaatgctggacacgctcctggcgccattaacataccttatatgttcagagttggatcagggatgactaagaatagcaactntattagacaggtgtcttcaaatttta

SEQ ID NO: 36690 - DNA, 413 bp, Glycine max
  Clone ID: LIB3055-011-Q1-N1-E4
gctcagtcttggttccaaatgttgatgctactgtagcttttaatgggagttccttcttctgaagcttgcaaaccctgcccaagccaaggctcctgttcaggcccactttggagagctggataattctgttggcttttctgatgttacggctgccaaggccttagaggagaagttgaaggcatctggtgttccacatgaggtacacatatatcctggcaatggacatgcattcatgaacaggtctccagaaggaatcaagaggaggaagaatatgggaatgcccgacgaagacgaagctgcagttcagcttgcatggtctcgcttccagtcatggatgacacattacttatccagctaaataagttcttagtaatgccacaatggtatgataacatgatatacttctaattctg

SEQ ID NO: 36691 - DNA, 409 bp, Glycine max
  unsure (1)..(409): unsure at all n locations
  Clone ID: LIB3055-011-Q1-N1-E6
gttatctgtttcccgccatatatccaataagctttaaccatgtctgcctttgttggaaagtacgcagatgagcttatcaagaatgccaagtacatagccacacctgggaagggcatcttggcagcagatgagagcactggcaccattgggaagcgcctatcgagcattaacgttgagaacattgaggccaaccgccaagctcttcgcgagcttctcttcaccgctccagatgccctccaatacctctctggtgtcatcctctttgaggaaactctttaccagaaaacctccgatgggaagccttttgttgaggtccttcaagagaacaatgtcatcccaggcatcaaagtggacaagggtgttgttgagttggctggcacaaatggtgaaaccaccactcanggattcg

SEQ ID NO: 36692 - DNA, 411 bp, Glycine max
  Clone ID: LIB3055-011-Q1-N1-E7
gttttgtatgcagtgcgctcgcaaaccttcctgatatccatccagattgatagttcattgcatgcaaccatagttttattaggttttttcttctttgttttcaattaggtttttgctgctctccttcaaactccgtctttccgaatcctctctttgtgattgtgttctgttctgcttcctaccgcgatagtttctcttctgaagcatggccatggcggtttctgcaattggttttgaaggtttcgagaagaggctggaaatatcctttttccagccgggactttttgctgaccctgagggaatgggtttaagagctcttgcaaagtcccagttggatgagatacttacaccggctgcttgcaccattgtttcatctctcagaaatgatcatgtcgactcctatgttctggc

SEQ ID NO: 36693 - DNA, 408 bp, Glycine max
  Clone ID: LIB3055-011-Q1-N1-E8
ggtgcagtttggggtgacatagtttggggacacgcagtgtcaagggaccaatggaatcaatggctttaaccttcaattaccattggtggttgatcaatgtattgccttgcagggtgtgtgaccgggttaagccacatcttaacaaaccggggaatcattatggtattcaccggtttccaccaacgagtcagtgcaggttcaaaaccttgcataccctgcagacccttctgaccctctccttgtggattggatcaaataccctggaaaccccgttttggtgccaccaccaggcattggtactaaggactttcgcgacccgacaaccgcgtggctcacctccgaagggaagtggcgaatcaccataggatccaagctcaacaaaacaggcattgcattggtttatgacac

SEQ ID NO: 36694 - DNA, 360 bp, Glycine max
  Clone ID: LIB3055-011-Q1-N1-E9
aaaaaagtgtagtgggaaatggcaggtgcgggtgcaggaggagggtatggggacgcgaaccagaggatagactacgtgttcaaggtggtgctgataggggactcggcggtggggaagtaccatattctacctacttttgcgagtgacgacctatttttaaagaagtcacgcactttacccattatcagagctactatactttcttctgaaagagatgcttttaaacatgcattgtcaagatcttccgatgatcttcacgctttacacatgtggcataaagaggaattcatcaatgagtttgatgatcaaataagggcatatcaagatagaacaattgacatgggaaaacctggagatggt

SEQ ID NO: 36695 - DNA, 405 bp, Glycine max
  Clone ID: LIB3055-011-Q1-N1-F1
caagaactctccaaggatcctccttcccacgagaatctttggggggtaaaatccaagaggtttgaaatttgaaagcagggaagatggattatttcaatgcaccaggaagaaaccatctctttgttccagggccggttaacattccggaccagatcatccgggccatgaacagaaacaatgaggactaccgttctccagcaattccagctatgacaaaaactttgcttgaggatgtcaagaagattttcaagaccactactggaaccccatttctcatccctacaactggtactggtgcttgggagagtgctctcacaaacacactgtcttctgggggatcgaattgtatcgttcctgattggccaattcagcttgctttggattgatcagcagcaacgcctgaag

SEQ ID NO: 36696 - DNA, 392 bp, Glycine max
  Clone ID: LIB3055-011-Q1-N1-F10
gccaaagtggataccttggccaaaaaaaaaaaaaggttttccctttgagaaagaaaacccaaagacagtctttggatcattttgagcagttgcattccttgttttcttccattttgggtcccctcaaaagtagtttcaaaagggttcctcttcctccacagatatcatggcagatcataccccgggttcaggaaccgtttctgttgaagcttcttcacaagaaagaaggaaacttccaaactttctcctatccgtgagacttaagtatgtgaagcttggttaccactacttgatctccaatgctatgtaccttttactcataccccttcttggtgtagcttctgctcatctttcaacaatctctttaccagatggtgtccaattttgggaaa

SEQ ID NO: 36697 - DNA, 368 bp, Glycine max
  Clone ID: LIB3055-011-Q1-N1-F11
gctgattcatgttcattttctctgggaaccatgttgatattttggtagcatctgtaatattggtgattgttataaaaacaatcataattgcatctgttgtgaaaggatttggttacaataacaagacttctatacttgttggaatgtcgatggcacagataggagaatttgcttttgttcttctcagtcgtgcttcaaaccttcatctagttgagggtaaattatatctgctgcttcttgggaccacagctcttagtctggtgacaactcctttacttttcaagctaattcctgctgtagtgcatcttggtgtcctactgagatggttctctcctgatagttcagtggagattggatataagctagat

SEQ ID NO: 36698 - DNA, 366 bp, Glycine max
  unsure (1)..(366): unsure at all n locations
  Clone ID: LIB3055-011-Q1-N1-F12
cccacctggggcttacccaccaccacctggggcattaccctccacaacaaggatatcctccagctgggtatnctccacaacaagggtatcctccagctgggtaccctccacatcaaggctatcctcctgctggttaccccccagctggttatcctggttcatcacatgcaccaggttctcatgggcacggcggtatgggagcaatgctcgctgggggtgctgctgcggctgctgctgcttatggtgctcaccatgtctctcatggctcccatggctcctatggccaatatgcacatggtgctcacatgccacatggaaaattcaagcagcacgggcacggtaagttcaagcattgaaagcatggca

SEQ ID NO: 36699 - DNA, 323 bp, Glycine max
  Clone ID: LIB3055-011-Q1-N1-F2
caccattcagtacatgtcgttgggtggtgcttgggaaccggaaaaccttcggtttttggtttccccatgatgatgcggcgcaaaacaacccgtttggaggtttcctcttcttacgacaacatttcagcttcaattttggaatctgggaacgttcatgctcctcttgatgaaaagctgattctaaagaatagatcacaagagacccaaccatatttaaatggacgctgtatttatcttggtggaatgatgggctctgggaaaacaacagtggggaagataatgtcgcaagtgcttggttattcattttgtgatagtgatgcatt

SEQ ID NO: 36700 - DNA, 418 bp, Glycine max
  Clone ID: LIB3055-011-Q1-N1-F3
ccattaatagcttaaatgctggatatggtctctaaaggttgttctggtatgggccactttttcttggtccaaggtgaaaagtgggttgtgcgtgtggccagatgtgagacaactttgctttagaaaaggcatgctatatggatttatgcggttgttttctacaccgttgaaaacgctccgtggagctagccgctcgctgagagtgactcaattttgcagtgttgccaatatgtcttcctcattgcagattgaattggtaccttgcctgaaggacaattatgcttatctgttacatgatgtggacacgggtacaggtggtggtgttgatccttctgaagctgtgcctatcatagatgccttgagcaggaaaaatcgaaatttgacatacatactcaacactcaccatcatcatgatcac

SEQ ID NO: 36701 - DNA, 412 bp, Glycine max
  Clone ID: LIB3055-011-Q1-N1-F5
gttgcttcagccatctctcgccgttgatttcgtccaaatgccctagatctgagccgttagggggcaatcaacggcgtctgtcatgtcaattggtatattgaaaaaggttcaaggcttggtgcagaaatggatgcttatattatcttgcttggtatttgtgattgaggctggtgaaaatgataaaacaatggagcccccttctttatatgattctggatcacctttgccctttgttgttgttcatgatctacctctaccagcaaatctccatgtgtcgaagcatgtgctttctcatggtgcaccaattgctgcactgtcaccagtcaagcctccttcatatggtcctttcacaagtaatggtcacccccctgcaagttcacatttatccatactattcaagaagagtgaaatg

SEQ ID NO: 36702 - DNA, 321 bp, Glycine max
  unsure (1)..(321): unsure at all n locations
  Clone ID: LIB3055-011-Q1-N1-F6
acaatattgtagtgctttttcccacaatatttggtgtcacgtattactacaccaatcttctttgtaaacgcggcatacgactcatggcagattaagaacattttggcaccgggtgttgctgatcctgaaggccattggcatagctgcaagcttgatataaacaactgctcacctgatcaactcgatctaatgcaaggcttcaggacagaatttttaagggctataactgtgcttggcaactcttcatctaaaggaatgttcatagactcttgctatgcccactgccaaactgaaatgcangagacatggttgagaagtgac

SEQ ID NO: 36703 - DNA, 377 bp, Glycine max
  Clone ID: LIB3055-011-Q1-N1-F7
cttcactgttagggccatccaatcagaaaagccaacctatcaagtgattcaaccaatcaacggtgatcccttcattggaagccttgaaaccccagttacatccagccccttgattgcatggtacttatcgaacctccccgcatacaggaccgcagtgagcccactactaagagggatcgaggtgggcctggcccatggctaccttctggtgggcccattcgtgaaggccgggcctctgaggaacaccgagatcgccgggcaagcgggctctctcgccgctggtgggcttgtggtgatcctcagcctttgcctcacaatctatgggatttcatcttttaacgaacgagacccatccactgccccgtcactgaccttga

SEQ ID NO: 36704 - DNA, 371 bp, Glycine max
  Clone ID: LIB3055-011-Q1-N1-F8
cccaaacaaaaccacttttgatgttgatttggtttggtttgtaaaaaatccgacagttgaaaaggatgccaacatgggaagacacatagctgaacctacaacacacacacacacacacacacatatactgccaccacccctagacatacaccaaacaaaagtctgttcttttatgcacacagaaacctgcttgctattactgtaaggattggattctggcaaggatttctatatgggagaagcacctacattcatacctcaagacctgcagaatggaacatgcaatgggtttgaattaaaaagtgggacttttgaaactgatactattgttggcaataaacagtatgtcattggtggaacctatggtgaaa

SEQ ID NO: 36705 - DNA, 353 bp, Glycine max
  Clone ID: LIB3055-011-Q1-N1-F9
ttcttcctcagtagtgtcatttacgcttctcttctctgcagcaactatgcctaaccctaaggtcttcttcgacatgaccatcggcggtcaatctgctggccgcatcgtgatggagctctacgccgacgtcactccccgcaccgccgagaacttccgcgcgctttgcaccggcgagaagggcgtagggcggagcggcaagcccctccactacaagggctcgtccttccaccgcgtgatcccgagtttcatgtgtcagggtggcgacttcaccgccggaaacggaaccggcggcgagtcgatttatggcgccaagttcgccgacgagaacttcgtgaagaagcacaccggtcccg

SEQ ID NO: 36706 - DNA, 352 bp, Glycine max
  Clone ID: LIB3055-011-Q1-N1-G10
tcagaatcaatggttacctctctggctatcataattcttgtgctgctattccaacaaacttgccttgccaagcagcaccaccaccacccaccctgttattcttcatgtggcgaaattcacaacataacgtatccatttcgactaaaaggcgacccaatcggctgcggcgatcaagattacgaattagattgcgttgaaaacgtgacagtaatgactctattttcagggaaattccacgtgcaggaaataaattacaagaggtacgagatccggttgaccgatgctggtgtggtggaggacattgcttgctcaattcctcgttatttctttaatctctacaatttcacttaca

SEQ ID NO: 36707 - DNA, 205 bp, Glycine max
  Clone ID: LIB3055-011-Q1-N1-G11
gatcatcagaaaaaggagcagcaagaaaattttcttatcacgccaggtctacttgaccacagttcatcgctgcttctttttcgaattgcatgaggtcaataggtcacagatacgaggacaaagcaggggtatttattgtattttaacttgtaaatagcacaattggctttgaaagaaaaagaacggttgcagagtcgctccagtt

SEQ ID NO: 36708 - DNA, 333 bp, Glycine max
  Clone ID: LIB3055-011-Q1-N1-G12
ctcattcaagtcgctaatcctagttccttcaactcctcgctggcaacatcagcagtactaccattagccgcgtttttcaaaagtgattttcgagaattagcgatgggaattgaaagaggaggcttcaagggattcaggagcgcctggagcgtgccgcccaagccgtgcgattcctgcaagctggcctcggcggcgcttttctgccgccccgattccgcgtttctctgcatcgcctgcgattccaacattcactgctcgaacaaactcgcgtcgcgccacgagcgcgtgtggatgtgtgaagtgtgcgagcaggcacccgctgctgtcacgtgc

SEQ ID NO: 36709 - DNA, 414 bp, Glycine max
  Clone ID: LIB3055-011-Q1-N1-G2
tgcatgcaaccatagttttattaggattttttcttctttgttttcaattaggtttttttgttgctctccttcaaactccatctttccaaatcctctctttgcgattgtgttttgatctgcttcctactgcgatagtttctctactgttacatggccatggcggtttccgcaattggttttgaaggtttcgagaaaaggttggaaatatcctttttccagccgggactttttgctgaccctgaaggaaggggtctaagggctcttacaaaatcccagttgggtgagattctaacaccagctgcttgcaccattgtttcttcgctcaaaaacgataatgtcgactcctatgttctatctgagtccagcctctttggttatgcctacaagatcatcatcaaaacctgtggtactact

SEQ ID NO: 36710 - DNA, 415 bp, Glycine max
  Clone ID: LIB3055-011-Q1-N1-G3
caaacgcagccaaaacaacaactaacggcaaaaattttttcccaacccaagggaaaaccggggccacaaaaaaagtaacacacacgcacacacgcatcatcgtataacatttgttttattttttttaaagagcgagtgttgtaacaaatggtgaagtcgaagagcgtggagaaacctgcggaggaacaacaacgaggtggtgtttcagcgtacagaggagtacggaagaggaagtgggggaagtacgtgtcggaaattaggctgcccaacagccgtcaaaggatttggttgggttcctacgacagcgccgaaaaggcggcgcgtgcattcgacgcggccatgttctgcttacgtggcagcggtgccaactttaatttcccgagcgaccggcccaacatcgctggcgggaggaaca

SEQ ID NO: 36711 - DNA, 146 bp, Glycine max
  Clone ID: LIB3055-011-Q1-N1-G5
attatttttttcattccttcattttaaacctactgcagcccttttatcaccatatcatggcatcagaagcaaatgctgccaacaccaacttctgtgtaaatgttagcaactatggctacattagtgctaatgaccccttgtactga

SEQ ID NO: 36712 - DNA, 417 bp, Glycine max
  Clone ID: LIB3055-011-Q1-N1-G7
gggaatcgccgttggggctgtggcggttcttcttgtgttgagcattctctgcatatgttgccggaagaagaagagaagacgtgatgaagagtactatgctccgccgccgcaaccgccgcggggacctaaagatgatgcatatggtggtcccccacgtcaatggcaacacaatgttccccctcctcaagatcatgtggtctcaatgatgcctccaaagccatcgccaccacctgctccaccggcttatgctgctcagcctcccccaccaccgcctcctttcatcatcagcagtggtgggtctggatcaaactattcaggtggtgaatttcttcctcctccttcgccaggaattgcattgggattctctaagagcacgttcacgtacgaggagttggcacgtgcaactgatggcttttc

SEQ ID NO: 36713 - DNA, 402 bp, Glycine max
  Clone ID: LIB3055-011-Q1-N1-G8
gtaaattaagagcatggctgcacaagctcttgtatcatcatcttctcttaccttctcagcggaggctgcaagacaaagtcttggaccaagatcactccaatctccatttggcttctccagaaaagcctcctttcttgttaaggcagctgctaccccccctgtcaagcaaggatcagacaggcctttgtggtttgcatcaaagcaaagtctttcttacttggatggcagccttccgggtgactatggatttgaccctctgggactttcagaccctgaaggaacaggagggttcattgagccgaaatggctagcatatggtgagataatcaatggtcgttatgcaatgttgggtgcagttggtgcaatagcacctgaaattctaggcaaggctggtctgatccc

SEQ ID NO: 36714 - DNA, 369 bp, Glycine max
  Clone ID: LIB3055-011-Q1-N1-G9
aggttacatgaagccatttctctttttaaatcttcccaacaccgagttcaattcttcacaagttgattgtaatcactcaatggctcattcttcttatccctacggcgatccaatttttgcttatggaccacaagctattagtcatccccaaatgatacccccgatgctgggactagcatccaccagagtggctttgccacttgatcttgcagaagatggaccaatttatgtcaatgcaaaacaataccatggtatactgagaaggcgtcagtcacgagcaaaacttgaggctcagaacaaacttatcaaaaatcgtaagccatatcttcacgagtcttggcaccggcatgctttgaatagggttagggg

SEQ ID NO: 36715 - DNA, 397 bp, Glycine max
  Clone ID: LIB3055-011-Q1-N1-H1
gtgatcacttcagcaggtactggaaaaattcttcctggtgtggagcactggactctacccttgctaaatctattaacaccctggatgatcccaacgaagtgcaactactaatctgttcaagctacaatgaaatgccaatggataactaggaacctaaatccttgcttgatttgatatactttgactagttagtgttatgcttttatattctaagactagtaaccaaatggttcgatactttcatggtgatagggttaagagaatgcctaaacctcttgttaccaaagtgtatgttaggcgccagcctggcagtaataggaataactaaccgaattctgttaggaataactaacagaattctgttagttaaagagtactataaataagagctttaact

SEQ ID NO: 36716 - DNA, 350 bp, Glycine max
  unsure (1)..(350): unsure at all n locations
  Clone ID: LIB3055-011-Q1-N1-H10
ctntgttgttcagttccgttgttgtgttgtgtgctgcaacacaatcggtggtctgagaaatcttgtttgtgttgggtttgttatggctcggagagcagaggaagagtacgattacctgttcaaggttgtactgatcggtgattccggtgttggaaaatccaatcttctgtcccgattcactcgcaacgagttttgcctcgaatccaagtccaccattggagtcgaattcgccactcgcactcttcaggtggagggaagaactgtgaaagctcaaatatgggataccgccggacaggaacgatacagagcaattaccagtgcatactacaggggtgcccttggagctcttc

SEQ ID NO: 36717 - DNA, 330 bp, Glycine max
  unsure (1)..(330): unsure at all n locations
  Clone ID: LIB3055-011-Q1-N1-H11
aaataagcaaaatcaggtagatgataaaggcatacctggtaaaactgcatccggaggagctagagaaatggacaaggatgctcagaatgttgaaacaagtggttcagatagtagttctgcaaaaggaaagaatgttgttgataatatggataatggagagctttcaaaatcaaatgagcgtcttaaaagaactgcagttgaggaaaatccagaggatgaaaagattgaactntcacaaaggagaaaacgaaaacgaacaataatgaatgataaacaggtgatgctgattgagagggcactcaaagatgagcctgatatgcagcgaaatgc

SEQ ID NO: 36718 - DNA, 361 bp, Glycine max
  Clone ID: LIB3055-011-Q1-N1-H12
ctcgagccgaaccctttttgcgtgaagggtcgcgtctactgtgacccttgccgtgctggttttgagacctcagcaaccacctacattgccggtgctgagattatgttgcaatgcaagagcagggttagcaacgaggttgtgtacaccaagaaggggtacactgactcaactggagcatacacaatgtacgtggacgaggatcacgcagatcaaatatgcagtgccaagcttgtaagcagccctcaccctcaatgcacggaagtcaccccgggccgcgacgaagccgtcgttattctcacccgctacaacggcattgcatccgatgataggttcgccaatgccatgggcttcatgtctcaag

SEQ ID NO: 36719 - DNA, 412 bp, Glycine max
  Clone ID: LIB3055-011-Q1-N1-H2
tgtatgtctcactgtcttggctctacagagaactgtatagagagagatggtagctgcaacatctggtgctgtggtaaacgggttaggatcttccttgttgagtggacgaaacaagagccaaacccttacggccactgatattgtaagcaaagttggtgctgctgctgatactggtagccctagaatactcattgtggtagctgctgctgcaccaacgaagtcatggctgcctggtgtcagatgtggtggcaaccttgacgacccagaatggcttgatggatcgctaccaggtgactatggctctgacccactaggtcttgggaacgacccatcattccttcaatggtacagagaagctgagctgattcatgggagatgggcaatggctgcagttctaggaatctttgtgggc

SEQ ID NO: 36720 - DNA, 386 bp, Glycine max
  Clone ID: LIB3055-011-Q1-N1-H3
caccggagatcggtaccggcgggactgcgacgtgatccggaatttgtcggcggcgttcgcgaagagcgtgggattggccggagacggaagagacgcgtgggtgttcgacgtcgacgagacgcttctctccaatgtgccttactaccaaggcgtcggattcggatctgagatcttcaatgagacttcctttgataattgggtggacttagctgctgccccagctttgccagccattttgagtttgtataacgagcttaaggaattgggcttcaagatattcttcttaactgggagaagtgagtttcaaaggaatgccacagaaacaaaccttctgctttcagggtacagagattgggagaggctcatcttaagagggtcttctgatc

SEQ ID NO: 36721 - DNA, 388 bp, Glycine max
  unsure (1)..(388): unsure at all n locations
  Clone ID: LIB3055-011-Q1-N1-H5
gtgatgttgacatcaggaaagacctgtacggtaacattgtcctttcaggaggtacaaccatgttccctggcatcgctgatagaatgagcaaggaaatctctgctttagccccaagcagcatgaagatcaaggtggtagcacctcctgagagaaagtatagtgtctggattggaggttctatcttggcatccctgagcaccttccaacagatgtggattgcgaaggcagagtacgacgagtctggaccatcaattgttcatagaaagtgcttctaaattgtttgagcaatagggttattgaagaaaaagatagttgttntattcctcgggaagaaatgctgcttgcttgtaaccctttcattctattctaacttttggtactcattcac

SEQ ID NO: 36722 - DNA, 413 bp, Glycine max
  Clone ID: LIB3055-011-Q1-N1-H6
ctcgagccgccgagtgccgatgttactgcgatacacattccatcaattaatcttcacaaggcagatcttgttgttgatgtgctcatcaagaacccgaatccggtgccgatccctctgattgacatagattacttggttgacagtgatggaaggaagctagtttccggattgatacctgatgcgggtaccatccatgcacatggagagcaaactgtcaaaattcctgtcactttgatttatgatgacatcaagcaaacatatgctgatattaaacctggaagcatcattccttatagggtgaaggttagtctcatttttgatgttcccatcttgggaaggctaactctacctttggagaaaactggagaaattcccataccatacaagcctgatattgatcttgagaagattca

SEQ ID NO: 36723 - DNA, 405 bp, Glycine max
  unsure (1)..(405): unsure at all n locations
  Clone ID: LIB3055-011-Q1-N1-H7
aaaaatttgacctttgccttaacgcccaaggatgcacgtgttccttccaccgcctctctttttctttctatgccggtttccgttatcataacataacttgcctcttcccccaagacccaagttttctcttttcctcataaccccctctctcccttccaaatttcaatttcctctttcctcccttaggttatggatccattggggaaacgccctgctgccgaggacgattccctaatttccgattgcgagagcggggtttccgctggagacacgccgncgncgttcgtcgaaaacgccgacctcgtccggaccagattcgttcgtggcctcgtcgcgcactgcttcaaaccccgagttctggcagttcgcaggnacgtgtgttcctccgtcatggcccctgcgcgt

SEQ ID NO: 36724 - DNA, 345 bp, Glycine max
  Clone ID: LIB3055-011-Q1-N1-H9
ttacaattactactttctctctctttgtaacttgtaagcatggagtcctcaaagatctatgcttacctcttcctttgcatgctcttcctctcctccgccactcccattctcggttgtggctactgtggcaaaccccccaaaaagcacaagcctggtaaaacaccaaagacacccacagtacccgttgttaagccaccagtcacaatccctcccattgttaatccaccagtcacaatccctcccattgttaatccaccagtgacagttccacccgttgtgcttccaccaatagtgaagcccccgggttttctccctccaattcttaacccaccaagtacaccaaca

SEQ ID NO: 36725 - DNA, 375 bp, Glycine max
  Clone ID: LIB3055-012-Q1-N1-A1
ggagaagagatgcagctttatcacagccaattcagatcccatctatattgcttatcatgatgaagaatggggagttccagttcatgatgacaagatgttgtttgaacttctagttttaagtggtgctcaagtaggatcagattggacctcaatcttgaagaaacgccaggatttcagggctgcattttctgaatttgatgtagcaactttggccaacttgactgataagcaaatggtgtcgattagtttggaatatgggattgatataagccgagttcgaggtgttgttgacaatgctaaccgaattttagagattaacaaggactttggttcatttgataaatacatttgggggtttgtcaatcacaaacccat

SEQ ID NO: 36726 - DNA, 407 bp, Glycine max
  Clone ID: LIB3055-012-Q1-N1-A10
aaaaagaaaggggttctcattctcagcgaatttgctggtgctgcacagtcacttggtgctggggctattctggtcaacccttggaacatcacagaagttgctactgcaattgccaaggctctgaatatgccatcggcagaacgagagaagagacataagcataactatgaacatgtaaaaactcacactgctcaggaatgggcagaaacttttgtaagtgaactaaatgatactgttgtcgaggcacagataaggacaaaacaagttccaccacggctcccaacagagactgcagttgaacgttatttgcagtcaaataatcggttgcttattttgggtttcaatggaactttaactgaaccagttgagagagaaagtgatcggtttaaagaaagggaactcactgt

SEQ ID NO: 36727 - DNA, 400 bp, Glycine max
  Clone ID: LIB3055-012-Q1-N1-A12
tttccatccatttaattccccacaaccacgctcacctaagtttcaatttcaatcccttttctttttccgttacaaaataattcaaaattccctccctcatttacccttgtttgtgtaaagtagtagcagagtgagactaggtatcatcgatggcagggtacaagggcgatgacgaatacgattacctcttcaagctggttctcatcggcgattccggtgtcggcaagtccaacctgctttcgcgcttcacgaggaacgagttcaatttggagtccaagtccaccataggggttgagttcgccaccaagagcttggacatcgatgctaaggtcatcaaggctcagatttgggacaccgctggccaagaaaggtaccgtgccattactagtgcttactaccg

SEQ ID NO: 36728 - DNA, 401 bp, Glycine max
  Clone ID: LIB3055-012-Q1-N1-A2
atgatggctccctttttctccttcgtcaccggcgagaacgtcgagagtatcgccgcggttagatccggcggccttttcgaccccgccgccttctacgccgtctccctgtcttgcctcttcggcttgctcattagtttcttcgggttcgcggccaggagggccgtttccgccaccgcgttcaccgtcaccggcgtggtgaacaagtttctcactgtggcgatcaatgtacttatttgggataagcatgctagccccattggtttggtttgcttgttttttaccattgttggtgggattctttaccagcagtctgtgactgggcttgggagtgctccggcccagcccaaacagttggatactgaaagcaacaaaggtggtggcgaagatgatgacgatggtga

SEQ ID NO: 36729 - DNA, 416 bp, Glycine max
  Clone ID: LIB3055-012-Q1-N1-A3
ctatgacgcacgctgccctcagccgggaactcggctcgaggaacagtttatcaatggcacttctccacccaaatcttcttgccactgtcaattccaacactcttacctttccttccatcaaactcaaaccctcactctcgcacgtgccttctccaacccccacacgcttcagtctctctgtttccgcggcggaaaccaccgcttttgccgcccctcccactccccaacctgagaagcttggagttgtagttaagccaacggagaagccgagacttgtgttgaagttcatatggatggagaagaacattggaattgcgcttgaccagatggtaccgggccatggcaccattcctctgagcccatattacttttggccccgaaaagatgcctgggaagagctcaaggagttgcttgag

SEQ ID NO: 36730 - DNA, 387 bp, Glycine max
  Clone ID: LIB3055-012-Q1-N1-A5
gcgttgccattctcatcctcctctgtctctctctctccaccattgccatggatccttacaagctccggccatccagcgccttcaattctcccttctggactacaaattctggtgctcctgtttggaacaacaactcctctttaaccgttggagctagaggtccaattctgcttgaggattatcatcttgtggagaagcttgcaaactttgacagggaacgtatcccagaacgtgttgtccatgccaggggagctagtgcaaagggtttctttgaggtcacacatgacatttctcacctgacatgtgcagatttccttcgagcccctggagttcagacgcctgtaattgttcgtttctcaactgtcattcatgagcgtggtagccctg

SEQ ID NO: 36731 - DNA, 374 bp, Glycine max
  Clone ID: LIB3055-012-Q1-N1-A6
tgaaattgcagtaattggtgacttcaatggggaattctgggctgtgtatgcactccaccagtttattggaaatcttataacatttgctctactgagtgatgatcagcaggagggaagtaccaagggcacaactttattgtttattgtattccttttcattatgacctttggtgcaatactaatgtgcttcttgcgcaaacggagtgctaatagcaagggacaacaagagctttcaggtgcagatgctggcgcatgtgcgtccttgaagtctctatccaaatcacttgccagtgcattgtctgatgtaaaaaatgttgttgatcataccccttattgcatattcaggtctacaacaagccttttgtgtgggctga

SEQ ID NO: 36732 - DNA, 324 bp, Glycine max
  Clone ID: LIB3055-012-Q1-N1-A7
cacaaactaagaagccatactcacatcacacaacacaaccgtcctcaagccaacaacaccttctcagatcttacaatgatatttcaatcgtgttttatgatgactgcaactctgctattatttgttatagcacaatgtgttgtgggagttaattcactttcacaagctgataagataagcactttgccagggcagccaccagtcaaattccagcaatatgctggttacattacagtggacgacaagcagaagagagccttgttttactactttgttgaagctgaagtggaaccagcttcaaagccactagttctatggttaaat

SEQ ID NO: 36733 - DNA, 401 bp, Glycine max
  Clone ID: LIB3055-012-Q1-N1-A8
tgcagaagagcgtcgcagttgtaaccctaatcagaagaagcgcagcttcaagcgagtgacagccaccagccatgggtcgtatgcacagccgcggtaagggtatatcctcttctgctttgccctacaaaaggacacctcctagctggctcaagatctcttcgcaagatgtcgaagaaaatatctgcaagtttgcgaagaaaggtttgaccccgtctcagattggtgtcattctcagagattctcacggtattgctcaggtcaatagcgtcactggcagcaaaatccttcgcatcctcaaagctcacggacttgcgcctgaaattccagaggatctgtaccatttgattaagaaggcagtttcaattaggaagcatcttgagaggaacaggaaggacaaggac

SEQ ID NO: 36734 - DNA, 403 bp, Glycine max
  Clone ID: LIB3055-012-Q1-N1-A9
gcgctaaattatatgtcatgtttccaaggattatttttctgtccataggcaacttctttgcttcttcacaacttctgcatctatcatatcagtcctcctgggcatgagttgggagctgctgcaatttgttctgatgatccagtcccttctgctgaagacttagcagatcaaataatcgaggttctcaattattgtcggctcggcgcagtgatgtgtatgggagtatcgtctggtgcttatatcctttcgctatttgcaacgaaatatagggagcgtgctcttggtttaatacttgcatctcccttatgcacatctgcttcttggactgaatggtcctataacatggtgatgtcaaatttgctatacttatatcgtgcgcgtcgcttgttgaaagagtggctgc

SEQ ID NO: 36735 - DNA, 400 bp, Glycine max
  Clone ID: LIB3055-012-Q1-N1-B10
agggattggagaccccgtattatcttgataacttgcagaaggaggagcgcattactgaacagtgagatgcttgaacgttcgaagcatacgttgtcacggtatatgctatctctttcacagagatcgctgctaatgacctttaaacagatagaacttccgatgcgcgtacagatggatccgctgagagctccgtgtccatgatcggagcttcgattgcgctggcattgatggctatcttgaagcattgaatctcgtaattgcgttgggtttagacaaaatttattcgattgatatacacagtggtgattatgagctttggtatctatacttataggtattccggagagagattatgcagtatttaatatacttattgttatttggtttaggacttaaggag

SEQ ID NO: 36736 - DNA, 402 bp, Glycine max
  unsure (1)..(402): unsure at all n locations
  Clone ID: LIB3055-012-Q1-N1-B11
gacagttccaggacttggtcagtacatctctggtgccattctctttgaggaaactctctaccaatccacaactgatggcaggaagattgttgacgtgctcctcgagcaaaacattgttcccggtattaaagtcgacaagggtttggtaccccttgctggttccaacgatgagtcatggtgccaaggtcttgatggtcttgcctctcgctcggctgcatactaccagcaaggtgcccgtttcgccaaatggcgtactgttgtgagcatccccaacggtccctctgctctggcagttaaggaagcagcctgnggtctggctcgctatgccgcaattgctcaggacaatggattggtcccaattgtggagccagagatcttgcttgatggggagcatggtattga

SEQ ID NO: 36737 - DNA, 376 bp, Glycine max
  Clone ID: LIB3055-012-Q1-N1-B12
attttgcttcagacgtgaaggttgtcagatgggggcggtctgtatatgcaaatattcagaaatttatccagtttcagcttacagtaaatgtggccgctctagtgattaatgctgttgctgcagtttcgtctggtgatgttccattaaatgcagtgcagcttctttgggtgaatcttatcatggatactctgggagcgctggccctggcaactgaaccaccaactgatcacctcatggatcgaactccagtgggtcgaagagaacctctcataacaaatattatgtggaggaatttgctgatacaggcaatgtaccaagtgtctgtcttgcttgtactcaatttccgaggcataagcatactgggtctgagccatga

SEQ ID NO: 36738 - DNA, 339 bp, Glycine max
  Clone ID: LIB3055-012-Q1-N1-B2
cctcctttttctcgggactagctctgtgcattcgtatctggctctctgcctttcatcacactcggcattatctctcccaagatagtagaagatggcagacactgaggatattcaacctcttgattgtgacaatggaacatgaatggttaaagctggatttgctggagatgatgccccaagtgctgtgtttcccagcattcgtagtcgtcctcgttacactgatgtgatggttggcatgggccataaagatgcatatgttggtgatgaggcacaatctaagaggggtattttgactctcaagtaccgcattgaacatggaattgtgagcaattgcgatga

SEQ ID NO: 36739 - DNA, 409 bp, Glycine max
  Clone ID: LIB3055-012-Q1-N1-B4
ctcttcttccccaccatcacaccaaccaaacctcactctcgctgccatggtcatgggagcctttcgccacttcgaaccggtttccaaatgcagcaccgaaaaccggtttaaccaaaccgtggcctcggacttggacggcaccctcctggtgtcccctagcgcctttccttactacatgctcgtcgccatcgaagccggcagcttcctccgtggccttgtcctccttggatccgtccctttcgtgtacttcacgtacatattcttctccgagaccgcggccatcaagtccctgattttcattgccttcgcgggcctgaaggttaaggacattgagatggtcgcgtcctcggtgctgcccaagttctacaccgaagacgtgcaccccgagagctggagagtcttcaactcc

SEQ ID NO: 36740 - DNA, 409 bp, Glycine max
  Clone ID: LIB3055-012-Q1-N1-B5
ctttcttttggttcagaactgatatagaaactgtttttctgggtttaaattggaaataaaatagatttagtttataatcaggattcggatctcttagcaatttggtgatatttgtttagtgacgtttttgtttagttattattttttaaaaggttctgcaacctaagtaaatctacttttggtagtcaacgtgaaggcataatgggactctgttaaacactcttgtctcgcgccccaatctgggacaaattgcacatattgtctgcctttcacttttgccgtacatacaggtatgagtattgttgtggaaagtcctgtccatcgtttaccttttcttgttccgtgtgtttgcaatgtatggaactcctaatattttttttgcataccagataaagatgttttgcttttt

SEQ ID NO: 36741 - DNA, 394 bp, Glycine max
  unsure (1)..(394): unsure at all n locations
  Clone ID: LIB3055-012-Q1-N1-B6
caaggccctcctccagtgctgccgcgaccacggcgtgaacttcttcgacaacgccgaggtctacgccaacggccgcgccgaggaaatcatgggccaggccatccgggagctgggctggaagcgctccgacattgtcgtttccaccaagatattttggggtggacaggggcccaacgacaaggggctctcccgcaagcacgtcgttgagggaaccaaggcctncttgaaacgcctcgacatggaatacgtggatgttctctactgtcaccgcccggattcctctactcccatagaggaaaccgtgagggccatgaaccatgttattgataggggctgggccttctactggggcactagcgagtggtcggctcagcagatcaaccgagcgtgggct

SEQ ID NO: 36742 - DNA, 411 bp, Glycine max
  Clone ID: LIB3055-012-Q1-N1-B7
ccctttctcttcccacactgaagctgaatccctgcaaatcgatttatctaacgaagaaagcaaaagatgcttgtttaaccggctattgtatagaagcaaacaacgagggttcctggaactcgatttggtcctcgggaaatgggttgaggaaaacattcactccttggatgaaaatcggattaaggctctcattcatgttctcgatctggagaatccagacttatggaagtggatatcaggacaggagcaacccccagaatcagtcagcgcaaacctggtctttgctgcagtgcgggaaagagttaagaaaaaccttgatatccattctgctcctgaagttagagcaacgcctggccaaccatgggtaagaggctgggatgatatcaagaaaggacaagatggtcctgtttc

SEQ ID NO: 36743 - DNA, 375 bp, Glycine max
  Clone ID: LIB3055-012-Q1-N1-B8
gaagaatctttcccaagcgttcttttgatttctgcaaccgcgttgtgtccacgctccatgcaactttagcagtcacattggcttggctctctgttgaagattggaagtgtccaatttgtcctgtgggatcaaaatcttcacccaaacagatgcaagtcctagcagttagcctttcttatctcatttatgatctagcttgttgtcaattggatgaaagagtgaatctagacaacaccgtccaccatttggtaagcattgttggaattggagcaggtctttcctatcaaaagtgtggctcagaaatggtagcgacaatatggataacagagatatcaagcccattcttgcatttgagggagcttcttaaagagcttg

SEQ ID NO: 36744 - DNA, 403 bp, Glycine max
  Clone ID: LIB3055-012-Q1-N1-B9
ctttctctaagaactcttccaattttttctctctcttcctctttagcttcatcgccatggcatcaccagcaagaaccttctttgccttcattctcgccgtcgtcgctctcttcttcgccgccgccaatgctcaagacctctccccggctccgagtcccgatgccggagcggcgggatccgtttcgagctccgtcgccatgatcggagcttcggttgtgctgtcattgatggctatcttgaagcattgaattcgttaatttcgttgggtttgtacaaaattgattcgttttatatacagagtggtgattatgagctttggtatctatacttataggtataccggagagagattatacagtatttaatatacttattggtatttgttttaggacttaaggagaat

SEQ ID NO: 36745 - DNA, 381 bp, Glycine max
  Clone ID: LIB3055-012-Q1-N1-C1
attcctcacaaagattggtatcctgaacaccccttcatgggacactgctggagagttggagtacttcacagacaccaccacactcttcatagttgagctctttttcatcggttgggccgagggtagaaggtgggctgacatcatcaagccaggctgtgtcaacactgaccccatctttcccaacaacaagctcacaggaactgatgttgggtacccaggtgggctttggtttgacccacttggctggggaagtggttctcctgagaagatcaaggagttgagaacaaaggagatcaagaatgggaggttggccatgttggctgtgatgggggcatggttccagcacatttacactggcactggtcctattgacaacctctt

SEQ ID NO: 36746 - DNA, 366 bp, Glycine max
  Clone ID: LIB3055-012-Q1-N1-C10
accaggcacagggaaagttactaaaggagcatccaccaatggaatttctcatatcaatatcaggatgcaaattcagaaatcccagcatatgcgatgttgcctacaaagacaccatcaaagctaaatctgttcatttcattggggaaaaagattggctgaaacttccttctgaggatctcacatctgcatttgacaaacccctgataataaggcatccccaaggtcacaccgtaccacgattagatgaagtggctaccagtcaattgagaaaatggattaccgaagaagtcctatgtcaaccaaaagttggcatctcagtttgtgagcatgaaacagaccatgaagaatagaagtcagagaagggga

SEQ ID NO: 36747 - DNA, 127 bp, Glycine max
  Clone ID: LIB3055-012-Q1-N1-C11
cttatatgctggtgtatatacgtgaaagtgacaaggacaaaatcatatgcaatgtggatgagaaagacattgcagcacatttaagggagaggttgaagaaagaacaagaagagaaagagcacataat

SEQ ID NO: 36748 - DNA, 378 bp, Glycine max
  Clone ID: LIB3055-012-Q1-N1-C12
caccaacaagtgtttctgtaaccatggcatccaccactctatcccctacaaccccttctcagctatgctcaggaaaaagtgggattttcagttcctcacaggcacttcttgtgaagccagtgaagaggcagatgatggggaagagcaagggattgagaattgcatgccaagccaccagcatttccgctgatagagtccctgacatgggcaaaagacagctcatgaatcttcttcttcttggtgccatttcactccccactgctggaatgcttattccctacacctacttctttgtccctccaggttcacgttcttcagctggcggtactgttgccaaggatgccctttgaaaatgatgtaattgccgagaattggctc

SEQ ID NO: 36749 - DNA, 402 bp, Glycine max
  Clone ID: LIB3055-012-Q1-N1-C3
attcatctctacttctctctctcttctctctcttcatctagattccgcccgaaaaatcgaatttttacttttagggttttaaaattcctgctactgcctatcctgatctgcgattagtgattgggtggcggcccccatttccgagtctgtgataagctcatcttgcaccttaagagtgatgtgctaagacatggcacttaaagttcctgctcgtaaggctgccgagattgcaattgggtccatcggccgtggttatgatatatcacttgatataaggcttaagtattgtaaaggagattccataaattcacgtttaattgagatagatgaaaatgatgtaagagaggtggtactacctggtggagtttcaataccaaatgtttccaaatcaataaaatgtga

SEQ ID NO: 36750 - DNA, 406 bp, Glycine max
  Clone ID: LIB3055-012-Q1-N1-C5
gctcccgattgtctcaaattgcttgcggctttcgggctggatctgcaaaagcatggagatggcgcgcattgttgaattgcctcacacctacatggatcgacccccaagagagagagcgcgattgagctgtgacatcgctgaggcccccaaagctcaagtaggatcgttttgaggacaagaggttgagaatattgcaagctatgctccttcagaacatacgcctagatctctgtttaagggagttgcccgaaatgggactgccccatggcgagatgatgacaaagatggccattacatgtatgagcttggagatgatttaacttgtcgctatatgatccatagtgaaatgggcgaaggaactcttgggcaggtcttggagtgctgcgacagagaaaggaaggaaatg

SEQ ID NO: 36751 - DNA, 404 bp, Glycine max
  Clone ID: LIB3055-012-Q1-N1-C7
ttatcttcaattcttcttctcatcattacttttcacacaaaaaggtaccatggaagggagaatgggactgttgtttcttgttgtattaggtgctgcttgggcatgtgatgcacgggaactggctaactctgaaacttctgaactaagcataaaaccggatgtgtgtgcactttgtgaggaatatattaccaaggcacttgattatctacatgaaaacaagactgagacagagatcattagtatcctgcacaacacttgccaccagcttccttctttcaagcagaagtgcgttgctttggtggactattatgttcctcttttcttctcggaagtagctacaattcagcctggagaattctgccacaaagtcaatctctgtcaggacattgcacatatgtccttga

SEQ ID NO: 36752 - DNA, 410 bp, Glycine max
  Clone ID: LIB3055-012-Q1-N1-C8
ggaaaaagaaaaagaaaaagaaaaagcatacaacgatggctatgaatggatcacctcgacggtgggacgtgagattagttttgacattttctctacttttaatctcagcctctgtttctgctcttgaacatgtaaaccacaaaaagattgatcccaccaccgctgaaactagttttcttggcaaagtcatgaactttttgtggagctcatctgggtctggatacgaacatacttggccagaaatagaatttgggtggagaataataacgggtacgataattggattcgtaggatctgcattcggaactgtgggtggtgttggtgggggtggcatctttgtcactatgctctcccttattattggatttgatgcataatcagctactgcaatctccaagtgtatgattacc

SEQ ID NO: 36753 - DNA, 372 bp, Glycine max
  Clone ID: LIB3055-012-Q1-N1-C9
gaatgatacgtccttaagcaatgctagatgctgctcatctgataccacagatatttgaatgacacggactgatagtgttgaacggaagggtgttactgctgacctcatggtcattgatatcttatatcaccatcttagccaggagcttgagcagtagcctcagcttgagcaacaggcactgatacatgatcaaagttgtgcaatcagcgctcaaccatgttgcatagggggtccctgtcagtgctctgacactattcaggcagtaaatagctctgcttctgtcaaccaggatatcagttttgccaggaatgccattattgattataggccattggcaccaaaatcacagaattcatttagtgcatctcaatt

SEQ ID NO: 36754 - DNA, 396 bp, Glycine max
  unsure (1)..(396): unsure at all n locations
  Clone ID: LIB3055-012-Q1-N1-D1
cgcgtcgctccgcaccagtttcaccgcacgaatatcttgttgtttggagcgatccgagaaaaactctgtaaacatgttggtttaccaggacctccttacaggtgatgagcttctctctgactccttccgttacaaggaaattgagaatggaatgctgtgggaagttgaggggaagtgggttgttaaaggagcagttgatgtagacattggtgcaaacccttctgctgagggtggaggagaagatgagggagttgatgatgcagctgttaaggttgttgacattgttgacacattcagacttcaggagcaacccgcattcgataagaagcagtttgttaccttcatgaagaggtttatcaagaatttgacttccaagctcgatgcanagcaacagga

SEQ ID NO: 36755 - DNA, 330 bp, Glycine max
  Clone ID: LIB3055-012-Q1-N1-D11
gcttgagcaatataggaattttgagaacattcttaaatctggggatgctgtggacaaggagtgcaagcaaatcgagaagggtgggaattactatgaattcttctataatacaagaatggttaagcctactatccttcattttcagctgagaaacttagtatgggcaacttcaaaacatgatgtctaccttatctccaactactctgttaatcactggtcatcattaagtggtaatttgtctgagataatcaattttgctgggcatgtggcaccggcccctactgagagatatgcaggaaatttgttggaaggattttctcagacccagat

SEQ ID NO: 36756 - DNA, 352 bp, Glycine max
  Clone ID: LIB3055-012-Q1-N1-D12
gaagatttagactcagtttttagctcacattctagagctggggaggaatatggaggaaggcaacttaagctgagaagtaatattcagagacaaaatccagttgaaggattggattctccaatacttggttcaagaagatcttttcctcataggaggcagtgttcagtgggagaggaccactcatttttaagctctcctgcaactccagcatacatggctgcaacagaatcagcaaaagcaaaagcaagatcaacaagctccccaaaaataaggactggggggaatgtggacatgaactctgatagctattcaccatgcaagaaaaagctatccattgcatcttctattaaca

SEQ ID NO: 36757 - DNA, 397 bp, Glycine max
  Clone ID: LIB3055-012-Q1-N1-D2
gcaggatgtttaactttccactttcgcagagataaaggatccctttcagaaaataatgtaagaggtcgaataatgcttgaaaagaatggaaaaaccacaaattcctttcctggggatgtgaccacagaaaggattgctgctcttcaggaagcatactggagtatggcatcagcactttctgaggcagatggaatcgattacactgatcctgaagagcttgagttgttggtcagaactcttatagatctggatgcaatggatggtaaacaaagtgtttctttgttggcagagtgttctagttcccctgatgtcagcactagacgggctttagcgaatgcattggcagcagcaccatccatgtggactcttgaaaatgcagggatgggggcattacaga

SEQ ID NO: 36758 - DNA, 405 bp, Glycine max
  Clone ID: LIB3055-012-Q1-N1-D3
gatgaaaacctctccacactcataggaacaagaacaagaaacgtttgtttcaaaaggaagagagaacactatgtcaagattctacaagatttgaccaaacataacgatttgatccgtggggagataaagaatgtgaagtgtcacaatgaaaaactgaaggagtacaatttgaagttgaaagcgagaaaacaagagcgaagtcatggcccaagtcaaggtggtctggtacacaagcaaccacaacagcaattccaattttccggcatggcgcatcatccaccgttgatattgaatcagacggctgggccagcccaaataagaggcggcgagggcgttgttggtcctgctcacgcaacgacgtcgttaggtagtaatgatgtgggcccaattgggaattccgatctg

SEQ ID NO: 36759 - DNA, 408 bp, Glycine max
  Clone ID: LIB3055-012-Q1-N1-D5
ctcataacacaaagcacaaagcaaagctcatccttgagttaaaaaatggcagcagcttcttccatggctctctcatccccatccttggctggcaaggccgtgaagctgggcccatcagccccagaagtgggaagggtgagcatgaggaagaccgtcaccaagcaggtctcctcaggaagcccatggtacggcccagaccgagtcaagtacttgggcccattctctggcgagcccccgtcctacctaaccggtgagttcccaggcgactacggctgggacactgctgggctttccgcagacccagaaaccttcgccaagaaccgtgaactcgaagtgatccactccaggtgggccatgctcggagccttgggctgcgtcttcccggagttgctgtcccgcaacggggtg

SEQ ID NO: 36760 - DNA, 375 bp, Glycine max
  unsure (1)..(375): unsure at all n locations
  Clone ID: LIB3055-012-Q1-N1-D6
agaacagcaagcaatcgttacccattacctatttcactttccacaccactctcatcctatatctctttcttccttattcctctgtcaagccactcgataatatgcagagtctttcaccacctacttccaacgcgctcaatttgaagcatgtttttcgcccgcgacttggcgcgtcaagccgaatctctgtcaaatgcgcttttgggtttgagccggtgagctacggagtcggctccagccgagccgattggcagagctcctgcgccatcttagccagcaaggtcgtttctcaggaacaaccctccgctgaccagaacagcggcaccaccgaccacatcgccgncgtcaacggtcacanagccgncgtcagcgact

SEQ ID NO: 36761 - DNA, 343 bp, Glycine max
  Clone ID: LIB3055-012-Q1-N1-D7
catccatgcaccgtgcatctcttaccgtcaaatctgaataaaacacttttgatgcattttagaatcacttttgatgacatttcctagccaaattgcattgtaacataaacactggaaaacaaagggtctataacacatcattagcctgttcccttttccagcctttgttgttttggttcgttgtgtgtctctctcagtagactccaatgagaattccccatgtttcattgctttccttcatattctgctactgcttctggatacaccacagtgtttactacaccggggtttcagcccaaattgttgaagatcaacaacaatcattgctcaaactaaagaatag

SEQ ID NO: 36762 - DNA, 410 bp, Glycine max
  Clone ID: LIB3055-012-Q1-N1-D8
caattctagaatgcaattgactctagattttattcatactgctgcttgcattacgtttgagtaagttgaaataattgaattttgttccatattactacatttaaattgacttgctaacaacttttcactttaaactcgttgataaaatttaccaattattgtttgacttaaccactaaaataaataaacacaaacttactcttatcaaaagtggtattgatgcatattttgatctagttgtatctcagacccatatctatatacagacttgcatattctaactaccctcttctaaactggaatttgtggattgttagcattttgaaaaagcttgtcctttacatcaatgtatatattctcctgagttgtcttgcaacacaaaaatttgactattttcgtacatattatct

SEQ ID NO: 36763 - DNA, 393 bp, Glycine max
  Clone ID: LIB3055-012-Q1-N1-E1
attttgagtattcagcatcaatggctccaattgcagtgggaaacgtgattccagacggcattttggcttacttggatgaagaaaacaaaccccaaactgtctccattcactctctcgccaccggcaagaaagtcatcatctttggggttcccggtgccttcactcctacttgcagcttgaagcacgttcctggcttcattgagagagcagaagagctgaaagggaagggtgtggacgaaataatctgtatcagtgtgaatgatccatttgtgatgaactcatgggccaaaacattcccagagaacaagcatgttaagttccttgctgatggtgcagccaaatacaccaatgcccttggtcttgagcttgacctcactgacaagggtctcggcg

SEQ ID NO: 36764 - DNA, 354 bp, Glycine max
  Clone ID: LIB3055-012-Q1-N1-E10
gttcttgcgcattcattttcagcttatgatactagaagaagggtgtgcgaaaatgcagttgtttcaggcatctaacgatagagaagatgagaatgcaaagattgacgaagctggcgtggatctgaaagtgatgattgaagaaatggaatccatggctgagccttcagatggcatatgaccaatctgccttgaaccaatgcaagaccctgtgacccttcgcactggtcaaacctacgacagatacaacatccttaaatggctctcacttggtcactgaacatgtcccacagcaatgctagagctgtgacacgatgttgtcactctcaacagcacactttggcacttgatgttgac

SEQ ID NO: 36765 - DNA, 403 bp, Glycine max
  unsure (1)..(403): unsure at all n locations
  Clone ID: LIB3055-012-Q1-N1-E11
ttccaaagaataacatcgtcaatcctcacgacagctctgctctgctctgcttcttttgttttcttatttttcttctgaaaccctaaattttgtctgctctaaactttgggatctttcacacttgaaaaaaactgcttcttgtgcccgacccagcacaattctcatactatagatctttgaatcaaatataatttctgatcattttttttgtttctctttttcccccatttgatcccttctcaggttctggattctcagtgtttgcggagcgcagcgtcatcttttagggaagaatggatcatcaagggcatagccagaacccatctatggnggttgttggtagtggagctcaattagcatatggttctaacccatatcagccaggccaaataactgggccacc

SEQ ID NO: 36766 - DNA, 403 bp, Glycine max
  Clone ID: LIB3055-012-Q1-N1-E12
ctcatcttatactcaccggcgagtccatctcgcgccagcgtcgtagccgctccggccaccgcctttggttccctcactttctcgtccttcttcttctcagaaatatgccttctcaaaaagttgaaacgggtcatcaagacacggtccatgatgttgcaatggattactatggtaagaggctggccacggcttcatcagatcacacaattaagataattggggtgagtaatacggcctctcagcatctcgcaacattgactggtcaccaaggacctgtttggcaagtggcgtgggctcaccctaagtttggttctctacttgcatcgtgttcctatgatggtcgtgtcattgtttggaaggagggcaaccaaaatgaatggactcaagctcatgtgtttgatga

SEQ ID NO: 36767 - DNA, 405 bp, Glycine max
  unsure (1)..(405): unsure at all n locations
  Clone ID: LIB3055-012-Q1-N1-E2
ggacacagtgctacatcaggtggtattctagacagagctattgaagcagaggacagaaagcatggagatttcttgaggctgaatcatgtggaaggataccttgaattgtcagcaaagacaaaaacctactttgccactgctgtgaacttatgggatgctgatttctatgtcaaagttgatgatgatgttcatgtaaatatagcaacactgggacaaactctagttaggcatcgatcaaaaccacggatatacattggatgcatgaaatctgggcctgtcctatcccaaaaaggggtaaggtaccatgaacctgagtactggaagtttggagaggctggaaacagatacttncgtcatgccacaggacagttgtatgccatttcaaacgatttggctacatacata

SEQ ID NO: 36768 - DNA, 278 bp, Glycine max
  Clone ID: LIB3055-012-Q1-N1-E4
ctctagccttttcgtatccagctctacaaccactgcgtcggtcctgcactcagccaaccttttctcctactccaccgccacctatcaactcccaatcctcctagcgcgtacagctcacctcctacctccaagcccgccctctgcgccgcctgggcttcgctcactcgtaacccaatgctcacggccagtgtaacgtctctcgtggcagcagtgagacgacgaggaaagggccctaaccaaatggtctcgattacgaagaataacctatgtgacctgaa

SEQ ID NO: 36769 - DNA, 404 bp, Glycine max
  Clone ID: LIB3055-012-Q1-N1-E5
ctttattcttcttaagccgtttctttaaaaccttttggccagcttcttgctcttggttttgcatctttctttttctaaaccccacatcatctttattccctgattttcttctattagagtcagtggcagtgttttgaccttcaagtgatgcaccaccattgttatggccattttcgttattctttggcttcatggacaaggctgcttctcgattttctttcagtgcctttttactcttattgttgcccttttgtcttttgcatttgtgtccttgtggggattttccatttgccactgcaacacccgattcaccatttgtattcagtactgattcctttgctggttcgtcatgctctcgagattttcgctttctgtcctttacaggctagcaaccttctaccgtg

SEQ ID NO: 36770 - DNA, 392 bp, Glycine max
  Clone ID: LIB3055-012-Q1-N1-E6
agcttgaggagttggaacttatttttggaagtattcatcttgtgcgtgtcattactgagttgactagtgtccaaaataggttggattggaggcattcagaattaggtttattgtgtattctgagaaaatagctaaaacggggtcgctttgttgtgtggcttcaaggccacatgaatcaaatgctggcagtagggactggtccatgggtccaaatgagccctactggcgaacaaattcaagtttttcgcctcctccgacgaggtgggatttcagatttcagtctgaaggtctgtcatatggtgtgaatgatggtgttcaactctatgggtcttctacatcggaaaacgatgaagaaagtaggggttgcgtcagaggcatccacctatatgatc

SEQ ID NO: 36771 - DNA, 371 bp, Glycine max
  Clone ID: LIB3055-012-Q1-N1-E8
atcgaattgaatcgaagagtgaagaaagatgcttccctcatttctaagcctggtgtcagtgtacagcctctacctccgacgctgcttcacgggcgcggggctctcatcgcagacgcttagagtggacgacgaatccacgctccacttctgggccccgacaaacccaacggcccagaagccttccctggttctgatccacgggtttgggccggagtccatatggcagtggcgcaaacaggtccaattcttagcccctcacttcaacgtgtacgttccggacctaatattcttcggaggatcgagcaccaagtccagcgaaaggagcgaaacgtttcaggcagcgtcggtggggaagcttttggacaagttgg

SEQ ID NO: 36772 - DNA, 404 bp, Glycine max
  Clone ID: LIB3055-012-Q1-N1-E9
gggactctgttgaaagcaacggggacaccgaacttggtggattattttccagtgttgagggtgtttgatccacaagggatcaggaggcacaccaccaactacattgacaagttgttcgatgtgttcgatcccatgattgatgaacgcatgaggaggaggggagagaagggttatgccactagccatgacatgttggatatcttgctggatatttctgaccagagtagcgagaagattcataggaagcagatcaagcatttgttccttgacctattcgttgcggggacggatacaacagcctacggcttagagagaacaatgacggaactaatgcacaatccagaagccatgagaaaagcgaagaaggagatagcagaaacaataggagtaggaaaaccggtgga

SEQ ID NO: 36773 - DNA, 416 bp, Glycine max
  Clone ID: LIB3055-012-Q1-N1-F1
cattgagaaagctgagaaacagccaaatctcactattggaattcttgtagcggttgtggttgtcttcgtgtcaattttcttcaggctcatatttggtggcaagaaacctgcaaaggtggagaagaaaccagaacgcacagaagcttccaataaccaaggtggtgcagagaatgaagaaaacaaagagaaagaggaagcatctaatgctccgcgtcggaggccaaggcgagaagattgaaatggttgaatcttttaaatggcgccctgtcaactatcatcaccacagctacagataaattttgggctttagtttcattttaggtgcactctgttttcattcgtttccttttttccctttttttttaagaaaaagaaaagattatttgcttcaggggtgtagatcttctcctggtttt

SEQ ID NO: 36774 - DNA, 406 bp, Glycine max
  Clone ID: LIB3055-012-Q1-N1-F10
gcgcaaaggggaacaagaagaagaagatggtgtccttgaagcttcagaagcggctcgccgctagcgtcctaaagtgtggcagaggcaaggtctggctcgatccaaatgaagtcaatgaaatctccatggccaattctcgacaaaacataagaaagttggttaaggatgggtttattatcaggaagccaactaagattcactctcgctctcgtgctcgtcgaatgaaggaggccaagaggaagggacgtcactctggctatggtaagcgtaagggtacaagggaggcaaggcttcccaccaaaatcctttggatgaggaggatgcgtgtcctcaggcgcttgcttcgcaagtacagggaatcaaagaagattgacaagcacatgtaccacgatatgtacatgaaggg

SEQ ID NO: 36775 - DNA, 406 bp, Glycine max
  Clone ID: LIB3055-012-Q1-N1-F11
agttatcctcataaatacactctaattaggtggcaagataagtgtctaaccttagtaacattgccacatattgtgttcattttggaattgtgccactaaaattctattcaattcatctatggctgcctcttcttatgctatgcaatcaatcctggcaaaccctgtgatccgcattttcagcgggtctagggtgaaccaatttggcgttcctgctttgcacatgagaaggaatgttggcctgagagttaggtccatgtctaaggaagatcaaccaagtgagcctgcaacctcagttacaccgtcactcatcagtagaacccatgccacagctcagtctctgctccttcaccaaaggtgagcactaagttttctgatgtgttggcattcagtggtccagcatctgaga

SEQ ID NO: 36776 - DNA, 360 bp, Glycine max
  Clone ID: LIB3055-012-Q1-N1-F3
cttgacgtcctgccgcgtcgtagctcggattcgctcggcttgtcgcttttctgcttccgactcatttggcggggttcaagtctcccagttttctcttggattgctctacttaaattacccgtaacctgtcaagtgtgcaggaaaaagtctctggcgcgactgcactcacaactatgacttatctgatattaaggtttccgtgaggtgtgacggtgtgaaaaaactggctttggctactacagataacgatggctccttcaaggatgatcttcccctagaccacacagaaccttcttcttctgtgaataattgcctagcaaaacttcttggtgggccagttcagctttatgtctcaaggga

SEQ ID NO: 36777 - DNA, 260 bp, Glycine max
  Clone ID: LIB3055-012-Q1-N1-F5
agttttcctttaacatacacactaatatcgtgtcagaatagcttcctaaccatatcaccattgccacatatagttcacactcatgaatagtgccactaaaattctattcaattcatcaattcctatctccacttattctatacattatcatcactgtcaaaccctgatatccgcatcatcagcaaatctactgcgaaccaatctcgctctcctactccacacataatagagactaatagcctatgacttcactctatctc

SEQ ID NO: 36778 - DNA, 419 bp, Glycine max
  Clone ID: LIB3055-012-Q1-N1-F6
aaagaaaccctatatagtatatggtccttgttaatgctatgaatattaattgtgatttggccttgttggatctgagttatggaaatggagaagaggaagaacaagagggtcatgagagaggaagaagagagtgaaagagtgaagaacaagagactaaagggtgtagaagaagaagatggtagtgatggtggtgttcccacggaggaggaggtggaagagttttttgccatactaagaaggatgagggtggcggtgaagtactttgatgacaaagggagtggtggcaaggagtggcggaaggccctcgagacggcggagctcacggtggaccaccgccacgacgtcgttgctgccgaagaggatgacaagccaaggaaaaagggtggtgaggtaattatcaatgaaggctttgacttgaa

SEQ ID NO: 36779 - DNA, 400 bp, Glycine max
  Clone ID: LIB3055-012-Q1-N1-F7
ggctggttggggcatgtatacttgtcgtttacttagcttgactttatggaattcatgttccagactggggattcactgtccataacccagacagcatatacaatggcacaactttaactgtgacttgtggtgttagagggaaacttgatcccccttgtaatgctgtgggatatattgaccgagaggtgcttggaattaatcacatgtataagcgtccagcatggaggagatctgaagcttgcaccgagaattccccatatgaaggtccttttaaaaaaaatgctccttcatggtgttatgcgccttttgagccagaaggcattttaagttcaatatctgctatcctctccacaatcattggattgcattttggacatgtactcatacacttacaggatca

SEQ ID NO: 36780 - DNA, 282 bp, Glycine max
  Clone ID: LIB3055-012-Q1-N1-F8
gctcaatgatcagtctaatcctactcttcagccatggccggcactggctgatccgcgctgtcgagtctcagactagcgtgaaatgcgccatattcttcatctatgtccagagaattgcgatcgtaaccgactctcacacgctactgggcttggctcacaagctagtcagaatgaagtatggcacaggcacgtacattgattttgatgactaccactagctctctgggcggtgctcttaccgtgcgtgctggctgcatcgtgtcacagcgcgggacgatgcac

SEQ ID NO: 36781 - DNA, 385 bp, Glycine max
  Clone ID: LIB3055-012-Q1-N1-F9
tttgcacatttggaaagtgttgtttttctttttttcatttgcattgcaaagcaaaaaccttgcaaattgcaatggcttccaacaaggttattgccaccatcttggttctttctctccttgcctactcaacatcattcaccaatgcatgtggcacatgccacccaaaacctactccttctccccctcctccatcagggaagtgccccaaggacacattgaagctaggggtgtgtgctgatgttctaggacttgttaatgttgttgttggttcccctgtctctagcaagtgttgtgcattgcttgaaggtttggctgattcggaggctgcactttgcctttgcactgctattaaggccaatgttcttggaatcaacttgaatgtgcc

SEQ ID NO: 36782 - DNA, 398 bp, Glycine max
  Clone ID: LIB3055-012-Q1-N1-G10
ttttgcattttttgctaacaataatattgagaacttgcatgatgctgatcacatttaagatatgactatcatatatacgcaatgtagaacagataaacacacccgtattctcacatatagctgctgctatctacactccacccacacatttgatgaaacgtgtccctagctaggtctactactacatgcagcttcccaatttgattacctcaaaatgcactactaggctacccaattgagcaataaagcctataatttcacatgaaacagctaccgggaaggcttaaaatatgccagagcagcacaacttacaaagagctagctagctaataacacgacgcagacacacacataatctcaaacgctgacgcagagtgcatagccaacatcatcgtgca

SEQ ID NO: 36783 - DNA, 175 bp, Glycine max
  Clone ID: LIB3055-012-Q1-N1-G11
cgtggatatatgtagattgatgtgcgctacgctcatattcgtatacaccgtaacatgcaagagcgattcgctagaggcgtaaagcattgacgccatccacatcttatacgtgaagatccatgacacgggaggaatccatggtgaccaactgcgctgcacagaagacatagagcaa

SEQ ID NO: 36784 - DNA, 402 bp, Glycine max
  Clone ID: LIB3055-012-Q1-N1-G12
ctctatcttcttctctcactccttcttctaaaggctctgttcatctttgtccatgctcttccacacgttctcgctctcttccccaattcccttccaaactacgacgcaaagccaccatcaagccgaggctgttgacgatcatcgaccccattttgctctttaacggcgtcgccaccactttctatttcgacacgcaaacacttatcgtcactgtcagtgttttggccgccattgctctttctctcttccttggccttaagggtgatccggtgccttgtgagcgctgtggtggcaacggtggcacaaaatgtgtattttgcaacgatggcaagatgaagcaagaaatggggttaattaactgtaaagtatgcaagggttcaggattgatattctgcaagaaat

SEQ ID NO: 36785 - DNA, 371 bp, Glycine max
  Clone ID: LIB3055-012-Q1-N1-G2
tgaatcagcaccacattcacctgagctttttgggaagattccaaagcatgggtttccttgcagcattcactggtggtggtttccttggcatgtcagaaatgcttggaaaccccattaaccttaatggtggcacaagggccacttcatttggctctaacccttggctctttaagactggggctcttttcttccaaaagaaaggctgaacttcaaaaaaaagctgcaactgcttgctcctgccaatgatgagcttgccaagtggtatggtccctgacagaggatcttcttgcctgagggtctcttggaccgatctgagatcccagagtacttgaccggagaagtccccggagactatggttatgacccatttg

SEQ ID NO: 36786 - DNA, 412 bp, Glycine max
  Clone ID: LIB3055-012-Q1-N1-G3
ggagtattccacaccacgaccaatgatgggcaactaccacgaccctaatgctcaccgtgtcctcaacgagaagattgtttatgaggaggatgtgattggaggatcccgccacaaccacatgcatcaccaccaccctgagactcatgagagagtcaaggtggtggagtatgaacaagttcctgagaggcgcgttgtctatgaagagaaagttgcttatgacaacgatcgttactactctccaaggtattgaaattggacaaatggaagaacacctataacgtgttatcatgtggctttttattaggcaggctacctagtataccaaaagcaccactgtgcttgtactaaataaattcctgcttatatatactggccattatgttatatataaaaatcatatgcatgccgttta

SEQ ID NO: 36787 - DNA, 395 bp, Glycine max
  Clone ID: LIB3055-012-Q1-N1-G4
ggctcgacaaaaaggccactagctctggggagaagaatggtctcatttttgatctcgtggtgggacttttggaggctctcttcttaccatcgaggaggtattttcgaggtgaaagcccctgctggtgatactcacttgggaaggtgaagattttgataacagaatggtgaacccatttttgttcaggaattcaagaggaagaacaagaaggatattagtggaaatgccagagctctgaggaggttgagaacagcatgtgagcgggcaaagaggactctctcttccactgctcaaaccaccatagagattgattccttgtacgagggtattgacttctacacaaccattacccgtgcccgttttgaagagctaaacatggatttattcaagaagtg

SEQ ID NO: 36788 - DNA, 411 bp, Glycine max
  Clone ID: LIB3055-012-Q1-N1-G5
atgaaggtataattaatagctgttcttcagttaatattgtatgtttgttactattggtgctgacctgcagcttttgaaggtttggtcataattatgttatttattttcttatttgagagtgcttacgtacagtagtgccccaatcattgtgaatattcatggaactttggaagtcaattttgttgtttcaaccttaaagcctgggtctttcttttactttttcaatttgttaatgcattgtttttttctttcccttttcccttgatgtatgttatgaagagatgagatatatcttaatcatttcatcacagtttatgttgtttagctgctaaactaccaactttttagtttgttccagagttgattcatgcttaatggaattggtgtagcacttaatgaaatattccttgt

SEQ ID NO: 36789 - DNA, 408 bp, Glycine max
  Clone ID: LIB3055-012-Q1-N1-G6
gtcgatgctcatcctacataacctccgagctctacaccgaataacgaagccatggggaagacacatggaatgggagctggtcgcaagctcaagtctcaccgcatgaggcaaaggtggactgataagtcatacaagaaatcccatcttgggaatgaatggaagaaaccttttgccggttcatcccatgccaagggaattgtccttgaaaagataggtattgaagctaagcagcccagctctgctattcgtaagtgtgccagagttcaacttatcaagagtgggaagaaaattgcagctattgtccctaatgatggttgcttgaactacattgaagagaatgacgaagtcttgattgctggatttggacgaaagggtcatgctgtgggagatattcctggtgtcagattt

SEQ ID NO: 36790 - DNA, 400 bp, Glycine max
  Clone ID: LIB3055-012-Q1-N1-G7
cagctgcagcttgcgcaaaacttgctttggactgcaccgtcttcatggccgacaaagacatccacagacaatattcaaatgtgaggttgatcaagttgttgggagctcaggttgaagcagtagatggagggttcacagatgcagcatcagaggcgtttcggtattgggtaggggatttggaaaacaggtaccacttgagtggctcagcggtgggaccacacccgtgtccaaccatggttcgggagtttcagtcagtgatagggaaagaaacgaggatgcaagcattggaaaaatggggtgggaagccagatgttcttgttgccagcgtagggactgggtcaaacgctttgggtctgtttcatgagtttatagcagacaaagatgtgaggttcgttggagt

SEQ ID NO: 36791 - DNA, 387 bp, Glycine max
  Clone ID: LIB3055-012-Q1-N1-G8
cataaaaagacttccttgtttgcaattgccatttgtcaccaaacaattgttgttagctcttacatgcatgcttcagcaacgacaatgaaggtcagaactagatgaagaaaccaatctgttttataattgcctccctttcatccactaatcaatgtttctaattgagtgtaattttctcagggatagccttacactgttttgcttccactagatctggtatttaactatatcctatcatgttgtaaatgtagaagtattcaactattggatcttaactgctctatgattagatgtgttacagaaagtagtgttacagtgggacttacatggtgatagaatcaagcacaaagctatgaaaacagcatctggcctttcaggggttgaatc

SEQ ID NO: 36792 - DNA, 395 bp, Glycine max
  Clone ID: LIB3055-012-Q1-N1-G9
ttttcctttgtaatggaaagttagaaaccctcatcgtcaaagcacgcgttttttttaatctctctctctcaacaaatatttgtgggtagattcaattcaccatgtcgagctcatcggagtactctgaattttccggccagaaaccggcgaggtcgccggagaaatcgagcttctctcagacttgcagtctgttgagtcaatacatcaaggagaagggtagcttcggagatcttaccctcggaatgacatcatgtgggtcacctgagacatcttgtcaatctgctacaaccatgaacttgtttcctcccaaggaaaacaacgtggcaccaaagaacctgacagctatggatttgctctctccacaagcttcctcctatggaccttcagaggagatt

SEQ ID NO: 36793 - DNA, 383 bp, Glycine max
  unsure (1)..(383): unsure at all n locations
  Clone ID: LIB3055-012-Q1-N1-H1
aggacccatttaacccattcaaccattaccaacaacaacagcatgggcctcaaaaagtgccggcaccactcattccaacgccgcaacctgctccgnctcatcctcggcgccatcgcggccttcgtcgtcctcatcctcctcgtcatcttcctcatctgggtcatcctccgccccacaaagccccacttcaccctccaagacgccaccctctacgccttcaacctctccacccccacacccaacaccctcaccctcaccatgcaggtcaccctctcctcccacaaccccaacgcgcgcatcggcgtctactaccacgcgctccgcgtctacgcctnctaccggagccagcagatctccctcgccaccgcgctccccgacaccta

SEQ ID NO: 36794 - DNA, 69 bp, Glycine max
  Clone ID: LIB3055-012-Q1-N1-H10
cccaaccaaattcccatcaactacattgctatattctgctacttctgagttaacacacaccatatcatc

SEQ ID NO: 36795 - DNA, 397 bp, Glycine max
  Clone ID: LIB3055-012-Q1-N1-H11
gtgggagcaatacatatcattcattcagaggcaacacacgagttgtgaattaagagcatggctgcacaagctctcgtatcatcatcatctcttacctactgagccgaggctacaagacaaagtcttggaccaagatcactccaatctccatttggcttctcaagagaagcctcctttcttgttaaggcaactgctactccccatgtcaagcaaggatcagacagacctttgtggttagcatcagagcaaagtctttcctacttggatggcagccttacgggtgactatggatttgaccctgtgggactttcggaccctgaaggaacaggaggggtcattgagccgaaacggctagcatatggtgagataatcaatggtcgatatgcaatgttggtgc

SEQ ID NO: 36796 - DNA, 381 bp, Glycine max
  Clone ID: LIB3055-012-Q1-N1-H12
gcttgcagggactgaaaaccttctcttacccttctctcaagtttcaagagatttcatcatggctccaaagaaggacaaggctccaccaccttcctccaagcccgccaaatctggcggtggcaagcagaagaagaagaagtggagcaagggaaagcaaaaggagaaggtgaacaatatggtgctgtttgatcagggcacctatgacaagctcctttctgaagctcccaaatacaagctcatcactccttccattctctctgatcgtttgaggattaatggatcacttgcaaggaaggctataagagaattgatggcaagaggttctatcaggatggtgtctgcccatgcaagtcagcaaatttataccagggcaacaaacac

SEQ ID NO: 36797 - DNA, 384 bp, Glycine max
  Clone ID: LIB3055-012-Q1-N1-H5
tctagaatctcgttcttcctttcttctctcagattccccctttgcctccttcttcaaccccttttctttctctctctgtctttcgcactttcattctctcttaaaaatctaaatcccttttggtcttcatctttgcctctgacccaggtatggcttcgaaacgcatcctgaaggagctcaaggatttgcagaaggatcctcctacgtcatgcagcgcaggtcctgtggctgaagacatgtttcactggcaagccacaatcatgggacctgctgatagcccatatgccaggtggtgttttcttagtttcaattcattttcctcctgactatcccttcaagcccccaaaggttgtttttcggactaaggtgttccacccaaacatc

SEQ ID NO: 36798 - DNA, 391 bp, Glycine max
  Clone ID: LIB3055-012-Q1-N1-H6
atccaatcctcgcacacatgcatgctgtctctgccaaagttggggccaagtcataactacatttccattgttacgattctttctttccatcccaaccacttattaagcgtctgatccaatttctttctcttaccatggatcattggaaaccattggtacccaatttctctgaccaagcttcaaattcacgcactctggaaagagctctggctaaagagatgcgcggttggtttgcgctctcttcccttggtgcctttggagggtacagggcctccaacgcgccacatgctgacgtgtcatcgccagcatcgaacgatgaacaacctagtcccacatcggtgccttctccgaaatggtacccggttacacggtgtgtttcttctggggtgtc

SEQ ID NO: 36799 - DNA, 363 bp, Glycine max
  Clone ID: LIB3055-012-Q1-N1-H7
gatgtatctggaaatttggaaggtaaaaaatttgaaggacctggagggggcattgagtggcttaggtggcatccaagaggacacatactcttagctggttctgaggatttcagcatttggatgtggaatactgataatgctgccttacttaatacatttattggtcatggtgatagtgtaacctgtggtgattttactcccgatgggaaaataatatgtactggttctgatgatgcaaccttgagaatatggaatccaaaaactggagaaagcactcatgttgtgcggggccatccatatcataccgagggattaacatgcttgacaataaattcaacttcaactcttgctctttcttggtct

SEQ ID NO: 36800 - DNA, 372 bp, Glycine max
  Clone ID: LIB3055-012-Q1-N1-H8
gtggaaagagcaccattgttttgcacaacacatgcgaggattccctcttagctgctcctattatcttggacttggtccttcttgctgagctcagcactagaatcgagtttaaagctgaaaatgagggaaaattccactcattccacccagttgctaccatcctcagctacctcaccaaggctcctctggttccaccgggtacaccagtggtgaatgcattgtcaaagcagcgtgcaatgctggaaaacataatgagggcttgtgttggattggccccagagaataacatgattctcgagtacaagtgaagcatgggaccgaagaataatatagttggggtagcctagctgaatggtttatggtaataatatg

SEQ ID NO: 36801 - DNA, 360 bp, Glycine max
  Clone ID: LIB3055-012-Q1-N1-H9
aatttgacggtgtcggtgattcaccaaattctatctctctagctctctcaaatctcaattcactcattcattcaccctttcgtctctatctcaatttcactatgtattgcctacaattcagctaaccgcaccaattccgatggccgcgtagcggcggctacaggacctgcaatcccaaccgtcgaacaatatctgcgtcgactgttcccagaagaacccgcaatgggcctcggactcctacggcgtcttcatgtgcctggagtgctacatcaagcaccgctgcctcagcgtcacatctccttcgtgcgatccgtgacgatggattcgtggtctgaaatccatatcaggaagactgaatcc

SEQ ID NO: 36802 - DNA, 381 bp, Glycine max
  Clone ID: LIB3055-013-Q1-N1-A1
atgtacactgcgtctctttatgcagcatttgcctccctcattcacaacaaacatagcacattggcaggtaagagggtgatattattctcatacggaagtggcttaactgccacaatgttttctttgcaattacgagacagtcaacatccgtttagcttgtcaaacatggctagagtgatgaatgtcgatggaaaattgaagtcaagacatgagtttcccccggaggagtttgttgaaaacttgaagttaatggagcatagatatggtgcgaaggaatttgtgacaagcaaggacagtagccttttatcttcgggcacattctatctcactgaagttgactccatgtatcggagattctattcaaagaaaacttaagaaagc

SEQ ID NO: 36803 - DNA, 381 bp, Glycine max
  Clone ID: LIB3055-013-Q1-N1-A10
ctttaaaactttcataacacaaagcacatagcaaagctcatccttgagttaaaaaatggcagcagcttcttccatggctctctcatccccatccttggctggcaaggccgagaagctgggcccatcagccccagaagtggtaagggtgcgcatgtgcctgaccgtgccctatctcgtgtcttaaaggagcccatggttccgtcctgatcgagtcacgtactcgtgcctatgcaacagcgagcggaactcctacataccagctctgttcaaaggcgcttgccgatgaggcgtcaagttccttcagcgtgcatagaagcacctctagcgtttcccataaaagcaagaacatgtcatggagccggactaaacatcgttagatgt

SEQ ID NO: 36804 - DNA, 382 bp, Glycine max
  Clone ID: LIB3055-013-Q1-N1-A11
gttcagcagataaggtaatctcaaagctcgtcgtgttttcgcatcaatggccatggccatggctgaggcttcaagaatcacgttacactccactctcctccctttttttacccccaaaacccacgttggtcaccgccacttaagcctctcgtcatcacgcaagcaccaagtccagtgctcggtgtctgcaggcgcggcggctcagacgaacccagtggcttggggctgcgagattgactcgctggagaactcttcggctctgcagagatggctgtcggagtcggggcttccgccgcagaagatgggaatagagagagtggaagtgggagagagaaggctggttgctttgaagaacattaggaaaggggagaaactactcttt

SEQ ID NO: 36805 - DNA, 398 bp, Glycine max
  Clone ID: LIB3055-013-Q1-N1-A12
tccgaaatttggtgactggtatgaattctatgaccccgcgcaccgcaaaacctattccatcgagttgccagagttgaggggatctagagtttgttacaccaaagatggttggttactgctataccgacccagaactcaccgtgtgttcttcttcaatccctttactatggagattatcaagctgccaaggtttgagatgtcataccaaatagttgccttctcttgtgctccaacatcacctgactgtgttctgtttactgttaagcatgttagtcctactgttgtggccatcagcacatgttaccccggggcaacagaatggaccactcttagttaccaaaaccgcttgccctttgtcagtagcatctggaataagcttgtgttttgtaatggactct

SEQ ID NO: 36806 - DNA, 291 bp, Glycine max
  unsure (1)..(291): unsure at all n locations
  Clone ID: LIB3055-013-Q1-N1-A2
caacactctgcaactgactacggcaatgaaagaccatgtctgttaaggagtgctagcaccacgaggggtaatagacgcagatctttagcatatgttctgatgctcaatggtcgtcctgcacagtcggctgctcacaatgcttttgatatgggcaatccttacaccgatcatacgaaccttcacgctacaagacttcaacggctaagaattgaacggcaccgaggcgaacttacttacttctaattttcaggctacgctnatctggcgtaacccgaaatagcgcatatgtga

SEQ ID NO: 36807 - DNA, 379 bp, Glycine max
  unsure (1)..(379): unsure at all n locations
  Clone ID: LIB3055-013-Q1-N1-A3
tgaaaaccgactgttagtaatgaatccagagaagaagaccataattccaactgaatacttgggagtgaagttgatctcttttggatttgctggacaaggacgtgcaataatgcgtggccccatggtttctggagtcattgatcaacttctgactactactgagtggggtgagctggattacctcattattgacatgcctnctggaactggagatattcaactcacattatgccaggtagttccattaactgctgctgtaattgttaccactcctcaaaagctgtcgttcattgatgttgcaaaaggagttcggatgttttcaaaacttaaggtgccttgtgttgctgttgtggagaatatgtgtcattttgatgctgat

SEQ ID NO: 36808 - DNA, 252 bp, Glycine max
  Clone ID: LIB3055-013-Q1-N1-A5
ctagaagcagctatatgaagaactaaagaggacagagagagataagagagtgtgtgaaatggatgtcgagaaaatgccctacatacacgctatgctgtaagagcttgttataaagcacactgcaacacactgtgtgctaacacatgctgggactgaacccaccacttttggctgacttgacataccaacatatgcctgtggggtaagtggcacaccatgcattgctggtgacccgctcaattgttcaaaccc

SEQ ID NO: 36809 - DNA, 393 bp, Glycine max
  Clone ID: LIB3055-013-Q1-N1-A6
cttgcttctctctcttactaactttactatgttctccttctacttagttgtcccctcagggttagatctcacgcgttgtgcgacatactgtgtatatatatttaatataatctatatccatatatctcttccttctgattctaatccgatctataatctatttcaagcatacatatatataaatatgaaatatttggaagtaccctttatttattttcttcttgagaaacctctccttcctagctatatggatttgccaaggtacgtgagtctttccctctttaagggattactgctgggatttgattcataaatcaagggttcctgttatgtctttatcattgtcaaatctctttccttaagtgaaagtatatggcttgtaatcgatacatc

SEQ ID NO: 36810 - DNA, 383 bp, Glycine max
  Clone ID: LIB3055-013-Q1-N1-A7
cacaagacagcatccactgtctctctctctctctctctttgtttcagtgtttgacaaatcacaaacgcaagggcgatctgagtggataagatgagcacttcggagctgattcgccatcgccttccaacaaaacttcaaattagtataaataaaactttatttccttccccttttatttttcgtttcactttttctatcctcttttttttttttcttttgagattttcaattttcgagattacgttctatttttgtcttgctacggattctccaatatttcagaagctagatctaattgatatgctgtttggttgctcaggaattcgtgatcaggtatatcactgttaaaaaaaatacatatgcttttgcctctcttttttttc

SEQ ID NO: 36811 - DNA, 379 bp, Glycine max
  unsure (1)..(379): unsure at all n locations
  Clone ID: LIB3055-013-Q1-N1-A8
attcttaacttatactccgaattatatggacataatgatggataactctcctagggctnttagatccttcttacgtggtgaatgctcacgtggtgatgagggcttgaatggactgggagccgggagacttggtgtgacttcactcgcaccattgtgttgcctacctgctgcatggtctatatagggatgccatgacaatggctgcgtctaacgaatcatcactgatgctcaaggatctaacaagatgctcaactcagctgcagcaagtattcaaaagcaacttcctggtgttaagattgcaatcctcgacatttacaagcctttctatgacctcgttcaagcccattgctaatctgaggatgtggaggccaaccaaagg

SEQ ID NO: 36812 - DNA, 402 bp, Glycine max
  Clone ID: LIB3055-013-Q1-N1-A9
ctttaacaagatttcaacaacaaaagcattgggccagctggtggctaactacaactcacttcaggccctgaatctgcttggaaatccaattcaaagcaacatcagtgatgaccagctgcgcaaagtagtttgtggtcttcttccaaagcttgtgtacctgaacaagcaatctatcaagcctcaaaggggacgagaaatactcactgatagtgttgccaaagctgcacttgggaacagcagccggaactcctacagaagagcactaaagaaaggtggtggccaaggagggtcaagttcctccagtgtgcatagaagcagtgctagtgtttcccagaaaagcaggaacaggtcaaggagccgaactaaacatcattagatgtctgtaaaaggtgcaattcatca

SEQ ID NO: 36813 - DNA, 366 bp, Glycine max
  Clone ID: LIB3055-013-Q1-N1-B1
aaattgctatgctatgctaagctaagctggaaagaaaaaaggccctctgagtgagtgagagtgtgtggttaaagaggagaggaagaagagaagaggaggcggtgcgcaccttagcatggattcctctccgtcatcttctctctcctctctcgcttcgtccccacggcaccatcgtcctctctccaattgagaaaggcaccgattcccattctcattctcactctggctgacataaaggcaacccttgcctctctctcttccatcgatttcaatttctacggcaacaggaaaagcaagaagaagaaggccaggctctgctttggtttccgccgcgtcaaaatgctgtggctgatgagattctcgggc

SEQ ID NO: 36814 - DNA, 389 bp, Glycine max
  Clone ID: LIB3055-013-Q1-N1-B10
agaaatcatcagcattcacataggtcaggccgggatccaggttggcaactcctgctgggaactctactgcctggaacatggcatccagcccgatggcatgatgccaagtgactcctccttcggtgtagcccacgacgccttcaacaccttcttcagcgaaaccggatccggcaagcacgtccctcgcgccgtcttcgtcgatctcgagcccaccgtcatcgacgaagtccgttgtggcacttaccgtcaactcttccaccccgaacaactcatctccggcaaggaagatgccgccaacaactttgccagaggccactacaccgttggcaaagagatcgtagatctgtgcttggatcgcgtccgaaagctcgcagacaactgcactggtc

SEQ ID NO: 36815 - DNA, 237 bp, Glycine max
  Clone ID: LIB3055-013-Q1-N1-B11
gtagatcattgcctctgacatcttcacctacttggctgttgtttatacaatgatcagtgctgtcacaaggatagatccaagggctttcactgtatccgtactactgcggctataagactgagagacgaatacatgtgctttcatgcactttatgtgccatatatgctagacagcgattcataatgcttctacgttgatctttactctggctaactgactaacttgaccaatgaatca

SEQ ID NO: 36816 - DNA, 399 bp, Glycine max
  Clone ID: LIB3055-013-Q1-N1-B12
aaaattaatcatcttacttatttattctccgaaaatggttgatttacattggaaatcaaagatgccaagttccgacatgccttccaaaactctaaaactctctctctccgacaacaagtccttaccctctttgcaactacccttccgcaccacagatatctctcacgccgcaccttctgtttgcgccacttacgactactatctccgtcttcctcaactcagaaagctttggaactcctcagattttcctaattggaacaacgaaccaatcttaaaacctatcttgcaagctctcgaaatcaccttccgctttctctccattgttctctccgatccaagaccttactccaaccacagagaatggactcgcaggatagagtctcttatcacacatcaaat

SEQ ID NO: 36817 - DNA, 387 bp, Glycine max
  Clone ID: LIB3055-013-Q1-N1-B3
caagtggtcaggaatcactctacatgattggtggcgaaatgagcagttctggttgattggtggaacaagtgcacaccctgctgctgttttacaagggttgttgaaggtcatagcatgagtggacatatcattcactttgacctcaaagtcagccaccccagaagatggagatgatgagtttgctgatctttatgaggtgaagtggagctttctaatggtccctccaatcactattatgatggtgaattccattgctattgctgtgggggtagccaggactttgtacagtccatttccacaatggagcagactagtaagaggggtgtttttcagcttctgggttttgtgccatctttacccctttgcaaagggcctcatgggaaagag

SEQ ID NO: 36818 - DNA, 449 bp, Glycine max
  Clone ID: LIB3055-013-Q1-N1-B4
tctatgacgctatcgatcgcacgcagtgacagtacagtcatcggaactcggcatcgaggctcgaggaaaatatctatctagccaatgccagtgtatgagcaccatgtcgaccgacacatcccacgcgtgctcaccgtgatgccggccatagtgcgttgaaagcgaggcatctgaccagctcacacatgatactctatcacctagtggctatccggccaatgtgatgcccatgatgagtctgctgctcggtataaggcgagatggatgtgtgtagtcctgactagaataactattctgacggcgaattccattgctattgctgcatcggttgccacacactttgtacaggccattttcacattggaccagactagtaacagggatgctgatcatgttatgggacgtgtgccatcgttacccgttatcctacggcctcattggaaggatag

SEQ ID NO: 36819 - DNA, 334 bp, Glycine max
  unsure (1)..(334): unsure at all n locations
  Clone ID: LIB3055-011-Q1-N1-C9
ctttgccttttgcattgtgggttctctgtaaacaaatcctggcgaaggaagattaatatggaatattcggctggggttgaatccctgagttgaaagcgttcagacattgatggctattctaagactgtctcgctctctcattcatgtgccaactgtacgacggaagacaggctgcgtaactgccacctacccttcgacgcacggtaggcgtagagctttgccttatgaatgtactagcccttcagacttgctcatactagctggcggancatgctgtcacttctagcttcatggtacctcccatggggacccactacacgtaagctatccccgg

SEQ ID NO: 36820 - DNA, 424 bp, Glycine max
  unsure (1)..(424): unsure at all n locations
  Clone ID: LIB3055-013-Q1-N1-B5
ctcatgataagtgtgactataaccattgcccttggggatattcttctgttgtaaatttggacttgtctcatcctttcctagccaaggcaatccaagccctcaagccattgaggataagacttggaggttctttgcaagaccgggtgctgtatgatgtaggaagtttgaagtctccttgccatccccttcaaagtgttaaaggtgaattgtttggattttcaaaaggatgtttacacatgaaaaggtgggatgagctgaatcagtttttcaacgagacaggggccattgtgacatttggctngaatntactccatgggaagcaccagattagtcataatgtttgggaaggcgcctgggaccctacaaatgcttataattntatagagtacactatttcaaagggatacaagattgattcatggga

SEQ ID NO: 36821 - DNA, 231 bp, Glycine max
  Clone ID: LIB3055-013-Q1-N1-B7
ctcgagccgtttctctctcctcgactcgatcccaattccactagggattcaattccgatgcgattccgagcttgttagatccacgacaaggtttcgtttcccagaatcttttggaaaaaaaaattcttcctttggccaacaagtaagttggaaaaaaatggaccatgacaagactgggtgccaagcttcttctgaaagtcctatattgggcattaacaacttggggttttt

SEQ ID NO: 36822 - DNA, 378 bp, Glycine max
  Clone ID: LIB3055-013-Q1-N1-B8
cttgatttctcgcatctttcgggaagcccatggcggatgtcttatagccaaggaagcatatgggatgtgtgtagatagatctatcttctgtgttattcccaaatgtgtttacctgatcgcaggtgctctcagtggccagcacatgacttgtgctcaaccggaccatgtcaagacctactgcctagctcctcctgaaggtcctatattgcgcatgaacaactgtcagttttttggaagtgcaactaccatgaacatgtgttctaaatgccacatagacatattgctgaaacaggagcatgccaagcttgcagcatcatccattgggaatattatgaatgggtcatcaagcatcactgaaaaggaacctgttgttgctgc

SEQ ID NO: 36823 - DNA, 399 bp, Glycine max
  Clone ID: LIB3055-013-Q1-N1-B9
caaacactctgcagcaggagcgtacgcataactccccgccgtccggacatttcttggttcctgattcaccatggcaactatgagaggctgtaatcgatttgaaggatgaaccactggacttgtctataatttttgaaggaggaaagggttgtaacagcagatttttgttccatcatcatattatctgaacttctggtagaaaatggcagctgaagatgataggaatcttgtcgaaatcatggaaaccctgaatccaatagatgttgctaaatacatgaattttgttggtgccccccaagctggtgctatagctacattttcaggcacaactcgcgacacctttgaaggaaaaacagtcgtggagttgagatacgaagcttatgttccaatggcaatacg

SEQ ID NO: 36824 - DNA, 362 bp, Glycine max
  Clone ID: LIB3055-013-Q1-N1-C1
cctttggagactactcgccatgtttcaatgatcacaattaccttgtcaaagaaagaattggatacgtcatccacaggataccaacctcctcttccagttgatcaagtaaaacctttaaatgaatatgatgaggaaggagaaggctcaccaaggatacgaggaagagggcgtggtcgtggaaggggcaggggtagaggattttacaatgggggtatggaatatggtgatggttgggaatggtgacgtggctatggtggaagaaggcgtggtcgtgcaagggggcatgcttttcggggacgaggacgaggacgaggctatggtgtgcagccagttggttactatgactatggtgaatatgatgc

SEQ ID NO: 36825 - DNA, 396 bp, Glycine max
  Clone ID: LIB3055-013-Q1-N1-C10
aacattgtcaactctgaaaaaagaagaaaaaaaggaagcacttcaggcttcagcacttgaatcaaattgttaaggggaggcagagagagaaagagagatctgaaaaaaagaaataaaaaatggatttttttgaaatttgaacaaaatgggttcaagagagagagagtgtgtgtgaaatggataggagagaaaaaagtttagagggaggggacaaaaggggttgtggattaatggtggaaaagttgagggaaggggtttcggtggggaaaaagggagggcctagtactccaccacccacatggagacttgagcaaaatggtggtgataaggttcaagagtttcttaacttttccacttcaactctttctgctagaaagctctgtgccaacctctggg

SEQ ID NO: 36826 - DNA, 400 bp, Glycine max
  Clone ID: LIB3055-013-Q1-N1-C11
gtcagcaggtatcataggtctagccaacgacaaactctccatgcttggtcaattgtccaacaaatatggcaatgccttctcctattgtctcccctcatctttttcagcacaaccaaactcttctgtatcaggtttcttgtccattggagcctcatcattgtcatcatcaccatacaagttcactcccttggtcaagaatccaaagattccaagcttgtactttcttggtttgacaactatcactgtggcaggaaagccactaggagtttctgcctcaagctacaatgttcctaccataattgactctggcacagtaatcacaaggcttcctgtggctatttacaatgcattgaaaaaatcttttgtgatgatcatgtccaaaaagtatgcacaggcacca

SEQ ID NO: 36827 - DNA, 400 bp, Glycine max
  Clone ID: LIB3055-013-Q1-N1-C12
tgaagagtgagagagagagagagagagaggcacttggaatccaaaaatgagagaaatcatcagcattcacataggtcaggccgggatccaggttggcaactcctgctgggaactctactgcctggaacatggcatccagcccgatggcatgatgccaagtgactcctccttcggtgtagcccacgacgccttcaacaccttcttcagcgaaaccggatccggcaagcacgtccctcgcgccgtcttcgtcgatctcgagcccaccgtcatcgacgaagtccgttgtggcacttaccgtcaactcttccaccccgaacaactcatctccggcaaggaagatgccgccaacaactttgccagaggccactacaccgttggcaaagagatcgtagatctgtgc

SEQ ID NO: 36828 - DNA, 346 bp, Glycine max
  Clone ID: LIB3055-013-Q1-N1-C2
ctctagacttagattttgtgaatggctgaagtggaagagggacaggtcatcggcgtccacaccgttgatgagtggaagctgcaactccagaatgcaaaagactccaaaaaactgattgtggtggattttactgcttcctggtgtggtccatgccgttttatggccccagttcttgcagagattgcaaagaaaactcctgaattgatcttcctcaaagtggatgtggatgaagtgaggcctgttgctgaggaatattccattgaggccatgccaaccttcctcttcttgaaagatggcgagatcgtggacaaggtggttggtgctagtaaggatgaccttcaagcca

SEQ ID NO: 36829 - DNA, 274 bp, Glycine max
  Clone ID: LIB3055-013-Q1-N1-C4
atgggaactccagagacgtcaagggaaccatgtccagaccggatcctggaccacataggcggcgcctttcgcatgggcgccgggggtggggtccgctttcaatttcttaaagggcctctacaacgcaccaaggggcgcgcgtgtcgtcgccgcgtcacaagcggtacgcctcaacgcgccgcgcgtgggcggaagcttcgccgtgtggggcggcctcttcttcagcttcgactgcaccatggtctaccttcgccagaaggaggacccctggaac

SEQ ID NO: 36830 - DNA, 350 bp, Glycine max
  Clone ID: LIB3055-009-Q1-N1-D3
ctctcagccatccattgcaccaattcgtcagaattatggagttgacacacagagttacaacttactacaaatggaataacttgttttcctctgtggcttctctctttctctcacctgaaatcaacttgtaatctccatgagcttctattgaattgatactttgatcaagatggatgggaaaaactctcttcaaataactagaagtggtattggtgcttatgatgatgatggacatgccaaaaggactgggaatttgcagagtgctgtagctcatatcattactgctgttattggttctggtgttctatctcttgcatggagcactttccacttaggaatggatggaaggc

SEQ ID NO: 36831 - DNA, 257 bp, Glycine max
  unsure (1)..(257): unsure at all n locations
  Clone ID: LIB3055-009-Q1-N1-D4
caaaccttatgccttggagttgctcaggtttcgtgaagctggggttgaagttgtcctaaaggacttcangaagagatgggatagacaatctcaagcattttacaacttattcagacaggctgatagggttgacaagcttgctgacattatccaaagactggagcacggtgatctaaagctgcgagttcgaactatggaatctgaaagggcatgctaccatgatgctgctgtacataccactatggctagtgcattat

SEQ ID NO: 36832 - DNA, 327 bp, Glycine max
  Clone ID: LIB3055-009-Q1-N1-D5
aaattggccttatttcccatctgggtcctgtgaattgcgagtggaaccgcgttttccccgcttctgggcttggctcagaagtagtcagaatgatgtctgtcacaggcaaaagcattgattttgctggcaaaaacttggtctcttgtggctgctcttccaatgcttcttcgtttgataggtacactgtgaggaactatgccaagctgaatagtaataattctaaagggtgtggcagagatcatggggctcgtaaattggtgtgttgtaagaagaggagcactcattgtcgggattattttatgaagactgcacaggctattgtgcaag

SEQ ID NO: 36833 - DNA, 238 bp, Glycine max
  Clone ID: LIB3055-009-Q1-N1-D6
ttataattaacataaataatatatatatatatatatatatatatatatatatatatatatatatatatatttattaatttcactcctgctttttttttccctgtcttcacctctcttctagactttaatttgataaaccttggaggtgtgcgtgtttgtgtatgattagaaatttgatgacttgtgaagcactcaagcttaataatgtgtgtcgtgtaaatgaacaatgttttcagtc

SEQ ID NO: 36834 - DNA, 371 bp, Glycine max
  Clone ID: LIB3055-009-Q1-N1-D7
aaattttcgttcttttttcctttccatgagttgatgcatctttttcaagctaattaagcttgaattagctggtggggctttttaaattcgtcgataaaaaaacagtgttctgctttttttctcttgtgttttttggttgcagattcaggaactggtgtgtgagatttcttcaacttggggtgtcattgacataaatgcaaacaatcttgaatttgaaggcagtaagtgattacttaaatccctgaaagacatgcagtcagccttcgttctgctgaaatgaagaacttgcagacctcggaggaattacagtcatcgactcaagcttctcatgagcccaagagtgaacaaccaaacaatcacacaactgatgc

SEQ ID NO: 36835 - DNA, 377 bp, Glycine max
  Clone ID: LIB3055-009-Q1-N1-D8
atcaattgcttcggttgaattttgactgaagacaaagttggaaaacaaacacatgtctcgctccgtcgcggtttccaattcgccggtgttctctccttcttcttccctcttctgctcgaagccctccatcatctcttcttcgccggaatccctctccctctctctgtcgcatctcaaaccttcgaactcttctacgtcctcgccttgttcttcgccttctgctgctgctgcttcttcttctccttcttctccgtctcgacttcgccttcccaagcctaccaccgcgttctccgcgtcttctgctgctcctgcttcgtctacctctccgaactgcaccgttttgaagcggaagcgacctcgctacgctggacataccc

SEQ ID NO: 36836 - DNA, 398 bp, Glycine max
  Clone ID: LIB3055-009-Q1-N1-D9
cccttctcctgaatcacttaagaagagaattattatatcaaccaaaccacctaaggagtaccttgaggcaaaagaaaaggaaaaaggggatgattcacagcacgaaaaggagaaaggggatgattcagagcatggaaaggcatcaggtgaagatgaagcttgggggaaggaagtcccaagcttgaaaggtggtactatagaggattacaaggacaacaacgtggatgaagatcttaatgatgaggaagaatttgatgaatcagacaagtcacatcataatgaagctccagaatatagacacctaattgccattcatgctgggaagcctaaaggtggattagtggaatgcctcaaagtggatcctgaaaaagtgagacgtctaagtttaagtgagcaac

SEQ ID NO: 36837 - DNA, 306 bp, Glycine max
  Clone ID: LIB3055-009-Q1-N1-E10
ttcgtcacactcactcaccactcaccactcaccactcaccgagacactttctcagaggtcaattatcgcgcgactcggtaggttgtggattttgagagtggctttgatttaattctagcactagttgcagagagctgcatggtgaatacaaaacaagatggttcacatggcagcatctcgaggaggggttcataaacttgtatcctcctctcgaattgaaaaactagtttcccttttatattccaaacaatatctgcctccgtggcttgagactgtgcgccatttgagctttaccgatgatcgcag

SEQ ID NO: 36838 - DNA, 350 bp, Glycine max
  Clone ID: LIB3055-009-Q1-N1-E11
gtggacactttgtgtgagcggtgttcacttgatccttctgggtcgtcatcatcatcatcatcatcaccgtcgattgaagaagatgccgatcagaaacatcgccatcggaaggcctgaagaggctactcaccccgacacgttgaaggcggggttggctgagttcatctccaccttgatcttcgagttcgccggatcaggctccggcatcgcctacaacaagctcaccgacaacggcgccgacactcccgccggcctcatctccgcttccatcgcccatgctttcgccctcttcgtcgccgtatccgtcggcgccaacatctccggcggccacgtcaaccccgacgtcacct

SEQ ID NO: 36839 - DNA, 415 bp, Glycine max
  unsure (1)..(415): unsure at all n locations
  Clone ID: LIB3055-009-Q1-N1-E12
cacacacactctttacaacactctgaaactaacaacaacagggaaagaccatgtcggtgaaggagtgcgagcaccacaaggggaagaagaggaagatcttccggcaagtgttctggtgcttagtggtgttccttttcatcgtgctggtcacaattcttttgatatgggcaatccttagacccaccaaacccaccttcacgctccaagacgtcaccgtctacgccttcaacgccaccgtggcgaacttcctcacttcgaattttcaggtcacgctcatctcgcgtaacccgaacgaccgcatcggtgtttactatgatcgcctcgaaaccttcgtgacctaccggagccagcaggtcacgtaccgaaccgncatcccttcgacatatcaaggccataaagagatcaatgtttggtc

SEQ ID NO: 36840 - DNA, 406 bp, Glycine max
  Clone ID: LIB3055-009-Q1-N1-E2
ttgtaatttctgccagcctcaaaaaatacttgctctacctctgccactttctgagtacaatacaacactgccatggctgcctcagtctccactattggagctgtcaacagagctccactgagcttgaacagctctgaagctggagattcggttcccagttcagccttctttggcacaagcttgaagaaggttactgcctcaagggtccctaacgtcaagatttcttctggaagtttcaaaatcgttgcggcggagaaagagattgatgagcaacaacagacaaacaaggacagatggaaaggtcttgcctatgatatttcagatgaccagcaagacatcacaagaggaaagggtatggttgattccctcttcaagctccacaagagactggaactcactatgcagt

SEQ ID NO: 36841 - DNA, 316 bp, Glycine max
  Clone ID: LIB3055-009-Q1-N1-E3
ctatcatcttctctcagttcgacgtcagcgaagccttcattgtttgttgggggcaattcgattcgatttcgcagagtagaatgtttgggacggcgattcgatgtttggcgaagaaaccgaagccgaagatgggacccgtgatcctgaaaacgccgccggagcagaggcagacaatcacaagaaccctcttcgatataattaaggagcatggtcccatcactgttgctaacacctgggaacgtgtccaggaagttggattgaaagatttgacaagcaagaatcacatgaaaatagtgctctaatggattaaagagag

SEQ ID NO: 36842 - DNA, 405 bp, Glycine max
  Clone ID: LIB3055-009-Q1-N1-E4
ctatcatcttttctcagttcgacgtcagcgaagccttcatggggggttgcaggcaattcgattcgatttcgcatagtagaatgtttgggacggcgattcgatgtttggcgaagaaaccgaagccgaagatgggacccgtgatcctgaaaacgccgccggagcagaggcagacaatcacaagaaccctcttcgatataattaaggagcatggtcccatcactgttgctaacacctgggaacgtgtccaggaagttggattggaagatttgacaagcaagaatcacatgaaaatagtgctgaaatggatgatagagagacagaagattcggctcctttgcaaccacgttggagcacacaaacagtttctctacaccacttggtttaccaagccggttaccccttcca

SEQ ID NO: 36843 - DNA, 344 bp, Glycine max
  Clone ID: LIB3055-009-Q1-N1-E6
aactgtttttcttagatgacatgttaaaggaatgtccggaaacacatctacaaaacctgcgtactggaatctataaagaaacaatccaattaatcaaaacgcacaacgaagatcgtatgaatacgattttgcacttctcgacaaatataatttgtttctttattctaagcggttattctattcttggtaatcaagaacttgttcttattaactctttggttcgagaatttatatataatttaagtgacacaataaaagctttttctattcttctattaactgatttatgtataggattccattcaacccatggttgggaactagtgattggtttcgtctataaa

SEQ ID NO: 36844 - DNA, 394 bp, Glycine max
  Clone ID: LIB3055-009-Q1-N1-E7
aaccagtcctgctgattagtctgctgtttctagctccattctatagtaatggccaagtctgttgctaatcctcctttccttcgtcctctgcatcaactagaatttctgagatgccctcgcctttcttctaaatctcagtttcaccctcgccgcttccgctctcaaacccaaagcatcattcgtgctatatccgcagttgccgcagaatcggagttaggtacacagcaggatcaagcaattgaagcagacatcttcgcttgccctgtatgttatgaaccattgataagaaaaggtccttctggccttaacttaccagcaatctacaggtctggtttcatgtgtaagagatgtaagaagtcatattctaaccaagaacaggtatctggatctaact

SEQ ID NO: 36845 - DNA, 295 bp, Glycine max
  Clone ID: LIB3055-009-Q1-N1-E8
gccatttcatctccacccgaggaacatgttgttagagctggtcatggttgtgtctcagttgctgtgtatggggaccaggacaagccagcgcttatcacgtatcctgatttggctttaaattatgtctcctgctttcaggggttattattttgtccagaagcctgttcattgctgctccacaatttctgcatatatcatattagtccacctgtgcatgatgtctctaactatatgtcttgaaactttgagagctgctgccattgatcctgatgatccaattctttcttgcttatga

SEQ ID NO: 36846 - DNA, 377 bp, Glycine max
  Clone ID: LIB3055-009-Q1-N1-E9
ccttcttacttttctttgtgttatccttcacacacctattgcgggtcaagccactcaactcacactaacataaaaacatggaactaagcaccatgtttttcctgtgtgcttctcttctcttcattgttctcttcttcaggacactcatcaaaccttactatgtcttcaaacgccgtgaccttgccactcccacctggctccatgggttggccttacataggagaaacctttcatatgtattctcaagacccaaatgtcttctttgcctcaaaaataaaaaggtttggctctatgtttaagttccacattctaggttgtccctgcgtgatgatttccagcccctaggctttcaagtttgtgcttgaacaaagctcaac

SEQ ID NO: 36847 - DNA, 410 bp, Glycine max
  Clone ID: LIB3055-009-Q1-N1-F1
aaaatattgcaggaacacttggctcctagtggatatcttaaattaccgaacgccatacctgattatttggagaactgtagatttcttccagtgcttaacaatgaaataccagataagagaaattccacttacaaggaaagatttagtagcttgcagaatttggtacttatcatgttagagcacgacactgttttaataccaagggaaacttcctggtttggatattacccagatggctacttcaagcccgttttaccaccacaatcgatatgatccccaattcgactcgggtagatcttttcctgtgataaaacttttcttactccggcttttcctttgcatttattaaatgatatcaatggagttgcctccttaagcttctattacctattaaggtcataaatatgaaa

SEQ ID NO: 36848 - DNA, 415 bp, Glycine max
  unsure (1)..(415): unsure at all n locations
  Clone ID: LIB3055-009-Q1-N1-F11
ggaagctagtgaatctgagggttcttgctcttcataacaacaacttctatgggtcaattccaccagagttgggaaattgcactgaattggagggaatatttttacagggtaattaccttagtggagcgattccaagtgaaataggaaacctttcacagcttcaaaatttggatatatcaagcaattccctcagtgggaatattcctgcatcacttgggaagttgtataatctcaaaaatttcaatgtatcaaccaattttctggtcggacctataccttctgatggtgtccttgccaactttactggaagctcctttgttgggaatcgtggtttgtgtggagtgaaaattaattcaacatgtanagatgatggtttgccggataccaatggtcaatctactaactcagaccaaaa

SEQ ID NO: 36849 - DNA, 259 bp, Glycine max
  unsure (1)..(259): unsure at all n locations
  Clone ID: LIB3055-009-Q1-N1-F3
gctatattgttggtttactncactgctctatcatataccggaggggacatcaccaaacctcattattaccttaactgtaaatgcttaccaagtcttaacaataaaactaccagatatcatacattacacttacaatgatagatacagcatcacacacaatttggtgcttatcatgaaataacctgacactcctattatacctaacgagactcacttttttgcatatttcgacagttatctactcatacacctttctacc

SEQ ID NO: 36850 - DNA, 370 bp, Glycine max
  Clone ID: LIB3055-009-Q1-N1-F4
aatccctaatctctatttctctctctctctttttctctgcaaaacaaaaatgtctcacttcggacgttcgggtcccccagacatttccgacacttactctcttctcgttctgaacatcaccttccgtaccaccgccgacgacctattccctctcttcgacaagtatgggaaggtcgtcgacatcttcatccccaaggatcgaaggactggtgaatccaaggggttttgcgttcgtgcgttacaagtatgctgatgaggctcaaaaaggccgtgaaaggctcgacgggagaatgggtgatggtcgcgaaataacggtccagtttgcgaaatatgggcctaatgcttgaaggattttttcaaattgcagtca

SEQ ID NO: 36851 - DNA, 405 bp, Glycine max
  unsure (1)..(405): unsure at all n locations
  Clone ID: LIB3055-009-Q1-N1-F5
gtttgttgttgtaactcgttcttcttcttttgttgttctgtgtttgtgtttgttttttctctcacctgaaaatgtcttgctgcggtggtaactgtggttgcggaagctcctgcaagtgcggcaacggctgcggaggctgcaagatgtacccagacttgagctacactgagtcaaccaccaccgagaccttggtcatgggagtggcacctgttaaggctcaatttgagggtgctgaaatgggtgtgcccgctgagaacgatggctgcaaatgtggaccaaactgctcctgcaacccctgcacttgcaagtgaggtgttgggagagcaagcttcaagcagagatagcccttaattaggaataatgataaactattaatgtgtagctaanaacttatgtattatgtct

SEQ ID NO: 36852 - DNA, 287 bp, Glycine max
  Clone ID: LIB3055-009-Q1-N1-F6
cttcgatccacggagttgatgaggaaggtatggacgggggtggcaatattattcatgataatggccgccaagtgtatatggatggtgccaacatgaatgctcaggtgggactcacaagcccgggttggataggagcagatgtttgtcatctcaatctccacatgacattatgcatccatcatggaggaggtggccctggcatgggacctattggtgtaaagaaacacttggcaccatatttacctgcacaccctgtgatagaaactggtgggattgctgcccctgac

SEQ ID NO: 36853 - DNA, 259 bp, Glycine max
  Clone ID: LIB3055-009-Q1-N1-F7
acgaatggctatatagcataaacatatgagtcttcattgcacaatgtcgacctcttgcattaacgggtggtgcctctcttgcatctgcccagccaaaacctctctcaagaaagccacattaggcccttctgtcttcgcaaccgttagcactccttcttctccttctacttcttcttcttcatccttcccttctctcattcaagacaggcctgtcttttgctgaccctgcccccatcattaccccaactgtgagagagga

SEQ ID NO: 36854 - DNA, 254 bp, Glycine max
  Clone ID: LIB3055-009-Q1-N1-F8
attacttccatttcgtctgtaaaaccctaatatcttcgatcctttattattttttctgtttctctctccaaaacccaactttctctctcaagaaccatcaaatctcgatcctgccctctccctgcaagatccggtggtggttccgattgctcacatagggtttggtctcgggtcggtcaaggctggcgggtatttgggtgaagtaaatggcggatccggccggaatccggctccgtgagtggtgcaagcgtggt

SEQ ID NO: 36855 - DNA, 367 bp, Glycine max
  Clone ID: LIB3055-009-Q1-N1-F9
atcaaattttacaaaataattaaaaaaaagaaatggtgattattcattattcagcagcgtcttgttgttgcgtgccatcgctgcaccgctcttcgccttctcgctcgattctcgcacccgcaatctttttcttccgcgacgccgctccgaacctcaggctcgtctcggtttggtcccaacctccaggctcggagggcttcggcgaacccaacaaacactcttctcgtgatgcctccgttgggttctccgcttcttcttcgtcggtcattgattttctcactctctgccaccgcctcaagaccacaaaaaggaaaggatgggttaatcatgggataaaaggtgctgaatcgattgctgaccatatgta

SEQ ID NO: 36856 - DNA, 387 bp, Glycine max
  Clone ID: LIB3055-009-Q1-N1-G1
cacgatctcaacggagcacctctcttcaggtcgccatctagactgcaatcatggctgatggaccacagcatccatcagttgttcagaagctagctggacagtcttacctggtgtccaggctaagccccaactttaactctgggaattattcctcgactggttcttacttcaatggaggactgcactcttctgggttggctgttgtgtcgcctggatctcaagttactgtgcatgctccagcagagaaaggagtgagtgggtttctagtggattttctgatgggtggagtgtctgctgctgtgtcaaagacagctgctgctccaattgaacgagtcaaattgcttatccaaaatcaggatgaaatgatcaaaagtggtcggttatctg

SEQ ID NO: 36857 - DNA, 335 bp, Glycine max
  Clone ID: LIB3055-009-Q1-N1-G10
cagtcaaatagtactaagaagagagccgtcgctgaattcaggggacatatacacacattattatgagcggagggccagcagccaatcgtcaagggataaagctcttgcagatgtacaccagatgcaaactgttcatattgagaagcttagtgatacacagtgccagcctgaatcacagcttaagttcataacagaggcctggttacagatagttgaatgcaggaaggtgctgaaatggacatattcatatgggtactatttaccggagcatgaacatgctaaaaaacagttctttgagtacttaacaagtgaggcagaatctggtttggagagac

SEQ ID NO: 36858 - DNA, 325 bp, Glycine max
  Clone ID: LIB3055-009-Q1-N1-G11
atacttttgtttttctcgatttccaaggaacttttggattcttagctgccaccctcatatgatatttcttgaaaccttgtgttaaaaattgtgtccttttgaacttcaataaaaatttgatttttttttcttagtttcatacccacatacccattgttggatttgaactagttttacttgcctcatggcccttcatataagcagcggttgttttactgtgatgtgtaactcaagagttcacagaataagagctgttgcttcagagggttctgctactcttaatacagttgtggaggagaaggtgaaattgggtggctctgatttg

SEQ ID NO: 36859 - DNA, 401 bp, Glycine max
  Clone ID: LIB3055-009-Q1-N1-G12
gaacagggtctctaatctttgcttaatgtcttgttatcgtgcatatttcattggcttctgtacaatgagataatcaccaagcctttcaactaccatgttgcattgacctggtgattatctcattgaacagggtctctaatctttgcttaatgtcttgttatcgtgcatatttcattggcttctgtacaagtttttgcatcgacctggactggaatgctttgattgcagtgtaataatcttgtgagtatgaaaagtcacgggatctgcgtgttgcgaagaaagtgtttgatgcttgagaaatgatgactataatctctatctttgtacttttttagtggggtacctgtatacattacacttgttttaaatttttaattgccatggtataatggtggcatatt

SEQ ID NO: 36860 - DNA, 215 bp, Glycine max
  Clone ID: LIB3055-009-Q1-N1-G2
caaaatacctattcttatcgcctttctctctccttcttcctctggcccccaaaaaaatgaagcgtttcatgctcccaagaaaccctctcagcgacgcagcaaagcttccttcttcgccaagcccaaccccaactaccagctttgccaaactccgtccctcttctcacatacacaaaccctccaaagagaacgaccttccctgcgatcccaatctc

SEQ ID NO: 36861 - DNA, 392 bp, Glycine max
  Clone ID: LIB3055-009-Q1-N1-G3
gccaaacgacagcgttctgagtcttttcttcttcgttaccctcttcacatgccttctctctgctaattcccacgatgaccatattttcctaccgagtcaactccatgacgatgactcagtgagttgcactgctaccgacccaaaccttaactacaagccggtgatcggaatcctgacccaccccggcgacggtgcctctggccggctcagcaacgccaccggggtttcttacatcgccgcctcctacgttaaattcgtggagtccggtggtgctagagttattccccttatctacaatgagtcacctgagaaccttaacaagaagctcgatttggtcaatggagtgctcttcactggtgggtggggctgttctggtccatatttggatactc

SEQ ID NO: 36862 - DNA, 233 bp, Glycine max
  Clone ID: LIB3055-009-Q1-N1-G4
gtgatcactacataaacaacagcaaggccttgagggaagctatgtgctttatgatggatccaaaccttggtaaacatgtttgctatgtccagtttccacagaggtttgatggtattgataggaatgatcgatatgccaatcgtaatacagttttctttgatataaacttgagaggtttggatggcattcaaggtcctgtttatgtgggtactggatgtgtcttcaataggaca

SEQ ID NO: 36863 - DNA, 405 bp, Glycine max
  Clone ID: LIB3055-009-Q1-N1-G5
actttttgctatagggatcaaaaacacatatgggaggcaccatgcgccttggatctaggaggacatatttccagaccaaggaatgcaaatctgcaaaattgtaagtattattactgcattgaattttttttaagatatattttgtgtttatgtaggacaatatgaatgagagtaatgtgtgtgcaagtatgactgcactataaaggacttgctatatagtttggctaaactggtgagatttattaggtttctaaccctttgacccttcttagatatggctgcaaaagcttcattgatgagagacatcggcatagatatgaggtattgtattgtgatttaaaaattatcttgtgaatgtgagtagaaacagaaaatgatcttgtcatatgcaggttgaatccggat

SEQ ID NO: 36864 - DNA, 379 bp, Glycine max
  Clone ID: LIB3055-009-Q1-N1-G7
gatggggctcatgacatcgccaaatgtgctgctgttactgaaactgtgcttgcagctgtttacaaggcactcaatgagcagcatgtccttcttgaaggaactcttctcaagcccaacatggttactcccggctctgatagcccaaaggtaccaccagaggtgattgctgagtacacagttcaagcactccgcaggactgtcccagctgcggtgccaggggttgtgtttctgtctggtgggcaaagtgaagaagaagctaccctcaacctgaatgcaatgaacaagttggaggtgttgaagccatggactctctcattctcattcgggcgagcactgcaacaaagcacactcaagacatggggtggaaagaaagagaatg

SEQ ID NO: 36865 - DNA, 191 bp, Glycine max
  Clone ID: LIB3055-009-Q1-N1-G8
ggcaatgctaatcatatctataggcacggcgcgagcccgttgtgcggactcatgtataaacagctccagtgcgagtaaacactcggaacatggggcatagcactactgaatgaaccgccgctaaagctgcaatctcaaagagcgacccacacgccttactggatgcccatctctgacactcacatctatac

SEQ ID NO: 36866 - DNA, 197 bp, Glycine max
  unsure (1)..(197): unsure at all n locations
  Clone ID: LIB3055-009-Q1-N1-G9
gttgtggtgatgtgaggtttgtgccgtgtgggaactgcagtgggagtaggaaagtgtttgatgaggatgaaggggtgttggagaggtgtttggagtgcaatgagaatggcttgattcgatgtnctaattgttggtcttgaaattggcaaaacaaataaaaaaagaagaaaaaatttgaaaccttggtgtgtgtagtt

SEQ ID NO: 36867 - DNA, 347 bp, Glycine max
  Clone ID: LIB3055-009-Q1-N1-H1
cagattcaggttccaactcttctctctctctcgccgtctaggtttttctctcaaaatttcgaaaccccgattttctctcaattcgaatctgcgatacatcgtaacctaaattattagatagttatattatctctctgcgtttctttcagcaattttctattttctcctctcatggcttcagattccaaaaaggatttccctgctgatgacaaagctggaacagaagagagtaaaacatccaaagatgagacttcatctaaagattctccagcagaacaaagagcgacagctacttttggacctagacctggaccctgttggccttcaagcaacccttttgatctctc

SEQ ID NO: 36868 - DNA, 484 bp, Glycine max
  unsure (1)..(484): unsure at all n locations
  Clone ID: LIB3055-009-Q1-N1-H10
actgtacgcatggcacgtcgtatcgtcnnagctcgtgaattcggcttcgagcgcggagggtatatactatttngctacttaagcaaagcgggcctgacgagtgatacatgtcttgaaccgtaacttgcataagaatgtgaagggcgacttttgacagagtaaaacaatagctagctacatttagctgatactatgccctgatatctgtgtttgagtgactcttgcataccttgtcattatcagtgaatgctctaatgaggaagtagtacatatataattctaagtaaaggagtgttacatgaaggccaacgaacgttagtaaagttgaagacccaggagccagattggttgaaggggattagtacatagaatattgagaaaggatttaaattcttctttggtgctactgcaagttgaagacaaactacaaagattggtgttactgaatgcattgacaagctagcacaggctgggattaagctat

SEQ ID NO: 36869 - DNA, 291 bp, Glycine max
  Clone ID: LIB3055-009-Q1-N1-H11
ctacaggatcatctatggtagcacatcgtaccgacgtccagagtatttagttgcagcaaaccaaaccagagcaaaatggcagcagccacagcctaattcatgatgtcaacaccagcctcatctccgaccatccaaaagcatcatcatttgaagccatgcaacgtgtgcttacaaggtcttagacccataacatggttcaccaaagcgttatcaaccagagtgagcagcagcaccaaaagggtcataccaagagctggtgctagagctgaactcaactcagccagtgcgata

SEQ ID NO: 36870 - DNA, 251 bp, Glycine max
  Clone ID: LIB3055-009-Q1-N1-H12
ggacagggtctatgatcgtggctggacgtagggacttagagcggcttaaagtgacgcatagtaaatgagagctgcacgatacatgctcaacgtccagttgagatggaccgtgatatcatgctcacagtacacgacatttcatactaggttaatgcctaggcatcagacatatggaacaggatcatggacaagcttgctcatctacctgcactgatacgctctgatcgtagcgtaaatatcacgatactatc

SEQ ID NO: 36871 - DNA, 353 bp, Glycine max
  Clone ID: LIB3055-009-Q1-N1-H2
gacatcagatgcagcacttgatcctgctgggttactggcagttgctatttgccacggttttgcactctttgttgcagtttctgttggtgccaacatctctggtggccatgtcaaccctgctgtgacttttggattggctcttggtggccacatcaccatcctcactggcttcttctactggattgcacagcttcttggctccatcgtggcatgttttcttctcaactatgtcacaggaggcttgccaactccaatccacagtgtggcttctggggttggagctgttgaaggagttgtgaccgagatcatcatcacatttggtttggtgtacacagtgtatgccacagcagcag

SEQ ID NO: 36872 - DNA, 321 bp, Glycine max
  unsure (1)..(321): unsure at all n locations
  Clone ID: LIB3055-009-Q1-N1-H4
atcacttactggaagccttgttgtgagtaagagaaaaggcttcctgcaccgagcacaccaacttgatacctctgattctttctttgcttagaattccacagaatatggagactgttcttttcaatcactccccacctttggaattcaagggtttgagcaaggaggaggaagactcattgctagggcaagtggaaatatggaggtacatgacatgcnttacggactacgtggccttgaaagctgtcataagagcttcgtatagcggacatactagaccgttatggtaaaccactatgcttgtcgcaaattgtggagaacata

SEQ ID NO: 36873 - DNA, 401 bp, Glycine max
  Clone ID: LIB3055-009-Q1-N1-H5
catcgcctttcaccacgcacgcagatcctttattcctatgatccttccttcgctctctccaaatttcgactctttcgatcagatccgcgacacccaccccaccaaaaccttgcgcaacccatccatgacgcttggctcaggaggatccagtgtcgttgttcctaggaacttcagattgctggaggagcttgaacgtggtgaaaaaggaattggagatggcacagttagctatggaatggatgatggtgatgacatttacatgcgctcttggactggcacgattattggcccccataatactgtacatgaaggaagaatttatcaactgaagctgttttgtgataaagactacccagaaaagccccctagtgttcggtttcattcacggatcaacatgactt

SEQ ID NO: 36874 - DNA, 330 bp, Glycine max
  Clone ID: LIB3055-009-Q1-N1-H7
ggagaagagtgaactcaaagccacagctgctgagaaagtggagcagataacagcttctctgggaacatcatcatctgatggcatcccatcatcagaagcctcagacaggatcaaagctggtttcattcacttcaagaaggagaaatatgacaagaatccagctttgtatggtgaacttgccaaaggccagagccccaagtttatggtgtttgcttgctcagactcaagggtgtgcccatctcatgtgctagatttccaaccaggagaggcctttgtggtcagaaatgttgctaacattgtcccaccatatgaccagtcaaaatacgctgg

SEQ ID NO: 36875 - DNA, 405 bp, Glycine max
  unsure (1)..(405): unsure at all n locations
  Clone ID: LIB3055-009-Q1-N1-H8
agcaagtgttgtggccacagcttaaggcaatctgtttaaaatttattgcaaatcctgcaaacttgggaggtgcgtatcgttttagaatatgaatgtaaaaatttttggttgtttcatttcaacttaagattcttttggaaataagcataatatgtattacagtcttgatgtttcctgacactttccttattaagtatgttttcttgtttctcttagtctctttaagttgataggagggtaagatgtttgatatgctatatggccaaatatcattatgagcgacggtaatctgttagaacttttgaatgggttatgggttaggttgtgtttctaattcattataatgcgaggaagttgntactgtgttttggtagtataatgtgaattttcttctttcttattcat

SEQ ID NO: 36876 - DNA, 363 bp, Glycine max
  Clone ID: LIB3055-009-Q1-N1-H9
cgattacctttttaagaacttcaacagcaccgccgacaccgtgacccagctgggcatgcaggttggatcaggggacacctcccaaggtagcaccactcccaacgaccactactgctggatgcgtcccgaggacatcgactacgaccgccccacccagacctgcaccacatgctccgatctggccgccgagatggccgcggcgttggcggcggcatcgattgtgttcaaggacaacagggcctattcgcagaagctggttcacggggcgaccacgctctttaagttctctagggattcgagaggtaggtacagtccaaatgggagggaggcttctgtattctacaattccatcagctattggga

SEQ ID NO: 36877 - DNA, 187 bp, Glycine max
  Clone ID: LIB3055-010-Q1-N1-A1
gttaaaccgtgccctcaagttcacgggaccggtatcgagaagggtaggtaagggtacctccactataagagaaatgcttgtgctaaacaacctgataactggcagctagccttatgagagagggaatcttgaagaggccacaaggattggcgcatgggacactctggtaactggggctatgtcatta

SEQ ID NO: 36878 - DNA, 401 bp, Glycine max
  Clone ID: LIB3055-010-Q1-N1-A10
ggcaaaatcattcttcacttagttaggaaccgaaccatggctataacgttcggtttagtgactcctaactccaacactttgtgtctcactctcaccacaccacccctcatcgccaatcatcgtactactaatgttgtgttctctggtcaaagtgtcttcagctatggacacactaatctttcttattcacaccaaagggcttcttcctttgccactattgtctgttctgctgctaataaaccatcctcttcttctgaaattagctctacagccaagataaggagcgaggttctctctccctttcgttcagttaggatgttctattatattgcttttgttgcaagtggtgctcttgggggattcatagcaaccacacaactaattggtgcactggctaactc

SEQ ID NO: 36879 - DNA, 406 bp, Glycine max
  Clone ID: LIB3055-010-Q1-N1-A11
ggcaatcatttcatcgagcattcaatggccaccacagcggctctatccggaaccatggtgagcacctacttcatgaggaggcaacctatgaccaccacacgcctaatgacattccccaacgttggtgaagctcttgtgggtctgaaaagtggacgaggtggtcgtgtcacttgcatggcctcgtacaaggtgaagctcataaccccagaaggagatgtggagtgtgaatgcccagatgatgtattcattgttgacaaggcagaggacgaaggcattgaacttgcctactcgtgcatgtccggttcttgcagttacagtgttggcaaaattgcggaaggtaacgtggaccactcagatggtagctatcttgatgatgagcatatagatagcggctgggatctcacct

SEQ ID NO: 36880 - DNA, 398 bp, Glycine max
  Clone ID: LIB3055-010-Q1-N1-A12
aatcccttttatatccacagatcaacatttttttttttttggtgggtagcagtgaggataaaaaatggctatggccacagctgtcgtgtgtcctcagaacatcaccggagccatcgtgagctcacctagcaagaccaagaagagagtggtacacgtgagaggcataaattcatttgggggactgaaggctagcaatggtgttgtctctttggggattcctatgagcactgagaagtgctttgctaaggttgtgagctcagtgaaagcagctacatcaaatgggaaaggaaaaggaggggctctttcttccacgtgcaacgctgctggtgagatattcacgattgctgctatcatcaatggacttgttcttgtcggagttgctgttggctttgtgctct

SEQ ID NO: 36881 - DNA, 365 bp, Glycine max
  Clone ID: LIB3055-010-Q1-N1-A2
gacggcggtttcggctggtcagagcacctgcaccagcaccagcaacagaaccaccactcggaggaacagcgattggtctatgctggtggtaacagtggccacggcggtgggtttggggtcaacacgccggcgccggtgcaagtgccggcgtttggccaggttttttctcaaaagggaacccttcagtccagtaacacccctttcattcgtgcttggatagaacccttcggtcgatcaccaccaacaacaacatcactaactattacaggtgatccaccaaggatccgtcggcggtggcggcggattctccggttttcgcattcctgcacgaattcagggtgaagaggaacacgacggcgtgtccg

SEQ ID NO: 36882 - DNA, 276 bp, Glycine max
  Clone ID: LIB3055-010-Q1-N1-A4
tgcaaattcaaaccgggtcttggttttctgaaagatgggaaggggcaagggccaaccttattgataaatttaccaaaggaattttttaaaaccttgttaatggggaacctggtccacaccatgggggccatgggacccaacttggggctaaccaacaacaacttggggcttaccttcaaaaacagggttttcctccagctgggaatcctcaacaacaagggtttcctccagctgggtaccctcaaaatcaaggttatcctcctgctggttaccccc

SEQ ID NO: 36883 - DNA, 334 bp, Glycine max
  unsure (1)..(334): unsure at all n locations
  Clone ID: LIB3055-010-Q1-N1-A5
aaaaactttcaaagaggtgaaagcaaaagagttcttcttttccttttttatatatacttgggtgctaagctgtgtgagttcattgacaagcctgaaatggcaactatgctgacaaaggagcatggtctgaacctcaaggagaccgagctttgcctcggtttgcctggtgggggaggcngcttgccgcggngcggcgaagttggaaactccaagggccactggaaagagagggttctctgagactgttgatctgaaacttaatcttcattccaaggaagatctgaatgagaatctgaagaatgtctcaaaggagaagaccctcctttaggatcct

SEQ ID NO: 36884 - DNA, 313 bp, Glycine max
  Clone ID: LIB3055-010-Q1-N1-A6
aaaaacttttttagtaggtgaaagcaaaagagttcttgtgtgtgcttttttatatatacttgggtgctaagctgtgtgagttcattgacaagcctgaaatggcaactatgctgacaaaggagcatggtctgaacctcaaggagaccgaactttgcctcagcttgcctggtggatgaggcagaggcagtggctgcgccgacgaggaaactccaaagaccactgatactacagggtgctaccctactgatgatctgaaacttaatctttattccaaggaagatctgaatgagaatctgaataatgtttcaaagga

SEQ ID NO: 36885 - DNA, 338 bp, Glycine max
  Clone ID: LIB3055-010-Q1-N1-A7
aggtttctcaactgcccttttcacacctcaacttcccgccttcttcacttgcttctcgaacttattcccttttgaagctattaatactagttccttattcagtttctagatatcttaggaagaggagcacagataaccacccctctctgtctaagcacagcctaagatgtcttactcatgatttcctgctatctcaaattgctgctacaagcaagaagaagtggagtctgattgaactctgaagtgggcacaatgcgttttgaaatcaagtggaccttgagtgcttaccgtactgtacaattttgaatcgctttgccaatattgctgggtgaattgat

SEQ ID NO: 36886 - DNA, 359 bp, Glycine max
  unsure (1)..(359): unsure at all n locations
  Clone ID: LIB3055-010-Q1-N1-A8
ccttgtgggactgacaagcgagtaacaagagggagagagtagagtgcataaattgaattgcaagcacgagcaagtacttggttttggcttggggaaacgaaggaagaatggcgcagcaacttggagttccatttaagttatcatgcaaaccctctcacattcacgctcttaaaccctttcactctctccctccccttcgcaccttcaccaccaaaccttctcttaatgccaaatcccatcatcatcatcatcctttattaacgcttcttcgttcccaccgcactctcgcaccctgctgcaactccaacaaatcagatataatgtcacaattggagcttgngaaaccggagcaaaagggg

SEQ ID NO: 36887 - DNA, 386 bp, Glycine max
  Clone ID: LIB3055-010-Q1-N1-A9
cctttctcatgttttttctcagaaccttctgaggttaaagcaaaaaacaaagagagagagagagagaaaatgatgaagccatcgatgctcagatctctccactccgccgccacccgcggcgcctctcatctcttccgccgtgggtacgcctccgagccgttgccggagcgcacggtagccgttctcggcgccccctgcaatatctggcatgctatttcactattacgaagcatactgccactgatttgaacctttgctacttccaacttacgctgacctttagcgtagactaccctatcatgcctattaactgtaaatttccacaaggtttcttccaccctaatgtttatccttctaggacctgtttattgtctattcttaactat

SEQ ID NO: 36888 - DNA, 421 bp, Glycine max
  Clone ID: LIB3055-010-Q1-N1-B1
atagagagagttagaaagcatgccagcgagatcaaattgttggagaaacgcgaattaatccacatatcctagaaagcgttacttgacgttcgcttgaacatcttaaacatttaccccaaatggcaacacgaactggtccgttggttccaaacccaaaacttcatgttcacgtttatggaggaggagcatgtttctggcaatgctggtttaaccggtcagaatgaaaacttggagctgggggaaagaaaaccacttggagatctattcaatgcaaggaacccttatgaaccaaattttattggaagaacggccttgacggttcattgaacacatgtcaaccctcagtctatggtagtcaggcaccgaaattgctcaagtcagagaatcttgaaagtgaccaaagaatttccgcttctgagaa

SEQ ID NO: 36889 - DNA, 403 bp, Glycine max
  unsure (1)..(403): unsure at all n locations
  Clone ID: LIB3055-010-Q1-N1-B10
tttgcaggttttgaatcgatttctgttgacgttaaggacatgaaactagtcttattgggtgagattgatccagtgagtgcagtgtcaaagctacgaaagtggtgtcacactgaactaatttcatttggaccagcaaaagaggagaaggagaaggaccccgctattcctctctacgaagcctatcccctttattatcacatgacaccaacattgtatggttcaaattactaggttagaggttttgaagagagtcttagggctgcgtgatcatctgctaaattctagaatattagaaagtttgataaaaaaaagacttcatagtcatttttgttggttntagttatatttttcattatctagttgaagaccattgtgtgcccaattaagggagtaaacatgcttc

SEQ ID NO: 36890 - DNA, 422 bp, Glycine max
  Clone ID: LIB3055-010-Q1-N1-B11
ctcgagccgtgtgcgattccttctggattagttaggaagagcccttatctgacacactctatctttaacatgtaccaaactgagcatgagttgcttaggtacttgtataagctacaatcaaaagatctctcactatgccacagtatgattccacttggatcttgtacaatgaagctgaatgcaacaactgaaatgatgcctgtgacatggcccagctttactgatattcacccttttgcaccagttgaccaggctcaaggttatcaggaaatgttcaataatttgggtgaactgttgtgcaccatcactgggtttgactccttctccttgcaaccaaatgctggtgctgctggagaatatgccggacttatggttattcgtgcatatcatttggcaaggggagaccaccaccgcaatgtttg

SEQ ID NO: 36891 - DNA, 195 bp, Glycine max
  Clone ID: LIB3055-010-Q1-N1-B12
cgcaaatcttccctatcccttatggatcacataagaggggccattatcaaacaatctcgagctctaacaatagccagactgctcatgagccgctaacgctcttgtataacccacacaccaatcatcactcactaacccacagcgtcatcacacgagcaacaggtacactgcagctgaacgcatcacctgaaatgc

SEQ ID NO: 36892 - DNA, 434 bp, Glycine max
  unsure (1)..(434): unsure at all n locations
  Clone ID: LIB3055-010-Q1-N1-B2
tcatgatggtcataatcaactgagaatagtttacaaaggggaaccacatgaatcaatcnctaaaacnctcaattcaaagctggccattactctactggtactggtatttatattcaaggagagaaatctggataaggcttcttttggctggccgagatgacaaagcatccactatgtatggtcaggtgtctcatgctgctgagcccaacagtactccagagtcatcacctgtaagccacaaatgatgatggtttagagggtgctgggtttgtgtcaaacaggaattaatgaagaggttgatgatgacgatcccttctcaaagcgaagaanaatggaacttggaaatgttgacatcactccagtagttaagcctatccgggaaccacgttgtgttgtacaaactttgagtgangttgacatatngnatgatgggt

SEQ ID NO: 36893 - DNA, 247 bp, Glycine max
  Clone ID: LIB3055-010-Q1-N1-B3
gggcactaatttggtgcacgtaataacccaactagctcaagaagtagctgataagcatgcagccatataacgtgacttagctgtgcatgcatcagatgtacattgatagttacatcggcccgatgttgtccttggtctgatatcactatatccttcactcaaaatgcgctaggagatatgcatgctgcttccggatataggacacatattgatcagacttctgcataattggtcaaggtctatacat

SEQ ID NO: 36894 - DNA, 288 bp, Glycine max
  unsure (1)..(288): unsure at all n locations
  Clone ID: LIB3055-010-Q1-N1-B4
gttccatcttcaagaaaccacagcgtctaagaactccaaccggggcctccaatttcaatacccttgctgggacacgcgccatatctccgttaactgctccaccaagcattgtacaagctatcactgcgctatggacccttgatccacgtcatgatcggttcgaagcacgtggtggtggcgtcgtcggcggagacgggcaagcagattcttaaaacctcggaggaggcattctgcaaccgtnccttaatgatagccagccagagcctaacctacggcgcggcggactac

SEQ ID NO: 36895 - DNA, 382 bp, Glycine max
  Clone ID: LIB3055-010-Q1-N1-B6
gttcctaaccctacaagcttcgtctcgtaaagaaaatgaggacagtgctttcgcgcttgatccattccacgccttccatttccaggatcaatgcagtgtcaatccgcgggagagatctcttctttccaaatgtctgctttaaagttgaagaagcagttaatgtgcctccacccccaacggaaaaggttgttctgtttggaggcgattggtttgttggatcacacttttttagagaagccctagaacgtggcatgtctgctgggagtcctagcaggtctggtaggtcatccctgcatgattcctgggctaggaattttgcttggtattaaagggaatctcttttcaactgctttaattgagaaaccatctgattggggccact

SEQ ID NO: 36896 - DNA, 413 bp, Glycine max
  Clone ID: LIB3055-010-Q1-N1-B7
ctggcagccatgagattaccagaagacgtggaaggacttgggtgttgtgagtacacgatggataggggagtggttcacgcgtgccatgcatgaggagtggtacatagccttgaaggttggtctcatcacgaagttggtgccatagatgttaacagaatcgatcttgtgtgggaagcagcactcaaacatggcctaagaccagtgtcaagtttcacacataaagaaaattaaaatcagctttagtcaaagtattgttctcaagttgtttcttatttgttttggtgtattgcatgcacatcacagtgaccttataagtgtgattatattctttcaagtctgtgtattacatctctaatgtatcctcttgtatgttcatatgatcacattgacagtgattcattcatggtataaat

SEQ ID NO: 36897 - DNA, 255 bp, Glycine max
  Clone ID: LIB3055-010-Q1-N1-B8
ctggctttttttacattaccagaagacgtgaaaagacgggggcgttgttagtacactttggatattgcacgcgttcaatcttgccaatcaatacaagttatacatatcctagatatttgttctcatcacaaatatggtttcatatatgttaacagattctacttctgtactaagtatgtctcaggacatgtcctaataactgcgataagtttcacacatatcacttattaagataagccttataccgagatttta

SEQ ID NO: 36898 - DNA, 285 bp, Glycine max
  Clone ID: LIB3055-010-Q1-N1-B9
agaaagcatgctcatcctagagttttaaaaatggcagcaggctcctccatggctctctcttccccatccttggctggcaaggccgtgaagctgggcccatcagcccccgaagtcgggagggtcagcatgaggaagaccgtcaccaagcaggcctactccggaagcccacggtacggcccagaccgcgtcaagtacttgggcccattctctggcgagccctcgacctacctcactgacgagctcctaggcgactactgctggtacacagctggtctttcggccgat

SEQ ID NO: 36899 - DNA, 94 bp, Glycine max
  Clone ID: LIB3055-010-Q1-N1-C1
caaacctggtttctatcaatctctctttgtctttaattatggtgggcttacataaaactctgtgttcctgccattaccatattaatcactctgc

SEQ ID NO: 36900 - DNA, 340 bp, Glycine max
  Clone ID: LIB3055-010-Q1-N1-C10
ctcgagccgtccaagatgagatgcagattgttgctgtgaacatggctgtgtctggtttgtctgctgctaatgagcgagtgaaggaggttgccttgttgaggattgaaaatcttgcggattaactgattcatgaccttcttgaatgtctcaagggtaacatgttcttgaaacattagaatgtgtacacgctgtacctacagtacatgcatcttagaactattagatgcgatggctgtcgtttacttaggatacaaatgattctcactctataaacatgttcacaaatgacaatttctatttatgttatttaaatcgaaggttaactttgtgacgagtttcg

SEQ ID NO: 36901 - DNA, 383 bp, Glycine max
  Clone ID: LIB3055-010-Q1-N1-C12
ctctaaagataatggcggtgcctctactctcgaagaagatcgtgaagaagagggtgaagaagttcaagaggcctcagagtgacaggaaaatttctgtcaagacaaactggcgcagaccaaagggtatcgattcccgtgttaggagaaagttcaagggatgcactttgatgccaaacattggttatggttcagacaagaagacccgccactatctccctaatggttttaagaaatttgttgttcacaatgtgaaggacttggaactgctcatgatgcacaacaggacttactgtgctgagattgcccacaatatatccacaagaaagaggaaagatatagttgagagagccgcgcagcttgatgttgttgtgacaaacaaaaca

SEQ ID NO: 36902 - DNA, 412 bp, Glycine max
  unsure (1)..(412): unsure at all n locations
  Clone ID: LIB3055-010-Q1-N1-C2
gtcggtgtttgcactgtaactgatgtaaaagttaacctcaaaggtttcatgtgtgcctgtatagcaggttttgtaaacatctttccggcaaatttcaataggttctcttcaaaggaaatattcaatggaatcttttgaatggctgagtaaaactgctccaatccaaccgctttttcttctaattcttggtccatttgttgattactacctcagtggcaaattgataaccaactataaaatgtcttctggtgccatttaattaattcttctttcatcctcgctagctgtattttgcaatgtgagccaatacctttgcattgngcgcttttcagctgtttccttccaggttttaggccacatgaaaacagtatgtgttctgactctgggatggctgctatttgattcggagcta

SEQ ID NO: 36903 - DNA, 377 bp, Glycine max
  Clone ID: LIB3055-010-Q1-N1-C3
ggagacatgacttttacaaccgcgttttcttgttcgctcggcggtgcttctctctccaccgtcgccagtttccgccggaataaatgcaccaccagcaagagttttcattcctcttccacgtgcatgccctctttcttgcatgatcatcactaccactctatcttattgcgagttgccaatgatgctgatagaagtgaagtgtcatctgatactgcaatcaagacatcgtattctgaagccgataagatggccgatggaatggactttggtgagcgctgcaatgaggtagagtgcattatcagtccctaggtagaattcactgcatgacaacttgcacgagatatacttgtgctaaaggtgggaactcgatcacttgg

SEQ ID NO: 36904 - DNA, 319 bp, Glycine max
  Clone ID: LIB3055-010-Q1-N1-C4
gacaggcaaattctgttggctgatatatcttgtatggttgggggggcacttttaaggaaccttctcgtgaagctgaagaggatcactccccacatcaatcaaatgatgaagtaaacaatgcacttgagaaaggcttaaaacaaccattactgattagttcagagaataaggtagatgaagatgctgaccaagattgtgatgatagtgaagaagcaccagaggaatctcgccagccagtgaattcaattagaatggcatacagactccttacaccttcttgaaaggttcaattaataatatatttcatgctcaaatatgt

SEQ ID NO: 36905 - DNA, 378 bp, Glycine max
  Clone ID: LIB3055-010-Q1-N1-C5
ctctatttatatggcggtgcctatactctcgaagaggatgatgaattagagggtgaagaagttcaagaggcctcagagtgacaggaaaatttctgtcaagacaaactggcgcagaccaaagggtatcgattcccgtgttaggagaaagttcaagggatgcactttgatgccaaacattggttatggttcagacaagaagacccgccactatctccctaatggttttaagaaatttgttgttcacaatgtgaaggacttggaactgctcatgatgcacaacaggacttactgtgctgagattgcccacaatatatccacaagaaagaggaaagatatagttgagagagccgcgcaacttgatgttgttgtgacaaacaa

SEQ ID NO: 36906 - DNA, 235 bp, Glycine max
  Clone ID: LIB3055-010-Q1-N1-C6
ctcagatccatgcttgggagacagagaaagagaaagagaagggacgccattgattctgtgttcgatccgctgagagaattcgcaaaggacagcgtgaggctcgtgaagcgctgccacaaacccgatcgcaaagaattctccaaggttgccgtccgtactgcaattggtttcgtcgtgatgggattcgtcggacattatgacacctcattatcatcctaatggatctcagtaattt

SEQ ID NO: 36907 - DNA, 414 bp, Glycine max
  Clone ID: LIB3055-010-Q1-N1-C9
ccacaatcatcttgaccaaaatttttggtatttccgtgacgaacacatgtcaacgccaccatacgccgcgtaagccgcaccgttcgaggacgaggaggatgttgtgtgcaccgttgcacctcactgtcctgaaaccctcgtcaccatgtcaaggcttcttgcttgtggaaacgttagaaggtttacacgttctgttcacaagacaggcagcttggaagtattttatcccatggggcccccttactcaagatacaaatttttctcacactatagacatgtacacaaaggacaatttctattcatgttatttaaatcgaaggttaactttttgacgagttgcggggctaggaacttgtataccctccctgcaaataatgtaaaatatcatcatggtcaagttgtttggaacatgat

SEQ ID NO: 36908 - DNA, 386 bp, Glycine max
  Clone ID: LIB3055-010-Q1-N1-D1
gggctatatagcataaacatttgagtcttcattgcacaatgtcgacctcttccattaacgggtggtgcctctcttccatctccccagccaaaacctctctcaagaaagccaccttaagcccttctggcttcgcaacccgtagcactcctttcttttctttcttcttcttcttcttcttctttcccttctctcattcaagacaggcctgtctttgctgcccctggccccatcatcaccccaactgtgagagaggatatggcaaaggaatacgagcaagctattgaagaactccagaaattgttgagggagaagagtgaactcaaagccacagctgctgagaaagtggagcagataacagcttctctgggaacatcatcatctgatgg

SEQ ID NO: 36909 - DNA, 390 bp, Glycine max
  Clone ID: LIB3055-010-Q1-N1-D10
tgcaattttattatggcagccaacctatcaagtgattcaaccaatcaacggtgatcccttcattggaagccttgaaaccccagttacatccagccccttgattgcatggtacttatcgaacctccccgcatacaggaccgcagtgagcccactactaagagggatcgaggtgggcctggcccatggctaccttctggtgggcccattcgtgaaggccgggcctctgaggaacaccgagatcgccgggcaagcaggctctctcgccgctggtgggcttgtggtgatcctcagcctttgcctcacaatctatgggatttcatcttttaacgaaggagacccatccactgccccgtcactgaccttgacgggccgcaagaaggagcccgatca

SEQ ID NO: 36910 - DNA, 369 bp, Glycine max
  unsure (1)..(369): unsure at all n locations
  Clone ID: LIB3055-010-Q1-N1-D11
tgcaatngtantatggcagccaacctatcaagtgatggaagcaatcaacggtgatcccttcattggaagccttgaaaccccagttacatccagccccttgattgcatggtacttatcgaacctccccgcatacaggaccgcagtgagcccactactaaaaaggaatcgaggtgggcctggcccatggctaccttctggtgggcccattcgtgaaggccgggcctctgaggaacaccgagatcgccgggcaagcaggctctctcgccgctggtgggcttgtggtgatcctcagcctttgcctcacaatctatgggatttcatcttttaacgaatgagacccatccactgcctcgtcacttgaccttgact

SEQ ID NO: 36911 - DNA, 395 bp, Glycine max
  Clone ID: LIB3055-010-Q1-N1-D12
tgtgaatattttagacggcaaacccaaggttcaggcctacgtgtaccgcgtgacctcggattcagataaaagacatgcggcgtttacaatagaaggttcctatgcacataggacatgtaaagtgttggatgagtacaagaaagccgtagctgaaatcaagagaaaggaggccaataccaaagacgtctctttcgggatagagatttttcagttagttgttcaccctgggtttgatactagctttgctatggcactagttttactactggatcaaatgttttcataatactcttcatatagagtagtaacacatttctagtttctatatcacaatgacactgtaaatcagctggagagatctatataaaaagaataagaaaacaattgaaacagtc

SEQ ID NO: 36912 - DNA, 300 bp, Glycine max
  Clone ID: LIB3055-010-Q1-N1-D2
gtacgctaatggccgccataatttcgcgaaggttaaggttatccaccttaacctcctcactcctaaaaccctcttcttattctataaccaatttcatctccaacaaccctaaacccccaatcttcaaaccctcccaattccttccacccatcaggtttctctcaaccaacaacaaagactcctccactttagattccgacgaaacccaaaagcccagcccaggcccaagcccaagcccatacccgagccaaaacccaaacttcaagcaccaggagatagaaggcccaacagtggagcgcg

SEQ ID NO: 36913 - DNA, 306 bp, Glycine max
  Clone ID: LIB3055-010-Q1-N1-D3
cgatattgatattgttactcatcctgaatctatcatacatgtccaggttgaaacgcacgattcatctgctatcgcacagttggggatacctgacatgcgcttacagctctctaatacattatcttggccagaaagaatctattgctctgaaataactaggccacgcattgatcttagcacgtatggttctctaacatactatgcaccggatgacaagacatgtccatcggtgaatctatgctatgctcgaggacgagctgtaggcaccatgacatgagttgtcagtgcatcaaacgagaaagctgt

SEQ ID NO: 36914 - DNA, 395 bp, Glycine max
  Clone ID: LIB3055-010-Q1-N1-D5
ggcaaaggaagttgtatcattcgaaaatgtgctgctggaggaagttccagcttcttcaattttaaaatctctgacaacttttattcaaaaccaaggattttattcttttcctcagtattatctgatggctggtgctgcccttttggatattgttcaatctaaaccttcctgctttcctatatcttcccaggagttgttcagcatccttgatgatgctagtgaaaatacttgtttatgtgggacagcagaatcaatgcaaagatatgtatttgatggagaggctggaaaaattggtcttgaaccaaaaaacctagttgcttgcacaagtttcttgctagaacagaaattggtgaaggcatggcttgctgacaaggatgctgaagcactaaggtgcc

SEQ ID NO: 36915 - DNA, 350 bp, Glycine max
  Clone ID: LIB3055-010-Q1-N1-D6
cgaatagagggttttgacgctatcgttcattgaatttcggagcttatctattaatctaatatacatatatataacgacatagataatagtcatatagatataatcatatcgttatattgtccttgcatgtgctgctaagatgtctcgcacgtgctcacattgcggtaacagctgtcatatctcatggacatagcaccgtacagatcgtccgtcatgctagcgaagatactggcatatgtcggacaggagaatgaatgctgacatatgtattcgatggataggctggaagaattagtattgaacctattaacctattgcttgacaagttttttgtagaacagaaattggtg

SEQ ID NO: 36916 - DNA, 253 bp, Glycine max
  Clone ID: LIB3055-010-Q1-N1-D9
ggattctcttctttattccttttgtaatttcattcattcggaatctttgtgaaaaataatgttcatcgagaattttaaggttgagtgtcctaatgtgaagtacaccgagactgagattcagtccgtgtacaactacgaaaccaccgaacttgttcacgagaacaggaatggcacctatcagtggattgtcaaacccaaatctgtcacaatactaatttaaaaccaacatccatgttcctatattagtggttat

SEQ ID NO: 36917 - DNA, 382 bp, Glycine max
  unsure (1)..(382): unsure at all n locations
  Clone ID: LIB3055-010-Q1-N1-E1
ctaatcactacgaaaacaagagatatcgaagatggctctgcccaaagctaaggagatcgtgtcgtccaattccgtcgtcgttttcagcaaaacctattggcctttctgcgtcgatgtgaagaagctcttcggtgacctcggtgcccattacaagggcctcgaacttcgacactggaatccgatggaaaagagctccaagccggcattagttgagtggacggaccagcgaaccgtgcctaatgtgtntattggtggaaaccacattggtggctgtgactcaacaactgccctgcacactcangggaagctggttcctctgctgatatctgctggagctgttgccaaatcaactgcttaaagggatctccatttctagggtatg

SEQ ID NO: 36918 - DNA, 411 bp, Glycine max
  Clone ID: LIB3055-010-Q1-N1-E12
actgaaggatgcgacatcagaggctataagggactgggtaactaatgtggagacaactcattatattttgggttctgttgctgggccgcatccatatccaatgatggtaagagagtttcatgctgtgattggcaaggagaccagaaagcaagctttggaaaagtggggagggaaaccagatattctgattgcatgtgttggtggaggttcaaacgccatgggacttttcaatgaatttgttgatgacaaagatgttaggctaattggcgtggaggctgctggatttggcctggacagtggcaagcacgcggcaacgttaacgaagggagaagttggggttttacatggagctatgagctacctgctgcaggatgatgatggacaaatagttgagcctcactcaattagtgc

SEQ ID NO: 36919 - DNA, 364 bp, Glycine max
  Clone ID: LIB3055-010-Q1-N1-E2
gaagaaagagattgaagagacccagcagaccgacagggacagatggaaagggtcttggcctataatatcttcagacgaccaacaggacaatacaggatgaaagggtttgggttggactcctttttccaagctccacaggatgctggaactcactatgctgtcatgagctcctacgagtaccttagcactggacttcgccagtacttggacaacaacatggatggattttacattgctccagcttttatggacaaacttgttgttcacattaccaagaacttcatgaccctgcccaacatcaaggttcctctcattcttggtatctggggaggcaagggacaaggaaaatctttccaatgtgagc

SEQ ID NO: 36920 - DNA, 264 bp, Glycine max
  Clone ID: LIB3055-010-Q1-N1-E3
gtagaaagagtttgtagagacccagcagaccgacaaggacggatggaatggtcttgcctatgatatctcagacgaccaacaggacatcacaagaggaaagggtttggttgactcccttttccaagctccacaggatgctggaactcactatgctgtcatgagctcctacgagtaccttagcactggacttcgccagtacttggacaacaacatggatggattttaacatgctccagcttttatggacaaacgttgtggtcacat

SEQ ID NO: 36921 - DNA, 412 bp, Glycine max
  Clone ID: LIB3055-010-Q1-N1-E5
gtaaccatggcatccaccactctatcccctacaaccccttctcagctatgctcaggaaagagtgggattttcagtccctcacaggcacttcttgtgaagccagtgaagaggcagatgatggggaagagcaagggaatgagaattgcatgccaagccaccagcattcctgctgatagagtccctgacatgggcaaaagacagctcatgaatctgcttcttcttggtgccatttcactcccctctgctggaatgcttattccctacacctacttttttgtccctccaggttcaggttcttcagctggtggtactgttgccaaggatgctgttggaaatgatgtaattgcagagaattggctcaaggcacatggacctggtgaccgaacccttgcacaaggatttgaagggagat

SEQ ID NO: 36922 - DNA, 374 bp, Glycine max
  Clone ID: LIB3055-010-Q1-N1-E6
cgaggagacacaccttcagcagcagcagccatggttctcaaaaccgaactatgccgattcagcggtgccaagatctacccagggaaaggcatcagatttgttcgtggtgattctcaggttttcctgtttgctaactcgaaatgtaagaggtatttccacaacaggttgaagccatcaaagctcacctggactgcaatgtacagaaagcatcacaagaaggacattgctcaagaagctgtgaagaaaagaagacgtgctgccaaaaagccttactccaggtccattgtcggtgccactttggaagttatccagaaaaagagagctgagaagccagaagttcgagatgcaaatagggaagctgcccttcgtgaaat

SEQ ID NO: 36923 - DNA, 380 bp, Glycine max
  unsure (1)..(380): unsure at all n locations
  Clone ID: LIB3055-010-Q1-N1-E7
aagaaaagaaaatcctcacccattttcttcgtagccaaacactctgaaattctcagttatgtcgtggcaagcgtatgtggatgatcacctactgtgtgaaatcgaaggtaaccacctcactcacgccgctatcatcggccaagacggaagcgtttgggctcagagcaccaacttccctcagttcaaacctgaggaaataactgccatcaataatgactttaatgagcctggatcacttgctccaactggattgtatatcggtggcaccaaatacatggtcatncagggtgagcctggtgctgtcattcgagggaagaagggtcctggtggtgttactgtgaagaagaccggtgcggccttgatcattggcatttatgatg

SEQ ID NO: 36924 - DNA, 293 bp, Glycine max
  Clone ID: LIB3055-010-Q1-N1-E8
gctttgtgtttatatcaaggaaggtgtccttaacagcaaggtcacagtgccctccattagggaagccatgtctaatctcctaaaacctgaccctgagctggccaacttgatccacatcaattgcatgggtcttatcaactggtatggcctaataccagatcttttccccaatgttaattatgttcatggtatcatgactgcttcaatggatccttatttgagaaagcctaggcattatgctggactgtagtctttgtcgactgctgactatgcatcttcatacaggttgatcg

SEQ ID NO: 36925 - DNA, 414 bp, Glycine max
  unsure (1)..(414): unsure at all n locations
  Clone ID: LIB3055-010-Q1-N1-F1
ctgatggatgttcaatacttgggacttgngaggcgactacataggggagagagtaatacttagggaccaaattgattgtttattccattattttgggtggagattgctgtatagatttgccaataaaggcagcatttctgttacggctaanataattctctgtgtagtgttttcctattcatcctttgggactagggctgtttcattttttctatttttcttcatttctggaatatcttttgaatttatgttccctgttcatggaaaaggtggtatagtgttattataatgtgccagacatcagtcaaaaatgggattcaagttgcatacagaacctagtaatcgccaattataaaatatatcaccacttcaattacataattttttttctgaactttaaatatctcagaatat

SEQ ID NO: 36926 - DNA, 341 bp, Glycine max
  unsure (1)..(341): unsure at all n locations
  Clone ID: LIB3055-010-Q1-N1-F10
gtccattgtgtgttgccactttcctctcttcttgtacactcttgttccttctggattgcagaaaggaagatggaagctgtgtctgctttttctgttggcacacttcacatcccaacagcacatgaaacaccaaactcatttaggaaatctatattcttgagcaaccaagtggcttcaccagtttcattggttctcaggggcgcttcaaaatccaagcttttcactgccttgtcaccccctccattgacagaatccagcaacaaccaacctgaggaggctgagccagaatttgaaagtcatgcagagaaatttgactggtactctnactggtaccctttgat

SEQ ID NO: 36927 - DNA, 358 bp, Glycine max
  Clone ID: LIB3055-010-Q1-N1-F11
cgaaagctcttttgctaggagcagatcatgatgaagcgtagtcgatcaccatcaacttcaggagtgagtggctacagccctaccgacttcgaattccgctctactgtcatagactaaggccaccaggtcacagcagcctgggttcttaagatgttccaaacacttcaactcaattgggttgcaccatcacagtcacagatgctgctcaaatgctgtacccgagagaccccagagacccagttccataagggctcgcactggagttggagcttctggatctgatcgtccattagctgaaagacttttagatctgaaagatgcttgttggagatttttaaggccatatactatacgtggt

SEQ ID NO: 36928 - DNA, 414 bp, Glycine max
  unsure (1)..(414): unsure at all n locations
  Clone ID: LIB3055-010-Q1-N1-F2
cagatacctgataatttgtagatttgatttccatagcttccagattccggactggagtggaaagtaagtgactgtcataaagccatccagttggagaatatgacctgatgaagaaaattctaattctgaatctgactgctttatcaagtgactgcttgtgtttggaatctgaatatggatggcatgaatgagtatccatccaattttggaccgtgtcgtggaattagtagtagtagtagtagtatatatatatgccttccctgttatacactcctaatatagtagtatggtattgtgccttgtgcaaggtgatagggggtgtatcggccttgcattnttcaacaatcctaccttgtacatagttntactcgcatccttagtacccaaactcgttaatgtaattaagtgtcatat

SEQ ID NO: 36929 - DNA, 417 bp, Glycine max
  Clone ID: LIB3055-010-Q1-N1-F3
attctaaagaaatataactaatattctttagaataatcaaaaagaatattaaattcaaataaattttagatagaaaaaagacttaaaaaggaggatttgaaatgcgagatctaaaaacatatctttccgtggcaccagtagtaagtactctatggttcggggcttttggcgggtctcttgatagagatcaatcgtttttttccagatgcattgatattcccttttttttcattctagttattgacacggaaaggggtgaagaagattatagatccaattaagtattaaatatatggaaataattaggtaataaatctcctctctttaattcgtcttttatttcttcttttttttacaattgtaataaaataagttaagaaagagaaagaataagggttaatttggcctaattgaaat

SEQ ID NO: 36930 - DNA, 387 bp, Glycine max
  Clone ID: LIB3055-010-Q1-N1-F4
caactctccccaaccatttcttttcatctgcacattcctattctattttttcacttcaacaggatctaacaatgtttagaatccctagtactcaaggagggccttccaagtttgaaagattagaaaaggaacttgctgacaatggaacttcaaatgaggagtttaaaaggagcacaagtttgccttctcgggctatgggttcaacctttcgagacatcaatctacagagaaaccccacaaaaaatgccaatagtaaacctaaggagaagaagagtcacccactcttcagcttctttgatcttcgccggaagaagaaaacaacagctaggcctgaatttgcgaggtatcttgagtatgtgaagggaaggaggcatgtgggatttgaat

SEQ ID NO: 36931 - DNA, 388 bp, Glycine max
  Clone ID: LIB3055-010-Q1-N1-F5
tgttaagaaatttaagtgaggagctagagaatgatgatgaagtctgctatgtgtgcagtggtggttgtagcacttcttcttctggcggaggtggggcccatggctgaggctgtgacatgcaccccaacagagttgagtccgtgtcttccagcaatcacttccggtgctaaaccttccaatgcttgttgcacgaagctgaagcagcaaaaaccatgcttatgtggctacctcaaaaacgctagcttgaagcagtatgttaactctcctaatgcccgaaaaaccgttgcttcttgtgggattcccttttccaacttgttaataaattaagccttcttttaattaaagtgtggaatatatatatatatatatatatatatatattttttta

SEQ ID NO: 36932 - DNA, 374 bp, Glycine max
  Clone ID: LIB3055-010-Q1-N1-F6
ctcgagccgatatcggctcgagccaaaccgggcctactcccgtgcagctccccgctctatggtccgggcgcttctggggccgccacggctgttccttcgacgccggcggccgggggcgctgcgccaccggggactgcggcgggtccctgttctgcaacggcatcggcggaagcccaccggcgaccctggcggagttcaccctgggcaacgagcaggacttctacgacgtgagcctggtggacgggtacaacctacccatctccatcactcccttcaagggatccggaaaatgcagctacgccgggtgcctgagccgacctcaacaccatgtgccccgatggcctacaagtgcggtcacgcgacatcaagcgcgt

SEQ ID NO: 36933 - DNA, 409 bp, Glycine max
  Clone ID: LIB3055-010-Q1-N1-F7
ctcaagtaggctatactaaggtgaaaaaggagagatggcagctgcaacatctagtgctgtgttaaacgggtttggatctcacttcttgtgtggaggaaagaggagccatgcccttcttgctgctagcattggagggaaagttggtgcttctgttagtcctaaaagagttattgtggcagttgctgctgcaccaaagaagtcatggatccccgctgtaaaaggtggtgggagtttcatagacccagaatggcttgatggctcgctaccaggtgactatggttttgacccactaggactaggaaaggacccggcattcctgaaatggtatagagaagctgaactcattcatgggaggtgggcaatggctgcagttgtaggcatcttcattgggcaggcatggagtggagtt

SEQ ID NO: 36934 - DNA, 415 bp, Glycine max
  unsure (1)..(415): unsure at all n locations
  Clone ID: LIB3055-010-Q1-N1-F8
gccacaggtggcttcaggctgcactgccgaggaagtggcagcatcactaggcacatttgtgcaaactgcacctagaatggccagcataggcagctatgaggtgaacttgttggctggagaagacctaggtaattgcatgcacattgatgtgcttaaatctgaaaaaaaaaatgttctagagctttcaaaagaaacacatatttcaagtatgtgtagtgatagtaagttgaagaatgaccccatggaacaaattagcaagttgtttgtcaattcagagaaaactaggcagacacctgtttctaggactgtaggttttcaaattagagcatcaactcctcgtgttaatggtttcggaggaaatggatattcatcacctgtgtntaatgtcatcagtgatgcaactgaggcttctgag

SEQ ID NO: 36935 - DNA, 382 bp, Glycine max
  Clone ID: LIB3055-010-Q1-N1-F9
gcggttaagagatataagaagaagaagctagattatgttccattcactcacataataatccgtgacccatttcagatttcgtcttaacgcacataaattcaggttcaaaatctcacctttgttgattttggcgaggattttgagaatggttgtggctgggggtgctaagttcaatttgagaagaggcaatggttcttctcataatgttgtcaatggctatagcagtgatggagatctttgcagaattagcaaaagtgggtgtttttcgtcggtggctgaggtggatagagatccttcttgcgtttcattcaccactttcaacattctggctccgatttacaaacggattgacccacagaaccagggcctgcgagaaagtgac

SEQ ID NO: 36936 - DNA, 412 bp, Glycine max
  unsure (1)..(412): unsure at all n locations
  Clone ID: LIB3055-010-Q1-N1-G1
gaaactagtcactataccacagttcctaattatctggaacagaaaaagactcagaagcttcttcttcttggaattcaaggatctggcactagcactatatttaagcaggccaagtttttgtatgggaacagattttctgatgaagagcttcaggatgtcaaattgatgatccagagtaacatgtataaatatcttagtattttacttgatggaagagagcgctttgaagaggaggctgtttctagaatgaatggacaaggttctcccggtcaaactatggaaacaggtagcaatggtgaaaccaggtaatactagtgaatgcatctaatcccttaacccaagggctaaaacaattctctgactggctcctggacaatatacccactgnggatttagatgccttcttccctgc

SEQ ID NO: 36937 - DNA, 275 bp, Glycine max
  Clone ID: LIB3055-010-Q1-N1-G10
gtgaatactacataaacaacagcaaggccttgagggaagctattttctaaatgatggatccgcaccttgataaacatgccagctatgtccagtttccacacaggtttgatagtattgattggaatgatctatatgccaatcgtaatacatcttcctttgatataaactagataggattctatggcattcaaggtcctgtttatgtctctactgcatgtctcttcaatatgacatcttcatatagtaatataactcctattaaacctaagcacata

SEQ ID NO: 36938 - DNA, 413 bp, Glycine max
  Clone ID: LIB3055-010-Q1-N1-G11
ctcgagccgtttcggctcgaggtgtacaatacacacttgtctctcaattggttgtaaccttttcttgggtacatttctctttgtatacattcaagcattaatgaaaatgaggaaactcattcctaaaatagtattataatttattctagatctattattaggttagttatcatattgtctacctaccaagcctaattattttttacatgaaggaatatattgagaaaagttcaaattacacatgattatgcgtaatacgtgaaaaaaaaattattacaaatttaatgtatatgttatcttagaaatcgattttacaggaagagttgcgcctaaaatttaactgatactaaaatttatcttagatttattaactatttttcataatattgagaggaagaaaaatttaaatttca

SEQ ID NO: 36939 - DNA, 394 bp, Glycine max
  Clone ID: LIB3055-010-Q1-N1-G12
ctgcagatttgatgcaagaacccaactctatgtagcaaagaaggtaccaaagtggtattgactgatcttaatcacaacaatcaaactgattttgtgctaagcagcagagcctttgcgggcatggctcaaaagggtatgggccaacaaatactgaagcttggcattgctgaaattgaatacaagaggtaggcctaaatcaaatcaactttagttttagataagttttattttatccttttctttcttgctttgcgagtggttttggttttggttttggttttggtccgtccccacttcccacctaacggccagcgccaccggcccacccaccacctatagggaacaatcaatgtggaccaacgtttaactatggaatccctaggacaatcatgtg

SEQ ID NO: 36940 - DNA, 220 bp, Glycine max
  Clone ID: LIB3055-010-Q1-N1-G2
cacagttcctaattatctggaacgcgaaattacttaaaagcttcttcttcttggaattcaaggatcttgcactagcactatatttaaacaagccaagtttttgtattggaaccaattttctgattaaaaacttcaagattttaaattgaatatccaaaataaccagtataaatatcctagtattttacttgattgaaaaaaaccccttgaaaaagaagct

SEQ ID NO: 36941 - DNA, 202 bp, Glycine max
  Clone ID: LIB3055-010-Q1-N1-G3
gaagctgcgttatttgatcgccgagagaaccaagaagaacgtggacatcatctcagcttcgtccaaaaaagaagccgccgccacggaaaatccaccgtataagaacgttgcagagaagaaacctgaagcgaaataaccagatgaaaaacctaaagagagtatagtggtttttccagatcaacctgtattgataccgtagcat

SEQ ID NO: 36942 - DNA, 290 bp, Glycine max
  Clone ID: LIB3055-010-Q1-N1-G9
ggactctcataaacaacacaggccttgaggaggggttttgctttatgatggatccgaaccttggtaaacatgttagctatgtccagtttccacagaggtttgatggtattgataggaatgatcgatatgccaatcgtaatacagcttcctttgatataaacttgagaggtctggatggcattcaaggtcctgtttatgtgggtactgcatgcgtcttcaatatgacagtcttatatggttatgaaccttcttttaaactcaagcacataaagcctgggttgttatcatca

SEQ ID NO: 36943 - DNA, 359 bp, Glycine max
  Clone ID: LIB3055-010-Q1-N1-H1
cacaaacacacacacctcttattccctctctctctctctctgtcaaccaatgcaatcattcattcactaaaaaaaaaattaaaacaccatgcaacaagcaattccttataggtcatggcaacctctcatcacacccaccaacgccaacaccactcacttcacaattagcccacacacattagtaaccttttccacagtgtctacaacagaattatctctaaaagacgatattggatcggaaccgaataacaacatccataatagtgataatcctttctttggttacctccaaaatgggcccaaacatggtcttagagagcgcgaatataagcctcgcttagcctgggtggtgcattaac

SEQ ID NO: 36944 - DNA, 412 bp, Glycine max
  unsure (1)..(412): unsure at all n locations
  Clone ID: LIB3055-010-Q1-N1-H10
agttcatcatatcatcaaagacattaaggagtttaaggaaagcactaaggttgacaaggtggttgtcctgtggacagccaacacagagaggtacagcaacctagttgtgggactaaacgacaccatggaaaacctctttgcttccttggacaggaacgaggctgagatttccccttccaccttgtatgccattgcttgtgttatggaaaatgttcctttcatcaatggaagccctcagaacacctttgtcccagggctgattgatctggccatcaagaggaacagtttgattggaggagatgactttaagagtggtcagaccaaaatgaaatctgtgttggtggatttccttgtggnggccggcatcaagccaacatctatagtgagttacaaccatctgggcaacaatgat

SEQ ID NO: 36945 - DNA, 378 bp, Glycine max
  Clone ID: LIB3055-010-Q1-N1-H11
agcaaatgtttttgtagcagtcgtgttattttatctggtgttatgtctgctgcgaagcatgatgactcacgttcttactttcttcagttaccaatgcatactgtaaagcataatgtccttctaaagatgagtgtgcatatgaatggtgaaaacatgtcagtgatttactggagattcatcatgcaaccgagtgtgtactcgccaataaaattcatcatgcggacagatgtatattcctaagcgaaattgatttgtgtagtacttgacgcctgcttgagaaagtacctatgctaatattctatattaattatgcaagtgcaacaactgcatactagagtctaacaagaatgtataaagggcggccggcaactactgagc

SEQ ID NO: 36946 - DNA, 322 bp, Glycine max
  Clone ID: LIB3055-010-Q1-N1-H12
ctactattttatattgtctcaaaaaccttctctctcaacggaacctacaacaacaactaagaaagagaaattttttagaacaatggaggcatcaaagatgaagtttttcttggttttggtgattgccatgttggcgatggtagcaactggggtctcagctgctgaggcacctaccccaagtacttaatccgatgccaccgccttctttgtacccactgctcttgcttatgtctatgctcttgcatttgtcattatcttctaattaattctctaacaacctatggttatttgctacattacatatatggaattcactttgttc

SEQ ID NO: 36947 - DNA, 373 bp, Glycine max
  unsure (1)..(373): unsure at all n locations
  Clone ID: LIB3055-010-Q1-N1-H2
agaaaagaatgatgagtccaacatgggtttttgtgttaggtgttgcagcaatgttggtggttgtgagtggacaatcatcagtgaagcctttggtgaagacagtgaaggggaagaaggtgtgtgacaaagggtgggagtgcaaaggttggtctgcatattgctgcaatgagactatctccgactacttccagacataccagtttgagaacctcttcgcgaagcgcaattcgccggtggcacatgctgttggtttctgggactaccgttctttcatcaccgctgctgcactgtaccagcctcacggctttggcaccactggnggaaagaccagtggccagaaagaacttgctgctttcttggccatgttggcagc

SEQ ID NO: 36948 - DNA, 258 bp, Glycine max
  Clone ID: LIB3055-010-Q1-N1-H3
ataaagaagcagggattggatttggagctgcatataacatcaaagcttcaattttgcaatctatatttggaagtcctttcctgggtggttccgttgaaaggatccccaatacctaattatatgcccccttggcgggtcagaacccaataatgatagtgatataccaattcttctgcatacttttccgtcaaacaccaaattccacaagggatattataatatcaaccatttccatgaccatgctgttgagcccaacct

SEQ ID NO: 36949 - DNA, 347 bp, Glycine max
  Clone ID: LIB3055-010-Q1-N1-H4
gtattcacctatgtaaatcaactgtccaaaagcttgccaggtccaaatggagagtcagtagtagactgtaatagcatttatggattgccaaacatcacgtttactgttggagacaaactttaaccttaccctgagcagtattttctgaaaactggagaaggcattgcaaaagtttgccttagggggttaattgcttttgacattcctcctcctcgaggtcctctctggattcttggcgatgttttcatgagggtatatcacaccgtctttgactatgggaacctccgagttggtttcgccaaaactgcctaacaagacatctaggagattatatagggcatgtttta

SEQ ID NO: 36950 - DNA, 411 bp, Glycine max
  Clone ID: LIB3055-010-Q1-N1-H5
ctcttactcatgtcgaatgttgcaagaggatagtaccagatggagctatatggccttacctgcatagagataaccctgatggttgtgattcatgcccgttttgccttgtccttccatgccttgtcaagctccaacagataagcaaccaccttgagctgattaagccaaatcccaaagatgatccagacaaacaaaataaagatgcagagtttgctgctgcagtctttggccctgatattgatttagtgggggggaatacacaaaatgaaagcttcatgggtctcagtgatgtgacacattgtggaaaaatgcgagcacttgaaaaactattgtactcatggttttcacagggtgacaaagttcctttggttagctattctgtaaggatgctggacatactggagaaattct

SEQ ID NO: 36951 - DNA, 406 bp, Glycine max
  Clone ID: LIB3055-010-Q1-N1-H6
tatttttcttactgtcttgtctctccagagaactgtatagagagagatggcagctgcaacatctggtgctgtgttaaatgggttgggatcttccttcttgagtggaggaaacaggagccaaacccttctggccactgctattggaggcaaagttggtgctgctgctgttactgttagtcctagaagactcattgtggtagctgctgctgcaccaaagaagtcatggctccctggtgtcagaggtggtggcaacctcgtcgacccagaatggcttgatggatcgctaccaggtgactatggctttgacccactaggccttgggaaggacccagcattcctcatatggtacagagaagctgagctgattcatgggagatgggcaatggctgcagttctaggaatcttt

SEQ ID NO: 36952 - DNA, 347 bp, Glycine max
  Clone ID: LIB3055-010-Q1-N1-H7
gtcgatttgctctgacagagcacctgcatcaacaccaggagcagactttccactcgcaggagcagctatagctctatgctggtggtaacagtggccacggcggtgggtttgtgttcaacacgccggcgccggtgcaggtgccggcgtttggccagcttttttctcagaggggaccccttcagtccagtaacaccccttcgattcgtgcttggatagacccttccgtcgatcaccaccaccaccaccatcactacctatcacagttgatccaccaaggatccgtctccgattgtctgcggattctccggcttccgcattcttgcacaaattctggctgaagaggaaca

SEQ ID NO: 36953 - DNA, 299 bp, Glycine max
  unsure (1)..(299): unsure at all n locations
  Clone ID: LIB3055-010-Q1-N1-H9
atcactgactgntaagccttgttgtgagtaagagaaagctgtttctgttaagagcacacgaggttgatacctctgatcctatctttgcttagaattccacagaatatggagactgtccttttcaatcactccccacctttggaattcaagggtttgagcaaggaggaggaagactcattgctagggcaagtggaaatatggaggtacatgacatgcttcacggactccgtggtcttgaaagctgtaatagagcttcgtatagcggacatactataccggtatggtaaaccactatcctt

SEQ ID NO: 36954 - DNA, 328 bp, Glycine max
  Clone ID: LIB3055-011-Q1-N1-A10
cttcattccatagacatggccaccgtcacttctgcagccgttgctattccctcattcactggcctcaaggcaagcgcaggcaaagtgagtgccgcagttaaagtctcagctccccaagccacaaggttgggcatcaaggcttcgctgaaagacgttggagtcgctgttgtggccactgccgcgagtgcagtgctggctagcaacgccatggccattgaagtgttgctgggtggtgatgacgggtctctggctttcgttcccaacaatttctccgtggcctctggggagaagatcgggttcaagaacaacgcaggtttcccccacaacg

SEQ ID NO: 36955 - DNA, 336 bp, Glycine max
  Clone ID: LIB3055-011-Q1-N1-A11
gtagagagcttcaactccaacactcctcgggatttggtccacataatctaccagggactcaccattctccaagaccaataccaacaactcttccatgacttgcagcctgatttcttgttcaccgacatgttctacccctggactgtggatgctgctgctaagttgggaattccacggctcatttatgttggtggaggttaccttgctcactcttctcagaacacaattgaacaattcttacctcacaccaaggtagattcggatactgagagttttctgcttcctggattgccccatgaattgaagatgacgcgtttgcagttacccgattggctt

SEQ ID NO: 36956 - DNA, 327 bp, Glycine max
  Clone ID: LIB3055-011-Q1-N1-A12
gtgctgactgctgaggacacaaggatagctatacaaagtggtgcagctggaattatagtgtccaatcatggagctagacaacttgactatgttccagccaccatatcagccttagaagaggttgtcaaagctgctgaaggtcgccttcctgtatttttggatggtggtgttcgccgtggaactgatgtcttcaaggcattagcactaggtgcctctggcatatttattggacgccctgtggtgttctccttggctgctgaaggagaggctggtgtaagaaacgtgctgcggatgctacgtgaggagtttgagctaaccatggccttg

SEQ ID NO: 36957 - DNA, 408 bp, Glycine max
  unsure (1)..(408): unsure at all n locations
  Clone ID: LIB3055-011-Q1-N1-A2
ggtcttaaggctctgggagtcagagacctcaactatcgtgtagcttttatcgccaactctgttcagatttgtgatggtagaagagaaatagacatcaggaacagaaagaaggatgctgatgatgacaatcaacagtttactgatcaggaactggaagaaattaaacgaatgaggagcactccagattttttcaccaaacttgtcgaaagcattgctccaactggttttggtcatccagatattaagagagctatccttcttatgcctttgggtggtgttcacaaatttactcatgaaggcttaaacctcagaagagacttaaacgtttgtgttgttggagatcccagctgtgcanaatctcaatttcttaagtatacttcaggcatagttccaagatctgtgtataca

SEQ ID NO: 36958 - DNA, 405 bp, Glycine max
  Clone ID: LIB3055-011-Q1-N1-A3
ggaaagaggctgcagagagtactttgcttgcttacaaatgcggtcatgatattgctcttgctgacttggcccccactcaccccattaagttgggacttgctctcaacttttctgtgttctattatgaaatccttaactcgccagatcgtgcttgtaatcttgccaagcaggcatttgatgaggcaatttccgagcttgacacattgggtgaagagtcataccaagatagtacattgatcatgcaacttctccgtgacaatctgactttgtggacatcagaacatacggacgatgctggagatgagatcaaagaaacatctaagcaacaaccaggcgaataggcgatggcagttgcgatgtggtagttgattggatatgtattaccgataatatggatcccaatgt

SEQ ID NO: 36959 - DNA, 387 bp, Glycine max
  Clone ID: LIB3055-011-Q1-N1-A5
ccattggagaatctcccagtagggtttccattggacgcattgcccctgacttcatctctgaggcctttggcattaagcaatcagttcctgcatacttggatccagcttataacatatctgattttgcctctggggtgtgctttgcttctgctggaactggatttgacaatgctactgcaagggttgctgatgtgatacctctatggaaagaaattgagtactacaaggagtaccaaaagaaactgagggcacatcttggggatgagaaggccaatgaaataataagagaggctttatatttggtcagcatagggaccaatgacttccttgagaactactacacactccctgaaagaaggtgtgaattccctattgttcagcaatatg

SEQ ID NO: 36960 - DNA, 393 bp, Glycine max
  Clone ID: LIB3055-011-Q1-N1-A6
aagaaggccaaatcgattgctctgccctcccatattcaggtaggtatcctaaaacgtgttcttgaagaggttgagaaagtgatgaatgacttcaagactatgcttttcaagtctatggaagatccacaaatagatctgacaaaccttgagaatactgtgagattactgttggatttggagccggagtcagatccagtatggcattatttgaatatacagaatcagagaattcgtggtctgcttgagaagtgtactttaaaacatgccgcttgaatgggaaaattgcataatgagttgcgtgaaaaggctctttctgatgtcagatggaagcagattcaagacgatatggatgaatcatcagatatcaacaactctgctattggtaatacctat

SEQ ID NO: 36961 - DNA, 413 bp, Glycine max
  Clone ID: LIB3055-011-Q1-N1-A7
ctcccttttcttttgtttctttcttcttctacatccactgcacaattgccacatgaatcattagttagggtttattctccaagaaaagcaatgagtgcgtccaggttcatcaagtgtgtcactgtgggtgacggtgccgttggcaagacttgcatgctcatctcctacaccagcaacacttttcctacggactacgtgccaactgtctttgacaatttcagtgcaaatgtagttgtggatggaagcactgtgaatcttgggttgtgggatactgctggccaagaagattacaatagattaagacccttaagctatcgtggagcagatgtattcctgcttgctttctctctcataagcagggctagctatgaaaatgttgccaagaaatggattcctgagttgaggcattatgc

SEQ ID NO: 36962 - DNA, 408 bp, Glycine max
  Clone ID: LIB3055-011-Q1-N1-A8
cggtgttactgagatagcattcaacaccttctcctttgaaaacattacacaagggaagttcaatcactaattagaagtatggtatgtttaattttgttccccgtcacctttgggtgcggcttctttaatttcatctgcaccatcatcctgcatgtcagaggtcccttctttacctctcccttgtgtgttcccttccccacattgcattgtcatcccattgcaccgtggaaaccgccacgaaaacctttgaaaaatgcatgaacctcccaacccaacaagcctccatagcatggacattccaccctcacaacttaaccttagaactagtcttttttggaagcttcatatcaccttcagggtgggttggatggggcattaatcccacatcgaccgaaatgaccggaacac

SEQ ID NO: 36963 - DNA, 281 bp, Glycine max
  Clone ID: LIB3055-011-Q1-N1-A9
agatgatcgatttgatgacgcaaaaagctgagagactccgcgagtacattgtagagaagcaacaacagaatggcaaggccaaaatgccaatggaggaataggccaaaatgctgattttattagtctcttatcacttgctttgtttgtaagtatgctgacatagggcatggtcttcataaatttagttcctactcgcagggaatgatatatcagtttgctaggtggttaatggtttttctattcttagatgaaggttgaggacttgtactgcataatctgca

SEQ ID NO: 36964 - DNA, 414 bp, Glycine max
  unsure (1)..(414): unsure at all n locations
  Clone ID: LIB3055-011-Q1-N1-B1
atcagcttcagatcatttgggtaatggatcccagttggaggtggtcgtggatgaacttcctgacatgcccagaatccttggctattatctttcaaaagggcttccaagatctaagtctttcaagaatggcatggtcaagaagaaatgggaatttcacaagggtcttggctcaacaacaggggtcgcttttgggacaaggcagcacacaagaacagttcctggtccaacgatcgaggccctctatggcgttgacacccacgtgaggtggcaaaatcaccttccttcaaaacacatacttncctgggacccaacaatccccaccgcaatgaccaactcgacacgtggaatccccacagtggtccaccttcacggtgggatccacgcgccagagagcgacngaaacgccaacgcatg

SEQ ID NO: 36965 - DNA, 361 bp, Glycine max
  Clone ID: LIB3055-011-Q1-N1-B10
ctcaacgatattgctggcccagaaggagatcctttgttggtgagtttaaaactatccgtagatgttttggtagttctttgcccatgtccactgagccttgcttctccttcattactaatttcttgccccctaaatttatccagaaaaggaactttttcttcggtttccggtcccattttaacccttacctaaattgaccctttcacctcgcctaaattatgcggaccttccttagttcatttggacaccagtatactcacaaagttaatatatatgtgtaaatggagggtttctatgagaatagggttgaatccgattttaagtctatgtcattatattttaatttccgttattttcaggg

SEQ ID NO: 36966 - DNA, 304 bp, Glycine max
  Clone ID: LIB3055-011-Q1-N1-B11
caaacacgtatctactattccaaactccgacatggccactgccaccgacgacgccgccacgtcatactttttcggcacccgtctaaacaacgttaacacgacaaccttaaacaacggaagattccacgcgctcttgaacttcggcaaaaagaagacggcgccgcagacgccggcgaagaaaaaggaagtgaaagtgaaaccctccggagaccggctggtgtggttcccgaatgctgagccgccggagtggctcgatggaagcatgatcggcgaccgcgggttcgacccgttcgggttcgcgaag

SEQ ID NO: 36967 - DNA, 321 bp, Glycine max
  Clone ID: LIB3055-011-Q1-N1-B12
gcccagtgctcatcgaggcttaaaccctttcggcggcagcgaaaaaagtctccccgcccccaaacccaaacaatgaggaagaaaaaacaagggttcagaagacccgttgtcataaaaaagccgaagcaaccgcaagagcaacccagcgttgatcctattacgggaaagaaaatccccaaaagtttcgtgttttcgcgaggcaagttgccggctcctctcaaacagcttcagatggacctcagaaagttgatgcttccatacactgctctcagccttagggaaaagaaacggaataatctgagggactttctgaatgttgct

SEQ ID NO: 36968 - DNA, 409 bp, Glycine max
  Clone ID: LIB3055-011-Q1-N1-B2
ttcaattcggtggaaccaggccaggtgtccatgtgaactcggtgactctctctctctctctaatgcccttcaagcccagacacatatctgcacttcacaaccctccaaacaacatttaactatatataaaaccatcattctgaacaccatgtttactctcttcttctctcttcttctacattagttcttgttattcattattcattctcagcttcttttcttctggggggcaaaaggggtcacttttcagatccgagattgagctcctttacccatcatcatcatggagctcctcgggtacctgaatcagggtcacccttctagaggaacaacacttgttattactctttcattggtgctttcgacacttgtgtccttctccactttcacacatgccttctcttcttct

SEQ ID NO: 36969 - DNA, 356 bp, Glycine max
  Clone ID: LIB3055-011-Q1-N1-B3
acgagacactgcagtccatggctagaatgggaagtagggaagggtatgttaaagtcctgggctgcgcggcgggcgaatttgatccggcgtattcgtacaaaggacccgtgatgatgctcgacatgaagtaacagatcctgagatatatagtggatcactatcgaagaagccaacatcattaacgtgaagctacagtgatgctaccgtatccaatgcatatccacctgcagatttccactacctcggcaaccattatatgcagtgctaccgcgacatagatttgagcatggacggtctgcacccatttatccacgctgacaaggatgaccctgttgagtatgaatgaccttactgtg

SEQ ID NO: 36970 - DNA, 413 bp, Glycine max
  Clone ID: LIB3055-011-Q1-N1-B4
gtgaaccgcacaagagagggagaatttgcttcgcctttggctctaacgtgactagcaaatcatgtttcctcattctcgccgagagtgcgttctctctctctgttcagacttcggagtacgcttcctctctcacagttggtttcattatgccataccactgaagaacgaagtttatctctctcttgtgacttgtgagcaattcaaattgcggagaacctacgcactgcattggaagatacaagaatatcatcagtttctcctattcattaactccagttactcactgaagatacctttggaggcattgggcaataaaaatgagcaattcctctgctggaacctcattcaaaccaagagcagcttcctcacaaccatcagaaacttcgtctaagcgcaaaagagagttttccaaa

SEQ ID NO: 36971 - DNA, 402 bp, Glycine max
  Clone ID: LIB3055-011-Q1-N1-B5
caaagattttgagcacaatggcctcgacacaatgctttttgcaccaccacgccctcaccactccagctagagcttcaacacagcgcctagttgtgagcaccaaaccaaaccacattgtttgcaaggcagcacagaagcaggttactgtccaagagggtgaggacactactactggccttgtctctcgcaggttggccctcactgtgctcattggtgctgctgctgttggctctaaggtggcacctgctgatgcagcctatggagaagctgccaatgtgtttggaaaaccaaagacaaacacagacttcctttcatacaatgggaatggattcaaactctcaattccctcaaagtggaacccaagcaaagaggttgagtacccaggtcaggttcttagatatg

SEQ ID NO: 36972 - DNA, 258 bp, Glycine max
  Clone ID: LIB3055-011-Q1-N1-B6
ctcgagccgattcggctcgagactgattatcttttaatttgtatttgtgttgtgtttgattcctcctcctcctccatcgtgctctcgggacatattcatggagcctgtgtgttttccgcacgccactttgatatgttatacgggtgcattactgtattttgagtgattatttcaataatgggtggtactcttatccctgttgaaactttgagttcagtgcttgactaattctattggtggtactcttatccttgtttt

SEQ ID NO: 36973 - DNA, 303 bp, Glycine max
  Clone ID: LIB3055-011-Q1-N1-B7
aatgtatacacccactcactctagttagctagtactaaagggagcatcagcatcagcactcagtagccagcagcagcaatgggttctgcttcagtcaccaaagcaccaccctcttcctcctcatcacccaactcttcttctactgagtcccttgatggcttgaagtttgtccagaaaatctactttgaggaagtgagtgttgttgcatcatcagcaacaacaactcaaggtgtcaacagaacactacttatgctttctgcttcaaagatggcaaggtgtgtctcaatgcaagctcctacgcgt

SEQ ID NO: 36974 - DNA, 412 bp, Glycine max
  unsure (1)..(412): unsure at all n locations
  Clone ID: LIB3055-011-Q1-N1-B8
taaaacggttggcttccccctccactatcgctctctccctaatcgcatctccaattgttgtcgtcggtgattaattctccctaatcaaaaccctaaacgcgtcttaaattgaactcaatcagagacaaaacaaagctgttgattctgttgctaaacatagcacggtggacaaacgttaaaaaaggctacagatctttgattcagttgaaagcagattgaaggggagtaaaacaggaacagagcaacctgcagaattactcaatcgaggtgtcataaacttgatgtatttgtgtctccaatctctntgaactgtgagagaccagccatggacagacgcacgaacacttccaggccagtggcattgtcttccccttctatcactgccacaaccaccaccaccataacaattttg

SEQ ID NO: 36975 - DNA, 354 bp, Glycine max
  Clone ID: LIB3055-011-Q1-N1-B9
gggtattcaaattgatactaaacaaaactgctgtcaatatgatgtagaagttgaagatagcattaacaaaaaggactgtggaaatgttggtgaagacattcagcaacatcaagacataggtttagatgcttatactgaatcagtatatggaatattggatctgaattctgtacaaaagatgtttcttaagggaatgagtagttttggcagtactgattctgacatagctgagatttaccaatgctcaggtgcgtcaatgcaagcacgatgggagctgttccagaagcaagctgaacttaccaaaaagaatcatggggaagctaacattcggtatgcttggcttgcttcttctaa

SEQ ID NO: 36976 - DNA, 367 bp, Glycine max
  Clone ID: LIB3055-011-Q1-N1-C1
atcttgacaaaatataatgaacgattgctaatttcaactgggaaaagtattaactgatattgcaagtttgaaactcatctcctcagcagccaacaagcacaacagtatcattatcatatacttggaagtgataaggtttcatttcaaaggtttggtggtgcaattcctttccattagcaaccttgcttgactgcatgtgctaatgcaaattctgaaattcaatccacgcgtccaccattgatgaggagcgtaagcagaaacaggagacaaattattcttttattttgcgtacatagacagtgatgtaaatagcacaatgtttaataattcatgatcgggtattatcattagaggcttagcgtgacac

SEQ ID NO: 36977 - DNA, 407 bp, Glycine max
  Clone ID: LIB3055-009-Q1-N1-D2
ggcaattttctgcatcaagtatggaagcaatttatgaggcattaatttatagtaacatataacaatcaactttggttcatcaagctctatccaaattcaatcaccaaatttaatcctctccctattatgtaagtactttatataccaaattgaatttggtttgttcaaatttgtcaacaagttatgatcaaggtgaacttctgcatccttttgctactatgtttgaaaagttgataccaaattgaatttcgtttgttcaaatttatcaacaagttaagatcaaggtgaaattctgcatccttttgctaccatgtttgaaaagttgagtagactgagccatgatctattgcagcttctgatttgttagtggttgaaatcctaaagggtaatgatcaggattggtcatc

SEQ ID NO: 36978 - DNA, 328 bp, Glycine max
  Clone ID: LIB3055-011-Q1-N1-C10
cttcaattctcttgtatacagttttggtctgtgatttgttgctttggtgagagagtggatatggacgaacggtacgagactttgaaggagcttggttcagggaacttcggagtggcaaggttggccaaagacaaggagacaggagaacttgttgccatcaaatacatagaaaggggaaaaaagattgatgcgaatgttcaaagggagatagttaaccaccgatctttaaggcatccaaatattatcaggttcaaagaggtgaagagtttgtttctatacttaaactgttctttgagtgtgattatttctagatatggaattggtcaat

SEQ ID NO: 36979 - DNA, 290 bp, Glycine max
  Clone ID: LIB3055-011-Q1-N1-C11
caagaactcttcagcatcacaaaaggttttgttctatttgcccagtgatttataatcaaagagcatgggacagacacacagaagttgttatcttgaatcagaaaacatgatgctaagaagctcttcaacaccagttcttggatccctactctattccttcacagatagccctaacaacaatattcactcagaaacctgtcatgcactgaaacacttttcaccaaccactgtcccacatcattatcacaaacttactttccaccaaactgggtcctctgcatgtggtcttc

SEQ ID NO: 36980 - DNA, 389 bp, Glycine max
  Clone ID: LIB3055-011-Q1-N1-C12
cttataacgtctttaaagttcggcaggctaacgatgggcctcactgaaaaacttggggactctgacctagtaatcaatacatcttcaggaagatgctgactagaagaatgatgccatcaaagccacccccaagaagactcgatccaaatttgttgaacagacttaatacactggagttgggatttgctgcctttctcttcgaatgtggatgctatgattatgttcatgggaaacacaactacttcatctacctcttccttcagaccttaacattctcaattgtaggatttggctacgttggcaccatcgtgtaaacctcgttgagccaaatttctcaagttacttaaagttccatcaaggttgtgtccctatttttctaggttttccct

SEQ ID NO: 36981 - DNA, 411 bp, Glycine max
  Clone ID: LIB3055-011-Q1-N1-C2
ccgtggtcgacatggattggttctcatggctttcaaaaagtgggcttgaggcatccctagtgtatgagtatggccttacctttgctcacaacgagcttgaagaagaagacatgttttacttcaaccacgagtttctccaaagcatgggaatctccatagcaaagcacagactagagatcctcaagcttgccagaaaagagaagggaaagaggccactcgcggtggcaaggctcgtggcggcaatcaagaagactaagaacacctttgctaactatgttaggactttgctgatgcacaaaccagaatcagcacttgctgtggtgccggtgccagtgcctactagaagtggtttggggacaagatggaacaagagtgctatgatgaagagggggcgtaaaaagcaagagacac

SEQ ID NO: 36982 - DNA, 397 bp, Glycine max
  unsure (1)..(397): unsure at all n locations
  Clone ID: LIB3055-011-Q1-N1-C4
cttattttaccaccttagattattaccttccttggcttttggctgaaatggaatttctctctatttttcaatgttttgatttactctacacanattaactctcaattttcactttcacttaatagaaaaccttctttttaattaaaataaaaaattaaacagcgttctaataattgatctgaaatcccctttgtttataataggaaaaccctgtgtttgtattcaaatctagcttaaaaaatcaaattatttctgtaatttattctgaattctatgtgtttatttcgttactcgggattcttttgcgttaaacattatatattctaaggagaacgagaccactttttattgagtttgtagaatattttattctgattgacattagctngctaaatgc

SEQ ID NO: 36983 - DNA, 388 bp, Glycine max
  Clone ID: LIB3055-011-Q1-N1-C5
tacttgtgtgccatggctccttaagcttatgatcagctgatcctctcagaccaatgaactttatcaattggcatcagtggcattctgcctacttgttgcttggtgtagcgataagctgggtttaagccttgaactaggttcctttgctgcgggagtgatgatatcaacaacagatcttggtcaacatacacttgaacaagtcgagccaattcgcaacttttttgctgctctgttcttggccagcattgggatgcttatacatgtccatttcctttggaatcatgttgacattttactggcagctgttatattggtgatcattataaaaacaattgtagctacatctgatgtcaaggggtttggatacaataacgagacttcagtactc

SEQ ID NO: 36984 - DNA, 396 bp, Glycine max
  Clone ID: LIB3055-011-Q1-N1-C6
agaacacaaaaaccacttaattagtccttctcacatccaaaatcttgtgccagcaaatcaaacatggcatccatgactatgcttcagaccatgattcctaagaatgcaccgaacctccctcctcgtgttggtgcttcttccaacaacactactaagatctcatttggtggctcaggtagggtactgtggaccgggattcagaggaacaggaataataggtcttcttcgattgtagttgctgcagttggagatgtttcatctgatggcactgcgtaccttgttgctggtgccattgctggggctctagttggaacggccttccccatcttcttctctcgcatagacacatgccctgaatgtgatggagcagggtttgtgcggaaggctaatgtgaca

SEQ ID NO: 36985 - DNA, 359 bp, Glycine max
  Clone ID: LIB3055-011-Q1-N1-C7
agcggttgtgcgttatctgccacgggagccatagaagcagcacatgcaatagcaacaggagaccttgttagcctttctgaacaagaactcgtagactgtgtggaagaaagcgaaggttgttacaatggatggcactatcaatcgtccgaatgggttttagaacatggtggtatagccactgacgatgattatgcttacagagctaaagagggtagatgcacagccaatatgatacaagacacggttacaaatgacggatatgaaactctaataatgtcagatgagagtacagaatctgagacagagcaagcgtccttaagcgccatccttgagcaaccaattagcgtatgcattgatgc

SEQ ID NO: 36986 - DNA, 223 bp, Glycine max
  Clone ID: LIB3055-011-Q1-N1-C8
aactgctcccactggtcgtcgaatgcggcatgctgcagctatcgcgtggggctggcaagggcactgcacaagacaaacttataaccctcatggaagctagtgacacaggtgacaagtcatttgccaatatagcagctgaaatgctagaagaatatttgctgatggccacggatcagtattatgcgtacatatctagcgagagtatttggctcttccattatta

SEQ ID NO: 36987 - DNA, 401 bp, Glycine max
  Clone ID: LIB3055-007-Q1-N1-D8
gagcctgccaagtggggtgtacaagatgagcctcttttggtttctagttttctctgcacatcttgcactagcatcctctcttgttgaatttcaagataatgataatccaaggcaaaagcaagagggcatgcagctaaatttgtaccatgttaaaggtcttgactcctctcaaacttccacatcaccattttcattctctgacatgatcacaaaagatgaggaacgtgtcaggtttcttcattccagattaacaaacaaggagagtgccagcaattctgccaccactgacaaattggggggaccaaacctagtgagcacaccattgaaatcaggtttgtcaattggttcaggcaactactatgtgaaaataaggaatggtacccctggccaatatttcagca

SEQ ID NO: 36988 - DNA, 407 bp, Glycine max
  unsure (1)..(407): unsure at all n locations
  Clone ID: LIB3055-007-Q1-N1-D9
ctttttctcattctctggatccgattcaggaatattattatttttaaattcccctgtttgcaaaanattaagaattgtttgcgtcgtcagatttgaaagtgcttcaattgaaatttattttcatttttattttagtctattttattcccattcgtttcgtaaagtcaacgctgccgggagaagcgtgaaaatagggtgttgatcccagttctcacgtttagttgtgtaaatggatccgtttcagaagagaggaaacatacaaaattaggttcaaaacgttgacattcttcgtgttgggaattagtgcctttggtggtcaccatgttccttcttagaaggcaaacccagaatcaccatgagaatgattcctcatatcaagatacaaaggtggctgaactcaagacagc

SEQ ID NO: 36989 - DNA, 416 bp, Glycine max
  Clone ID: LIB3055-007-Q1-N1-E1
attgaatgtggtggaggttacatcaagcttctctctggatttgttaatcaaaagaagtttggtggggatacaccatatattttaatgtttggaccagatttatgtggcacggatacaaagaagctccatgtgatactctcctaccacggtcaaaattaccccataaagaaggacctgcaatgtgaaactgacaggttaactcacttctacacattcattctcaggccagatgccacatacagtgtcctggttgacaatagaaagagagattccggaagcatgtatacagattgggatattcttcctccacgaaaaatcaaagatgtcaaggccaaaaagcctaaagactgggaagaaagagaatacattgaagaccctaatgatgtcaaacctgagggatatgattcgatcccaag

SEQ ID NO: 36990 - DNA, 404 bp, Glycine max
  Clone ID: LIB3055-007-Q1-N1-E10
agttcattctctttgcgcagttccctacctctcctttcaagatgcagatcttcgtcaagaccctcaccggaaagaccatcacccttgaggtggaaagctctgacaccatcgacaacgtcaaggccaagatccaggacaaggaaggaattcccccggatcagcaacgtctcatcttcgccggaaagcagctcgaggacggccgtaccctcgccgactacaacatccagaaggagtcaacccttcaccttgtccttcgtctccgtggtggcatgcagatcttcgtcaagactctcactggcaaaaccataaccctagaggtcgaaagctctgacaccattgacaacgtcaaggccaagatccaggacaaggagggaatccccccagaccagcaacgtctcatcttc

SEQ ID NO: 36991 - DNA, 411 bp, Glycine max
  unsure (1)..(411): unsure at all n locations
  Clone ID: LIB3055-007-Q1-N1-E11
gaaaaaccaatacccttggcgagtgaagccctagactcactagactacacacttcgcaatggcggttgttgctcaaacccctgacatcgccggcgagcggcagtccggccaagacgttcgcacccaaaacgttgtggcatgccaagccgttgccaacatcgtcaaaagctctttaggccccgttggcctcgacaagatgctcgtcgacgacattggcgacgtcaccatcaccaacgacggcgccacgattctcaagatgctggaagtggagcatcctgctgccaaggttttggttgaactcgccgagccttcaggatcgagaagtcggagacggcactacttctgtcgtcattgtagctgctgagcttctcanaagggcaaatgaccttgtcaggaacaagattcatccta

SEQ ID NO: 36992 - DNA, 410 bp, Glycine max
  Clone ID: LIB3055-007-Q1-N1-E12
ctcgagccgattcggctcgagggaagtgggaatggccatcaataatggtgggggaagcgaggaaggggcattgcagacagtgctttacatgtggggctaccttcccggagctctgccgcagaggacgcccctcttgacgccggttgccgttagggttccgccgtgtgattactcttggaatgatgtttgcggcggtggctgtggattcgctattgctatatctgaatcggggaagctcatcacatggggctcaacagatgatctaggccaaagctatgtgacttctggcaagcatggggaaactccagagcctttccctcttccaacggaagcctctattgtaaaagctgcagcaggatgggctcattgtgttgctgtaacagaacatggagcagtttatacatggggat

SEQ ID NO: 36993 - DNA, 416 bp, Glycine max
  Clone ID: LIB3055-007-Q1-N1-E2
ctcgagccgattcggctcgagctttcttcaccgttcgctctttctttctcccctacacaaaacatggctttgcccaatcagcaaaccgtcgattaccccagcttcaagcttgtcatcgtcggcgacggtggcacaggaaagacaaccttcgtgaagaggcatctcactggtgaattcgagaagaaatatgaaccgaccattggtgtggaggttcatccgttggattttttcacgaactgtggaaagattcgcttctattgttgggatactgctgggcaagagaagtttggtggcctcagagatggatattatatccatgggcaatgtgccaataatcaaggttgatgttactgcccgtctaacatacaaaaatgtccctacctggcaccgtgatctttgccgggtctgtgaaaaca

SEQ ID NO: 36994 - DNA, 418 bp, Glycine max
  Clone ID: LIB3055-007-Q1-N1-E3
ctcaagcattgcatccctcttgatttgtagtttgttttgtgctttagataaaagttctgccaaatcaagaggggttttaagatcatagtgtgtgttttgcaacaatggctaagttctttgctgctatgatcttggcactctttgccatttccatacttcaaacagtggtaatggctgctaatgaacaaggaggccacttgtatgacaacaagagcaaatatggaagtggaagtgtcaagagttaccaatgcccatcacaatgctcgaggaggtgtaacccggaccaataccaccaggcctggatggttttctgtcagaagtgctggcagacatgcctgtgtgtgcccccggggtattatggtaataaagctgtgtgcccttgctacaacaactggaagaccaaggaaggaggacccaa

SEQ ID NO: 36995 - DNA, 416 bp, Glycine max
  Clone ID: LIB3055-007-Q1-N1-E5
gttcttcgacccgaaggcaacgaactcttcacagacgttggcatcgcattcgacatgatgcttctcgctcacaacgccggtggcaaagagaggaccgaagagaactggaagtggctgttcaaggaaaccggtttcgcgcgttacaacatcatcaagatcaacgctctcccttccatcattgaggcgtttccaatctgaagaagatgccactaccacaactgcatgtggtttttatgttgcatgtgttgttgttattattaacagctatatgatcttcgttttaattttgtggttttccttcctgcccttgttatgtttgtgcattaaataaaagtaagaaatgccccaccactaagtaatgctatatggattatgtatgtgttccatatatgtcaagtgagtggtgtgtggttgta

SEQ ID NO: 36996 - DNA, 411 bp, Glycine max
  Clone ID: LIB3055-007-Q1-N1-E6
gcagcagagacggcagctgcatccgaacctgggtttgtagctgaagatatggacactccacgcaacgtgtataaagtatcagctacaaacccaggttcggatgtagcagcagagacggcagctgcattggctgcttcttcaatagtattcagagattcagatccaagctattcctccaaattgcttcaagcagccatcaaagtattcaattttgcagaccgttacaggggttcttatagtgattctcttaattcggttgtctgtccattctactgctcttactctggataccatgatgagcttctgtggggtgcatcatggatttataaagcatcaggaattaacacttatatacaatatatacaatccaatggccacatattaggggctgatgatgatggttacacattc

SEQ ID NO: 36997 - DNA, 412 bp, Glycine max
  Clone ID: LIB3055-007-Q1-N1-E7
tgattaacacagagaatggaaaacctgaaacaaaagctgaagacttgaaggtacctgaatctaaaaaagctgttgccaaggctagtggatcagcaaaacaagtcaaggttgttgaaccaaaaaaagataacgaggaggactctgatgatgattctgatgatgatgattttggatcttctgatgaagagatggaggatgctgatagtgacagtgatgatgagagtggtgatgaagatgatgatgaagagacccctcccaagaaggtggatctgggaaagaagagacccaatgagtctgcatcaaaaactccagtttcttccaagaaagccaaaaatgctactcctgaaaagactgatggtaagaaaggtggacatacagcaactcctcaccctgcaaagaaaggcggaaagac

SEQ ID NO: 36998 - DNA, 414 bp, Glycine max
  unsure (1)..(414): unsure at all n locations
  Clone ID: LIB3055-007-Q1-N1-E8
cctcccactgcttctttcttccttgcagcgcgattgctgcatcctcctccaataagagctcgctgctagcgaaccctaacacggcggcaacgtgaggtgttcggttgaagttcagatcagccatggccgcagcaacccccacttctctgcggttcctcctctccgtttccgtaaccctaaccctaaccctgcttaacctcgccgcctcaaattccgaaggcgacgctctctacacgctgaaacggagcctctcggaccctgacaacgtcctccagagctgggatcccactctcgttagtccctgtacttggttccacgtcacctgcaaccaggacaaccgagtcactcgagtggatcctggtaactctaacctatctggacatttggtacctgaacttgngaagctggagcatc

SEQ ID NO: 36999 - DNA, 413 bp, Glycine max
  Clone ID: LIB3055-007-Q1-N1-E9
aaaatggaccgcagaagcctcctctgcctcgcaatcatcggcattgtcgtcgccgccgtcggaggtcagtctccagcggcggctcccaccacttcctcggcatccccagccacagccccttctaaacctaaaccaaaatcacctgcgccagttgcttctcccacttcatctcctccagcttcatcccccaatgctgcaaccgcaacccctcccgtttcgtctcccacggtagcatctcctccgtctaaagctgctgctccagctccagcaaccactcctccggtggccacacctcccgcggccactcctcctgcggctacacctcctgctgtgacaccagtgagctcgccgccagcgccagttccggtgagttctccaccagcgcctgttccggtgagctctccccctgcact

SEQ ID NO: 37000 - DNA, 402 bp, Glycine max
  unsure (1)..(402): unsure at all n locations
  Clone ID: LIB3055-007-Q1-N1-F1
cacgattcagagatttggttcgctgcctgaaacctaatggctccgaagcccaaaccggcgccgtcgcagcctgctcctcctcctgccctcgaagatctctttaccacgctcaaccgccacatccaggcttccgcatacgacaatgccgtcaggctcacggatcagattctcgccattgctcccggcgacgaggacgcgctccgatgcaaggtcgtcgcgctgaataaaaatgaccgcgtcgaggacacactctccgncattcggtcctctaagaagcagctcgatgattntcatttcctcaaggcatactgcttatacagacaaaacaagttggatgaagctntggagtctttgaaaagacaagagagcaatgatgaaacaatgcttttggaatgtcagata

SEQ ID NO: 37001 - DNA, 414 bp, Glycine max
  unsure (1)..(414): unsure at all n locations
  Clone ID: LIB3055-007-Q1-N1-F10
cttcaacccctctctctctctccaaaacgccaaaccaaaaaatggctcagaaggccgagaaaaacgacaccgactttaaggtccccgaaaccatcatcaccccctgcaccaccaccaccgccacctcgattaccgaaccttctagattcttcgacgcaaccacccccgccacgtcatcgcgctcccccaagcgatccctccccctcgacgacgaatctcagacggaccaaacggcgtcgtcggagcccaaacgcgtcgtgagccgctgctcctgctgtcggcggcgcgtggggctcactggattccggtgccgctgtggcgacctcttctgcgccgagcaccgctactccgaccgncacgactgctcctacgactacaaggccgcanggagagaggccatagcgagagaaaacc

SEQ ID NO: 37002 - DNA, 412 bp, Glycine max
  unsure (1)..(412): unsure at all n locations
  Clone ID: LIB3055-007-Q1-N1-F11
gcatgctgattaagcaaatgatcgaaaatcctataaagagtggattcttaagacgattgaagacagttggaatcttttntataaaaaagattcacttcactttgggatgagcacaaagatggtgctggtgaagcatatcttccagcaatctataacaatcctgaggttcaactgcttgtacagaagaaatacatgacagatttgtttcacgacagtcttggatttggtgctgctaaaatgattaggagaattgttggtgtggcacatgttgaggatttcgaatccattgctgatgctgctaaacgggcaagttgtgaacggcgggcacttgatttagctaagatgcttctcaaagaaagaagaaaatttgaaggcattgctgaaattatttcagcaattcggcaatactagc

SEQ ID NO: 37003 - DNA, 412 bp, Glycine max
  Clone ID: LIB3055-007-Q1-N1-F12
gcttaccagatgaggactcgaaaaacaatcaacaactttctcaccttgggtttaaaaatccttgggttgatgcccaatccatgggtcaaattaaaaacaatcccttgattgacccgtcagagaaatgcttaaaacacaccaggaacttgaaacctcttcaatgaagaaagaggttgtcccgaaatctgttgaagtcaagtcgatgcttattttttgccatgcttttgaaggcaaaatagattgttagtggcattctgataatgcagtgaatacctgctgtaagattaattgcctaatttgtgtaaaaatattatggtccttgcccacagcttgagtgcttgataggcaatgagctaagaaatcatgtctttaactcgagtctcagattttggaggaagttgatgaaatgatg

SEQ ID NO: 37004 - DNA, 415 bp, Glycine max
  Clone ID: LIB3055-007-Q1-N1-F2
catagtagctattatactctctagagtaattgcggaatctgctagaattttctaataatggcgaaagacgttgagcaggtcacagagcaaggtgaatactccgcgaaggactaccatgaccctcctccggcaccgttgatcgacccagatgagctcacaaagtggtccttgtacagagccgccatagctgagttcatagcaacactcctttttctttacatcaccgtgttgaccattattggctacaagagacagagtgacaccaaaattcccggtaacaccgaatgtgacggcgttggcattttgggcatcgctagcgccttcggtggcatgatcttcatccttgattactgcactgccggaatctctgggggacacatcaaccctgcggtgacattcgggttgatccttggac

SEQ ID NO: 37005 - DNA, 418 bp, Glycine max
  Clone ID: LIB3055-007-Q1-N1-F3
agaatccacacaaactcagggtagggcagagagagagagagagagagagagagagagagagaatgggagggtgggctatcgcggtgcatggtggcgctggtgtcgaccctaatctcccactcgagcgccaagaagaagcgaaacaacttctcacgcgctgtctcaatcttggaatctctgctctaaattctaatcttcccgccatagatgtcgtcgaacttgtggtgagggaattggaaacggatccgctgttcaattcgggccgtggatctgccctgacagaaaaaggaacggtggagatggaagctagcatcatggatggtcccaaacgacgatgcggcgccgtttcgggtcttaccaccgttaagaacccgatctcgcttgctcgtttggttatggacaaatccccgcattccta

SEQ ID NO: 37006 - DNA, 414 bp, Glycine max
  unsure (1)..(414): unsure at all n locations
  Clone ID: LIB3055-007-Q1-N1-F4
gcttccacttctgattcagaaactcttaggcattccacattctcaaccccgaaccctaagagcagagcgaaaatgacaaccaccttcgcgaccgtcgcaggactcggtggcgcattactgtcatccacctcatctcgtctcacctcagggtttgtgaaatccccagtgattgctaggaatcccttgaggcaagctgtggcaatgggaaatgggaggattacatgctttgagaggaattggctgcgggcagattacagtgtgattgggtttgggttgattggttggctagcaccctcaagcataccggctatcaacggtaaaagtctgactggcctcttctttgagagcattggtgctgagcttgctcactntcccagccctcctgcccttacttcgtccttttggttatggctg

SEQ ID NO: 37007 - DNA, 415 bp, Glycine max
  Clone ID: LIB3055-007-Q1-N1-F5
caaaactgttcaacaccgagttattatatgaactaaggggtgcagagcaattgaagaagattgatatagatggagctcctattcatttccaatcaacatcttccaactccatagaacataaaaaatcagttagttgctcaatgccttcctccccaatatttccatgtatgcgtgaacttgatctaagtttctgtaatttagttgaaatccctgatgctattggagttatgagttgcttacgatggctagatttaagtggcaacaattttgctacactgcccaacctcaagaagctttccaaactgttctgtttaaagttacaacattgcaagcagttgaaatctttgcctgagctcccttcacgtgcagtaggaccagaattatacatgtttaactgcccagaattagttgatag

SEQ ID NO: 37008 - DNA, 415 bp, Glycine max
  Clone ID: LIB3055-007-Q1-N1-F6
ctggcgtggtgaagggtttcgaggggaaaacaaaatacggtgcgttgaatggtggtgccaactttgttgcccctggttacaccaagggtgatggtcttggtgctgagattgttggcactttcatccttgtttacaccgttttctccgccaccgatgccaaacgtagcgccagagactcccacgtccccattttggcacccttgccaattgggttcgctgtgttcttggttcacttggcaaccatcccccatcaccggaactggtatcaaccctgctcgtagtcttggtgctgctatcatcttcaacaaggaccttggttgggatgaacactggatcttctgggtgggaccattcatcggtgcagctcttgcagcactctaccaccaggtcgtaatcagggccattcccttcaagt

SEQ ID NO: 37009 - DNA, 414 bp, Glycine max
  Clone ID: LIB3055-007-Q1-N1-F7
cttacagttgctgcgtcgcaaggtaccggcggcgacggagaactatcttctcaattttcgatcactgcattggttctgttgtcaagggttttgttcttcctgacttgcatacttgatggcttcaaagttgcagaagttgcaggccacagcatctcaagcgtctcaatttgtatgcagtcgtggaactaactactacaagcaattgctggaacagaacaagcaacacattcaggagcctcctacagtagagaaatgcaacctgttggcaaagcaattgttttacactcgccttgctagtattccgagtcgtaatgagtccttttggaaggaacttgattatgccaagaatttgtggaagaacaggaaagagctaaaggttgaagatgcaggaattgctgctttgtttggcctcga

SEQ ID NO: 37010 - DNA, 415 bp, Glycine max
  Clone ID: LIB3055-007-Q1-N1-F8
gtcacaccaaaaaattcttgcttagctctcacaaacaatctttaacaacaatgaagaaagtagtattaaaggtggacttaaataatgatagaatcaagaaaaaagctatgaagacagcatctggcctttcaggggttgaatcgatttctgttgacgttaaggacatgaaactagtcttattgggtgagattgatccagtgagtgcagtgtcaaagctacgaaagtggtgtcacactgaactaatttcatttggaccagcaaaagaggagaaggagaaggaccccgctatttcttttttacgaagcctatccccttaatatcacatgaaaaccaacattgtatggttcaaattactaggttagaggttttgaagagagtcttaaggctgcgtgatcatctgctaaattctagaata

SEQ ID NO: 37011 - DNA, 393 bp, Glycine max
  Clone ID: LIB3055-007-Q1-N1-F9
tcttcatccatagacatggccaccgtcacttctgcagccgttgctattccctcattcactggcctcaaagcaagcgcaggcaaagtgagtgccgcagttaaagtctcagctccccaagccacaaggttgggcatcaaggcttcgctgaaagacgttggagtcgctgttgtggccactgccgcgagtgcagtgctggctagcaacgccatggccattgaagtgttgctgggtggtgaatgacgggtctctggctttcgttcccaacaatttctccgtggcctctggggagaagatcgtgttcaagaacaacgcaggtttcccccacaacgttgtgttcgacgaggacgagattcctagcggcgtggatgcagggaaaatctccatgagcgatga

SEQ ID NO: 37012 - DNA, 381 bp, Glycine max
  Clone ID: LIB3055-007-Q1-N1-G10
caaagcctttctagaacgaaaaaaaaaagaagagcaattgtccctcaccaaagaagaagaagcaaacaatggccgatcaacttaccgatgaacagatctccgagttcaaggaagccttcagcttgttcgacaaggacggcgatggttgcatcacaaccaaggagcttggaactgttatgcgttcattggggcaaaacccaactgaggcagagctccaggacatgatcaatgaagtggatgctgatgggaatggtaccattgacttccctgagttcctaaatctcatggccaggaagatgaaggacactgattctgaggaggagctgaaagaggcattccgggttttcgacaaggaccagaatgggttcatctctgctgctg

SEQ ID NO: 37013 - DNA, 417 bp, Glycine max
  Clone ID: LIB3055-007-Q1-N1-G2
ggggaggcaagggacaaggaaaatctttccaatgtgagcttgtctttgccaagatgggaatcaaccccatcatgatgagtgctggagagttggaaagtggaaatgcaggagagccagcaaaactgatcaggcagagataccgtgaagctgcagacatgatcaagaagggaaagatgtgcgctctcttcatcaacgatcttgatgcaggagctggtcgtcttggtggaaccacacaatacactgtgaacaaccagatggtgaatgccactctcatgaacattgctgataaccccaccaatgtgcagcttccaggtatgtacaacaaggaagagaacccccgtgttcccatcattgtcaccggtaacgatttctcaacactctatgcacctctcatccgtgatgggcgtatggagaagt

SEQ ID NO: 37014 - DNA, 417 bp, Glycine max
  Clone ID: LIB3055-007-Q1-N1-G3
aacgaaatctcaaaatgaatggtttgattataagaagtttgtcaatgttgacttctcagttgaaaggcccatgcttattaatgaccaagctaactgctcaaatgcagttctttttggctttggcattgttgaacaatgctctaagcatgatgaaattttaaaggtgctaatgtctgagactgctgaagcagggatagatggagggaatttatccttgttatcagacttgatgaaattgcagttgtcaggcattgatgaaacccagcaaccatcatcatctcttatctacccaactggaaaattcaacatcccaaagcattttctgtattttgttcaagattcggccctttcttcaaagatcacggttcatccagatggtcaaatgacatttatgggtaccgcaattgagttgaaaga

SEQ ID NO: 37015 - DNA, 413 bp, Glycine max
  Clone ID: LIB3055-007-Q1-N1-G4
ctcgagccgaatcggctcgagctctcatctcctggtctccagtgagatgaaccctagctccaattggtccctttaatcaattacctcttaattagtaattacttaatctcaattagcctttcactctcccacacaacaacatcatgggcgtcaaaggttttgtcgaaggaggcatcgcttccatcattgcaggatgttccacacacccacttgatctcatcaaggtccgcatgcagcttcagggcgaaaacaatttgcccaaaccggttcaaaatctccgacccgcactcgccttccaaaccggttcgaccgtccacgtggcagcggctattccgcagacccgcgtgggtcccatcgcggttggggttcgcctcgtccagcaagaaggccttgcggccttgttctcccgcgtc

SEQ ID NO: 37016 - DNA, 413 bp, Glycine max
  Clone ID: LIB3055-007-Q1-N1-G5
atcagtctctaatatttttctcactgtcttgtctctccagagaactgtatagagagagatggcagctgcaacatctggtgctgtgttaaatgggttgggatcttccttcttgagtggaggaaacaggagccaaacccttctggccactgctattggaggcaaagttggtgctgctgctgttactgttagtcctagaagactcattgtggtagctgctgctgcaccaaagaagtcatggctccctggtgtcagaggtggtggcaacctcgtcgacccagaatggcttgatggatcgctaccaggtgactatggctttgacccactaggccttgggaaggacccagcattcctcaaatggtacagagaagctgagctgattcatgggagatgggcaatggctgcagttctaggaa

SEQ ID NO: 37017 - DNA, 413 bp, Glycine max
  Clone ID: LIB3055-007-Q1-N1-G7
cacaaacagatactaaagcaagtgttgggttcaaagctggtgttaaagattataaattgacttattatactcctgactatgaaaccaaagatactgatatcttggcagcattccgagtaactcctcaaccaggagttccgcctgaagaagcaggtgccgcggtagccgccgaatcttctactggtacatggacaactgtgtggaccgatgggcttaccagtcttgatcgttacaaagggcgatgctacggccttgaacctgttgctggggaagaaaatcaatatattgcttatgtagcttatcccttagacctttttgaagaaggttctgttactaacatgtttacttccattgtcggtaatgtatttgggttcaaggccctgcgtgctctacgtctggaggatttgcgaatc

SEQ ID NO: 37018 - DNA, 395 bp, Glycine max
  unsure (1)..(395): unsure at all n locations
  Clone ID: LIB3055-007-Q1-N1-G8
ataggttcaatgttgtgctgatgatagaaccattttggttacaacatatgaaggcacgcataaccatccactgccacctgctgctatggccatggcatcaaccactacagctgctgctagcatgttgctttctggatcaatgtccagagcagatggaataatgaacccaaatttgctagctagagcaattctcccttgctctacaagcatggctacactctcagcttcagcaccattctccactgtgactttgtacctcacacacaaccctaacccattgcaatatcaaaggcctggttcatcattctaagtacccttacttcaagcacagtcttagaactttgactcaggagccgncccatttgcacaagcacaagcactttataatcaatcaa

SEQ ID NO: 37019 - DNA, 397 bp, Glycine max
  Clone ID: LIB3055-007-Q1-N1-G9
ggcagcacttggtgggaatcgtgatgtgacaggaagccagaacagcgttgagatcgatgctctagctcgctttgctgttgaagaacacaacaaaaaacagaatgcccttttggagtttgaaaaggtggtaactgcgaaacagcaagtggtttctggtaccttgtacaccatcactttggaggcaaaagatggtgggcaaaagaaggtttatgaagccaaagtttgggagaagtcatggttgaacttcaaggaggtgcaagagttcaagcttgttggagatgcacctgcatagtctagtgcttaattaggttgctgaagagtgaagaatgagacagcctggttcgaaggggaaaagcctaaggatatatcaaaggattctatatgtataaaataaatg

SEQ ID NO: 37020 - DNA, 408 bp, Glycine max
  Clone ID: LIB3055-007-Q1-N1-H1
tgtaaatgctatccaatcacaaatcagcaaagttttcttcaaggatttgttctttcgacgtgtccatggactagacaatcggattccaaaacatgtggtgagtgtggatgagaaatacatccgccgctgcctggaattcatacataacactgcattaaaagcagctcaattcaacatacctgagagcttaagagccacaaacatggagactttatcagaaagcttgaatacagtgaaattttttggtggaaatgcatgtggtttgggacattttgtctttgaatgtcctgtggccactgagaatgggagagtagttataagtgctaatgctggggaccagtggaccttaggttcaataatggggagcaagagcatgataaatatattgaatagtactcttcttcagca

SEQ ID NO: 37021 - DNA, 335 bp, Glycine max
  Clone ID: LIB3055-007-Q1-N1-H10
atcaaagacttgaacaatgaatccaatggaagctcaaggtcagggacaactaacccagaagacgagttggatgctgtggccacagctgaggagctgaaggcattaagaaaggaacttgcatcattgaggctgagcaatggagttggaaacaatgacaaagatggagacaacaaacccagcatggacaaagctgtcatgagcaaggtgaaagggttgctcaagtcaaagaagtctttcattaagatttgggccagtaaagggggacaaggtgaaaatagtggctcagactcatcagagagtatgagttctgctaacccagaagaagccaaatctac

SEQ ID NO: 37022 - DNA, 380 bp, Glycine max
  Clone ID: LIB3055-007-Q1-N1-H11
tgaccatgctttcccatattgagagaattctatggagcgaggggcaaatttctcgccgtgttttcgagctcgccgccgaaatctgtgacgacttcggcggccattcttcggcgcccgtggtcgtcggcgtggtcactggcgcgtgcctcttcttggctgaccttgttcgcaaaatagatctctccatcgccgttgatttcgtacgagtcgaatcctacggttccggaaccgtgtccaatggcgcacccaccatttacttcgatttgaaggtcgacgtcaactcccgccatgtcatcgtggtcgaagacattgtagatactggacataccttatcaaaagtcattgagcacttgaaatcaaaaggagcgtgctctgcttct

SEQ ID NO: 37023 - DNA, 395 bp, Glycine max
  Clone ID: LIB3055-007-Q1-N1-H12
cacaatcactatcaccatcatcatcaatattcttcttctggtgggttctcattggcacaaatccaactaggacattctcttcctgaggcaatgaatcacaatgtttcagcattcaacaataatgtgagtggtgagaaccaaaaccactcatcatcagatcctcatctgcaacagcagcaacacttctcattcataccggatcatcttatgtcagctgtggttacttcttcttctcatcatcaacctagcgggagcgactacaatctgaacttcaccatgtcttcgggcctcgctggttacaatagggggacccttcagtccaattctccgtctcttttgcctcacttgcagaggttttcgcctctagacggatccactgtacctttcttcattgg

SEQ ID NO: 37024 - DNA, 418 bp, Glycine max
  Clone ID: LIB3055-007-Q1-N1-H2
aactcactcactggaagccttgttgtgagtaagggaaaggcttcctgcactgagcaccaagttgaaacctcttgattctttgcttagaattccacagaatatggagactgttcttttcaatgactccccacctttggagttcaagggtatgagcaaggaggaggaagactcattgctagggcaagttgaaatatggaggtacatgacatgcttcacggactccgtggccttgaaatccgtcatagagctgcgcatagccgacataatagaccgttatgggaaaccactatccttgtcacaaatcgtggagaacatagatgatgcacccttcccagatgcctctcttctacagagagtgatgagagtgatgggacgtaaaaagatcttcagtgcagaacaatcagagactggggagacc

SEQ ID NO: 37025 - DNA, 416 bp, Glycine max
  unsure (1)..(416): unsure at all n locations
  Clone ID: LIB3055-007-Q1-N1-H3
atcgtttattcagcatatgtctcaaaggcccacgattcctcactcttcttccatagcctgcggccttcactctcatctcctggtctccagtgagatgaaccctagctccaattggtcccattagttacctctttcctgcatctcatatatcccattctttctcattcacacagcatcatgggcgtcaaaggttttgttgaaggaggcatcgcttccatcatcgcaggatgttccacacacccacttgatctcatcaaggtccgcatgcagctccagggtgaaaacaatttgcccaaaccggntcanaatctccgacccgcactcgccttccaaaaccgttcgaccctacacgttgcagctgcagttcccgccgcccgcgtggggccccatctcgggtggggttcgcctcgtccagc

SEQ ID NO: 37026 - DNA, 326 bp, Glycine max
  Clone ID: LIB3055-007-Q1-N1-H5
ctagaactggttgcattgggatctcatggcgaaggaagcggtactgctacgcatgcgggttcgataccgagggcacttagatggtggtcctcgagaaacggctttgtaactttcggctgactcacatattgcgctaaagcctacctcgcaaggctcaacaggtatgctcggtaagaacctttatctatcttgcgatccatacatgcgcggtcacatgcgtgaatagcacggatcttatatccctccatgtcttccagcccatgcacttgaaggatttgcagtatctatagctgtacagtctgcatagccagattacacgcctggtg

SEQ ID NO: 37027 - DNA, 404 bp, Glycine max
  Clone ID: LIB3055-007-Q1-N1-H6
ctagaacggacttgccaaatggagcatatcatccttccttgaagtgcaatggtacggtccttacatttggaactgatacacccttgtgtgagtcaatggcatctgttttgaaccttgctgataaaaccatgcacaattacacaagaaatggatttcataaacctgaggaactaagaattcctgtttcccatgccagtggagaaaaaggggatgatcaatctaataaatcttcggttacctccacaacatctgtagaaggtgcaagcaccaatagacccaaagaacaggttatgcagaattgtcagagctttccgtcacaggttccctactttcctgcgaccccttggcccatcccttggaatccagtgcagtggagttctcccgtaccaccgcctgctttttgt

SEQ ID NO: 37028 - DNA, 414 bp, Glycine max
  unsure (1)..(414): unsure at all n locations
  Clone ID: LIB3055-007-Q1-N1-H7
ctgtatagagagagatggcagctgcaacatctggtgctgtgttaaatgggttgggatcttccttcttgagtggaggaaacaggagccaaacccttctggccactgctattggaggcaaagttggtgctgctgctgttactgttagtcctagaagactcattgtggtagctgctgctgcaccaaagaagtcatggctccctggtgtcagaggtggtggcaacctcgtcgacccagaatggcttgatggatcgctaccaggtgactatggctttgacccactaggccttgggaaggacccagcattcctcaaatggtacagagaagctgagctgattcatgggagatgggcaatggctgcagttctaggaatctntgtgggccaggcatggaatggagttccatggtttgaagctg

SEQ ID NO: 37029 - DNA, 414 bp, Glycine max
  unsure (1)..(414): unsure at all n locations
  Clone ID: LIB3055-007-Q1-N1-H9
cttttgtttgtctaacaaccccacaatgctgattccctcctctcacccctcaatagtaacctcttatcgtttattcccttatctttcaattccttctgttgatttctgctcattcatttgtagggaaataaattcaatactgaagaaaaccaagttgaaccaacagacgtgaaaccatgttatggaatcctacaggaataattcagtggcaagaagagaagaggtggcttccctggccttgtgtccccccacaactccgtgaagactcaagaaagcatttgaatcactctcgagaatgtgcaaacccagatctaataataggcatgactatcaacaacattgcttagcaaacatagtgtggtgtanggagacattatgtaaggttgtttgtgcagttccaacaagctatttgaa

SEQ ID NO: 37030 - DNA, 353 bp, Glycine max
  Clone ID: LIB3055-008-Q1-N1-A1
ccaagagggacttgtcactcatttttgacactggcagtgatctcacttggactcagtgtgaaccttgtgctcgttcttgctacaagcagcaagatgtaatatttgatccatccaagtctacatcatattccaatattacatgtacatctgccctctgcactcagctctctactgctacaggaaacgatccaggatgttccgcatccaccaaggcatgcatatacggcatccagtacggcgacagttccttctcagttggctacttcagccgcgagcgcctcaccgtgaccgtcaccgacgtcgtcgacaacttcctcttcggctgcggccagaacaaccagggcctcttcggc

SEQ ID NO: 37031 - DNA, 406 bp, Glycine max
  Clone ID: LIB3055-008-Q1-N1-A10
gcagaggttcatgatgtttctgatccaagagtaaaaacgctaggagttgatgcacttccagctattgtaggttggctaccaaatggagaaaagcgtgttctaaaaactgggatatctgtgaaagatttaaaatctgcagttcttgatcttagtaacatacttgatagttttgaaaaagtaagtaaaaaggaatcatcaggtcaggccaaggaggcacaaactgactcagacgagggacgcgtaccattactttctaaatcaaacatcgaggctctatgtggtgagaaaactccagtctgcataattggtgccttcagttcttctaaagctagagaaaagcttgaatcaatcctctctgtggtttctcaaaaatctttgtcaagacaaccaaatcagggatccagca

SEQ ID NO: 37032 - DNA, 412 bp, Glycine max
  Clone ID: LIB3055-008-Q1-N1-A12
caaaaatgaagaaaagaaaaacattgaagggtggaaacttcggttcaccctcttctcccccactctgttactcagccacagtagaccttctttataaatagcgatgcagagcttagcattcagattccccccaactcttggctctttttcttcttagaaagagagtgttagaattgtaattatatagtactagtagcacttgataaagcagagattctgcttcaagtgtcaatccccatccttttaccacttgttatcatccacacattacactgccaatctctattcaaaattcaataacccacaaactaaaactaatggctctgttttcaaatcaccgacactcttccgaagcgctcttgggctttctactcttcctcgtattcagaggggtttcagtttcaggggcaac

SEQ ID NO: 37033 - DNA, 408 bp, Glycine max
  Clone ID: LIB3055-008-Q1-N1-A2
gctcaaagacttatatgggaaggacctttccttttggcttaaggagaaactaactttgaagttgttgactgcaaatccgcaaaatggattggcaatgtaagctttgttgatgagcgacatcggcatagatatgaggttaatcctgacatgatatcaccgctagagaatgctggtctatcttttgttggcaaagatgaaactgggaggcgtatggagatagttgagttgcctagccatcctttttttattggcgttcagtttcaccctgagttcaagtccagaccagggaaaccttctccgctcttctcaggattaatagcagcagcaagtgaatctaggaagacaatcatggtgccaagtaatggtcacgccaagttaactaatggaaatggaatgtgcaatggacac

SEQ ID NO: 37034 - DNA, 409 bp, Glycine max
  Clone ID: LIB3055-008-Q1-N1-A3
ggcttcatgttccgcacctccctccctcatgctcgtccactctcaagacctttctccctctcttcgctccttctctcacaggcccatttctagaaccaccttctctctctatcctctccttttgaagccctccaaatggctccacatagagcccaaatccaggacttgccatgccctcgtcgccgctttgtctgcagaggtccaagtgcccgaaactttcgacgacacggaggaggacgacggtgctgatggctccaccgtcaccaacaccgtccccaccaccaagcctaagaaaggcaaggccgcattgcctctcaagaaggacaggacgagatctaagaagttcttggaaattcaacaattgaaggaacgtaagaaagaatatgacttgaagacagcaatatctttg

SEQ ID NO: 37035 - DNA, 120 bp, Glycine max
  Clone ID: LIB3055-008-Q1-N1-A4
tgacaatgatcctttcttgcttccattttttccacagatgcacaaacgcttaattgatctcatcagcatgccagctttagatgctcacgcaactgctataggtgcactctattaccctgc

SEQ ID NO: 37036 - DNA, 398 bp, Glycine max
  Clone ID: LIB3055-008-Q1-N1-A5
caccaccataaatcaatccttgttcactcttatttcttatagctccaacaacatccctcatataaaaaaatggcctctctccgttttctcttcttagcttctttcttcattgttttgtcactttccatcaacattggtgaggtccaaggggcaaatagaaaacttttggcaccaacatttcctgacctagggaacattcctggcctggaatatcctcctctacccccaatcaccaattggccagaatacaggttgccatcatacttaagacctaattaccccgcaattcctgcaagttattaccgttacactccacctgcgaaaacaaccacaatcacatcttccaagccttgatggccacatgcatgcaatttggtatatacatattattggtatga

SEQ ID NO: 37037 - DNA, 415 bp, Glycine max
  Clone ID: LIB3055-008-Q1-N1-A6
agaagactgatattgcgtttgggaaaatcaagcaaacatgtcactgtgtgttcactactctccatgcaatagcattggtgttatgccgcaattctgcacccccaggaccaggaccagccataataggaattgggatttgcagagacttagaattgtcgcaaaatcaaattcagatgcaacccaatccacatccacctcccttctctcatttctctgtcccttactcaagctcttctctgcaagagatccttctcaaccacgcaattttactttcgagctagcaacatcttccttggctagcttgtcaaggtttgcatggggaacaaaatccatagctgagagttcactgaacaaagaaatcactttagatctttcttttaggttgcagctttttgaatttggaggatgccccttt

SEQ ID NO: 37038 - DNA, 271 bp, Glycine max
  unsure (1)..(271): unsure at all n locations
  Clone ID: LIB3055-008-Q1-N1-A8
tgacaatgaacctttcttgcttccattttttccacagatacacaaacgcttaattgatctcatcagcatgccagctttagatgctcaggcagctgctataggtgcactctataaccttgctgaagttaatatggactgcaggctgaagattgctaacgagagatgggctattgatcgtttgcttaaagtgattaagacaccacatncggttccagaagtttgccggaaatctggcatgatattggagagtctcgtgtctggacccaacaaa

SEQ ID NO: 37039 - DNA, 414 bp, Glycine max
  Clone ID: LIB3055-008-Q1-N1-A9
gcagagcacccatttgccatcttcctccgcagaagcccaaaaccagaatccagaattctcacagcagaagagctcaacttccaaataggcgtttgttcctcttctctctgcctctctctagtttccttctccttcctgttccaagctttggtgatggtaacaatgcaatcattattgataaacttcaaagtgggccatcttcatttgctgccacaatgtatgacccagtaagtgcggctgaaagagaagcaagtgctttggtttcagagagagtgtctcaggcagtggagttgctggagaaagggagggaattgcagactcagggtgactttagtggtgctcttgattacttttctaaggttattgaaagctacaaagacttagcattctcagaatatgcaagggtaggaagag

SEQ ID NO: 37040 - DNA, 386 bp, Glycine max
  Clone ID: LIB3055-008-Q1-N1-B1
tccagatccaacttcaaaattgcaatgggagtggaagatacagatatttgtatcatcaaggagccagatcatgttgtagtctattcagatggcatttctcatgattcgggtcatgaagctggaagtggtcatcacaatattacagagtcgtatgaacaaatcaatgagactactgaacatcatagttcagaggatagtgcaaaggaatatgaggtgaaggaatgcacaacagaagtttctgttaaggtctctgatgtctctaatgttaaaaaatgtgaggataagttaacctcagattctgagggtgtcgtcagtgagaaaagttttaaatctaacaaaacaaggggtaagcataagccacgagataccgggaagaatggaacaag

SEQ ID NO: 37041 - DNA, 296 bp, Glycine max
  Clone ID: LIB3055-008-Q1-N1-B10
gttctctttcctttcaatctcatcatggattcttcttctgaccattctcccccatcatcacttcattctcctgacacttcctgcgggttatttagaaattggagagtcggctatggaaggtgctatcagggaaacacgggaggaagccaatgctgacgtggaagtgatttctccctttgctcaattggatattcctttaattggccaaacttatataatcttcttagcaaggttgaagaaacctcacttttcacctggtccagaatcatcagaatgcctgcttttctcactcaatg

SEQ ID NO: 37042 - DNA, 395 bp, Glycine max
  Clone ID: LIB3055-008-Q1-N1-B11
caaactcacagatagattagcacttagcatttactaagaaaggataaaggaaggaacactttcgttacatttctccgcccattcctaccttgttcctccttttctccttttctttttcgtattcggggttgctgctttctttcgactctattgtcttcttaataaatacagaaagaaacaaaaaagaaaaaaagtttataggtgcctagaagaaaagacaatatagtgtggagcaattacgtttgatcacaagggaaattaaaggtgcaacggttttgcaagatagcatagaagattttgaagaatcttagttgcaatatagttgtgcagttgttgaaatgggggctcctttatcagcatggcctttggagaactttggaacatacaagtatcta

SEQ ID NO: 37043 - DNA, 394 bp, Glycine max
  unsure (1)..(394): unsure at all n locations
  Clone ID: LIB3055-008-Q1-N1-B12
tgcaaaaatattaagatgataaacattggagcacttgttgtactctttgcatttctcttcctcagttgtgcctatgcacaagacacaacaacccttgtgcctgcaatcataacttttggtgactcagccgtggatgtagggaataatgactatcttcccacccttttcaaggctgattaccctccttatgggagggactttgctaaccaccaacctactgggaggttttgcaatggcaaattagctactgattttactgctgacactttgggttttaagacctatgctccagcatatcttagcccacaggcatcagggaaaaacctccttattggagcaaactttgcttctgctgcatctggttatgatgaaaatgctgctactntgaatcatg

SEQ ID NO: 37044 - DNA, 412 bp, Glycine max
  Clone ID: LIB3055-008-Q1-N1-B3
gaaaccagtgactggcttttccaagaaagaaaaccaaaaaggagtttccgtcattccatcatgaacgctcttccaattctcctcttcttcctcttcgtttctgcattagtttctgcgaagaaaactggtgatgtgacggagctgcaaattggcgtgaagcataaaccagtatcatgtgaagttcaggcacacaaaggtgacagagtcaaagtacactatcggggaaaactcactgatggaactgttttcgattctagctttgaaagaaataatccaattgaatttgagcttggtactggtcaagtgatcaaaggttgggaccagggattattgggaatgtgtcttggtgagaagcggaagctgaaaataccatcaaaacttggctatggagagcaaggttccccacccacta

SEQ ID NO: 37045 - DNA, 387 bp, Glycine max
  unsure (1)..(387): unsure at all n locations
  Clone ID: LIB3055-008-Q1-N1-B4
gaagttctacttggcaccaaccagggaagaacggattggtggttggaccggaaattttccgaactgagggaattcctgaccaggacattgtcaacctggttgacaccttccttggccaatccatggattcctttggggcactgagggccaaagtatatgatgatgaagtgaggaagtgaatttctggtgttggtgttgacagtgttggaaagaagcttgtgaactcaaaagatggacctncaacctttgagcaagcccagatgactctggagaagctcttggctgatggtaacatgcttgtccaagaacaagagaatgtcaaaagagtccaattggctgacaagtacttgaacgaggctggtcttggaaatgctaacgaggatgcta

SEQ ID NO: 37046 - DNA, 412 bp, Glycine max
  Clone ID: LIB3055-008-Q1-N1-B5
gtccagtgctccacttatcaataaatcagatattatacccgtaattgtccccagaactagcatgaggtcagagcctgtggctgattctagaaaagaagttggtgtttctggaagaacgatgccattcccctcacagtcaaaggcagcagatgtacgtaaatttccgaacaacagagatgatgtggataagcccctctctcctgtaatcgaatctgcagcttctaagggtagtgaattaagtggttttgcagataaaaataatttccctgcttctgtaagctcaacgcaagatgaagctcgaggactgaaagtaaacagagatgtatgctctgtcgaagtacaaaaaggagggagaatgcgctcacttctcaatttagaaaagagggaacgatctcttaattatgagggacct

SEQ ID NO: 37047 - DNA, 418 bp, Glycine max
  Clone ID: LIB3055-008-Q1-N1-B6
caaagtggtgtcctatttgtttgtaaccaccgcacagttttagaccctgtggttactgcagttgcacttggaagaaaaattagctgtgtcacatatagcataagcaaattcactgaaataatttcaccaattaaagctgtggcactctcaagggaaagagagaaagatgctgccaatatcaagagactacttgaggaaggggacttggtgatttgccctgaaggcacaacttgtagagagcctttcctcttgaggttcagtgcactatttgctgaactcactgataggattgtcccagttgctattaacacaaagcaaagtgtgttctacggaaccacggtttgcggacacaagttgttggacccgtactttgtgttcatgaatccaatgccaacatatgagatcactttcttgaacc

SEQ ID NO: 37048 - DNA, 371 bp, Glycine max
  Clone ID: LIB3055-008-Q1-N1-B7
ggtcattccaccacccttctctccaagcacagttcggcggtgactcatacccactgggccccaccgagtttcctgcctcaaatcaatgcgatgaagacaatgcacgggagagtggtgtgctccaccagcgacaagacggtggcagtggaggtggtgcggctggcccctcacccaaagttcaagaggctcgtgaggaagaagaagaagtaccaggcccacgaccgcgataaccaattcaaagtcggcgacatcgtgcagctccagaagaccaggcccatcagcaagaccaaggcctttctcgcactccccgttcccaaaaggccctccagcaggcccgaggcccagcccgaggaactttccattcccttcga

SEQ ID NO: 37049 - DNA, 376 bp, Glycine max
  unsure (1)..(376): unsure at all n locations
  Clone ID: LIB3055-008-Q1-N1-B8
gtttgttcccaatgtgctaataaacagcgagagacagagagaggatttgatctttctttttttaaattaataaattaactcagaaagggttccttcacttcccttccttttccattccacgtccaacacactcttgtcttgtgattcttcttcttcattctccctttttttgccctagattagatcctttctcttccaatcattaattaattagattagatttgatttgatttgatttaccttaatccttcgtctgctttttccttccctcaactccaccattcctgatttttctgcatcagtctattcaagttcattgtanggtgtatatccttgattttgtgtgggtttgaattagggtgcatgtgaatgaaaa

SEQ ID NO: 37050 - DNA, 318 bp, Glycine max
  Clone ID: LIB3055-008-Q1-N1-B9
gttaactttacctaatacacaaaccccgttcctccgttcgggcactacctcagtcttctcttctcttttactaaaagaaccaacaatctctagaaccctctcagccaaaaaaaacaatgcagacccaccagaaccctcccacactggattccgacccgcagctcccgcagatcaaaatccaccacccctcctccccgcgccatcaccacccctcctccgtcgccaccctcacccgcaccgccggcgcacgtcgcataatcggcgtggacgtcgacctctccgtcgagagctcctactgggtccgtatatccgagcaca

SEQ ID NO: 37051 - DNA, 408 bp, Glycine max
  Clone ID: LIB3055-008-Q1-N1-C10
gttttattggctgagcaagcaacttctgctgtaaatgcatcatctgtcacaagccattcagttaatcataatgaaatgatccagagcaattccactgattctgttttgtctgaagtgttcacctcttctgggtcgacagcttctacaattgccaagacatcagagactgctctccttgatgaaaaatcattattagcttgtattgtacgcactattccagctggtggccgaattcgaattagttcaacgctccctaacaggctgggcaagatgcttgcacctctacattggcatgattacaaaaggaagtatgggaagctggatgactttgtagctagccatcctgaattatttttgattgagggtgactatattcagctccgtgaaggtgcacagaaaatggttgct

SEQ ID NO: 37052 - DNA, 411 bp, Glycine max
  unsure (1)..(411): unsure at all n locations
  Clone ID: LIB3055-008-Q1-N1-C11
cggctcgagggacaaggagggaatccccccagaccagcagaggctgatcttcgccgggaagcagctcgaggacggacgcacccttgctgactacaacatccagaaggagtcaactctccacttggtgttgcgtcttcgtggtggtatgcagattttcgtgaagactcttacgggtaagactattaccctcgaggtggagagctctgacaccattgacaatgtgaaggccaagattcaggacaaggaaggcatcccaccggaccagcagaggctgatttttgctggcaagcagctcgaggatggaaggaccctcgctgactacaacatccagaaggaatcaacccttcaccttgtcctccgtctccgtggggggttntaagctcgttgtgtaatggtggatgtgttcccaaa

SEQ ID NO: 37053 - DNA, 321 bp, Glycine max
  Clone ID: LIB3055-008-Q1-N1-C12
cacaaggccatcatcatggcagctgcttctcctatggcaagccaactcaagtccaccttcactaaaactcttgtagctcccaagggcctctctgcctcttcaccactccacctcctgccttctaagaggcaatttagcttcactgttagggccatccaatcagaaaagccaacctatcaagtgattcaaccaatcaacggtgatcccttcattggaagccttgaaaccccagttacatccagccccttgattgcatggtacttatcgaacctccccgcatacaggaccgcagtgagcccactactaaaaaggaatcgaggt

SEQ ID NO: 37054 - DNA, 307 bp, Glycine max
  Clone ID: LIB3055-008-Q1-N1-C2
cgactgtccatacatatccacctctctctaaatcacccttgttgcccttatgtacgagccatagctcattgccgcatagaacccagatgctagctacccatgtcgctgaagaaagcctatcgctgcaacaagttctacaaatcgttcaaagaggagctaccgtcggatggcaccatcgaccaagacgaagacgacggcaccagctaagaacctgatagaggtaatagtaaaggatggccaagcatgctgtcgacaatcctctgagaaatcgtgcggagagtggactcctgctatgagcaaagcccga

SEQ ID NO: 37055 - DNA, 420 bp, Glycine max
  unsure (1)..(420): unsure at all n locations
  Clone ID: LIB3055-008-Q1-N1-C4
ggaacattgcttgtactggaccgaacgcaccttaaaagcggtgatccggtcctaagccaacaacggtcctttaaccgaacttaacatactcaacattgcccattcccgagcctcttcttccctcttcggtctctcattacccgattatctcaaagcctctgctctaacgcgcctccgcactccagacgccgatgctttccgctccgccgagtacaccgncgacaaggcctccgagattctccgagactacatctccgccatcgccaatgaactcaaagattatccctcttggtgtatcaatcttggaatggaatactcttccggttgttattagaggatgaggatgactttggccatgttagcttgaaaatctattcactgacttagatgtcgaagacaaagggaaaatcagcaagaatg

SEQ ID NO: 37056 - DNA, 407 bp, Glycine max
  Clone ID: LIB3055-008-Q1-N1-C5
ggtgaatctagttcttgtgcttcagacgtttatcgattgggggttctcctttttgagctattttgtccgctcagctcaagagaagaaaagagtagaaccatgtctagccttagacacagagttcttcctccacagttacttctaaagtggcctaaagaagcttcattttgcttatggttactgcatcctgaccctaagagtcgtccaacacttggggagttgttgcagagcgagttccttaatgaacagagagatgatacggaagaacgtgaagcagcgatagagctgaggcaaaggatagaggatcaggagttgttgttagagttccttttgttacttcaacagagaaaacaggaagttgctgagaagttgcaacatactgtctcttttctgggttcagattttga

SEQ ID NO: 37057 - DNA, 414 bp, Glycine max
  Clone ID: LIB3055-008-Q1-N1-C6
aagagatctatttgcaagggcaaaaagggaagctccgtgcataatctttattgatgagatagatgctgtggctaaaagtcgtgatggaaaatttcgcattgtcagcaatgatgaacgagagcaaaccttgaatcagttgctcactgaaatggatgggtttgacagcaattctgcggtgattgttcttggagctactaataggtcagatgtcttagatcctgcacttcgccggccaggaagatttgatcgtgtagttatggtagaagcacctgatagaattggaagagaagccatcctaaaagttcatgtttccaagaaggaacttcctttagccaagaatgttgacctcagtgacattgcttgtatgaccactggttttactggagcagatcttgcaaacctaataaatgaagc

SEQ ID NO: 37058 - DNA, 390 bp, Glycine max
  Clone ID: LIB3055-008-Q1-N1-C7
catggctccagtgccaaccttgtgtcatatactgccacgtccaagttgaccctatattcaccccttcagtatccaagacctacaaggccttgtcctgctcatcctctcagtgttcctctctcaagagctccacactgaatgctccaggttgctcaaatgcaactggtgcttgtgtctacaaagcaagctatggtgacacttccttctcaattggctatttgagtcaagatgtgctaaccttaaccccttcagcggcaccatcatcaggttttgtatatggctgtggtcaagacaatcaaggcttgtttggaaggtcagcaggtatcataggtctagccaacgacaaactctccatgcttggtcaattgtccaacaaatatggcaatgcct

SEQ ID NO: 37059 - DNA, 383 bp, Glycine max
  Clone ID: LIB3055-008-Q1-N1-D1
gagtcaacgaaatcgcgaacagaacagcaacgttaacaatgggttctcgctacgaggtggaactgaagctctcatcggcacgcgctctcaagaacgtgaactggcgccatggcccgaaccgcccatacgtcgtcgtttgggtcgacccaagcaacaagctctcgacgcgcgtggacgaaagcggcgacactgacgcgaattgggaccaaacgctcacaattccgttgccaccaaagcctctcgaggatcaaacgttgtacatcgacgtggtccacgccggctcggaagaggacaccaagccgcttatcggctcggctcggctcaagctggtggacattctcgacgacgttggaatcggcgagcgcgtgagccgcacgctctcg

SEQ ID NO: 37060 - DNA, 413 bp, Glycine max
  Clone ID: LIB3055-008-Q1-N1-D10
cacaagcaccttcaaataaaattcaagtatcgaagaagaagatggctttaggtgttcctgctcttccgttgacatacgtggctcacgttctggcagttgttgccagcgtcttggtcgtggtctgggtcgtcaatttcaggggtggcttggcttgggattctgataacaagtccctcatcttcaacattcatccagttcttattgttattggcttactagttcatgggggtgaagctattataagttacaaagcttttcccctaaagaaggaagtgaagaaattgatacaccttgttttccatgccatcgcattaatacttggaatagttggaatttatactgccttcaagtttcacaatgaaagtgggattgccaatctctacagcttgcattcatggcttggaattggggtt

SEQ ID NO: 37061 - DNA, 364 bp, Glycine max
  Clone ID: LIB3055-008-Q1-N1-D11
tctggaatcagttttgctagtggtacttctgctttttcaagtgcagtggcagctactgagacttcaagatcttcagaggagagggtctatgaagtggttctgaagcaagcagctttggtaaaagaacacaaaaggggtacaaaaatagctttggatttggacaaagatgttgaggctgatttcaacaatgtggatctgttgaatgcggcttatgatcggtgtggtgaagtttgtgctgagtatgccaagacattttacttaggcacacaattgatgactgcagagcgccgaaaagcaatttgggcaatttatgtgtggtgcagaagaactgatgagctagtggatggcccaaatgcttcacaca

SEQ ID NO: 37062 - DNA, 140 bp, Glycine max
  Clone ID: LIB3055-008-Q1-N1-D2
aattggaaaatttcatcaatagtggagcaagatgggaaaagggtcacggcccaagagttatgcaattgcctcttcaatagtacaagaaaaccaacaacaaacaccaactttcattgcctgcacaacttttaacaattctt

SEQ ID NO: 37063 - DNA, 389 bp, Glycine max
  Clone ID: LIB3055-008-Q1-N1-D3
gaaagacaaaagcttgttatgactgtacgaaacctcaagaatgccagaaaggcccaaatgactactagttcatgatatctgctgtggaaatagtataaggtgaataaattaatgtgtacactggcaagatatgtatgtattttcttctccttttcttagggttttttctccctcccttctgaatcgtaaatgcgtgccataatagtgctcattttacagagttatcctagcagtttgtgatgttttaagttctatagttaccaatagtgctcatcagttctttgattgtatcttttcttttctttttcttatgcgtttatatacatattcttttattgtatgctttaactgatatatgatataatacaaatgagcatttattttattgg

SEQ ID NO: 37064 - DNA, 407 bp, Glycine max
  Clone ID: LIB3055-008-Q1-N1-D4
caggtatgcctcaaggaaggcctatgcaaagactaaacccggtataaaaggtcgatttgccaagagaccagatgtagaagctgaagtggatcagatgttctccacaacactaattacagaagttggatatggcattgttccctctttctgaatatgctgtgttgaacaaatggccacaagatatcgaagatgctagaggatcatgatcaatagaaatggctaccacttgtgtactaataatgtattttttatgtaatctaattacttgcagttgtactaatcggatgctttattattttggttattgtcttttgaatgaaacttgtaacttgaaatacaagtcatgtattaaattattaaattacagtcaacataatcttgaaaaaaaaaaaaaaaagggcgggcga

SEQ ID NO: 37065 - DNA, 412 bp, Glycine max
  Clone ID: LIB3055-008-Q1-N1-D5
attcacctgagctttttgtgaggattccaaagcatggcttcccttgcagcatccactgctgctgcttcccttggcatgtcagaaatgcttggaaaccccatcaacctcagtggtgccacaaggccagctccatctgcctctagccctgcctccttcaagactgtggctcttttctccaaaaagaaggctgcacctccaaaaaaagctgcagctgctgctcctgccaatgatgagcttgccaagtggtatggtcctgacagaaggatcttcttgcctgagggtctcttggaccgatctgagatcccagagtacttgaccggagaagtccccggagactatggttatgacctatttggtcttagcaagaagccagaagatttttccaaatatcaggcatttgaattgattcacg

SEQ ID NO: 37066 - DNA, 383 bp, Glycine max
  Clone ID: LIB3055-008-Q1-N1-D6
cgttctcctacgacggcgagaggctcttggatctggacagcgtgaggagaattatctccggttttgtggagagggagaagagtacgacggtgttcaatgccggcgtcaacttcaacgaggacttctccgccgcgatgcagcgcgtggtgaaaaccgtcgacacgtatctcgccgagatcgccgcgtacggcgaactctccatctcgaaattcaacggcatcgcaatcctcattcccaaaggctcgagaaaatccgacgacgatctataccgcgccgtcgatatctacctcaaggtgcacccgaacctggacgagatagagaaggagaaagtgtgcagcgtattggacccgttaaaattggcctacgaggcgcgtgtgcacgcg

SEQ ID NO: 37067 - DNA, 387 bp, Glycine max
  Clone ID: LIB3055-008-Q1-N1-D7
ctctgctctttgccttctctgacacatttggtgccttgtagagcgtgttttggcaggaaggtggtatggcgaaggacgttgaggttgctgagcgtggctccttctctgggaaggactaccaggaccctgcaccagcaccactcattgatgctgaggagctcacaaagtggtccttttacagggctctcattgctgaattcattgccactttgctcttcctctacattactgtgctcacagtcatagggtacaatcaccagactgacctcaaggaaaatggtgaaatctgtggtggggttggcattcttggcattgcatgggcctttggtggcatgatcttcatccttgtctactgcactgctgggatttcaaggggtcacattaacc

SEQ ID NO: 37068 - DNA, 409 bp, Glycine max
  Clone ID: LIB3055-008-Q1-N1-D8
ccttttcctcccttcaacaaaacacaggggaagggaaagtagtagtagtagtagtagtagtaaggaacgaaacaccaaacatgagtttcttgttaccattaccaaccctcttgttgtgtctctttgttgtgttaatttattccctccaatcaaaggccgatgaatttgatttcgatgagtccttgttcaatgcaaaaaacgcttccagtggcagaaaacttgcaggaagatgcaacttgttccgtgggaaatgggtttatgacccttcataccctctctatgacccttctacatgtcccttcatagatccacaattcaactgccaaaagtacggtagaccagacaaacagtatcagaaatatagatggcaacccttctcttgtcctttacctaggttcaacgcatttga

SEQ ID NO: 37069 - DNA, 403 bp, Glycine max
  Clone ID: LIB3055-008-Q1-N1-D9
gtggaatggaattactctgaatacaattttgactagcaataagtgcagcacagagagaagtgcgaatcagagagagaaagagaggcatggctgctgcaggtccagaaaacgtccctcctttcatcgccgctcagcttagccacctcctctcccacttcggtcttacagtcaaggttgaacaaatgtggtcgagtgacaaatacaactccacccccctcgatcgcttcaccctcctcatcccctactgcttagacttcatcaaatgggatgttatatacgacgcggaatctccgaacaccgtccccgacgttatctttagccccgaagacgacgatttccacccctttcacatgtttccttccttctcggaacccgctaataactggttgtctgattggaacta

SEQ ID NO: 37070 - DNA, 403 bp, Glycine max
  Clone ID: LIB3055-008-Q1-N1-E1
ctcagttgacctaattaatataggatagagagattggaaagttaaaatggcatttggagctaagaatggcgtgtgttttcccttcttttttttcataactttcttggttatatgttctgccactgctcggagccctattttcttctcaaatgatgaagcttcgagcatggtggggaggtcattaaaggtaataaaccttcaagactatggtgaaccaactgcaaatcatgggcacgatccatggaagggggctagttggggaggtaatggagggcgaaaaggctgagccatgagagattattggaaatgcaatactttatagtttacattatttcagttaacgcagttaatgcaatatttagcctttcattttataaacatatgtatcttttaaaagaagaac

SEQ ID NO: 37071 - DNA, 406 bp, Glycine max
  Clone ID: LIB3055-008-Q1-N1-E10
aagattttatccaattgaaattttaaaaatgactgggataaacttaagaattcaattattgaaattgaataagtaaacaatttaattggattggtcgaatggtatcaaaaaaatggagtactaactcccatttcttatttattattgaattaaccgatcaacttgctttgttatcgaacatttctttttgatttcaaaaattttccggaaaaaatttgaatctatttttatatgcgaatcaatcctactacttctggtcctgaggtttctgcgcttgaaaaaaaaaatctgggacgtatcgcccaaataatgggtccggtactagatgtagcttttcccccaggtaagatgcctaatatttacaacgctctgatagttaagggtcgagatactgttggtcaacaaa

SEQ ID NO: 37072 - DNA, 408 bp, Glycine max
  Clone ID: LIB3055-008-Q1-N1-E11
ctttgttcgacccagaggagctcacacagtggtccttctatagagccctcatcgctgagttcatagcaacccttctcttcctttatgtcactgtgctcaccattattggctacaaaaggcagactgatacaacggtaggtggcaccgactgtgatggggttggcattttgggcatcgcttgggcctttggtggcatgatcttcatccttgtttactgcaccgccggtatttcaggaggacacataaacccggcggtgacattcgggttgttcctaggacgcaaggtgtcgttgataagggcgttgttgtacatggtggcacagtgtgccggtgctatctgtggtactggattggccaaggggttccaaaaagcatactacaacaggtatggaggtggtgccaactctg

SEQ ID NO: 37073 - DNA, 383 bp, Glycine max
  Clone ID: LIB3055-008-Q1-N1-E3
cccaggcgaggagaaagatggaggggaaggagcaggatgtgtcgttgggagcgaacaagttccccgagagacagccaattgggacggcggcgcagagccaagacgacggcaaggactaccaagagccggggccggcgccgctggttgacccgacggagtttacgtcatggtcgttttacagagcagggatagcagagtttgtggccacttttctgtttctctacatcactgtcttaaccgttatgggagtcgccggggctaagtctaagtgtagtaccgttgggattcaaggaatcgcttgggccttcggtggcatgatcttcgccctcgtttactgcaccgctggcatctcagggggacacataaacccggcggtgacattt

SEQ ID NO: 37074 - DNA, 378 bp, Glycine max
  Clone ID: LIB3055-008-Q1-N1-E5
gatttgcgataacagtgtattattttgcgttgctaaaaccctgtaacccgacttacgtttgggtttttcactgtgcctatggcggcggcagcggtggcggaggtgaggaaggccccacggccgggcaagggcgggtacgaagcgcacggcctgagcgaggaggaggcgcgagtgcgcgccatcgcggagatcgtcagctccatggtggacctctctcacaaaggccagaacgtggaccttaacgcgctcaagtccgctgagtgccgcaagtacgggctctcacgcgcgcccaagctcgtggagatgatcgcggcgctccccgacgccgagcgcgagacgctcctccccaagctacgagccaagcccgtccgcaccgac

SEQ ID NO: 37075 - DNA, 406 bp, Glycine max
  Clone ID: LIB3055-008-Q1-N1-E6
acctccgcctccactctctctctctctctctctctctctctctctcttcaatcctcacgctagattatttccctttgatgagtgttgaacggccaagatggtgaacgacgacgagtgggtgcgtgcggcgatggaggatgacaccgttgtggtggagcttctgctacgcctcaagcaaggtaccgttttacacaaatctcaccaccagcagcttttacctttctcctggggagtcaaacagctgcgctcaagatcaaggctaacctccgccgccgtctcccgatgcgacgccgccgtttccaccagatgcagccccaccacgcccctctcttggagcgccggcgccgacagttacgaagactccagccgtcaccaccaccatcacgccggcgtatccaagggtact

SEQ ID NO: 37076 - DNA, 382 bp, Glycine max
  Clone ID: LIB3055-008-Q1-N1-E7
ctcgagccgattcggctcgagcggctcgagcggctcgagcttcctggctccatcatagtcactgccacaaatttctgtccacctggtggttggtgtgaccctcccaatcaccactttgatctttctcaacctgttttccagcacattgctcaatatagggctgggattgtgcctgtagtttacagaagggtgaggtgcaggagaaaaggtggaatcaggttcaccatcaatggccactcttacttcaatttagtccttgtaaccaatgttggaggggctggtgatgtgcatgctgtgtccatcaaaggttcaagaactagatggcaagccatgtcaaggaactgggggcaaaactggcaaagcaactcctacttgaatggtc

SEQ ID NO: 37077 - DNA, 422 bp, Glycine max
  Clone ID: LIB3055-008-Q1-N1-E8
ttctcctcctacaccaacaaaaatggcaccttctccacaagaaatcatcttccgatccccactccccgatattcccatccccacacatctcccattgtactcttactgcttccaaaacttgtcaaagttccatgaccgtccatgcctcatcgacggcgacaccggcgagaccctcacctacgccgacgtcgacctcgctgctcgccgcatcgcctccggcctccacaaaatcggcatccgccagggtgacgtcatcatgctcgtcctacgcaactgcccgcagttcgccctcgccttcctcggcgccacccaccgtggcgccgtcgtcaccacagccaaccccttctacacgccggcggagcttgcgaagcaagcgacggccacgaaaaccaggctcgtcataacgcaatccgcgtacgttg

SEQ ID NO: 37078 - DNA, 414 bp, Glycine max
  Clone ID: LIB3055-008-Q1-N1-E9
tttgattagagtggcctagttgttgtttttctcaatgagaagggcttccactatgcattgcgcactttggcgcttctgtgttcccttgttgctacttgctagcttcagttatgcaccttttgttttggcgacaactgaaatttcagggaatgaagtgagcactgatggaaaggttttaaatgaagagttagcaaaacctaatctacaaggacatgatgaagaagcaaagtttaaaggatttattccaaagccaattcccatagtgaagcctattccaaaaccatttcccatcattaagcctattccaaagataattcctattgctaaacctattcctattccgatttataagcctatatcaaaatcaattcccattattaagcctgttccaaagataatccccattattaaacc

SEQ ID NO: 37079 - DNA, 239 bp, Glycine max
  Clone ID: LIB3055-008-Q1-N1-F1
ctgcatgtggtttttatgttgcatgtgttggtggtattattaaccgcttttttaaccttggtttaaatttgggggttttccttcctgccctggtaatgttggtgcattaaataaaagtaagaaatgccccaccactaagtaatgctatatggattatgtatgtgttccatatatgtcaagtgagtggtgtgtggttgtgaagaatctattgcttttaatgaatcagatcctttggtgtg

SEQ ID NO: 37080 - DNA, 410 bp, Glycine max
  Clone ID: LIB3055-008-Q1-N1-F10
gttgaaaccccagtagaggttcctgttgagaagactgaagcttagacctatggacagtgtgagtgagaaaaacaagtttaaaaatggtcctagttgtggggatcaggtctaccattttgcatgccatgttgaaaagcctctttttttttttttctttttatttctttagtttactttattaatattattatatgatgcttaagtctttggttgtattatggagggtacacctacgtgtaagcacaacacttggctccacatcagcgtgcttgccacgtggtgacatgagaaattctgggagttgtgtattgaagtgagcaagctgctggtgctggagtttaggggtgatggtttattggcagggttacatgagtttgtgatggtgtgttactgtgtttctttaagtttga

SEQ ID NO: 37081 - DNA, 412 bp, Glycine max
  Clone ID: LIB3055-008-Q1-N1-F11
aaccaacgtagttatggcttcctctctacacaactatgttcttgctatcttacttttggccataacccaattcaaaaccacatctgcgggctcccatcaccacctccagcacctcaaatcccttcacttctctctgtttcaacacgagaccataaacaaaaccggatacatcatagtggatggtataaaaggaggagcaggggtgactcaaaccacaaccccttttggcaccttatttgcctttcaggaccctttgactgttgcagccaacaggtcctccaaactagttgggattgcagaagggactacagtcacatctagtctcgacgggcttcggagcatttcgatcgccaagctaaccctgcgtttgaagcaccacaagggcttcctttccattggtggtgtcacaaac

SEQ ID NO: 37082 - DNA, 413 bp, Glycine max
  Clone ID: LIB3055-008-Q1-N1-F12
tcagaatcagaatcagaatcagaatcagagagaaacgatgagggcagtaagtgcgttaatggtggctcggatgttgacgcgggaccactcgctccctgtccttggcaacgaaagcatacccttcggatcggtgtggtggttcgcctatgccggcgtctcctgtttcctcgtcctcttcgctggcatcatgtccggtctcaccctcggactcatgtctctgggcctcgtggacctcgagatcctcgaacgcagtggttctcctgccgagaaaatgcaagctgcgattatacttcctgtggttaaaaaacaacaccagcttcttgtcaccctacttctctgtaatgctgttgccatggaggctctgccgttatacctagataaactattcaatcagtttgttgctatcattctct

SEQ ID NO: 37083 - DNA, 271 bp, Glycine max
  Clone ID: LIB3055-008-Q1-N1-F2
atcggaaggcctgaaaaggctactaacccggacacgtgaaaggcggggttggctgagttcatctccaccttgatcttcgtgttcgccggttcaagttccggcatcgcctacaacaagctcaccgacaacggcgccgacactcccgccggcctcatctccgcttccatcgcccatgctttcgccctcttcgtcgccgtctccgtcggcgccaacatctccggcggccacgtcaaccccgccgtcaccttcggcgccttcgtgggcggcaaca

SEQ ID NO: 37084 - DNA, 412 bp, Glycine max
  Clone ID: LIB3055-008-Q1-N1-F3
aaaccttgcatgaaaatatggacccataatgtccttgaagctagggcaagtccaagccatagtgggtttcttccctgaaaccgctgaactattcctcaagacccatgacactgtttttgcaagcaggccaaagattcaagcctctgaatatctctctcatggcaccaagggcttggtgttttccgagtatagcgcctactggcgcaaagtgaggaaagtgtgcacccttcaacttctcagtgcttcaaaagttgacatgtttgctcctttgaggagacaagaattgggagtgttagtgaagtcactgagaaattcagcggcatcacgtgaagttgtggacctcagtgaagtgttgggggagcttatggagaacatagtgtataaaatggtattggggcgtgctagggatcat

SEQ ID NO: 37085 - DNA, 380 bp, Glycine max
  Clone ID: LIB3055-008-Q1-N1-F4
ggaaaattgttttttaaagggttaccgaaaggttgcattggtggtatactctctaggacttacgccggcggacgtgtgtaggttttccgccgtatcaaagattttccgttcggtcgctgaatcggacgcttctggggaaacgtttcttcctttccatttaccattccatcatttcccagtctccttcgcctctaaactatacttccaagaaggagctctatctcgctctctcggatcgccctatcatcatcgatcagggtaaaaagagctttcaattggagaaaaagagtgagaagaagtgttacatgcttgctgctagagctctcagcattatttggggtgacactgagcaatactggaactggacaaccgataccaat

SEQ ID NO: 37086 - DNA, 381 bp, Glycine max
  Clone ID: LIB3055-008-Q1-N1-F6
gtcgtgtcttcttctctaaaataaaaaaccctaacttctgaacctttcaccgcatcgccaccgattccctatctccactaatcaaagaaaagaaaatgagtagacgctcgagcagaactgtctacgttgggaatctacccggtgatatccgtgaaagagaagttgaagatttgtttctgaagtacggacacataacacacatcgacctaaaggttcccccaagaccacctggttatgcatttgtagagtttgaagatgctcaagatgctgaggatgcaattcgtggtcctgatggctatgaatttgattgccaccggttacgggtggaacctgcccatggtgggcgtggtcattcatcctcaaaagatcggcgcaatagtc

SEQ ID NO: 37087 - DNA, 92 bp, Glycine max
  Clone ID: LIB3055-008-Q1-N1-F7
ggcatgttttctgctgtagctcctactatcgtaaccagtggcccattcaccacatgcataccggctgccatacatgagctatgcgaccatgc

SEQ ID NO: 37088 - DNA, 136 bp, Glycine max
  Clone ID: LIB3055-008-Q1-N1-F8
ggaaaatttttctccctttcattttctatgcatatgtagggtccataatgcctgtcttagaggaggagctcttaccttaaccccaggcaagttcaagatcgagcggtcccaccacatgaaccgccagctctaccga

SEQ ID NO: 37089 - DNA, 408 bp, Glycine max
  Clone ID: LIB3055-008-Q1-N1-F9
ctcccaattactttgttgcatttcacacaccaacttcccatagaagagagaagagagaagagactcttccttccatcctgcaactcaaatcatcatgcaagactccagctcaatgaagatctcccctctggatctcatgtccgccatcttcaagggcaagctcgacccctccaacgtctcctcctccaccaacgccgccgccgccgccttcctcctcgagaaccgcgacttcctcatgctcctcaccacctccgtcgccgtcctcatcggctgcgtcgtcgtcttcatctggcgcagatcatcctcccccaaggccaagcctctcgagcctcctaaacgcgtcgtcgagaagcttcccgaaatcgaagtcgacgacggcaccaagaaagtcaccatcctcttcggcac

SEQ ID NO: 37090 - DNA, 286 bp, Glycine max
  Clone ID: LIB3055-008-Q1-N1-G1
gaacataccaatctacaataaacgatgattctcattatctgcctcattttatctcttctctctttctcccatgcttctgtcctagatttctgtgttgcagattatgcaggtcctattggacctgcatgatattcctgcaagaagccttcaaaggtcacagcagatgatgttgcttacagtggccttggcattgctggtaacacctcaaacattatcaaagctgcagtgacccctgcatttgatgctcaacttgctggtctcaacggtcttggcatttccgcagcac

SEQ ID NO: 37091 - DNA, 389 bp, Glycine max
  Clone ID: LIB3055-008-Q1-N1-G10
gtttggcttagacttagatggagtcgcgtggacactcaaacccgcttctgtcattttccagcttcatccatcaacactgcgtccgcttagggtccgacctcgcgactcgtttggatgacacgaagcgagccctagctcaatctcatcataatcttgtcttccccaaacacgccctcgcccacgccgccactgctaccctgggctcccagcacgtggctaagtccctcgtcggcacctccgttttcaccgtcagcaattccaacaatgagttcgttcttatctccgaccccgacggtgccaagtccattggattgctttgctttcgccaagaggacgccgaagcctttctcgctcaggttcgatcacggagtagagagcttcgaagcaag

SEQ ID NO: 37092 - DNA, 410 bp, Glycine max
  Clone ID: LIB3055-008-Q1-N1-G11
gcgtttttgtaggtactgaggaagaaagttttggcagaataactttgttggagagaataaaattcaggcaaggcgttgaagttggagagtattagattggaagcttagaagtttctctttggaccaaagaaatggaggcattgcaacttctgctcgagttttcctttggtgaagtttggagaagccaacagttatgggactataaagagtttaaaggctaagtaggaaatcctaacactacagggtgtcaagaattgaggcaagaacatttatgatactgtacagatacggtagagacacactattcaaagatgaaaaatagatgtgaggtgacaagggcaaataaaggggggctttataaggaaaggatacttatcagcagcagcatcaatctttcaaacttgcatagt

SEQ ID NO: 37093 - DNA, 396 bp, Glycine max
  Clone ID: LIB3055-008-Q1-N1-G12
tgttattgcacccaacattccagctctttatgaagctcactttgggattccaatgtcaggggctgtgttgaaccctgttaatattaggctaaatgcatccacggtagcttttcttcttggtcattgcacagctgcagcagtaatagttgatcaagagtttttttctttggcagaagaagctttgaaaatatggtctgagaaggccaaaaccttcagccctccacttttaatagtcatcagtgatgaaaattgcgaccctaaggcacttaaatatgctctgggcaaaggagccattgaatatgaggattttcttcaaagtggtgatcctgagtatgcatggaaacccccagaggatgagtggcagagcattgcattgggttacacatccggtaccac

SEQ ID NO: 37094 - DNA, 371 bp, Glycine max
  Clone ID: LIB3055-008-Q1-N1-G3
cgccgtttcagcgtctttcttttgcgtcacaaccactgcgcaggctcatggctcgcgccaccctcggcctcactcttccagccaacaccgaatcccttaaggtttctttcgcggcaaaggagcttgacgtggcggaatggaaaggggaccttctcgccgttggcgtaacggagaaggacgtcgcgagaaacgtggaatcgagattcgagaacgcgattctgagcgcgttggactccaagctgggcgggttgttgggccaggtctcgtccgaagaggacttcagcggcaaacttgggcagtccacggttctaagaatcgctttcggactcggattcaagcgcgtcgccttgcttggcctcggcgccttcgcg

SEQ ID NO: 37095 - DNA, 421 bp, Glycine max
  Clone ID: LIB3055-008-Q1-N1-G4
ctcgaacccaaaaaactttgggaaaattcaagtcagtaaatggttaaatggtgtaccaaagccaattatccaacaaattcagaagcatttgaaggaggaacaggttatggacatattaacctggaagaacaactaatatggttggaaactttaacaaatgtgaaattgcttgggtttggcagtgggcaaaactagccaaaaaggtggcaactgattcaggggcactcagcctggataaagtttttgaacttgtagtggaaggtgaaaacttgcctgttgatatgaacgaggaactaaggacattaagggcacgatgcatgctttattgcatttgtcgaaagccctttgatccagaaaggatgattgcatgttatcattgtaatgagtggtatcactttgattgcatgaaattgccttgcac

SEQ ID NO: 37096 - DNA, 408 bp, Glycine max
  Clone ID: LIB3055-008-Q1-N1-G5
gtttcagtgagtgatcggtgttcacttgatccttcataagtcgtcatcatcatcatcatcatcaccgttgattgaagaagatgccgatcagaaacatcgccatcggaaggcctgaagaggctactcaccccgacacgttgaaggcggggttggctgagttcatctccaccttgatcttcgtgttcgccggttcaggttccggcatcgcctacaacaagctcaccgacaacggcgccgccactcccgccggcctcatctccgcttccatcgcccatgctttcgccctcttcgtcgtcgtctccgtcggcgccaacatctccggcggccacgtcaaccccgccgtcaccttcggcgccttcgtgggcggcaacatcaccttactccggggcatcgtctacgtcatcgccc

SEQ ID NO: 37097 - DNA, 423 bp, Glycine max
  Clone ID: LIB3055-008-Q1-N1-G6
gccagccactatccacaataataatggctttgagaaaatgaagtaaacttcctcaaacagcactcatcaagcaaatcctcaagaggtgttcgagtttagggaggaaagatgatcaaggcctcttggacgtgccaaagggtcactttgttgtatatgttggagaaaacagaagcagatatattgctcctatttccttcctaagtcgccctgagttccaaacacttctccaccaggctgaagaagagtttggctttgatcacgaaaagggtctcacgattccatgtgaagaggacgtttttgagtctctcacctccacgctcagatgagaaacttgccttaccacgtatcgatcatttttcgttatcttttctttgattttttgaaggagaagagaaaattaatagctcaagatgaagctggttt

SEQ ID NO: 37098 - DNA, 414 bp, Glycine max
  Clone ID: LIB3055-008-Q1-N1-G7
aaaagatataattgaagttttagaagacaactcgggaagtagagagattgaaatcatatgtcaggatttatgcttatccgagaaagaaacagcaatagaatgggaaggagatgccttcaaaaagatgaaacaccttagaatacttattattagaaatttacaattttccaaaggtcccaattattttccagaaagtttaagattactggaatggcaccggtatccttctaattgtttaccatctaattttcctccgaaggaacttgccatatgcaagttacctcaaagttgcattacgtcatttgagttccatggctcaatgaagtccaggaatctaaaggttttgaattttgatgagtgtgaatttttaagagagatacctgacgtatctgatctcccaaatttggaagaact

SEQ ID NO: 37099 - DNA, 415 bp, Glycine max
  Clone ID: LIB3055-008-Q1-N1-G8
gtcctgagtgatcttgtcatccgacctttgccatgacaggtgcgcttgcatggcaggtcaaaaaatgttaataaaaaaagttttattggtttggggagagatcgcacgggggttgcccggggtctcttcctcttgtgtggtgtggtgtttgctgtgctctccttttcgttatgccttttattattacctatctgtcgctccactccgtattacgactctggatcagaggatacatcagaggattcgctccaacccctatcgagtaaggtattatctgtcaatttacattcgaaagggttaggctattgaattttaaataattacagataaaataatcgatagctttgattttaaaaattaatcataatcatcggttaggttgcaacataatacttaattcgcttaattttttaac

SEQ ID NO: 37100 - DNA, 406 bp, Glycine max
  unsure (1)..(406): unsure at all n locations
  Clone ID: LIB3055-008-Q1-N1-H1
cagtcttaggcgtcgaaggtttctcggcacttccccaccactgcttgcagctctgttacgggttcttcgctttcgcggtggctgtgaacatggtcagagacctctcccccaagaagattgggaaatggatgcctttgcccatggtaatggcgatacccttccttgttggtgcttactttgccattgatatggcccttgggactttggttgtttacgtgtggcacaagcttaactccaagaaggctgaggccatgattccagcaactgcctctggactcatttgtggggaaagcctctgggctctccctgcttccattctcgcccttttcaaaattaaaccttctatctgcatgaatnttcttgcttcctagaacttgatcatcaactacatcaaaccaataaatgc

SEQ ID NO: 37101 - DNA, 411 bp, Glycine max
  Clone ID: LIB3055-008-Q1-N1-H10
ctctcttctctgtttcatttattgcttctttgttgtcaactatgaacgctcttgcagctaccaaccgcaactttcaacgtgcagctcgcattctcggtttggattccaagcttgagaagagtctcctcatacccttcagagaaatcaaagttgaatgcacgatccccaaggatgatggaactctggtttcctatgtgggattcaggatccaacatgataatgcccgtggtcctatgaagggagggattcgttatcatcctgaggttgaccctgatgaagtgaatgctctagctcagctgatgacatggaagactgctgtagcagacattccttatggaggagcaaagggtgggatcggctgcaacccaagggatctgagtatcagtgagttagaacgtctaactcgggttt

SEQ ID NO: 37102 - DNA, 409 bp, Glycine max
  unsure (1)..(409): unsure at all n locations
  Clone ID: LIB3055-008-Q1-N1-H11
gtgttggagcagatcttgctttcttggttccaatgccaaatgttggaggtggaacaacctgtcttattctactataacaaggaaaacaggtgcaaaagctggcgttttccctcatacaacttcagtatgtcacttatttggtcaccattccttgtggaagctgctatttttgaagacgaaaatggtgtttcaagttctaatgttgagctacatctcgacaaactggatagtaaatggactgatcagtaccttgactttgattacattattttttcaactgggaaatggtttctcaaatctgcaatctactatgagaatgacaccatattgggctgccacttctgtcctaagaggaacctgacagagctggggtttaacctggcttatcgganagccttgaaattagtga

SEQ ID NO: 37103 - DNA, 405 bp, Glycine max
  Clone ID: LIB3055-008-Q1-N1-H12
cacagtgatgaccaccagcactctcactaccaccaaaccaactctacaactacaaggacgagcttactgagctacttcaactgtagcataaaagcttaactatcaatggaatgtataaccttttcgtgtctgcctaacgccgtggacggacaataattgtggtttcgagcttggtgatcatttacttggcacttgattctgatttatgaaaacaaatgtttcatttaaaccctaatcttaaacagtgattctatattacacttagcgtatagtttcaaatttgagtatttaatctagaggtataatgaatatgagtaacatgtaaatggcgcttaggactctttgaacctgtaccaccagctccaaaatatgatgatgaattaatacaggaacacaaattaaaaa

SEQ ID NO: 37104 - DNA, 395 bp, Glycine max
  Clone ID: LIB3055-008-Q1-N1-H2
ctcgagccgctcgagccgaatcggctcgagcttgttttcatgacataaactatcatcaactgttgctttccattttggctataattccacaaaatgtgccattcattgcaagtgtaatattactagcatttccatatatcagtccatggcctccttaatgctcaatggagctcatcaaaatccaaacctcattagtggcatagctccaaatggccttaactttcacagcaagtgtttattccaaaagggtgtgctgtctcatggtaacaagttaagggtggtcagaaaaaacttcactcccaaaggcagcatgtcagcatcatcatcatcatcatctaggcctggttctcagccaaggttcatccagcacaagaaggaagcattttggttctaca

SEQ ID NO: 37105 - DNA, 371 bp, Glycine max
  Clone ID: LIB3055-008-Q1-N1-H5
gttcagcagctccatagtgtcgccgccggacgagctcgtggccgccggcagccgtactccgtcgccgaagatgacggcggcggcgctgcggaagcggttcgaggagaagaacccctccgccgtgtcggtggaggtcggagagcatgtccagctcgcttatacccaccacaacgagtcgccgtttcagcccagatcctttgctgtcaaggatgaggtgttctgcttgtttgagggagcccttgacaatttgggaaacttgagacaacaatatggactggccaagtcagtcaatgaagtattgttggtcattgaggcttacaaagctttgcgtgaccgagcaccctaccctgctaatcatgttgttggccatc

SEQ ID NO: 37106 - DNA, 396 bp, Glycine max
  Clone ID: LIB3055-008-Q1-N1-H6
gatcaaagaacagaagatggcacaaacgctggcaatgcccgtggcaccttcgctcgctatcatctccaattctcgcctctccaagacactctccgttcccgttctcaacaacccaaagtttcaagggttaagcatcaagtgcgttcgtgttggaggtgtggagattccgaacaacaagcgaatcgagtactcgctgcagtacattcatggagttggcaggaccagagcaaaacagattctgtgtgatatccaaatggataacaaaatcacgaaggaactcactgaggaggagctcatcactctcagggacgaagtctccaaatatatgattgaaggcgacctgagacggttcaatgcggttaatataaagagactgaaggacattcagtgctacag

SEQ ID NO: 37107 - DNA, 411 bp, Glycine max
  Clone ID: LIB3055-008-Q1-N1-H7
ggctttgaatttgccttctcccgcccaagtgaagcccttattgttctcttcaaataactccacaaaacttccaggtagcttttctttgaagagaaaagatagtgacacaacagtagagagacgagtttattgctctgccgctgctcaatcaccaccaccagcatggccaggaacagctattcccgagccttctgatttcaagacatgggatgggcaaaaacctatttctgtcttaggatctacgggttcaattggaactcagacactgagtatagtggctgagttcccagaaagatttaaagttgtgagccttgctgctggctctaatattactcttcttgctgaccagattaaaacatttaagcctgaagttgttggtcttagaaatgagtctttaattgatgaactcaa

SEQ ID NO: 37108 - DNA, 351 bp, Glycine max
  Clone ID: LIB3055-008-Q1-N1-H8
agaagttcttttgggcacctacaagggatgaccgagttggtgtctgcaagggaattttccgcactgacaatgttcctgaggatgaaattgtcaagcttgttgacaccttccctggccaatctattgatttctttggtgcactcagggctagagtatatgacgatgaagtgaggaagtggatttctggtgttggtgttgacttgattgggaagaagcttgtgaactccaaggaaggacctgcaacctgtgaccaaccgaagatgactttgagcaagctcttggagtatggtaacatgcttgttcaagaacaagagaatgtgaagagagtacaactgggagacaagtacttga

SEQ ID NO: 37109 - DNA, 412 bp, Glycine max
  Clone ID: LIB3055-008-Q1-N1-H9
gggaaagagaagccacttccaatttcacacacacacagcaacacactgcactgtgtggaaagtaagcatggcaagagtggtggcactccaacagaaccaactatctttctctcccttagcttcctctctttttgacttcagtggaaccagacttcaaactcaacttcagttcaagagaaaactatgccatccaaaagggtctttctacgtctcggcatcgagcaccaagaaaatcctaataatgggaggcaccaggtttattggtgtgtttttatctaggctccttgttaaagagggtcaccaggtgactttattcacaagaggtaaagcgcctgtcactcaacagttgccaggtgaatcagacaatgattatgctgatttttcttccaggatcttgcatttgaaaggagac

SEQ ID NO: 37110 - DNA, 361 bp, Glycine max
  Clone ID: LIB3055-009-Q1-N1-A1
gctacttactactatagtgtctgattcacaggccatagggcatagattttgagcacattggcctcgacacaatgctttttgcaccaccacgctctcaccactccagcttgagcttcaacacagcgcctatttgtgagcaccaaaccataccacattgcttgcaaggcagtacagaagcaagttactgtccaagacggtgaggacactactactggccttgtctctcgcaggttggccctcactgtgctcattggagctgctgttggaggctctaaggtgtcaccttcttatgcaatctattgagaagctgtctatgggtttggaaaaccaaagaccaacgcagacttactgtcatacaatg

SEQ ID NO: 37111 - DNA, 381 bp, Glycine max
  unsure (1)..(381): unsure at all n locations
  Clone ID: LIB3055-009-Q1-N1-A10
agccatgatgtgttctaaaggactcaccgatgcatcaaagatagccattttgaatgcaaactacatggcaaaacgattggagaattattacccggttcttttccgtggagtcaatggaacagttgctcatgaattcatcattgacttgagagggctntaagaatactgctggaaattgagcctgaagatgttgcanagcgcctcatggactacggttttcatgcaccaacaatgtcatggcctgtgcctggcacactcatgattgagcctactgagagtgaaagcaaggccgagttagacaggttctgtgatgctcttatttncattagacaagaaattgctgagaatggaaaagggaagggtggcctttaccaccattgt

SEQ ID NO: 37112 - DNA, 351 bp, Glycine max
  Clone ID: LIB3055-009-Q1-N1-A12
aaagcacaaagcaaagctcatccttgagttaaaaaatggcagcagcttcttccatggctctctcatccccatccttggctggcaaggccgtgaagctgggcccatcagccccagaagtgggaagggtgagcatgaagaagaccgtcaccaagcaggtctcctcaggaagcccatggtacggcccagaccgagtcaagtacttgggcccattctctggcgagcccccgtcctacctaaccggtgagttcccaggcgactacggctgggacactgctgggctttccgcagacccagaaaccttcgccaagaaccgtgaactcgaaatgatccactccaggtgggccatgctcg

SEQ ID NO: 37113 - DNA, 386 bp, Glycine max
  Clone ID: LIB3055-009-Q1-N1-A3
ctcgagccgaatcggctcgagattatattgaacagcttaatgtggagcttgaagctgctaggatggctgaatcttatgcacacagtctgctagaggagtggacgaaaaaggttgaggaactagaagtgagggttgaagaagcaaataagttggagagatctgcatcaatgtcgttggaatccctaatgaaacagttagaaggaaacaaggatttgttgcatgaagcagaatctgaaatttctagtcttaaagagaaggtgggattattggaaatgacaattgggagacagagaggagatcttgaggattcagagcgttgtcttgatgtggctaaggaagagagtcttgaattgtcaaagaaggttgaatctcttgaatctgaactt

SEQ ID NO: 37114 - DNA, 318 bp, Glycine max
  unsure (1)..(318): unsure at all n locations
  Clone ID: LIB3055-009-Q1-N1-A4
gaaggggcataagagaaagaagcgcttatcgaactcggacggaagcactgagttgactcggagggagtggaaagtgttgttgcgtaatgtctggtggtatcgctcgtggacgcctcaccgaggagcgcaagtcgtggcggaagaaccatccccatggttttgttgcgaagccggagacgctgcccgatggaaccgtgaatttgatggtgtggcattgcactattcccgggaagactgggactgattgggagggtggctacttcccacttacgctgcactttagtgaagactaccctagcaagcctncaaagtgtaaat

SEQ ID NO: 37115 - DNA, 380 bp, Glycine max
  Clone ID: LIB3055-009-Q1-N1-A5
cagagaaacgtcaatccagcaaaaaccaaggtcttcttcttaggaatttctcctgtgcattaccaggggaaagattggaatcgaccaacaaagtcatgtatgggcgagacacaaccattctttggactgaagtaccctgcagggacaccaatggcttggagggtggtgagcaaggtgttgaacaagataactaagccagtgtatttcttggatgtgaccacactctcacagtacagaaaagatgcacaccctgaagggtatagtggtgttatggcagtagattgcagccactggtgtcttccagggcttcctgacacttggaatgagcttttgagtgcagttctttctggttgaaaacaatcaaatcagagatgacaact

SEQ ID NO: 37116 - DNA, 397 bp, Glycine max
  Clone ID: LIB3055-009-Q1-N1-A6
caacaacccttctctgattcgtcttcaatttttgtttctcttcttacaaaaccttaggtcagatttctgggtttgtcttttctgataatctggagtggagctaagtcaagatgccgtgggtttccttgtttgtggatcacaaaagaaattgtgttcgcttggtggtgttttttcgtgtgattctgtaatttaattgctcaggtgtagtcccattaggttgcaaagcaactcttttcattagctgttctccttttcatttccaaagctgttagggggattgaggatgtactttgcaataacaataaagagataccgagctgtgaaggaagttggacaaattaagatgagtgttggagttaaccaattgatgcttgtttgccaggccgaatattttcgt

SEQ ID NO: 37117 - DNA, 186 bp, Glycine max
  Clone ID: LIB3055-009-Q1-N1-A7
gtattgtatatcattccaagaatctcagctgcaggtaacaacgaccatgaaactaatgacagcaacaacaacgtttgatgtctctgccacatgcttccgtgccccttctccttcgtgctcaatgaatccatgccacaccagtttttcagttataaactccctgaatcctcacaagggacgacggat

SEQ ID NO: 37118 - DNA, 390 bp, Glycine max
  Clone ID: LIB3055-009-Q1-N1-A8
tccaatatattccattctctctgtgtatttccctacctctcccttcaagatgcagatcttcgtcaagaccctcaccggcaagaccatcacccttgaggtggaaagctctgacaccatcgacaacgtcaaggccaagatccaggacaaggaaggaatccccccggaccagcaacgtctcattttcgccggaaagcaacttgaggacggccgtacccttgctgactacaacattcagaaggagagtactcttcacctcgtcctccgtctccgtggtggcatgcagatcttcgttaagacactcaccggcaagaccataaccctagaagttgaaagctccgacaccatcgataacgtcaaggccaagatccaggacaagggaggtatcccccc

SEQ ID NO: 37119 - DNA, 405 bp, Glycine max
  Clone ID: LIB3055-009-Q1-N1-B1
ctttcctatcacactttctagatagctagcctgtaagatatatatatagatatttcatatatatcctatggtccgtgagtgcccttgttctgtaccaaccctttcttccacatgttgagtttcagcatcgtcctctcttgagtccccatatcaaatacccaccgaattcaaccccccatataacaaatctcctcccatcccatttttcagcaccaaagtttgaaacttttctcaattgggttgaggagagtttgactcaaatttttatttttctaacgaagcagtagctattagaagtgcaaaaattaaatgtccaacatcttcttgttgatgtttgagattcatgtatccgattctcagtgaaatcttcttttccgggtgtatgatcaattccactgttaggcg

SEQ ID NO: 37120 - DNA, 419 bp, Glycine max
  unsure (1)..(419): unsure at all n locations
  Clone ID: LIB3055-009-Q1-N1-B10
ggaagagaattttagaatgaggaacctatacaggaaagcagctactttacgttgctatgcagggagcagatgctattctgcatcggctgtgatatggagcttgttagggtgcttgcttttgtttcatctatattccaatattcatcacaaacacaaggaaggtagagaagtgccattgcatgtgactaatcatcctcagtcacgtgaactccaacaagtggaaggggagatcatccgactccaaccaaaggggaagaggtcccctcgggcagcaaaatgcagacataagcaggtcacaggaaatggtagttattactactaccctgngagaatttggttggatactgatgganatcctattcaagctcatggacggngcattctatatgatgaaagatcaagaacatactattggtatg

SEQ ID NO: 37121 - DNA, 416 bp, Glycine max
  Clone ID: LIB3055-009-Q1-N1-B12
attataactaaaaacatatttaacttgggccttcaaattagtttgggccttcagcaacaattaattgtcttgatagtgtctctgcctctgggccttcatccttctccacttgagccttcatccttctccacttgggggctttgtccttctccacttgggccttcgtccttctccacttgggcctttagcctgtatttggccagtttcatgattctcatcattccctccttcttggaaaacatttgtcctcaaatgttcaggatcatcaccgtgttcaagtaccacttccttccttttcttgggggcttgcttgacataactttatggatatgaagaatatgtgcaaccgataaagaaagcgatagaaaaagaagaagaagcgcttcgcgatgcacgaaagagaagaattggaagca

SEQ ID NO: 37122 - DNA, 364 bp, Glycine max
  Clone ID: LIB3055-009-Q1-N1-B2
ggcactggggtgagttcatcacacccggaatactattcctgtacatctcgggatggatcggctgggtgggtcggagctacctgattgcgatcagggacgagaagaaacccaccatgaaggagatcatcatcgatgttcctctggcttctcgcttgctcttcaggggtttcagctggcccgttgctgcctacagagaactcatcaacggcgacctcattgccaaggatgtctagataagagagggtggatggctacattggaggaaagcctggagaatttgtatgtggatgggatctttacgcgctctttttgtaaatactttttttaataatggtacatgatatgatgtaatctaatgcatgtg

SEQ ID NO: 37123 - DNA, 386 bp, Glycine max
  unsure (1)..(386): unsure at all n locations
  Clone ID: LIB3055-009-Q1-N1-B3
ggagggtttagtttccctggttgattcctccacaatcaagaaaacccaggcaacaagcacaaccaaacaggcagggatgtcgtcgcagggcacaggttcagtagtggatttcgacctccctgacgagattctatcggttataccgacggacccataccagcagcttgatctcgctcgcaagataacctccatggccatcgcctctcgtgtctcttctctcgagtccgacgcctctcgcctccgccagaagcttctcgaaaaggaccgaatcatcctcgacctcgaagaccgcctctcctccctcacccgcgcctcccaccaaaccgactccaccctcaacaccgncctcaacgaaaacattaagctttccaaggagagggatcaat

SEQ ID NO: 37124 - DNA, 251 bp, Glycine max
  unsure (1)..(251): unsure at all n locations
  Clone ID: LIB3055-009-Q1-N1-B4
tgggaacgtacaaggagtgggattgttcataaatgttgaaccaagaacaggacatttggttgtcttgtcatgtgtagatggcagtccagctgctcgtgctggtatacatcaaggggatgaattgattgagataaatggtgagaggcttgatggcattgatagtgaaactgcagcacaaaggcttagagggaatgctggaacaactgttacagtaaaggtcaaagactcaggaacaagatcttttatncgag

SEQ ID NO: 37125 - DNA, 377 bp, Glycine max
  Clone ID: LIB3055-009-Q1-N1-B5
caataacaatgtcaacaacactaataatgtgtgcaactgcaagcactctccctccgccaccttagaccttctcatcctcctcctagtcctcttctccggcgcgttcctcctctcctcctacctctgctacatcttcaactccctctccctcctcctcccctcggtgccgctctcctacctcctccccttcctcctcttcttcgccctctccctcgccaccgccgacttctgctgcggcgcccgatcccgccgctgccagcgccagggctgcaagggcctcaagaaggccatggagttcgatttgcagattcagcgcttcggctcctccgtgccttcctccgccgaaatcgataagctcccctggaagggcggcactg

SEQ ID NO: 37126 - DNA, 389 bp, Glycine max
  Clone ID: LIB3055-009-Q1-N1-B6
gtgagcttccagttgtattcatggacttaccggagaagctgttctttgcagcatttctcattctttcagtggccattgatggaacgcaggcagacaccatggtcactggcactgtcttctgtgaccaatgcaaagacggacagagatcccttttcgattatcctattaatggtgcaaaagtaactctgtcctgtgctgacagtaatggacaaattacaatgtcaagagaagaaacaacaaactggtttggaagctatacaatgaggttcgatggcgcacccgacttgagtggttgttcttgccatgtctcgggcagtggtcaagggtcaacgggttgtggtgaagtggctggtccttcacagaatcccaaactcatggttaaggatgtt

SEQ ID NO: 37127 - DNA, 407 bp, Glycine max
  Clone ID: LIB3055-009-Q1-N1-B7
tcgtgaacatgctctgctttcattcacccttggtgtgaaacagatgatttgctgctgtaacaaaatggatgctactacacccaagtattccaaggccaggtatgatgaaattgtgaaggaagtctcttcctacttgaagaaagtaggatacaaccctgacaagattccttttgttcctatctctggttttgagggagacaacatgattgagaggtccacaaaccttgactggtacaagggtccaactctgcttgatgcacttgaccagattagtgagcccaagaggccctctgacaagcccctcaggcttccccttcaggatgtgtacaagattggaggtattggaactgtgccagtgggacgtgttgagaccggtgtcttgaagcctggaatggtggtgacttttg

SEQ ID NO: 37128 - DNA, 392 bp, Glycine max
  Clone ID: LIB3055-009-Q1-N1-B8
gaagaatcttcagctttctactgaacacgttgaggcttctagaatgacccttcacaggtttgggaacacttcgtcttcttcgctgtggtatgagctcaactacattgagtccaaggggaggatgaagaagggtgatagggtgtggcagatagcgtttgggagtggctttaaatgcaacagtgctgtgtggaagtgcaacagaagcattaagacaccggttgatgggccttgggctgattgcattgatcgttacccggtcgatattcctgagatcgttaagctctaggatggagaattgttcaagaacaagaagataattgcttattttatgaaaaaaaaaaatagatgagttctcataacccttctctatctgctcaccgtaaccgtaccac

SEQ ID NO: 37129 - DNA, 284 bp, Glycine max
  Clone ID: LIB3055-009-Q1-N1-B9
agcatggccatggtaggcggaaccatgatggctgcgtatttgcgtgtatccatgcccacttccccacagtcccccaccactacgaggaggagatgcagaaatctgaaaacttcttgctccgttaacagacccaaaattccaatgccccctctcaaccctaaagacccctttctctccaagctcgcttccgtcgctgcttcttcccctgaaacgctcctcaacactcccaaaaactccgacacccttccttatctcgacatcttcgactcccccaaactcatggc

SEQ ID NO: 37130 - DNA, 367 bp, Glycine max
  Clone ID: LIB3055-009-Q1-N1-C1
gcaggatgtgtcgttgggagcgaacaagttccccgagaggacagccaattgggacggcggcggcagagccaaaaacgacggcaaggactaccaagagccggcgccggcgccgctggttgacccgacggagtttacgtcatggtcgttttacagagcagggatagcagagtttgtggccacttttctgtttctctacatcactgtcttaaccgttatgggagtcgccggggctaagtctaagtgtagtaccgttgggattcaaggaatcgcttgggccttcggtggcatgatcttcgccctcgtttactgcaccgctggcatctcagggggacacataaacccggcggtgacatttgggctggttttg

SEQ ID NO: 37131 - DNA, 413 bp, Glycine max
  Clone ID: LIB3055-009-Q1-N1-C10
ggatgctgatgatgcctggtggattggagagacattttgatggatctgatgaagaaaaacctgcatcatatgtctcaactaatactcgaatggtggttccaacatccaagaatgttaactcctctcagaaacctgctctcaagttcttgatctatggcagaacaggttggattgggggtttgctgggaagttgtgtgaaaagcaaggaattccctatgaatatggaaaaggacgcctggaggaccgatcatcacttgtggctgatattcagaatgtgaagccaacacacatttttaatgcagctggagtaactggcagacccaatgtcgattggtgtgaatctcataagacggaaaccattcgcaccaacgttgctgggactttaacattggctgatgtcagcagagagcatg

SEQ ID NO: 37132 - DNA, 346 bp, Glycine max
  Clone ID: LIB3055-009-Q1-N1-C11
caaacatggcggcaattttctcttcttcgctcttcgtttcttcgcctcttcccaaaccactttcttcctcctattcccgaatccataaagctccacaacttttcagggctcgctcctcgctccttcaggataaagaggaaaaagtgatcgtgcaggattcattcccctccaaaacctctcctcttcactccgctgataaatcaactagtggaaactcgattaacacctctgcgttcgagaaacggattatcaaggtcgaacaatcggtgaatatctttctcacggattccgtcataaagatacttgatactctgtaccatgatagacactatgcaaggttttttgg

SEQ ID NO: 37133 - DNA, 293 bp, Glycine max
  Clone ID: LIB3055-009-Q1-N1-C12
caattcttgtataattcaatctctctttctctttaattatcattatgggagatgctactctggtctgtggcatctaagattttaatcactgaggtggctgttcccgtagatctagcgttcatgaaagtccgctttgttatcttcatatcttggcaaatgcgattcacgtgtcgtgactgaagctgctacccatagatagctatataattcagaatagagcagcacagatgcctcctgcgattaagctttgctgcattggctcgacatttttgaactcttattcttaactgaat

SEQ ID NO: 37134 - DNA, 392 bp, Glycine max
  Clone ID: LIB3055-007-Q1-N1-D7
cttcaagattcaggtactgcgtttcggaagcagacacagatggctcgtacgaagcaaaccgctcgtaagtccacaggaggaaaggctcctaggaagcagcttgcaaccaaggctgcacgtaagtctgcaccaactactggtggtgtgaagaagccccaccgttatcgtcctggtaccgttgctcttcgtgaaattaggaaataccagaagagtaccgagcttttgatccggaagctcccctttcagaagctggttcgtgaaattgctcaggacttcaagactgatctgcgtttccagagccacgccgtgcttgcattgcaagaagctgctgaggcataccttgttgggctctttgaggacactaacctgtgtgccattcacgccaagcgtgt

SEQ ID NO: 37135 - DNA, 275 bp, Glycine max
  Clone ID: LIB3055-009-Q1-N1-C2
ggctcaaagacatgcctgctttggcgtaaaatagatcattgatcaagtacactgcaataccagtcaaatgttgaggcagtcagtttaattctttattattttttgtaagagtttttcttttcctgcttaactttctcataatagttggtgacataaatggggtataaattgtgggaaatgggagggtttatgttctatgttactttgtactccaatcttttatgaatgtactagggaaacttgttttgtttgattaatcttctgaatcttctctt

SEQ ID NO: 37136 - DNA, 386 bp, Glycine max
  Clone ID: LIB3055-009-Q1-N1-C3
catggatcatcgcaaaccattgctacccacttcctctgatgctgctccaaatccacacactcgcaaggaccttcttctagttatttgcggcttgctattactctcttcccttgttgcctttggagggtacagggcctccaacgcgccgcatgccgacgtggcatcggcaacatcgaacgatgagcaacgtagtccgacatcggtgccttctccgaaatggtacccggtttcgcgaggtgtttcttccggggtgtcagagaagtcattcaagcatgttgtttgcggttaaagatggagcttcgaaggcatttccatgggacaacagcatggtggcttggcagagaactgcttttcatttccaaccagagaaaaactggatgaacgat

SEQ ID NO: 37137 - DNA, 361 bp, Glycine max
  Clone ID: LIB3055-009-Q1-N1-C4
ccacaaacaacttgaccaaaatttttggtatttccgtcacaaacacatgtcaacgccaccatacgccgcgtaagccgcaccgttcgaggacgaggaggatgttgtgtgcaccgttgcacctcactgtcctgaaaccctcgtcaccatgtcaaggcttcttgcttgtggaaacgttagaaggtttacacgttctgttcacaagacaggcagcttggaagtattttatcccatggggcccccttactcaaggatacaaatttttctcacactatagacatgtacacaaaggacaatttctattcatgttatttaaatcgaaagttaactttttgacgaattgcggggctaggaacttgtatac

SEQ ID NO: 37138 - DNA, 408 bp, Glycine max
  Clone ID: LIB3055-009-Q1-N1-C5
cactcacacacaccaatggaatcataacaagaaaaagataaacactccccagagttcaaagagcaagcactatttcctctgttgtgtcttttttcaatttgttttccctctctgtagcagcagcagcagcagtgatggaacgtgctcgcaggctagcaaaccgcgccattctgaggcgtctggtttcagaggcaaagcagcatcagaagaatgaatccgtgctgcactcttccaccacccccatgctgctctactcttcctccaggtgcatgtcctctgttctgcgaagcaggggatccaaaacagagacccttctgggaaggaacatcaacatgaacatgaacatgtcacgcggcgttgttgttgctgctgctgctggttttctcggcgttggctcggcccggtcca

SEQ ID NO: 37139 - DNA, 393 bp, Glycine max
  Clone ID: LIB3055-009-Q1-N1-C6
caataaacttcttcctcatttctcatttctcattcaacacgatggcaagaaaaaccaagtccattttcttggccttcttactactatgctctttctcactgggggtagtggtagtagcccaagaggaggcaatagcaaaatccgaaagtgaagcattaggggaaccagagaaaagagaaacacttgaaatcatcattggtggaggtaggatcagctgctgcgctgtactcttccactacatataggccactttactcaccataaccactgatgcccttggagaaggcaaaccggggactcatcacattcacaatcacaatcggggaccccaactgttacacgcacaactggagccaggacacagacgcgtgtaaattcaatggggtacgatgc

SEQ ID NO: 37140 - DNA, 319 bp, Glycine max
  Clone ID: LIB3055-009-Q1-N1-C7
ctttaatcactcactatcagcacaacaactcactcactaagctaaacaatttcatcaagcctgccatggcttcctcgtgtgcttcctctgccattgcagctgttgccatctccacaccaagttcccagaagaatggatcactcttgggaagcacaaaagcttcttttcttagtgggaggaaactgaaggtgaacagttttacagcaccagttggagcacgatccagcactacagtgtgtgcagttgctgagcctgataggcctctgtggttccaaggcagaacccttcctccgtggctagatggcaatttgccaggaga

SEQ ID NO: 37141 - DNA, 310 bp, Glycine max
  Clone ID: LIB3055-009-Q1-N1-C8
ctcaatttctaaattttcagcttcaaaataataaaaccctaagagaggggttgcaagcaaaatgagaagcgcaaagatgtggacggttttgatgtgtctgatggtgagcttcttcgctcgcattgaatcgctgtccgtgacggtgaacgacgtcgagtgcgtctacgagtacgtgctttacgagggcgacaccgtttcggggaacttcgttgtcgtcgaccatgatattttctggaactgcgatcaccccggcattgatttcacggtgacatctgctgcggggaatactggccacaatatcaagggaacc

SEQ ID NO: 37142 - DNA, 267 bp, Glycine max
  Clone ID: LIB3055-009-Q1-N1-D1
gcagcattcaggcaagtgccagggctataaatactatcttaccgtgcttcagtccacttgagaagttagtgagtgttatgttgaccggctatctcatgctagacgtttagaagtgatctgtaaccgggggctgattatatgctatacgtttcatggtatttttaaatggtatttgggaattaggaccagggtaaagtttggggggaaaagggggcaacctaaggtcctttttgggccgaccattattaacaccggcggtttaaaatt

SEQ ID NO: 37143 - DNA, 386 bp, Glycine max
  Clone ID: LIB3055-009-Q1-N1-D10
ctagagcggatatagcaatctcatctcattcatttcaatggcaactcaaggtcaagtcattacctgcaaagctgcggtggcctgggaacccaacaagcccttaactgtccaagacgttcaggtggctccgcctcaggccggcgaggtccgtgtccaaatcctcttcaccgctctctgccacaccgatgcttacacttggggcggcaaggatcccgaaggtctcttcccctgtattcttggccatgaagctgcagggattgtggagagtgttggagaaggtgttactaatgttcagcctggggatcatgtcattccctgttatcaagctgagtgtggggagtgcaagacttgcaaatcatggaagacaaacctatgctgcaaggttc

SEQ ID NO: 37144 - DNA, 410 bp, Glycine max
  Clone ID: LIB3055-009-Q1-N1-D11
agtttctgttgtattttctcaattacaacatcgtattctgcaaattcaaaccgggtcttggttttctgaaagatgggaggtggcaaggacaagcatcatgatgaatctgacaaaggaattttttcacaccttgctcatggggtagctggtgcagcacatggtggacatgggtacccacctggggcttacccaccaccacctggggcataccctccacaacaaggatatcctccagctgggtatcctccacaacaagggtatcctccaacttggtacccctcaaatcaaggctatccctcttcttgttaccccccaacttgttattccgggtcatcacatgcaccaagttctcatgggcaccggcggtattggagcaatgctcgctgggggtgctgctgcggctgctgctg

SEQ ID NO: 37145 - DNA, 335 bp, Glycine max
  Clone ID: LIB3055-009-Q1-N1-D12
tggagatggatcctccaccgaagagctggagcatctcacacccgatccgagatcatcgcaaaatacgaggtcatggagcggttccgatcgcaagcctactcctacatctaacgtgggcattttttcacacattgctcatggggtagcttgtgcatcacatggtggtcatgggtacccacctgaggcttacccaccaccacctgggtcatacgctccacaacaaggatatcctccagctgggtatcctgcacaacaagggtatcctccagctgggtaccctgcacatcaaggctatcctcctgctggttacccccccagctggttatcctggttca

SEQ ID NO: 37146 - DNA, 375 bp, Glycine max
  unsure (1)..(375): unsure at all n locations
  Clone ID: LIB3055-005-Q1-N1-E7
gccgcgttgactcggttccgtttttcattctcgcggatctaatattaaggaatagcttaagggcacattacaatgaaggcattgattctggttgggggatttggaacaaggctgaggccactgacactcagtttccctaagcctcttgttgattttgctaacaagcctatgattttgcatcagatagaagcccttaaggccattggagtgactgaggtagtgctagccatcaattaccaaccagaggttatgttgaatttcttgaaggattttgaatcaaagctcggcatcaagatcacatgttctcaggaaactgaaccactgggaacagcangtccnctggctcttgctagggataagctgatagatgattct

SEQ ID NO: 37147 - DNA, 374 bp, Glycine max
  unsure (1)..(374): unsure at all n locations
  Clone ID: LIB3055-005-Q1-N1-E8
cacacaacaaattctttagtgctcggtacaagattcgtgaggggccagcaatgaccacatctcttctactcccatctccttcttgtgctgctatactgagcaaagggactaatagaatttgcactcgtgcttcatttcactcacttaaatcccatgtgaagaagggattcagagtgagagctcttaaagaaaaaacagaggaaattgaaagtccttcacagccatcttcacctgaggaagttacaaagaagtatggccttgaagctggtctttggcagattttcagctcaaaagaggaaggaaaggataattctcaacagaaatcaaagggtgatcaagccaaagaattgctagcanaatatggtggagcatac

SEQ ID NO: 37148 - DNA, 417 bp, Glycine max
  Clone ID: LIB3055-005-Q1-N1-E9
tatgtctcaaaggcccacggttcctcactcctcttccataggctgcggccttcactctcatctcctggtctccagtgagatgaaccctagctccaattggtccctttaatcaattacctcttaattagtaattacttaatctcaattagcctttcactctcccacacaacaacatcatgggcgtcaaaggttttgtcgaaggaggcatcgcttccatcattgcaggatgttccacacacccacttgatctcatcaaggtccgcatgcagcttcagggcgaaaacaatttgcccaaaccggttcaaaatctccgacccgcactcgccttccaaaccggttcgaccgtccacgtggcagcggctattccgcagacccgcgtgggtcccatcgcggttggggttcgcctcgtccagcaag

SEQ ID NO: 37149 - DNA, 394 bp, Glycine max
  Clone ID: LIB3055-005-Q1-N1-F1
gcaaactgaatatttgctcgacaaactaagtgtttctttgactggtgaagaacttgatgtcattgaaaagctttattaccaagcaatgaagcttgaaatagatttcttctctgctcagccactctttcagccaactatagtacccttgactaaaggacataagcctgcggaagatcatctcatagttttttctgattttgatttaacatgcactgtagttgattcgtccgccatcttggctgaaattgctatagtgacggcaccaaaatctgatcagaatcagcctgaagatcaaattgttcggatgttatcttctgacctcaggaatacatggggttttctatctaaacagtatacggaggagtatgagcaatgtatagaaagcattatgcct

SEQ ID NO: 37150 - DNA, 410 bp, Glycine max
  unsure (1)..(410): unsure at all n locations
  Clone ID: LIB3055-005-Q1-N1-F10
tgcccctctctcttttcttatagagaccacatttattcattgcattcaaagggcaatggcctcttggaagaagaccatcacaactccattcaaaaaggcttgcactttctttaaccagcaaccaacatctgcaagggatcaaaagaagtctcaaacagagcaagagaggcaagtaatggatctgcacggggaagtgatggcatgtgggtatgaagatgttcaagtgatgtggtctattctggataagtcgaaatccacaaactgcaatataacctcttcaacctgacccaataaaaaaacaagaaagtggcacttcagcaattagcggatgtttttgtatgctaatgtttaaggtcataattgcatcatactaacatatctatttgtatgaatgtanatctcattctcat

SEQ ID NO: 37151 - DNA, 398 bp, Glycine max
  Clone ID: LIB3055-005-Q1-N1-F11
caccaatccctaatctctaacttttcccgagaaaattataagttccattctcttttctccctcagattcccggaaaatatagtattcacaacgttatattttggcaccgccaagctccaattcaatccgtcgtcgttttcgcgaattccgaatgcgtcgacttcgggttggagaatgagttctccgtgctcttcttgtggctgattgttggcgttcttggatctctcttcaaaccctccacaatctcctgtccaattttaactctcttagtcagtttaactatgtatcacacaaagaaattttcaccggctagcatggtgccgcataaatctcaaggtggtgctgaacagcttgcaaatgctggggttttgggtggatcggctgtaaaaactgctgca

SEQ ID NO: 37152 - DNA, 383 bp, Glycine max
  Clone ID: LIB3055-005-Q1-N1-F12
cgaaatttgatcgcagcgtcgagaagaatgggaagtttgggagcgattctgaaacatccagatgacttttaccctctgctgaagctgaaaatggcggcgaggaacgccgagaagcagatcccgccggagccgcactgggcgttctgctacacaatgctccacaaggtttctcgaagtttcgccctcgtcattcagcaactcggcatcgagcttcgcaacgccgtttgcatattttatttggttctgcgagctctcgacaccgttgaggatgatactagcatagaaacagatgtcaaggtgccaatactgatagcctttcaccgtcatatttatgatcgtgattggcacttttcatgtggcacaaaggagtacaaagttctaat

SEQ ID NO: 37153 - DNA, 424 bp, Glycine max
  unsure (1)..(424): unsure at all n locations
  Clone ID: LIB3055-005-Q1-N1-F2
ggaacaacatttacacataccaaacaagccctncctctcctaattctccttctccttctccttcactttcaacacagtcattggctccttcaccagcaccttctcagcaagtggctccacctccactttctccagtggcagctcctcctcagcaagaggctccttctccaccatctccagccacaaataaccccactccagctcctgttagtgatcaaccttctcctncttctcctcctcataatgctgcttcttcaatcttggtcaactttgcttgttctgttggagcgttcattgcttcagttctggttttttctttctgagtggagtgtatgtgatatgagtggttcagtataattntttaattnttttccacatttttcttaattntttatggattcttatcctttgagttcagtattat

SEQ ID NO: 37154 - DNA, 407 bp, Glycine max
  Clone ID: LIB3055-005-Q1-N1-F3
cattattactatacacaccctctttctcctcctcctccttcgtcttcgtctccttctttctctttttcattctttctttcaacatgggtggcatcagcctcgaagaaataaaaaacgagaacgtcgatctggaacggattccaatagaggaagtgtttgagcagctgaaatgttcaagagcaggtctaacatcagaggaaggggccaatcggctccaagtctttggaccaaacaaattggaagagaaaaaagagagcaagtttttgaagttcttgggctttatgtggaaccccttgtcttgggtcatggaagctgctgccataatggccattgctttggcaaacggaggaggaaagccaccggattggcaggactttgtcggaattattgcactgctagtgatcaac

SEQ ID NO: 37155 - DNA, 240 bp, Glycine max
  Clone ID: LIB3055-005-Q1-N1-F4
atttgaaagttcaaccagcaaaatgatcaatgacagggagagtacctaagatttatcgtaacatgaatgctgttctgtgaaatgactcaacagagtgctcaccattcattgttgtccatctcggaaatgtctgcttgttttgtgaagagatgtcacttgtttgatttatttatttttacttgaggaagcaaatcataaaggaagagggttttgggttggggtgagcgcctgggaacatgt

SEQ ID NO: 37156 - DNA, 366 bp, Glycine max
  Clone ID: LIB3055-005-Q1-N1-F5
cgaaacaaaattgtttggagttcctccaaatgcaccgtagggtgcagcagctatggatacgtcatccaatctcggtggcaagactgacatagcccacgttctctctgccgttcagaagtatgagaagcatcatgttcgctatcgacgtcaagacgaagagagaaaagctcattataccgatatggttaataatatactatgatcttgctaccagcttttatgagtttggctggccggaatctttgcattttgcacccacatggaaaggagaatctcttcgagagagcatcatacgacatgaacacttgctagcttcacaactaggactgaatccagagcacaatgctttggatgttggatgtggaa

SEQ ID NO: 37157 - DNA, 253 bp, Glycine max
  Clone ID: LIB3055-005-Q1-N1-F6
aagatgggttcccttttgcaagaagtatacatagagccaagggctcctgagtgttactgtttcagaaaattgattacttgaagccaaggtgcagtctacatttgtgaaggaaagaatggcaatgaagcgggaatatgaagaatttaaggtgaaaattgattctttggtggtaaaggttcagatgatacctgatgagggctgggtgatgcatgatgtgactctatgtccagggaacatcactattgggcatcca

SEQ ID NO: 37158 - DNA, 381 bp, Glycine max
  Clone ID: LIB3055-005-Q1-N1-F7
cctgcttctcgacctgcatttcaagttcgcttagtacaggtatatccttttggtggtgcaaattatgccgattccatacatttagatccttcggagaacgaagatgcacagagttctcttaactattctttaaagcagggaattcatccaccacctacatttggttcatcctctaatcttgaagctcttgcacttcaaacaaccaaaaataacattgaagacgggggaagtgctatgagcgtaacaccttatttccggcccatgcacgagattaccttttcaacagttgacaagcctaaacttcttagtcagttaactgcaatacttggtgagatgggactgaatattcaagaagctcatgcattttccaccactgatgga

SEQ ID NO: 37159 - DNA, 179 bp, Glycine max
  Clone ID: LIB3055-005-Q1-N1-F8
aagcatactacaacaggtatggaggtggtgccaactctggtgctgatggctacaacaacggtactggtttgggtgctgcgattataggcaccttcgatcgtgtatacactgagttctctgacattgactctaagaggaacgctaggtataccaatgacattggactgatgctataatct

SEQ ID NO: 37160 - DNA, 437 bp, Glycine max
  Clone ID: LIB3055-005-Q1-N1-F9
aatttaggctcttcccatttttcttaattcgctggtgcatcgcgctgcggcaatcttgattttggtcatactcatcttcatgtttggagagatattgccgcaagcaatttgtacaagatatggattgacggttggagcaacgctggctccacttgtttgtgttcttcttatagttttcttccttttttcttatccaatcagaaaggtatgcttataatgttgatatgtatgattactatcaacaagggtatgtttaacgaaagtggttagtcttcctcaacgtaacaaatcaaggtttgaataattgcaagaggtgtccatgtttcctgtttgacaatagtgtctcagataggattgccttaaaaaaaggatatgtgtgaaaacaaacaaacaaaaatgtatgatagctatgtgtaacaagatacctgatggagatt

SEQ ID NO: 37161 - DNA, 426 bp, Glycine max
  Clone ID: LIB3055-005-Q1-N1-G1
ctttctggactttcacattcagtatgttggtgttttgcaataaatcattagtgggtgttttatgtagttacatgtacttgtttttttacgttgatttttttttaaaaattcaaataggaattatacattgtcgatttttcgtaagatttttactcaatttttccgaaatgcttggattgtgtttccttaaagttcctttagaatctttctgaagcataaaatttagatcaacacttgattcgttgttcttctttcccagtattcatttctgaattgcatgtgatgtatgttcaggtatttatgaaaacaataatttctttttaatactattgaaataccgacatttctcgtccattaaaattttactattttgccgtcgtatttaaatctatatcaaattttaaaatcttctgtttttagtgtcgt

SEQ ID NO: 37162 - DNA, 404 bp, Glycine max
  Clone ID: LIB3055-005-Q1-N1-G10
tgcttgaaatgcttaaggacaaaatcaaggaggaggcattgaggacatacctctttaccttctcttcatcttatgaatccttgagcctggatcagctcacaaaattttttgatctccctgtttcttgcactcatagcattgtcagtaggatgatgatcaatgaggagcttcatgcaagctgggaccagccaactgggtgcattcttttccaagatgttgaacactctaggctgcaggccttggcattccagttgacagagaaattatctatccttgcagagagtaatgaaagagcaacagaggcaaggataggtggtggtggattggatctgcctctaaggcgcagagatggccaggactatgccgctgccgctgctggtagtggaacagcctcgtcaggtggt

SEQ ID NO: 37163 - DNA, 378 bp, Glycine max
  unsure (1)..(378): unsure at all n locations
  Clone ID: LIB3055-005-Q1-N1-G11
gcaaaaagaaagaatcccaggcgaggagaaagatggaggggaaggagcaggatgtgtcgttgggagcgaacaagttccccgagagacagccaattgggacggcggcgcagagccaagacgacggcaaggactaccaggagccggcgccggcgccgctggttgacccgacggagtttacgtcatggtcgttttacagagcagggatagcagagtttgtggccacttttctgtttctctacatcactgtcttaaccgttatgggagtcgccggggctaagtctaagtgtagtaccgttgggattcaaggaatcgcttgggccttcggtggcatgatcnttcgcctcgtttactgcaccggttgcatctcaaggggacaca

SEQ ID NO: 37164 - DNA, 386 bp, Glycine max
  Clone ID: LIB3055-005-Q1-N1-G12
ggactagccttaactcaactaccgctactgcactctattattggaagtgcagccacgcatcatgtctacagatcatgggcaaggtcaagatcggaatcaacggattcggaagaattggccgcttggttgccagagtcgatctgcaaagagacgacgtggagctcgttgccgatgacgactctatcattaccaccgattacatgacatacatgtttaaatacgacagtgttcacggacactggaagcatcacgatgtcaccggtaaggacgagaagacccatctctcatgagacaagccagtcactggcattggacacaagaaccctgaagagatcccatggaggtcaactggagctgatatcatggacgagtccaccggagttttc

SEQ ID NO: 37165 - DNA, 427 bp, Glycine max
  unsure (1)..(427): unsure at all n locations
  Clone ID: LIB3055-005-Q1-N1-G2
tgtgattgcattgcagcaatgggtgtctccttcctctcaacttgcccttctctgcttccactcgttgcttatgatacaccaccctccgccagataccaacctcgttcagtgtccatttgttgtaataaaaccataagcgatgttagtgatggagagccgttccattggagaaggagagatgttctcaaatgcgccggggcaaccgttggcctgttgtatctgttttcaggaattaattggaagctccggatctcttgttgaaatggctaatgctgctgacctgatacagcgcagacagcgttctgaatttcaatctaagattaaggaaacactttttacagccataaagggaaatcctgatcttattccatccttactgacactggctctaaatgatgncttgacttatgataagttgtaggcaaca

SEQ ID NO: 37166 - DNA, 414 bp, Glycine max
  unsure (1)..(414): unsure at all n locations
  Clone ID: LIB3055-005-Q1-N1-G3
gcaacttgaagtaccttgaacttctcccttatgaagctgtggcagtgaacttcgccataagtctgcaccatgtgccagatgaaagtgtgaacagtcacaatcatcgtgaccaattgttgagattggcaaagcgattatctcctaaagtggtgactctggttgagcaggaatttaacaccaacaatgcgccattcttgcagcgctttgatgagacaatgaagtactacttggctgtttttgaatcgattgatactgttcttccaagggagcacaaagagaggattaatgtggagcagcattgtttggctcgcgaagttgtcaacttaatagcatgtgaaggagaagaaagagttgaacgccacgagcttctgaataaggtggaaaatgcgtntcacaaaagctggatttacacct

SEQ ID NO: 37167 - DNA, 350 bp, Glycine max
  Clone ID: LIB3055-005-Q1-N1-G5
cttcctctcactccttctccgttctccggtcgccggaaaatgtatccggtgttagcgatacggaaaactcatcgcgattccgttttcttcttcgcttcgctttctacttctctgtatctttcacttacattacctctctcattcggttgattccgatcggatccatttcgccgtcgccggcgaagttagtcggaacaggctttagctacgttgtaaacctcagacattattaatctagattatcggaatttagtagttagtacggttcttagctacttaaccgtttaacgatattcatgtacctattaagagaagcgcgacgatgatagatcttaagcttaatgcgtagt

SEQ ID NO: 37168 - DNA, 402 bp, Glycine max
  Clone ID: LIB3055-005-Q1-N1-G6
ccaactactttgactcctttaccataccattacaataattatcaaacctaaccagtaaaaatggtgaccgtggaggaaatccgcaacgctcagcgttcccatggacccgccaccatcttggccttcggcaccgccacgccgtccaactgcgtctcccaagccgattaccctgactactacttccgcattaccaacagcgaacacatgactgatctcaaagaaaagttcaagcgcatgtgtgaaaagtccatgataaagaagcgatacatgcacctgacggaggagtttctgaaagagaacccgaacatgtgcgagtacatggcgccatcgctggacgtgagacaagacgtagtggtgatggaggtgccgaagctgggaaaacaagccgcatcgaatgcgatt

SEQ ID NO: 37169 - DNA, 410 bp, Glycine max
  Clone ID: LIB3055-005-Q1-N1-G7
gctgttcaattcgggccgtggatctgccctgacagaaaaaggaacggtggagatggaggctagcatcatggatggtccaaaacgacgatgcggcgccgtttcgggtcttaccaccgttaagaacccgatctcgcttgctcgtttggttatggacaaatccccgcattcctacctcgccttctccggcgccgaagaatttgctaggcaacagggtgtggaggttgtggacaacgagtactttatcacacctgacaacgttggcatgctcaagctggcaaaggaagcaaacacaatcctgtttgattaccgaatcccaacatcggggtacgagacgtgcggatccggtgtggagagtccactgcaaatgaatggactcccaataagcgtgtacgcgcccgaaaccgttgggt

SEQ ID NO: 37170 - DNA, 413 bp, Glycine max
  Clone ID: LIB3055-005-Q1-N1-G8
ttgaacactgtctgggctcagcatttgagtgaggaattgaaacgtaggttctacaagaactggtgcaagtccaagaagaaggccttcaccaagtactctaagcagtatgaaactgaggagggaaagaaaaacattgaggcgcagctggagaaactgaagaagtatgctactgtggttcgtgttttggctcacactcagatcaggaaaatgaaagggttgaagcagaagaaagcccatatcatggaaattcaggttaatggtggtagtattgcacaaaaggtggactttgcatacagtttctttgagaaacaggttcctattgatgcagtgttccagaaggatgagatgattgacatcattggtgtgaccaagggtaaaggttatgagggtgttgtcactcgttggggtgttac

SEQ ID NO: 37171 - DNA, 431 bp, Glycine max
  unsure (1)..(431): unsure at all n locations
  Clone ID: LIB3055-005-Q1-N1-G9
ttccttttcttcttctccttcatattttctctctcaccattctcttcttcttctccctttcttagattctccctcttttctctctgccctccgccatgactgaggataaggagatgtcttcctctgtcaccaatggcgatgattccctcactggtcacatcatatctacaactattggaggcaaaaatggggaacccaaacagactattagttacatggcagaacgggttgtaggaactggatcatttggaattgttttccaggcaaaatgcttggaaactggggaagcagtggctattaaaaaggttttacaggacagaagatacaagaatcgcgaactacagttaatgcgtgttttggatcatccaaatgtgatctctttgaagcattgnttcttttcaactacaagtacagatgagccttttcttaaa

SEQ ID NO: 37172 - DNA, 356 bp, Glycine max
  Clone ID: LIB3055-005-Q1-N1-H10
cagacattaaaacatgatgctgggaaggagtatgcggcttacaccacaaagaaaagacccagtactgatgcataattgttaatgtatgcacttttaagatcgaagacatttcaagttgataggaaagagtggatcactcttttgttgacccagttgtttgttttgagttggaattacatactcggctatctttccatatttttcttttgttaagttgctggtgctgaactggttaaattccaataaatgtgctattgtgggttaatctatattacataagttctccataaccgtatattactcaatagttgatgttcttccttggatggagtgaatgaaatttgtaagattttgct

SEQ ID NO: 37173 - DNA, 406 bp, Glycine max
  Clone ID: LIB3055-005-Q1-N1-H11
cgcgacgcgatcccggtgcggcagcgcgtggccgtctgcatctggcggctcgccaccggcgatccgctccggctagtctcaaagcgcttcgggttaggaatctccacgtgtcacaagctcgtcctcgaagtctgctccgctatacgcaccgttctgatgccgaagttcctgcaatggccgaacgaggaaaaaacgaagcaaatcaaagacgagttcgagaaaatctcaggaatacctaacgtaggaggagcaatgtacacaacgcacgttccaataatcgctccgaaaatcagcgtctccgcgtatttcaacaagcgccacacggagcgtaaccagaagacgagttattcgataacggttcaaggcgtggttgattcaaaaggcgttttcaatgacgtgtgcatcg

SEQ ID NO: 37174 - DNA, 434 bp, Glycine max
  unsure (1)..(434): unsure at all n locations
  Clone ID: LIB3055-005-Q1-N1-H12
ctcactctgtagctatctccttccttcatccatttcctgaacgaaaccaacttcactttccttccgccatttgcatttctcactttctcttctgaatgggcactgcactgcacctctgcgttagtttcaatcctgctcaaggtagaaaatgcaagtacgaagcccaatcagtgagagcacttcctatacgtatattatcagtggggaagaagcgatcacgtggactgcaactcatggttgatgagtatgtggataagctcaggtactattgcagtgttgaggatgttcaaatacggccaaatcctcaaaatgcacgtgaccaaagggctcaggttgatgccgaagatgaagcagtgatgaaccttataaggtctgatgattgggtatagtctncaacatgcatgaatttgaattacagtagtaaatgatttttt

SEQ ID NO: 37175 - DNA, 405 bp, Glycine max
  Clone ID: LIB3055-005-Q1-N1-H2
atgaagccagcgttagtatctctcgtgtcttctttaaccctgagtcagcaacgtgcgccctcctcgggtcaagctcagtcagcactgcaccgcaaatttttctttgcccctttcgatgagtaacgccacagactccgccggcgagatcccaccggagacgaggtccgccgagagtgacggtggtgggccccggcccacgattaagatcaatgttacgcacggttcctctcaccacgatttacacctcccggcccaatcaacttttggggatgttaagaaactccttgtcaataaaactggtttagagcctgcagagcaacgacttttcttcagagggatagaaaagggtgataaccagcgtttgcaggctgaaggtgtaaaggataagtcaaaactttttctttt

SEQ ID NO: 37176 - DNA, 261 bp, Glycine max
  Clone ID: LIB3055-005-Q1-N1-H3
cagaggttcttaaatcatctatttatatctctatcaatctaggcgcagatccgtgagcaagacgagaagccaaaaaatggaggccgacgagaagaaagcaatgatccgcgacgtagcgctacaagtcgttttcatttccctcactattttcagcttcctctggatgcacggcctccctcaaaacctctacgccaagctccgccaccgtcctccaaactctcgcgccgtccaagccaagcgccacttcgtccaaagcgcaca

SEQ ID NO: 37177 - DNA, 207 bp, Glycine max
  Clone ID: LIB3055-005-Q1-N1-H5
aaaaaagaaatgtatcggataggacgaacaacatgctgtggaggccatctcttctcgtgcttcgagactgatgatctgctgcttgctcttgaggttgacctgagattcaatctaacggatcttgatttacattgtgagacatgtaagatgtgtgcctctggacaaagtgctaccattatcggtgaagagcattccaagacgagctgg

SEQ ID NO: 37178 - DNA, 415 bp, Glycine max
  Clone ID: LIB3055-005-Q1-N1-H6
gatattgagaaggctcctgcaaatatattcaatgtaggatatgatagagatagaattgccccggctgataaggagcaacaggattttgggcaaaataatcagttgaaagctcggaaaaaatcacaaggtaaactagagggaaaatcattgaaggagttttatggtagctggtctccttcatcaactacatctggacaatttcagaatcagctggtgtcttcagtcatacagtcttctccctcttcaattcttgggcagtggaatgagcttcaaggacctgagacactataccaggacatcacaaatacatatgtgacatcctctgcatatgggaaccttacaaatacatattcttctatgtcaatgctaccacaggctcagtcaggagttcttatgcgacagcctctgctttctc

SEQ ID NO: 37179 - DNA, 273 bp, Glycine max
  Clone ID: LIB3055-005-Q1-N1-H7
ctcttaccgtttgataacagataattactatttatgctggagcgaatggttatcttgattcattataaattggaccggtaaggaaatttcctgttgagttacgtgcttacttaaacacgaataaacctcaattcaaagaaatcatatcttctaccaagacattcactgtggaagcagaagtccttacgaatgaagctattcacgatcagatggaactctcagtactacaggaacaggtataaaaaatattgattaatcatataataactttat

SEQ ID NO: 37180 - DNA, 415 bp, Glycine max
  Clone ID: LIB3055-005-Q1-N1-H9
atcatggccacctctgctattcagcaatcagcattcgcaggtgaaactgctctgaagcagctcaatgagttggtccgcaagaccggtggcgccggcaaaggtcgcaccaacatgcgccgtaccgtcaagagtgctcctcagagcatttggtatggccctgatcgtcccaagtacctgggtccattctcagagcagattccgtcatacctgaccggagaattccccggtgactacggatgggacactgctggactatcagctgacccggaaaccttcgccaggaaccgggagctggaggtgattcacagcagatgggccatgcttggtgcacttggctgcaccttcccagagatccttgagaagaatggtgtgaaattcggcgaagccgtgtggttcaaggctggttcacagatct

SEQ ID NO: 37181 - DNA, 293 bp, Glycine max
  unsure (1)..(293): unsure at all n locations
  Clone ID: LIB3055-006-Q1-N1-A1
gaaggccagcatggaagtattcaacatctcgggagataagtatgtcacatttgatggattagcaagagcatgtgctaaggctggtgggttcccagagccagagatcattcactacaaccctaaagattttgattttgggaaaaagaaatcatttccattccgtgaccagtatttctttgcatcagttgatgaagcaaatatcgtgcttggattggaacctgaatatggacttgtagagggtctagcanactcgtacaacctggactttggtagaggaacttattggaatgagg

SEQ ID NO: 37182 - DNA, 413 bp, Glycine max
  Clone ID: LIB3055-006-Q1-N1-A10
acttctctcttcaccatgcaccaagccatttcccaggagaagcttcatccccataggagcacgtggcatgccacacgcaggaggaatcaaagaatccaatggcaccgatccatccaaagctgccacaatggtatcggagaacgcggtggtaatcattggaaaacggggatgctgcatgtgccacgtggtaaaaagattgttacaaggtctgggagtgaaccctcccgtgtacgaggtggacgaggaccacgaagccgccgttgctctccacctgtccccgcagggcgccgaaacggtgcagtttccggcggtgttcctggccggcaagttgttcggagggttggaaagagttatggccactcatatctcaagtgaattggttcccatcttgaaggatgctggtgccttgtggc

SEQ ID NO: 37183 - DNA, 295 bp, Glycine max
  Clone ID: LIB3055-006-Q1-N1-A11
ccacaattcacaaccgaaacagtttccatctctcgcacaaagtgacaacaatatcaaattgctcccttctcttcctcttcctcttcctctccaccctccacatagcttccaccctctcaacccccaccaacttcatcaagtcctcctgcagcaccacccagtacccagccctctgcatccagtccctctccgtctacgcctccaccatccagcaagacccccacgagctcgtccagacagccctctccctcttcctcaaccacaccgaggccaccaaaaccttcgtcgcaaaatg

SEQ ID NO: 37184 - DNA, 418 bp, Glycine max
  Clone ID: LIB3055-006-Q1-N1-A12
caaaaatggctacagaattggcatcatctcccaattgggttccaagcgcagccacatgtttggcagcctttgccgccctccttctcctcttcctccgcggtctccgccgccgccgatacaacctccccccaggcccaaagccctggcccatcataggcaacctaaacttaattgggtcccttccacatcggtcgatccacacgcttggcaaaaaatacgggcccatcatgcacgtatggttcgggtcgagctccgtggtggtgggctcgtccgttgaaattgccaaggccgtcctcaaaacccacgacgccaccctcgccggcaggccgaagttcgcggcgggcaaatacacaacctacaactactcggacatcacttggtcccagtacggcccatactggcgccaggcccgtagaat

SEQ ID NO: 37185 - DNA, 275 bp, Glycine max
  Clone ID: LIB3055-006-Q1-N1-A2
agccaagcaagtgcttgaaggcatagacaaggaaaataacaaaatgacaatgaaggtcatagagggtgacgtgctgggactctacaagagcttcaagtctaatttgcaagttactccaaaaggaaagggcaacgtaatgctttgggcaatggaatacgagaaacaagaagaccacattcctgaagcttataccttggtgcaactggctggtgtggttagcaaaaaattgatgcttaccttactcagggggcacaactaaataatcaaattaagct

SEQ ID NO: 37186 - DNA, 399 bp, Glycine max
  Clone ID: LIB3055-006-Q1-N1-A3
cactaccctcaacatagtaaagcagctggtgcaagtgaagcaatggctcaaaccatgttgctcatgtctagtgtctctagcagttattccgtggatttgaagaaagaccttttcctccaattgcagagtcaaagtttaaggcctaagttctctcaactctcattcaacccacttccaccatcaacttcttccttttcttcaccccgtacattcacaaccctggctctcttcaaatctaagacaaaagccgctcctgctaagactaaggttacaaagccaaagcaaaaggttgaagatggtatttttggcacttctggaagatttgggtttactaaacagaacgagctctttgtgggtcgtgttgctatgcttggttttgcagcatcattgttgggtgaa

SEQ ID NO: 37187 - DNA, 224 bp, Glycine max
  Clone ID: LIB3055-006-Q1-N1-A4
tcatcgttcactatcgttgctgggatcttcctccggtcaaaatacgagcgctcttaagagtttacggcttgctgacggtactggcaacgatgggtgcgtgccattgacatctacatccacttcgtcgcgctcattgtcaccatgactgctatcagatatgcgcatcttcacatttacaggcacttgactcattacgagcgttcccacttatcagagttacatca

SEQ ID NO: 37188 - DNA, 302 bp, Glycine max
  Clone ID: LIB3055-006-Q1-N1-A5
ctcgagccgctcgagccgattcggctcgaggcaaactttatcgactggaaggttcagcaggtgtacaaaaagacttactttctcagtctctaaatgaaacaaatctaaagatttggaatttatcttatggaacagaactggcatggaggaggctacacaatgcaaaggcacttatagttcttgacaatgttgaagaagataaacagcttaatatgtttactgcgaatagaaagaatctgttacgtgaacgccttggtagaggaagcatagtcattataatttctagggatcaacaaatattg

SEQ ID NO: 37189 - DNA, 314 bp, Glycine max
  Clone ID: LIB3055-006-Q1-N1-A6
attgctcccagtagccaggaaccaaagaatatggtgaacttaccagtaatcatcaaaaggcttatttgagaacaattacaggaaagactgaggcccttgtggacctaacagtgatagagatattgtcaaggcatgcttctgatgaggtctaccttggacagagggacaattcaaattggactgatgacacaaaggcaattcaagcctttaagaagtttggaaacaagctgaaggaaattgaggacaaaatctcagggaggaacaagaattcaagccttaggaaccgtaatggaccggcgcatatgccctacact

SEQ ID NO: 37190 - DNA, 258 bp, Glycine max
  Clone ID: LIB3055-006-Q1-N1-A7
gtaattttcttcactgctatttaccattgccacactctcattctcgatggcggcgaagatttcattggcaattggtttgagaactctcttcactgttttgggacttctcatgcttgctgtctttctttacactgccttcaccgatggtctaggtgttcgctttctcaaagaacttgtcagaccgtggatggtagcaactttggtttgtttctatatcaacattgtagcttttgctgtctggattgcttacaaggaatc

SEQ ID NO: 37191 - DNA, 367 bp, Glycine max
  unsure (1)..(367): unsure at all n locations
  Clone ID: LIB3055-006-Q1-N1-A8
gcaattgaagttgaagtcttgcccttctctcttcaactccaaacacaagacatcatcatccatggctgcctccgtctccactgtcggagctgtcaacagagctcttttgaacctgaatgggtctggacctggggtttcagctcccagttcatccttctttgggagcagcttgaagaaggttattggctcaagggtccccaacacaaagatttcctctggaagcttcaagattgttgctgtagaagagaagaaagagattgaagagacccagcagaccgacaaggacagatggaagggtcttgcctatgatatctcagacgacccacaggacatcacangaagaaaagggttgggtgactcctttttc

SEQ ID NO: 37192 - DNA, 413 bp, Glycine max
  Clone ID: LIB3055-006-Q1-N1-A9
tcaaaatcagcctctaatatttttctcactgtctgtccagagaacttgatagagagatggcagctgcaacatctggtgctgtgttaaatgggttgggatcttccttcttgagtggaggaaacaggagccaaacccttctggcctctgctattggaggcaaagttggtgctgctgttactgttaatcccagaagactcattgtggtagctgctgctgcaccaaagaagtcatggctccctggtgttagaggtggtggcaatctcgtcgacccagaatggcttgatggatcgctaccaggtgactatggttttgatccactaggccttgggaaggacccagcattcctcaaatggtacagagaagctgagctcattcatgggaagtgggcaatggctgcagttctaggaatcttt

SEQ ID NO: 37193 - DNA, 244 bp, Glycine max
  Clone ID: LIB3055-006-Q1-N1-B1
taaaattcctattcttcttctcatttcaactctttgcaattgcgatctttcattccttttttttactcttggtaagcgtagttcggtgttggagaaccagcttccagttccagaatactgctgaacagagttcggcttcgctttattgggactcagttgtgtttctactaggttatcttctctgaattgcaaatgaatgatcgttgaaaaaccatgaagaaggtgaggagaaagatcggcaagt

SEQ ID NO: 37194 - DNA, 332 bp, Glycine max
  Clone ID: LIB3055-006-Q1-N1-B10
acaaaactagccaggaacaggccctgtctttccgatattcaccatctctttctctctaatccaaaaaaaaatctgttgtgaacaaacacacattattgtttgttttcatcccacggaaaaatcgatcaggcaaaacaaacaaaggtgaaactgaataggtgcgtgtttgtgttgatgggctaagaggacagagaaaaagaaagaaagagtataaaatcaaatctggcaaatctcgtggggttgagggctcggtcttcgtcgaagcaagcttcccctgatttgcaggacgacgaggaggagtgcaggccttggcgtcgaaggttaataatgtc

SEQ ID NO: 37195 - DNA, 429 bp, Glycine max
  unsure (1)..(429): unsure at all n locations
  Clone ID: LIB3055-006-Q1-N1-B11
gtggatagattaaagccaaacagggcctaagtcgaaggaggggcatggagttggttcatcacagaacataatggaataccaacaacagaaacaacaatggaagaggtcacaaaggacaaaaccctcttcttcttcttcttctcacatcaacaatctcgatgatggttgtcttatgcacattttcaacttccttcctcctattccagatcgctttaataccgccctcgtttgccacagatggaattacttggcatgtcatcctcgcttgtggcttcgggttgatcgatcagttaaagagttatctgaacccggtgttttcccaaacattgaaaccgctgtatctgcttcaagaccaggtgataccatnntaatagcagctggtggaactcatcgtgttgcaaacattcaaataaggaaaccactttgctt

SEQ ID NO: 37196 - DNA, 372 bp, Glycine max
  Clone ID: LIB3055-006-Q1-N1-B12
aaactacgccttataaccatggccagaatagtctctgctacggtcaacctacaccatggccttagaatacagcttactgccaactctcacgctatgctcagaaccccctctccgaaccaacacctcacacctatcctacatcccatcatgcttaaactaagacatgaacctttactaccttaaacagctatacttctttgatagcgctgctgcacaagacctaaccatcatgaaaattaaagatggcatgttcactttgttcaaccattacttcatcacctgtggccggttccggcgatcggattcccgtcgacccttaatcaagtgccatgattgtggaacaaggttcattgaagccaattgcaacaaaac

SEQ ID NO: 37197 - DNA, 376 bp, Glycine max
  Clone ID: LIB3055-006-Q1-N1-B2
ctggacaaggaatcaattaccctgttcacgtttgttttctcactaccacaaacacaaagcctacaaaccaagcaaatcatccccttcttcttcaatcatgcccctgtcataacacatcgacatactagacaacctagcttccatggcagctttttaaccttcctctatttctcacacctagaacaaacccctaccccaccaaacaacactttattattcccctcttcctcaccctccaatctctcatcattctctttcacccgtgctgctccaattttattacacacccaacatgtacacaacaaagagagaacaacaaaagttcaagttccaaaacgactctaaaacccccttcttctcttcaactctactcgat

SEQ ID NO: 37198 - DNA, 351 bp, Glycine max
  Clone ID: LIB3055-006-Q1-N1-B4
gtctctcgtagctcctatcatgtttccagaaagggagttctgagcatcacgttcctcagttccaagtttctgagggaaaatgtgtcacctaactactatatagtcgagtggtgttgctttttataataggatatacggtatgcatctatatcagcatacatttgaataaagtgttacgaatgacatgattccgagtggtgtgcttttaactgtatagtgaaagatttgtgtcatgaacaaatctatatttgtccataatggtctgtttgtgcatctaaaatcatgaaagatttgtatgtgttgtgactgatcttattgaaagtaggatgaatgagacaattcttggtgatg

SEQ ID NO: 37199 - DNA, 430 bp, Glycine max
  Clone ID: LIB3055-006-Q1-N1-B5
tgcccctcaacacccagtgatggtggcgctgtcgctgttggggaaaatccgaatccaaaagtggtagtagatgacgagaaaagcccaaggcggagaagcatcccagacgcaaacaaactcggacaatggttagaaacatgacacgcaagtactgcaaaaagtagaaggagagaagaagaagcgctctcaccgctttattcatttcatttttggaccttacggagacacccctctttcttgtcctctaccctttacttctctccacacagtatatatgttactttctgcttggtttcgtcttcctctccatctctctcgcacctcatgttgctcgatttcatcaccaccgctgcgtagaactctctttctttcattctctggttctttcttagaccatgtcgctcaagcgcccccccgatgatgggaaaac

SEQ ID NO: 37200 - DNA, 400 bp, Glycine max
  Clone ID: LIB3055-006-Q1-N1-B6
ctccataatttgcttctattctttaataaagttcttcaaccctgaaggttcctgaagacccttcttaaggtttggtctccaaatacatgaattggagagcatggaaagtgaccagaaagttcaaatggcatctaggagtgaggtcgtgtcaagtgttgctggggtggagtttcaaggggctcctaatttgggacaaggtggtggtggtggtggccttcagagacaacctagtatgaccaagagcaattgtctttgttctccaaccacacatgctggttcttttcgttgccggcttcaccgtgcccctagccttcagaggaccaaaagcatggaatcagagtcccttcaggatcaggcatctacggttcattctttaattgttgatgcttgtgctggtgct

SEQ ID NO: 37201 - DNA, 397 bp, Glycine max
  Clone ID: LIB3055-006-Q1-N1-B7
cttaatatggttaggctgggggaatcaattggggataggtggatgaataaggaaagcttggtctgattagtctatactatatgccttgctattccactttttctgagtttttctctgcactcctttgctagctaccctctcttttggggtatttctcttttcattctgcaaaaactcttcaaatttccttcccttttctgtgccttattttctcttcactggtcaaaagatttctgggatttttgctaatttggtgcaaatctgattcccctttgacaaaccctcctcatctcttggcttattgacaactactattaatttcaagttgctttttttttttccactttttttctagctgtgtaggattaatcaattttcgaatcaatcatatatactt

SEQ ID NO: 37202 - DNA, 279 bp, Glycine max
  Clone ID: LIB3055-006-Q1-N1-B8
ttcctaaaaaatatcattacaaatacgtcaccgtatttgtccggtttccacgcgattttgattcaaaagaaaagaagcaccaagcgaagccagcgaagctgtctttcgattccttcgtgcgtgcgattctcctgatatccaaggtgaagcaccgacaccggacctattttcggcgaatccccagtccttactttcttgcttcgaaatgaatcccgagtatgattatctgttcaagctccttcttattggagactctggtgttggtaaatcatgccttct

SEQ ID NO: 37203 - DNA, 434 bp, Glycine max
  unsure (1)..(434): unsure at all n locations
  Clone ID: LIB3055-006-Q1-N1-B9
gtttcgagatttgggattctgaacaagaatgctagagaccccaatgggatgaaatggatcgatgctcctgaatgtttctgcttccatctctggaacgcttgggaggaacccgaaaacgacgagattgttgtgatcggttcctgcatgacccccgcagactccattttcaacgaatgcgatgagagtttgaagagcgtcttgtctgagataaggctgaatttgaagaccggaaagtctacaagaaaacccattatctccgaatcccaacaagtcaacttggaagccggcatggtcaacagatacaagctcggacgaaagacccagtttgcgtacttagcacttgccgagccatggcctaaggtttcaggtttcgctaaagttgatttgttcagtggggaagtgaacaagtacatgtatggngaagagaggttcgg

SEQ ID NO: 37204 - DNA, 398 bp, Glycine max
  unsure (1)..(398): unsure at all n locations
  Clone ID: LIB3055-006-Q1-N1-C1
ggtgcattggtccattatccgttgttaatggaaatggaagtggaagtagcacttccattttccaatttccaatttccagtggagtagaacacattcattcaattgcaattttttataatttcatatatcctccaatattgctggtggttagcactcacaagagacaggctcaactaccagacaaattttccattcccggcatctcctccaaacctacgtaccccagataccctaaattcgattcatacacataacacaacacaacctcgttcctttgctgaccaactcggntggtgggtttttctttcactttcacctattggtatggcttccttgattcagttttccccaacttccctgttctttggttccatcactacccgttttaacccggccca

SEQ ID NO: 37205 - DNA, 423 bp, Glycine max
  Clone ID: LIB3055-006-Q1-N1-C10
gagatgaagttgagttcattaaataaagacgaaaaatgacaaaaaagaaaacattcattccccttctatatcttacatctatagtctttttgccctggtgtatctctttcacatttaagaaaagtctcgaatcttggtttattgattggtggaatactaggcaatccgaaattttcttgaatgatattaaagaaaagagtattctaaaaaaattcatagaatttgaagaactgtttttcttagatgacatgttaaaggaatgtccggaaacacatctacaaaacctgcgtactggaatctataaagaaacaatccaattaatcaaaacgcacaacgaagatcgtatgaatacgattttgcacttctcgacaaatataatttgtttctttattctaagcggttattctattcttggtaatcaag

SEQ ID NO: 37206 - DNA, 428 bp, Glycine max
  unsure (1)..(428): unsure at all n locations
  Clone ID: LIB3055-006-Q1-N1-C11
caatttgccctcccatttcactaacgcacacatcacatcataccagagactccatctccctctcgcacgcgacgagggagtcccgcttcggaatctcaccccctctttctgctaattcgcaagatggttgctcagaaattcgttgtcgacttgaacaagccccttgtattccaggttgggtatcttggggaagcctacgatgattgggttcacgatcctatcgtaagcaaagaaggtcctcggtttttccaaagcggtttcctcgagttgttcacacgcactgcatggtgggtgattccaaccgtttgggtgccggttgcgagttggttcatttccaactctgtcaaatcaggcctgccttctcttgatgtagctctgctcgtctntctcggcatctgtggttggactttggctgaatacaccttgca

SEQ ID NO: 37207 - DNA, 415 bp, Glycine max
  unsure (1)..(415): unsure at all n locations
  Clone ID: LIB3055-006-Q1-N1-C12
atcagatctaccacctcgcgtgtcccgcgtcgccggtgcactacaaatacaaccccgtcaagaccatcaagacgaatgtgatgggcacgcttaacatgcttggccttgcgaagagaattggggctaggtttctgcttactagtactagtgaggtttacggtgatccgttggagcatcctcagaaagagacttactggggaaatgtgaatccaattggtgagaggagctgttacgatgaagggaaaaggactgcggagacgttggccatggattatcatcggngtgctggtgttgaggttcgtattgctcgaattttcaacacatatggaccccgcatgtgtttggatgatgggcgtgttgttagcaattttgttgcacaggctattcgtaaacaaccattgactgtatatggtga

SEQ ID NO: 37208 - DNA, 415 bp, Glycine max
  Clone ID: LIB3055-006-Q1-N1-C2
aagccctcagaacacctttgtcccaggactcattgatctggccatcaaaaggaatagtttgattggaggagatgactttaagagtggtcagaccaaaatgaaatcggtgttggtggatttcctagtaggggccggcatcaagccaacatctatagtgagttacaaccatttgggaaacaatgatggcatgaatctctcagcccctcaaaccttccgctcgaaggaaatttccaagagcaatgttgttgacgatatggtcaacagcaacgccatcctctatgagcctggtgaacattcggaccatgttgttgtcattaaatatgtgccttactttggggacaggaagaaggccatggatgagtactcttctgagatattcatgggcgggaagaacaccattgtgttgcacaacact

SEQ ID NO: 37209 - DNA, 363 bp, Glycine max
  Clone ID: LIB3055-006-Q1-N1-C3
ggcaacaaaggagttgtaaattaagagcatggctgcacaagctcttgtatcatcatcatctcttaccttctcagccgaggctacaagacaaagtcttggaccaagatcactccaatctccatttggcttctcaagaaaagcctcctttcttgttaaggcagctgctactccccctgtcaagcaaggatcagacagacctttgtggtttgcatcaaagcaaagtctttcctacttggatggcagccttccgggtgactatggatttgaccctctgggactttcggaccctgaaagaacaggatggttcatttgagccaaatggcttacatatggtgagataatcaaatggtcgtatgcaaaggt

SEQ ID NO: 37210 - DNA, 268 bp, Glycine max
  unsure (1)..(268): unsure at all n locations
  Clone ID: LIB3055-006-Q1-N1-C4
ctctttcttttcttctcgcagagcgaaatcccaatcccacacaaatggcatgctcagccacctctgcttctctcttctccgcaaaccccacacctctcttctctcccaaatcctccctctccctccctaacaactctctccacctcaaccctctccccacgcgcccttctctctccctcacgcgcccctcgcacactcgccgctccttcgtcgtcaaagcctcctccagcgagcttccgctagttggaaacacggnaccgaatttcga

SEQ ID NO: 37211 - DNA, 416 bp, Glycine max
  Clone ID: LIB3055-006-Q1-N1-C5
gcctgctcctgttcccggtccccctggcgccgttgaccaaaaatactccactgcactcaaaaccgcaatgcaattcttcgatgttcagaaatctgggaggttagttgacaataaaatatcttggagagggaattcggctcttaaggatgggagccaagcgaagttggatctatcaaaagggatgtatgatgctggggataacatgaagtttggttttccgatggcttttacggccacggtgctgtcttggtccattctggaatatggagatcaaatggatcacgttggccagttagacgccgctcaagattcgctcaagtggatcactgattgtctcatcaatgctcacccttctgagaatggtctttatattcaggtgggtgatcctggtgcagatcacaaatgttgggaaaaac

SEQ ID NO: 37212 - DNA, 323 bp, Glycine max
  Clone ID: LIB3055-006-Q1-N1-C6
ggccacagcaacaataacaatggcagcctcactacaagctgcagctaccttcatgcaacccaccaaggtgggcatggccactcgcaacctcaaatctacacaatgcatttctaaggcttttggcttggaacccgctgcagctaaactcatttgctcccttaagcccgatctcaaagattttgctcaaaaatgtgtcgactccaccaaaattgcaggattcgcccttgccacctcagctctcgttgtttctggagcgagtgcagaaggtgttccaaagaggcttaccttcgacgaaatccagaggcagacatacttggaagtga

SEQ ID NO: 37213 - DNA, 432 bp, Glycine max
  Clone ID: LIB3055-006-Q1-N1-C9
gtggaaatcactgtcaactaccttcatcctggatgaattatgacaaatattctgcgataccatgattatattaatgcccttgctaacatggtgggcaagtacttccttaaaaatgtgcaacagggagctgcaactcaatgttatgtggcattgcatccacaagtcaagggaatatctggtgaatactttatggatagcaataagggaaacccggcctctctggctaaagattcagagctggcaaaaaaactatgggaattcagcttaagcctgactaatccaaagtagcttaaaagtttgactagaggaagcttcataaatgccaacattattgtattggaaaacaagtttcaccgaattagaaatttatagtggtgtaagcttacaacttgaaggtttctattaattattacagctcagactactatccat

SEQ ID NO: 37214 - DNA, 358 bp, Glycine max
  Clone ID: LIB3055-006-Q1-N1-D1
gtgttgagtatcgacactgattttgatggttgcatgcagttgatcagagaggtcactgctgagttgcctatttatttggctaactctctcaacagtttgaggttggaagggcagaagactgctgctattgagattctgcagcagtttgattggcaggttcctgattgggtcattgtgcctggaggcaaccttggcaacatttatgccttttacaaagggtttaagatgtgtcaagagcttgggcttgtggataagattccaaggcttgtttgtgctcaagctgccaatgctgatcctttgtatttgtactttaaattacggttgaaagagtttaaagccttgaagtcgagcactacat

SEQ ID NO: 37215 - DNA, 367 bp, Glycine max
  Clone ID: LIB3055-006-Q1-N1-D10
aaacactcttcttcatattcttcttcttcttcttgttcttgttctatctgtgacgagcatcatggcctcgagagcagtgctattgttggctatgtgtgtgcttccggccatggttgtggccattcgcccagcaaagaaccctttttgcgtgaagggtcgcgtctactgtgacccttgccgtgctggttttgagacctcagcaaccacctacattgccggtgctgagattatgttgcaatgcaagagcagggttagcaacgaggttgtgtacaccaagaaggggtacactgactcaactggagcatacacaatgtacgtggacgaggatcacgcagatcaaatatgcagtgccaagcttgtaagcagc

SEQ ID NO: 37216 - DNA, 391 bp, Glycine max
  Clone ID: LIB3055-006-Q1-N1-D11
tcttaaaggcccacgattcctcactcttcttccatggcctgcggccttcactctcatctcctggtctccagtgagatgaaccctagctccaattggtcccattagttacctctttcctgcatctcatatatcccattctttctcattcacacagcatcatgggcgtcaaaggttttgttgaatgaggcatcgcttccatcatcgcacgatgttccacacacccacttgatctcatcaaggtccgcatgcagctccagggtgaaaacaatttgcccaaaccggttcaaaatctctgacccgcactcgccttccaaaccggttcgaccctacacgtggcagctgcagtatcgccgtccctcgtgggccccatctcggttggggttcgcctcgt

SEQ ID NO: 37217 - DNA, 296 bp, Glycine max
  Clone ID: LIB3055-006-Q1-N1-D12
caaatcttttctaagtgtagtagaggagaggaaccgcgccaaccctctcttcttcttcttcttcttcaatccttttataacctttatagtttcattcttaatcgttgggaaaaatgttcatcgagaattttaaggtagagagtcctaatgtgaagtacaccgagactgagattcagtccgtgtacaactacgaaaccaccgaacttgttcacgagaacaggaatggcacctatcagtggattgtcaaacccaaatccgtcaactaccaatttaaaaccaacacccatgttccaaaa

SEQ ID NO: 37218 - DNA, 262 bp, Glycine max
  Clone ID: LIB3055-006-Q1-N1-D2
gaacacactaccctcaacatagtaaagcagctggtgcaagtgaagcaatggctcaaaccatgttgctcatgtctagtgtctctagcagttattccgtggatttgaagaaagaccttttcctccaattgcagagtcaaagtttaaggcctaagttctctcaactctcattcaacccactttcaccatcaacttcttccttttcttcaccccgtacattcacaaccctggctctcttcaaatctaagacaaaagccgctcctgc

SEQ ID NO: 37219 - DNA, 427 bp, Glycine max
  unsure (1)..(427): unsure at all n locations
  Clone ID: LIB3055-006-Q1-N1-D3
aaatttgttgctggccaagatggtgcaggctttccactggttgcccaatcccaacgctccacccgacccgactgagaccttcgctttcactgttgtcatgaaaaaccctctcaagccacttattgtgcctcgatccatttaacacttagttatgtgtgaaaaataacatttgagcagaagggatatatgaggtagatttatttttacagggtattttaatttggatgatatgtcattggtctgctagctcattgcagttagttgccatggaattccaaccttctatgtatctatcattattatttacttacatataggctntatcgcataaaatattgcacaattttattgtagaggagctgaattcgttccaatttgcgtccctactatataatataagtgaaggtgcctatgtgctgtgctatct

SEQ ID NO: 37220 - DNA, 225 bp, Glycine max
  Clone ID: LIB3055-006-Q1-N1-D4
aatccaaacacgcccttagcagaatggagactaatccccgcacgatccgcagcctagtctcgaagctgagctccgtttccgaagccgtccgcgtcgacgccctctcccaactccgcctcatgtccaaacagtcccccgaaaccccgcccctcatcgtcgacgccggcgcaatccccttcgtcgcagaaaccctctattgctcttcgcaccccccccaagaaaacg

SEQ ID NO: 37221 - DNA, 438 bp, Glycine max
  Clone ID: LIB3055-006-Q1-N1-D5
tcaacacaggaaccaggtcaaacaggtggaggcactggaccgatgaacaacttggggctggagatgttatcaagcatgtttggtggactcggagctggtagcctggctgttcctaacagatcaaatgagccgccggagcaattgtatgccacccaactttctcagcttcaggagatggggttctttgacacgcaagagaacataagggctcttattgctacatcagggaatgttcatgcagcagttgagcggcttttggggaactccggacagtaacaagtggtaagaagggacacaagactagcaattaaatcccaaacactagaatctggtgtgagatatttgtccatttagctttgaatttcatcatgggattatggtcaaacaaatctaatgatttttttttcatttacatgatatccaaaagttaatattata

SEQ ID NO: 37222 - DNA, 373 bp, Glycine max
  Clone ID: LIB3055-006-Q1-N1-D6
gctatgacgcacgcattccctcagccctgaattcggcttgagcactgaggagcacactgaacgaatcccaggcgaggagaaagatcgaggggaaggagcacgatgtgtcgttgggagcgaacaagttccccgagagacagccaattgggacggcggcgcagagccaagacgactgccaggactaccaagagccggcgccggcgccgctggttgacccgacggagtttacgtcatggtcgttttacagagcatggatagcacagtttgtggccacttttctgtttctctacatcactgtcttaaccgttatgggagtcgccggggctaagtctaagtgtagtaccgttgggattcaaggaatcgcttgggcctt

SEQ ID NO: 37223 - DNA, 294 bp, Glycine max
  Clone ID: LIB3055-006-Q1-N1-D7
atttttcttcctcagtagtgtcatttacgcttctcttctctgcagcaactatgcctaaccctaaggtcttcttcgacatgaccatcggcggtcaatctgctggccgcatcgtgatggagctctacgccgacgtcactccccgcaccgccgagaacttccgcgcgctttgcaccggcgagaagggcgtaaggcggagcggcaagcccctccactacaagggctcgtccttccaccgcgtgatcccgagtttcatgtgtcaaggtggcgacttcatccgcggaaacggaaccggcg

SEQ ID NO: 37224 - DNA, 431 bp, Glycine max
  Clone ID: LIB3055-006-Q1-N1-D9
gtttgtggggtcccttgccttccaagattgacaggttctggtcccttgaagtgatgaactttagctcaaacttcatttatggggaaatttcaccatcagtttcctctttgaagaatctaaaaagtcttgttttggctaataatcttttcaatgggagtgtgcctgatcttggaaaactagcttctcttgaagagctcaatttgagtggcaacaaattaggccctgagttcccttcattgagcaagaatcttgtgagggttatcttgagaaacaactcattgagatgtagaatccctcctcaactcattcatgtttataaacttgagctgtttgatatctcttccaatgtgatatttggaaatatcccatcatttattttctctcttccttccctaaagtacctaaacttggcttcaaaccaattaagtggc

SEQ ID NO: 37225 - DNA, 393 bp, Glycine max
  Clone ID: LIB3055-006-Q1-N1-E10
cggaataagttgtctctacgatttgagccatggcagacaacaacaccctcaaaccgatcatcagaggcgtttgctctcatggcaatcctcagcactctgctttgcacggcggtggcggcgaaggagagcgtgtacgagatactccccaagtacggcctcccgagcggtctgttaccggacaccgtcaccgactacacgctcgacgaggacgggcaattcgtcgtcgttttggcgaagccctgctacatacagttcgattacttagtttactacgagaccaagatctccggcaagctcagctatggctccatcaccaacctcaaaggcattcaggtccagcgcctcttcatcttgttcaacgtcgatgagatcaaagtcgatttgccttccttc

SEQ ID NO: 37226 - DNA, 422 bp, Glycine max
  Clone ID: LIB3055-006-Q1-N1-E11
tttgctattacctctttttccaaactctaaaaatttttagttccacaaaaccaaaccaaaatggcagcagcctcggcctcatccaccatgatatcaacaccagccttatctccaagcacaagcatccaaaagcaccatcatttgaagccatccaacgtgtgctttcaaggccttagacccctcacaaggttcacaaccaaagtgagcagcaccaccaaaagggttattccaaagggtggtgtcggtgttagagctgaactcaactcagcacttgtcataagcctcagcactgggctctccctcttcttggggaggtttgtgttcttcaacttccaaagggagaacgtggcaaagcaagtgcctgagcagaacggactcacacactttgaggctggtgacacacgtgccaaggagtatgtcag

SEQ ID NO: 37227 - DNA, 327 bp, Glycine max
  Clone ID: LIB3055-006-Q1-N1-E12
gttctgtgttctatgcttttgttgtgctttttggtgctgtgtactacttaaaaggtcttgaattcaacttcaaagtcaaaaagcatgaggaaacatgggtggcagttaccttaccatcctcttcaggtggtggctgctgctgtgtttctggctctggggtttgccttctatgtgttctttgctccttttgttggagagaagatgtatcagtacattgttattggcctttactcaccactgattattagtgtctttggactgtacatatggtgtgctgcagcagatccaggagatccaggggtttttaagtcaaaaaagtatcttaaa

SEQ ID NO: 37228 - DNA, 246 bp, Glycine max
  Clone ID: LIB3055-006-Q1-N1-E2
cttttaatttcctagatctcccaaacaaattgtagcataagtcccatggccaaagagactagtgttgtttatctatatcccagcaaatcacaagtttggggtgagaattttgatcataaaaaacttgtaataacaacactagctgctaatggaaagaaggaggagagtaatggagcacctaatgacacatatcctgcgtttcccgggtggtattctgatgtttcctggccaggagaagcacacaca

SEQ ID NO: 37229 - DNA, 434 bp, Glycine max
  Clone ID: LIB3055-006-Q1-N1-E3
aaaatcttctagaacactttttgttagaaacatcaatagcaatgtagaagattccgagctaaaggctctctttgagcaatatggagatatccgaaccatatatactgcctgcaagtatcgtggatttgttatgatttcttattatgatctaagggcagcacaaaatgcaatgaaagcacttcaaaataggtcattgagatctaggaaacttgatatacattattcaattccaaagggcaatgctccagagaaggatattggtcatggtacactgatgatatctgatcttgattcatctgttctgaatgatgaactaaaacagatttttgggttttatggagaaattagagaaatctatgaatatccacaactgaatcatgtcaaatttattgaattttatgatgtccgggctgcagaagcttctcttcgtgcat

SEQ ID NO: 37230 - DNA, 391 bp, Glycine max
  Clone ID: LIB3055-006-Q1-N1-E4
aataattttcatctaaaaaaaaaccaccgttgaatttgacagtcccggcgaggcatgttcttgctccgagtccactcagtggaagaggagcaccctctggatccccgaaccatcttccaatcccaaaccaacaaccctaaattcagccaacgcagaggcgcgcttcacttgttccgaaactctttccacttctgttcctcttgtcttctcttcatactcggcggccccaaatatactttctttacaagactacattccctttaaaacagcaaatttgacacgattgtggatgaacacaaccgtcttcttacatctcagttggagacacaaagacaatattatgaatcgttactagtggagacaaaaagtaaaatggaaagttccatgtctg

SEQ ID NO: 37231 - DNA, 430 bp, Glycine max
  Clone ID: LIB3055-006-Q1-N1-E5
gaggtccaaagggctttgctccttaactccaaaggaagttgggatttttcttaccgctctcggatacccatcaacaactccaatatatattgctgctggagagatatatgggggcgagtcccacatggctgaactgcattcccgatatccattgttgatgagcaaggaaaagttggcatccatagaagagcttgaacctttttctaatcatgcatcccaaatggctgctcttgactatattgtatctattgaaagtgatgtatttataccttcttattccggaaatatggcaaaagctggtgaaggtcatcggcggtttcttcgacgtggaagaacagtatcttcagacaagaaagcccttgttcatctgttcgataaactggatcagggaataataactgaggggaagaaactattcaataggattatt

SEQ ID NO: 37232 - DNA, 396 bp, Glycine max
  Clone ID: LIB3055-006-Q1-N1-E6
aattaacactaataacagcaaactaaagttgaagtttgccagaaacaagatgggaaggaaccattttcagcagcaacactgtgctgatgggagcatgtggatggagagtcagggtcagcaacagagctatgccttccaagaagagtcttggagccctgataacaactatggccacaaccacaagcaattcccaggcatgcacatgaacatgaacaacaacaacaacaacaaaaggcttggtgcttttgctgctgtggactctgacttctcaatgcaaaaacatcatcatgggcatggcaacggcgtatgagccatgcacatgaacatgaacaggcatggtggcaagttaggaggcatgtttcaagaaagcatgcacagtgaccaccatggtggcag

SEQ ID NO: 37233 - DNA, 318 bp, Glycine max
  Clone ID: LIB3055-006-Q1-N1-E8
gaccatgcaaatgcaaatgcaatgttctctctgctctcattcttcttgtcacattcctttttattgcttcttccgtccactgtgaagacccatatcggtacctcacttggaaggtcacctatggtgacatctatcctcttggtgtcaagcaacaagggatcttaattaatgggcagtttccagggcctcaaatagatgctgttacaaatgacaacttgattatcaatgtctataactacctcagagaaccgttcctcatttcatggaatggcttacagcataggaggaactcatggcaggatggagtgtatggcacaa

SEQ ID NO: 37234 - DNA, 429 bp, Glycine max
  Clone ID: LIB3055-006-Q1-N1-E9
tgcggtgcggcgatcctagcactctcttctgcaggtttcgcggacagcttcattcaccatggctgagcaaaccgagaaggcttttttgaaacaaccaaaagtgtttctcagctcgaagaaaactgggaagggaaagagacccggaaagggtgggaaccgcttttggaaatccattgggcttggatttaagactcccagggaagccatcgaaggaacctacattgacaagaagtgccccttcactggcaatgtttccatccgtggccgtatcttggctggaacatgtcacagtgctaagatgaacaggactattattgttaggaggaattatctccattttatcaagaagtaccagaggtacgagaaaaggcactccaacattcctgctcatatatcacctgctttccgtgtgaaggaaaggagatcacg

SEQ ID NO: 37235 - DNA, 434 bp, Glycine max
  Clone ID: LIB3055-006-Q1-N1-F1
cccttctccttctctctctctttttcgcctcattccattttcatctatcaatggctccagtagcagcagcatcttcagattcaatcaagccaagagatgtttgcatcgttggtgttgcacgtacaccaatgggtggatttcttggtactctgtcatctctatctgccaccaagctaggctctatagctattgaagctgctcttaaaagggccaatgttgatccatcccttgtggaagaagtattttttgggaatgttcttagtgctaatttggggcaagctcctgcaagacaagctgctcttggagcaggaatatccaattcagttatctgcactaccgttaacaaagtttgtgcatcaggaatgaaagctgcaatgcttgctgcacagagtattcaattaggcacaaacgatgttgttgtggctggtggtatg

SEQ ID NO: 37236 - DNA, 316 bp, Glycine max
  Clone ID: LIB3055-006-Q1-N1-F10
tgcaattgaagttgaagtcttgcccttctctcttcaactccaaacacaagacatcatcatccatggctgcctccgtctccactgtcggagctgtcaacagagctcttttgaacctgaatgggtctggacctggggtttcagctcccagttcatccttctttgggagcagcttgaagaaggttattggctcaagggtccccaacacaaagatttcctctggaagcttcaagattgttgctgtagaagagaagaacgagattgaagagacccagcagaccgaccaggacagatggaaaggtcttgcctatgatatctc

SEQ ID NO: 37237 - DNA, 366 bp, Glycine max
  Clone ID: LIB3055-006-Q1-N1-F11
ctgatcctttcatttgcaaattgcaaatgcagaaaggaaaagcggattctgtctccatcctcagttcccttcctgaagatgttgccctcaaaattgcttcgctgcttcaggtgcgggatttgtgtgccttaggttgttgttcgaggttctggagggaactctgcttctcagattgcatttgggagtctcttgtcagaaacagatggcccttactctcttccttccatttcccttcttcttccactcattctcccaatttcaagaagtggaggaaattgtacttggagaggcaagtggaattgggacttagaacaagggtctgtcgtgaaagttctggaaagcttgtctcggtctgagtcaactgag

SEQ ID NO: 37238 - DNA, 436 bp, Glycine max
  unsure (1)..(436): unsure at all n locations
  Clone ID: LIB3055-006-Q1-N1-F2
caacatgtctttattaggagatataagatggatccagtggttgaaatatattttcattatataatgagtttcatttatgaataacctatgttcaaaatatatcatagattttggatctgttacgatttgtgtgccactgatgatttcgttgtgtaacacagttcattgatgttggaaccatggtttctccaacgatttatgcacgtcgtagtctatgttatctgatgagcaatatgcccgatgaagcacttaatgatgcgatgcaagcacaagtaatatcccccgtttggtacattgcgttttatttacaagctgttgctcttttagcactgggcaaggagaatgatgcccaggtgccacttaaagagggttcttcgcttgaaaataanaagaacacaaattaattgagttcgttgaccaaaccttgctttctttt

SEQ ID NO: 37239 - DNA, 359 bp, Glycine max
  Clone ID: LIB3055-006-Q1-N1-F3
cagagtaatgaatccctacggaggcaggcagcggctgttgctttcgagcagaaagttcatccagaaaaaatagaatcagaccattcagcagcttctttggagcagaaagttcaaccagaaaaaatagaaccaggccattcagcaactgctttagagcagaaagttaatccagaaaaaatagaaccagtccattcatcaactgctttggagcagaaagttcatccagaaaaaatagaaccagatcattcagcagctgctctagagcagaaagttcatccagaaaaaatagaaccagaccatgaagttgctgttgcagagaaaatgcatgtgcaaccaagaataattgcagataatatgac

SEQ ID NO: 37240 - DNA, 391 bp, Glycine max
  Clone ID: LIB3055-006-Q1-N1-F4
gccactttgctcttcctctacattactgtgctcacagttatagggtacaagcaccagacggatcatgctgatgcgtgtggtggggttggcattcttggcattgcatgggcctttggtggcatgatcttcatccttgtctactgcactgctgggatttcaggaggtcacattaacccagcagtgacatttgggctgtttttggctcgcaaggtgtctttgatccgagccatcatgtacatggtggctcagtgcttgggtgctatctgtggagttggtttagttaaggcttttcaaaagtcttacttcaacaagtatggtggtggggctaattccctcgctgatgggtacagcacaggtactggattgggtgcttagatcattggcacctttg

SEQ ID NO: 37241 - DNA, 414 bp, Glycine max
  Clone ID: LIB3055-006-Q1-N1-F5
ttcgccagaaaccgtgagctcgaagtgatccactccaggtgggccatgctcggggccttgggctgcgtcttccccgaactattgtcccgcaacggggtcaagtttggagaagctgtgtggttcaaggccgggtcccagatcttcagcgagggtgggctggactacttgggcaacccaagccttgtccacgcccagagcatcctcgccatctgggccacccaagttatcctaatgggtgctgttgagggttatcgtattgctggtgggcccctcggtgaggtcactgacccaatctaccctggtggcagctttgacccattgggccttgctgatgacccaaaggcttttgctgagcttaaggtgaaggaactcaggaccggagattggccatgttctctatgtttgggttctttg

SEQ ID NO: 37242 - DNA, 329 bp, Glycine max
  Clone ID: LIB3055-006-Q1-N1-F6
ggagtttcttattccttctagacgcttccattgatcggcgagttctgatacatggcggagcatcacgaacacgaggaagtgaagggtgagtccttgttggagaagatttctgggaagatccacgaccacgattcctcgtcttcgtcggattccgacaacgacaaaaccagcgccactgattccttcaagtctaatgttttcaggcttttcggcagagaaaagcccattcatcatgttcttggcggtggaaaaccggctgatgtttttctatggagaaacaagaagatatccgcatcgacactcggagttgcgaccgctatatgggttct

SEQ ID NO: 37243 - DNA, 232 bp, Glycine max
  Clone ID: LIB3055-006-Q1-N1-F7
gcagagtagataatgaatacatcaaatagaataccttctcagctgcttctttgccttttgtttatttttattgtgagagaaagaaataaagttgagtgttgagaataccgtttcttccaacttccacggtccaataattctgattcagccatttttgattctttttcttttcttctttcttcggttcctgacttcttttcttttccccaaaacccaagagagagagagaaga

SEQ ID NO: 37244 - DNA, 379 bp, Glycine max
  Clone ID: LIB3055-006-Q1-N1-F8
cacagctggatcatgcagcaaaaattaagagcagcccagaagcagagaagtactatgctgctactgtatcttctctgaacgatgtccttgccaaacttggttaatgtgattaatttcttgctttcttgtgtaagctttgtgcatcattttctcagacactttgttgactgatattttaagaaaatcaaatgatgagggaaaattttctataaataagatcaatatatctagacgacttctctcctgcatgtccaaaactgaaaggtaattaaggggtaatgtaattgtagaagttagaagtttaattataatttcctgagcacaaaactagaatagttataatgatactataatcttagtacacagtatttggatcata

SEQ ID NO: 37245 - DNA, 339 bp, Glycine max
  Clone ID: LIB3055-006-Q1-N1-F9
gatgtctttaagtgttaatgctcaagttaaaagtggaattggtgcaagatattggagctccttcagtatcacttcagttatgtatcactagcctcaataagttgccttcgttcgtttggtttctcaaacaacacaacagtgaatttggcgtctcagatatggctgagaaagagagtattcattcatttggtgattggaggagaataccaatttgcactttctttcaagatgccagactagtttttaaagcagacagtcttggtcgggaaattttgtcaattgcattgcctgcagcaatagctttgacagctgatcctattgcttcactagttgacacag

SEQ ID NO: 37246 - DNA, 409 bp, Glycine max
  Clone ID: LIB3055-006-Q1-N1-G10
cgcagagcaaagcaaagcagagccaacaacaagaagaacaagaaccaacatcaacaaccacaagaagaagaagcttgcaaattagaagaatcttcagttgaaagggaagaacacacaagaacaaagagaggaagaaacgcgaatgaagggagaattagagttgccaccagggttcagatttcaccccactgatgaagaattggtgaatcactacttgtgtaggaagtgcgcgggtcaaccaatcgcggttcccatcatcaaagaggtcgatttgtacaagtttgatccatggcagcttccagaaattggctactacggcgagaaagaatggtacttcttttctcctcgggatcggaaatacccgaacggttcacggccgaaccgtgccgccggaagcggctattggaaa

SEQ ID NO: 37247 - DNA, 322 bp, Glycine max
  Clone ID: LIB3055-006-Q1-N1-G11
gcaaaaatcatgggtccgatggtgctgagccaactggccaccggtcttagcgttctagccggagcggttctggtgaaatcggttatggaccagaagcccatggcaggcccattcactcgctgccctacgtgcaacggaaccggtcgagtcacgtgcctctgctcgcgttggtccgacggcgacgtccgatgctccacgtgctccgggtcgggtcgcatggcctgcagcagttgcggcggctccggtaccggtcgacccttgccggcgtaaatcgcgattcgaccgccgaaccgtccaattaatagtttaccattccgtgggc

SEQ ID NO: 37248 - DNA, 413 bp, Glycine max
  unsure (1)..(413): unsure at all n locations
  Clone ID: LIB3055-006-Q1-N1-G12
ctttgttggcggcaaggcaaatctgcattgcgatggcgcctccgaagctcttcgtctttgcgctttctgtaaccctaattttcgccatcgttggggccgaagccgatatttccatcgaaggaagcactccagagcctgatacctccgccatcaggatccaattagatcaactcaattccaagatccaaattctcgagtctcaaatcagcgaaaagttggaagaagtgaagaagaaggacgaaattatagcagaaaaagaaaagtccattgaagataaatcaattaccatacaatccttgcagaatgagattgcttctctccagaaaaaagggtcactggatgctgaggagcangttggaaggcctaatgcacgtgctggtgaactacagaagcaggtggacaagcttaaaagg

SEQ ID NO: 37249 - DNA, 272 bp, Glycine max
  Clone ID: LIB3055-006-Q1-N1-G2
ctctctctcaccaaagccttcctagaacgaataataaaagaagagcaattttccctcaccaaagaagaagaagcaaacaatggccgatcaacttaccgatgaacagatctccgagttcaaggaagccttcagcttgttcgacaaggacggcgatggttgcatcacaaccaatgagcttggaactgttatgcgttcattgtggcaaaacccaactgaggcagagctccaggacatgatcaatgaagtggatgctgatgggaatggtaccattg

SEQ ID NO: 37250 - DNA, 363 bp, Glycine max
  Clone ID: LIB3055-006-Q1-N1-G3
gttctgcaacatttatcattgactagtagtcttccatgttttgaagatccaaaaacaataggaaaaaaaaaatgatggctcactgtgttttccctgttaatgcacttcctactccttcaccatgtttccactccaaagttggaaagcaatggcctcagggatttgccttgagtgtgaggccaacgaatccgaagaggctttcaagtgcctgcaaagtgagagcaactttgggtgcttctgataaatcaattggaattccaaaccaatggtaaaatgtaatggcaaatcttcaattgaaaccacttcaacaattgaatccaaggattaatgaccaattcaacccgatgaactggcaaccctttt

SEQ ID NO: 37251 - DNA, 425 bp, Glycine max
  Clone ID: LIB3055-006-Q1-N1-G4
ggaatcaaaccttaataaaaagtcccccaaaatggctccaacaagaaaccaccttcttcacattgccatgttcccatggtttgcaacaggtcacatgactccattcctccacctttcaaacgagttagccaaaaggggtcacaaaatcacgttcttgctacctaaaaaagccaaactacaactccaacaccttaacaaccatcctcacctcatcacattccataccctcacaattcctcatgtaaaaggccttcctcatggcaccgaaacagcctcagagatccccatttccttgaaccatttactagtcatagccatggacaaaacccgtgaccaagtggagcacacacttagtgcaacaaaccctgattttgtgctctatgataacgcttattgggtgccccagatagcaaaaaagctgggca

SEQ ID NO: 37252 - DNA, 287 bp, Glycine max
  Clone ID: LIB3055-006-Q1-N1-G5
gtgccaaacagccaatggtgcttcgatccttctatccacacgtgataaaaccatcaaattttggaaggtgcaagaaaagaaggtcaagaaagtttcagacatgaatgttgatcctaaattaatgggaaacggctctattgctagttcaagtaattcgggtagctctaaatcatatcttgcatatggagtatcttcagatggaccatataatcatttaaacaacgatttctcatttccaccaggcggtgtaccttcactaaaattaccattggtaggaaccagccatg

SEQ ID NO: 37253 - DNA, 411 bp, Glycine max
  Clone ID: LIB3055-006-Q1-N1-G6
caccccttcaatccactccactctagcacacaaaacttgctgtagcagtaagctataactcatttgaggctctgtgagaattgagaaatggctaaagatgttgaggttcaagagcaaggaggagagtactctgccaaagactaccatgaccctcctacagcaccttagttcgacccagaggagctcacacagtggtccttctatagagccctcatcgctgagttcatagcaacccttctcttcctttatgtcactgtgctcaccattattggctacaaaaggcagactgatacaacggtaggtggcaccgactgtgatggggttggcattttaagcatcgcttgggcctttggtggcatgatctttatccttgattactgcaccgtctgtatttcaggaggacacataaac

SEQ ID NO: 37254 - DNA, 233 bp, Glycine max
  unsure (1)..(233): unsure at all n locations
  Clone ID: LIB3055-006-Q1-N1-G7
cgctccacaacatggatacggttacgcgccacaagcggcttatgggtgcgcgccacaagcggcttatgggtacgcgccacaacccgggtacggttacgctcctnctnctcctgctgctgcagcagttcaaagaccggtgaagaacaatttgggaatgggattgggtgctgggttgcttggaagagccttgggtggaattctaattggggacatgatttctgatgccggttctt

SEQ ID NO: 37255 - DNA, 419 bp, Glycine max
  unsure (1)..(419): unsure at all n locations
  Clone ID: LIB3055-006-Q1-N1-G8
gacagagtgagaaatatagaaatggcgtcgtggtgcggtgctcggagcttccagattccggcgatggaagacagcgcactgcgcaaccgtgcttcattggccgccggagtagggtgtttgtcggtggccggcacctccttctggcgctcctcttcgtcaccgaagcgctctttgccattcacatgcttgagcatttcttccgatactcgtattaaggaaagtgttcaaactgaaggtgcacctgcggctttgggaccatattctcaagcaatcaaatccaacaaccttatttttgtgtctggtgttcttggccttgttcccgagacaaggaagttcgtatctgatgatgttgaagaccanactgaacagcttcttaaaaacatgggggaaattcttaaagccggtggtgctagctactc

SEQ ID NO: 37256 - DNA, 342 bp, Glycine max
  Clone ID: LIB3055-006-Q1-N1-G9
cttcaacttcattgtttctgtcgccttgctttgcttttaacgttaacctgcaattgcataaactttcaataactcagtgctcacacttcaattacaagctttggtttttcacttcacgcttgaaacccaatggcagcctcagctttctccaacacattggtttctcccatttctcttccatccaaacccaaacccaaagccatttccttgcaacccaaatttccacttgtcaaattccccaaccccagatcccatcccttgtcgaggaaaacgacgtcgctcaccaacgtttgtcctacgatgctgccaatgcttctcaacatgacaccccaattgaattaa

SEQ ID NO: 37257 - DNA, 294 bp, Glycine max
  unsure (1)..(294): unsure at all n locations
  Clone ID: LIB3055-006-Q1-N1-H1
ctttcttcctcaaccacccaacccaactttttattccactcatcacttccttggaaattgcaaccataaaaaaaattgtttgtttttattccttcattcataataatactttgaaaagtgttgctttttgggttgagaattgagagttgtggcagggtctaatgggtaactgcctagattcttctgccaaagttgatgcagctcagagctccagatccacttctgcatcangaatctcaaaaactactccttccagtttatctattccatcttacagtgaaaaaagcattgcct

SEQ ID NO: 37258 - DNA, 420 bp, Glycine max
  Clone ID: LIB3055-006-Q1-N1-H10
ctcacattcacgaccagcataattgtacatttttgcattgcgccggcaacgttggtgacgagtgacgaccctttgagtagcttgggcaaatattttggtcaacaaatatttttctgcaatatcagtgttttccattccatatcaaatttcaatcctttaggagtttccttccactcagatgtagctactagaatggacaatcagaagggaatgagtattagttttgagacattcacgtggaaaattgaaaatttctcaaaacagaacaccaagaaactacaatccaagactttccgaatccgaggttataaatggcggattcgtttgtatccattaatgaagaatgttgaccatttttcattgtatttgatggttgcggattctttacctccgtatggatggaacagaaatacgcatttc

SEQ ID NO: 37259 - DNA, 358 bp, Glycine max
  Clone ID: LIB3055-006-Q1-N1-H11
agaagagcaaggttacaggcacaattttcacagatgaggcctgttgcaataacgccttctgttgcgccccgtatgcctctctaccctcctggtgctcctggtcttggacaacaatttttgtatgggcaaggacccccagccatgatgcctccacaagctggatttggttaccagcagcaactagttccgggaatgagacctggtggtggtcccatgccaagcttctttgttcccatggttcagcagggccaacaagggcagcgcccagtgggccgtcgaggaacaggtcctgtgcaacaaccccagcagccaatgccaatgatgcagcagcagatgcttccaaggggacgtgtctatc

SEQ ID NO: 37260 - DNA, 412 bp, Glycine max
  Clone ID: LIB3055-006-Q1-N1-H12
cgtcgtggtctttagcatttctcaccgactgcgaagggagagcgaataaaaaaaggcaaatcaaattcgagagaaggagagaatttagagagggaaaggatgaagatcacggcgttgttggtgcttaaatgcacgggcgagggatccgatccggtgattctggcaaacgcttccgatgtcagccacttcggctacttccagcgttccagcgttaaggaattcatcgttttcgttggtcgtacagtcgccagtcgcactcctcagggccaacgccaatccgtacaacacgaagagtacaaggtgcacacatacaacaggaatggtctttgcgcgttgggatttatggatgatcattacccgattcggagtgcgttttctcttctcaatcaggtaatagaaggattatcaaaaa

SEQ ID NO: 37261 - DNA, 385 bp, Glycine max
  Clone ID: LIB3055-006-Q1-N1-H2
aagtttttgatcgagtggattgttcttgcaaaacatgccaatcttttttatgatccgtgtttcttttcctatatatatatattttaatttgttttgccttggtctcaggtgaaaacatattggttgaattctgatggtgctgatgtggtttaccatatgatagataacttccttctttagcctttttgttaagtttgatttcatctaatcaatgttgtgagcaacaatagtagttgtaatccaatcatatatcccctatattatgtcttgcaacgtaatggatgaagattttttgtacattgtattgtggcatgagaagtcgataactctgtttgagaataccattatgtacatgggaatcataaatgactaatttgtccatctt

SEQ ID NO: 37262 - DNA, 279 bp, Glycine max
  Clone ID: LIB3055-006-Q1-N1-H5
gtctctctgtctctcgtcgcctctctgcaagttagctgggacaagccagcaaggtaaacattttactgtgaagaacaatgaggaagcttaagtctcatgaaaagaagcttctgaagaaggctaatgctttggaatggaagagggaagggggtcacagagagaacctcattatgcaacgctaccattgtactggacaggacgattacaaaaaatattcacgtttatgccatatggtttagaagttagtaaacatatttaaacagatggacccaaaggatc

SEQ ID NO: 37263 - DNA, 397 bp, Glycine max
  Clone ID: LIB3055-006-Q1-N1-H6
gcaattgtcatttgtcaccaaacaattgttgttagctctcacaagcaagcttcagcaacgacaatgaagaaagtagtcttacagttggacttacatggtgatagaatcaagcaaaaagctatgaaaacagcatctggcctttcaggggttgaatcagtttctgttgatatgaaagacatgaaaatgatcgtgttgggggacattgatccagtgagtgcagtgtccaagctacgaaagtgttgtcacactgaaatagtttcagttggaccagcaaaagaggagaagaaggagaatgtggagccagcaaaagtacctgttcctctaaagctccatgaagcctatcccctttattatcagatgacaccacattatagtcaaagtcactatgtcacaaggt

SEQ ID NO: 37264 - DNA, 240 bp, Glycine max
  Clone ID: LIB3055-006-Q1-N1-H7
tgcatctttgaaaaggcgcaaaaagtcagtgaagtaaataagctgaaacaagaaacgttggttcagtttgcatcaatggcggatctgaagaacggtaatttcctcacctacgcgtacattcttctctacattgctctctccagcggccaaatcttcttcaacaaggttaatgatctgtttcttacaggttatgaaggttgaggagggaatgactcctgaaatatacgctactttagtagt

SEQ ID NO: 37265 - DNA, 413 bp, Glycine max
  Clone ID: LIB3055-006-Q1-N1-H9
atcacccacaacacaattttaaataacagtatggagaaattaaacataaaatcctgaaaatcaaacatcatctatacatattcatgtatgtacacagctgggtcattagcctaatcaagaaatgcaattctgactcatacaaccagattcaattgagctacaggttctgctctacatgatatgataaacccaaaatgtcccaaggtctagcttggctaacaaaataatgtacatgtcaatgtcacagctctaatttatttattttcgccaggcaattgatctaaatatggtacaacaagctgatgcacttagacatgcttaatcattactgtcactgtcactgctggtgtccagaaagctatactctctccatctgctgagtttaatcaacacagttccccggttctcttccc

SEQ ID NO: 37266 - DNA, 399 bp, Glycine max
  Clone ID: LIB3055-007-Q1-N1-A1
acaaagagaagcattagcactaggagcagcaacaactagtctcagctgaaatggcctcttcagtgatggcatctgtggccctcaaacctgcccctttcactgttgagaagtcctcagtgagaggccttccctctctctcaaggaactcttcttcattcagagttgtggccagtggcaagaagatcaagactgacaaaccttatggaattaatggtggcatggctttgagggatggaactgatgcatctggcaggaaaggaaagggaaagggtgtttaccagtttgtagacaaatacggtgctaatgtcgatggttacagtcctatctacgacaccaaggactggtctccaaccggtgatgtctacgctggcggtacgactggcttggatatacaggctg

SEQ ID NO: 37267 - DNA, 428 bp, Glycine max
  unsure (1)..(428): unsure at all n locations
  Clone ID: LIB3055-007-Q1-N1-A10
gcacattatttgtttggtttcagaagctcatatcatttgagttcccccggaaccaaatcttcattgaccatctttaccttttcaaactggacccttaatcttaatattatncctttttctttttcttcattagatatttgaaatatgaaattgttggatttaaggcaaacaatggacgacggacagcaaccagtaaaaagcattttccggattcgggattcaggattccatgaaagcccaacctacacttctttcccaaactcctaagcggncacaaagcgcgccaatctcgcccggtaaaattctcctccaatgggggcgccttctcgcctttctccgncgncgacaaagaccctcccgaacctatggctttcacgaactccgactcggacttcgagagccctgacgctgtccncgatgcagcagta

SEQ ID NO: 37268 - DNA, 301 bp, Glycine max
  unsure (1)..(301): unsure at all n locations
  Clone ID: LIB3055-007-Q1-N1-A12
ggaattaggatcctncgaaacaaaacatacaaaatggtccagcctggttttcaaccgggtggaaatccttcaaccacaaaaaacagaatggggaaaccttagcgccagaagaatcatcatgccctctctgtcatcgataacaaccttcattcttcaccctcgtcactcgtcatttctgcttaccacgcctncccttcaaaacttgacaaatttgatttgaagctggggaaggagcatcgggtttagattaacgcaatgctgcaacaagagccaaatctcattcagcattccatacgtacag

SEQ ID NO: 37269 - DNA, 416 bp, Glycine max
  unsure (1)..(416): unsure at all n locations
  Clone ID: LIB3055-007-Q1-N1-A2
acaagacagtgtcagcgcgcacgcatacatggccatcacaggcaacctcaacctcaacctagtactccccgtggcacgccccatggcgtgccccccacgcgccccaacgtccctcctcgctcgtggccgtggcgcgtcgtcgtcaccttcgctcctggtcacgcgcgccatcgacgtgaacgagttcctgggggacttcggggcgcgggaccctttccccgcggagcttgagagttccttcggggagaaagtgctgggatacagcaacaccgagcacaaaatcctcatccncaccatcactgctctcgccctctcgcagcaggagtgtgctcccgtttccccttcgcagccccccatctcgctggatgacgcccagacgctcattagaaaggttgtgggttggagacttgtgaatg

SEQ ID NO: 37270 - DNA, 419 bp, Glycine max
  Clone ID: LIB3055-007-Q1-N1-A3
tcttgttctatctgtgacgagcatcatggcctcaagagcagtgttattgttggctatgtgtgtgcttccggcgatggttgtggccattcgcccagcaaagaaccctttttgcgtgaagggtcgtgtctactgtgacccttgccgtgctggttttgagacctcagctaccacctacattgctggtgctgagattatgttgcaatgcaagagcagggttagcaacgaggttgtgtacacgaagaaggggtacaccgactcaaccggagcatacacaatgtacgtggatgaggatcacgcagatcagatctgcagtgccaagcttgtaagcagccctcaccctcaatgcaaggaagtcaccccaggccgcgacgaagccgtcgtgattctcacccgctacaacggcattgccttcgacgata

SEQ ID NO: 37271 - DNA, 417 bp, Glycine max
  Clone ID: LIB3055-007-Q1-N1-A4
gtcagcatacattaagaggtataccattagcaaagggaggcagccgttttttagattttaagtgaaattagaccttgactccttgccccttacctcctgtcccagtcaaatggtaggcagtggattgacggagtatgtaatgcatattgcagttgaatacaacaatgtgctaactcaactaaaattgagatggaaactatctccaacttattagaacatatatgatttcagtatggaattaagttataatatggaaattatcttccttttctatcaacataatcgtgcagtgaaatcttagctataaattcatcatagtatgatttcattaatctttaatttctcttggcgatcattgaaacagtatgacgattcattttccatttgaccacaagacttatttttgaaactcatgac

SEQ ID NO: 37272 - DNA, 407 bp, Glycine max
  Clone ID: LIB3055-007-Q1-N1-A5
ggtgtgcagaagagcgtcgcagttgtaaccctaatcagaagaagcgcagcttcaagcgagtgacagccaccagccatgggtcgtatgcacagccgcggtaagggtatatcctcttctgctttgccctacaaaaggacacctcctagctggctcaagatctcttcgcaagatgtcgaagaaaatatctgcaagtttgcgaagaaaggtttgaccccgtctcagattggtgtcattctcagagattctcacggtattgctcaggtcaatagcgtcactggcagcaaaatccttcgcatcctcaaagctcacggacttgcgcctgaaattccataggatctgtaccatttgattaagaaggcagtttcaattaggaagcatcttgagaggaacaggaaggacaaggactt

SEQ ID NO: 37273 - DNA, 414 bp, Glycine max
  Clone ID: LIB3055-007-Q1-N1-A6
gttttctgcttccttaaaatcttcactagcaatgaagattgagtttgtccagtttttcactttacattaccaaaagaaagaactaggaagaatgggagttcagcaaaagctcatttctttcctctttcatacttgtcttgttttcattatgttttcccttgtaagctcatcacaagagcaccaccaaattacaagcagcccttcaaaaaccaaagatagcaaccacattaagatgagtcctggacttcagtttcagattacattacatggctttctcctgtgggcttcaatggggttcttgatgcctgttggtatacttgcaattagattgtcaaacagagaggagagtccaaaaaggcatagagttttgttctatgttcattcaattttgcaggcaactatatcttagtccat

SEQ ID NO: 37274 - DNA, 421 bp, Glycine max
  Clone ID: LIB3055-007-Q1-N1-A7
gtgatgcaatgctcaagctatggcacttgtatttctatttgtatctctcatcgtttcccccaaacctctctatcttttcacgttccagctcaccactggaaccgattcaagagtgcacgaaggaatcagaggatgatggttctttgtagcgtggacgaccgaagctacaacctagattccccgaggaaaataaaaattgtggaacacgtttgtctcctcaaagcaaagcatgatttatctgaagaggaagagaacgacatgcttggctatttgtacacaacgcagtaccaaatgggcggtgttgttgcaatttcattagggcgcatttcttctccaaatcctgagcgctacacgcatgctctctatatgcggtttcagaagaaggaaaatcttgaaaagttttacgagaatcccttttaca

SEQ ID NO: 37275 - DNA, 412 bp, Glycine max
  Clone ID: LIB3055-007-Q1-N1-A8
ctgaaagcgttgaagtagagaacaactagcgagagagagagttgaatgtgaatggggaatcagacgcagatgtggacgcaggacgaagatgatgctctcatcgccggcgttgaaaagcacggtcccggatagtggaagaacattctcaaggatccccaattcgcccctttcctcacttcccgttccaacatcgacctcaaggataaatggcgcaatttgagcgtcagctacggagctcagggctccaaagaaaaatctagggttcccaagcttaaagccctccctgctcctactgctcctaccggcactcctcagaacgccgctcctgctctgcaaaacgcatcatctgatgtcactcgctcagatgcttctcagaatgaccaagatgccaaaaaccctccatggtataatg

SEQ ID NO: 37276 - DNA, 285 bp, Glycine max
  Clone ID: LIB3055-007-Q1-N1-A9
acttatatcatgtcacttaaggttactcacttatgaacagggttgccactgcaattacatagatggctacttcgcttacttatggagctgtactaccatcgattgctattctccaccgcaacgtagcctatgtcaaagctattaagaataccgagggaatgggccctggcacatacaccatgtggattggatggcatccatgatcaaacgctgtgatacattttgaacccgttctagtctctgactatgccatacgatcatgtgaattgaaatgtggatcttgag

SEQ ID NO: 37277 - DNA, 417 bp, Glycine max
  Clone ID: LIB3055-007-Q1-N1-B1
acaattcacagttcatagttcatagtccatattcatacaccgttgctttgttctcgctgcctagcatggcatcaacttctctcttcaacttcagactccctctgttcaacttcaacccactgcaccatcgacggataaagaggccaaaatctctgctctcctctcctcgcaacagtccacgcctcgtttcttccattaacgaccatttggcgctcacacgtgtcacatatccgcttctccaatctcactctgctccgaagcgcagattccacgttggtgtacagaaagagtattctgatggggaaagctctgagtcgattgtttctgacgctacataccaagaagaattttcctggtcttctgtagttcttccgtttctattccccgcattgggtggcttggtatttggttatgata

SEQ ID NO: 37278 - DNA, 395 bp, Glycine max
  Clone ID: LIB3055-007-Q1-N1-B10
atttgatggtttgtgcgcagactggttccggaaagactgcgggggtctgttatccaatcatgaatgggattatgagaggccaagcccaacccctccagaggccccctcgcggcgtccgcatagtctacccacttgcccttgttctctcaccaactagggagctatccatgcagatacatgaagaggctagaaagttttcataccagacaggggttagggtcgttgatgcttatggtggagctccaattaatcagcagctccgggaacttgagagaggcgtggatatccttggtgcaactccaggaagattggtagatttactggagagagctagagtttcattgcagatgatcagatatttggccttagatgatgcagatggaatgctggatatg

SEQ ID NO: 37279 - DNA, 381 bp, Glycine max
  Clone ID: LIB3055-007-Q1-N1-B12
cttaactagtactatgaggttcatgttagtcagttgtggatactctggggctagcaactatagttgcaattaagaacaaaatatgcatgacaatcgtaatcatattctattgtgttattttgcatcatggtgtttgtttgtgtgtgtttaaagttaaagatcttttcatttgtgcccgctatatacatgtgtgtgttttcatacatattagtggacactatgatattaccaataaaggtccatacatagtcctatacaatcacaaatacaattaattatggtggttttattttggggaggggaatcttattttccttctcactaagctttggtgataaccttttggtaatgaaaaatgttaaaataaaaagatctttgttc

SEQ ID NO: 37280 - DNA, 416 bp, Glycine max
  Clone ID: LIB3055-007-Q1-N1-B2
ctctttgatacccttttgttctttttggtgctttaatttgcactagcaagggggttggttttatttctgtttgcttgcaacaatggctgtggctaataagttactttctgttttgatcattgccctcattgccatttccatgcttcaaacagtggttatggcatctcatggacatggaggccaccactacaatgacaagaaaaaatatggacctggcagtctcaaaagcttccaatgcccatcacaatgctcaaggaggtgtggcaagacccagtaccacaagccctgcatgtttttctgtcagaagtgttgtaggaagtgcctatgtgtgccaccggggtattatgggaacaaagcagtgtgcccttgctacaacaactggaagaccaaggaaggaggacccaaatgcccttaat

SEQ ID NO: 37281 - DNA, 421 bp, Glycine max
  unsure (1)..(421): unsure at all n locations
  Clone ID: LIB3055-007-Q1-N1-B3
gcaagacatgcattctggatgattttggcttctatgaggcccgtcagaagactattttggagaagaaagcaaagcaacaattcccaaagcaggtatgggaagggaaacctgctgatgagaagattgagataaatggggaagtcaatactcaaaaatctgaagttagctcggaagtgctcaaggagtcccttgctgagaaggatagtgatgaccacaaagttcccgagaatggatgtgctacaaaaactggagatgccccaaagggtgctaaaccagttgttcctgagagcaagattgtagccaatggggttgtttctaatggttgctaagctctactgtgtttgaaggaggcggtcctatccatttcagtggcatatattggttcttagaagtattntatcagaaacttggtaccgnctga

SEQ ID NO: 37282 - DNA, 403 bp, Glycine max
  unsure (1)..(403): unsure at all n locations
  Clone ID: LIB3055-007-Q1-N1-B4
cccttctaaaaccttatctctttcagttatcctcggccatggcgtctctactgctagcatcaccttctccactctccgttcaattgcacaattccacctgtcacctttccttctctcactcccaaactctttcctcaccgctctccacttcctttccttctctctcagcctctgcaaccaccactctctccccaaccccttctgtgtactgtggcagaggggacaggaaaactgcaaagggaaagcgcttcgctcattcatttggaaatgccaagccaaaggacaagaagaagggtagagggccactgaggccttatgctccaccggcaccttccaaaaaagacaggttcgaagataatgaagtggtgaagattgaaattgacgagtctctctnttctggttg

SEQ ID NO: 37283 - DNA, 418 bp, Glycine max
  Clone ID: LIB3055-007-Q1-N1-B5
tcgtcttcaatcctttcgttattctcttattcatccttctcttctgaataatccagatctctttctgcccttttctccgtcacgcttttcgtgaccggatctgtatggatttgatccagatctacacgccgatggtggttttggccgggtctttcatagatctggtgcgtagaggctcagatctacggtaccgaggtacaacagagaatcgatgacaagaacgcagatccgacggtagatccagccgattccgcttgttcgatcgctacagacccctgtatcggatcattaagcagcgtgtctcgcgcgttctacacgtgttgccgatctcggatgttgtaaaattagtttatgatgtgaagctatggagtggaaaatatgtggatgtaggagatttcgggatgaatggcctcaaaac

SEQ ID NO: 37284 - DNA, 403 bp, Glycine max
  Clone ID: LIB3055-007-Q1-N1-B6
ggaatgttctctcagatttctttgtgtcagttggattgtcagaaaacttgtcagttgcaatctttgcaatggactctctgcgacaacttgcaatgaaatttttggagcgtgaggagctggctaattataacttccagaatgaatttctgagaccatttgtgattgttatgcagaaaagcaacaccacagaaattagagaattaatagttcgttgtatttcacagatggtccttagccgtgtcagtaatgtgaaatctggctggaaaagtgtttttatggtttttacagctgctgcagccgatgagcggaagaatattgtattattagcatttgagaccatggagaaaatagtgcgtgaattttttccttatattactgagacagagacaatgaccttcaccga

SEQ ID NO: 37285 - DNA, 414 bp, Glycine max
  Clone ID: LIB3055-007-Q1-N1-B7
tttgagacgtggctggttcaactgaggtgatggctttgaatttgccttctcccgcccaagtgaagcccttatttttctcttcaaataactccacaaaacttccaggtagcttttctttgaagagaaaagatagtgacacaacagtagagagacgagtttattgctctgccgctgctcaatcaccaccaccagcatggccaggaacagctattcccgagccttctgatttcaagacatgggatgggcaaaaacctatttctgtcttaggatctacgggttcaattggaactcagacactgagtatagtggctgagttcccagaaagatttaaagttgtgagccttgctgctggctctaatattactcttcttgctgaccagattaaaacatttaagcctgaagttgttggtctta

SEQ ID NO: 37286 - DNA, 412 bp, Glycine max
  Clone ID: LIB3055-007-Q1-N1-B8
ctgggttgctttttgtccatctgggttttggacatcacattctctgccctctctttttctttgtgatagaacaaacaagaccaataagagaacagggagaggaaaaaaaaaagaataagctattcttttttttttttatgggtttttgtttataaatattgttaaatcaatcttttttttgttcaattttgatcttttatataatagttcctctcttgattgcttgatcctttagactatcatcaccgtctcattcatcgtggcttcgtggggtgtgataaagttgctaaattttcgctgattcttccaaccctactttcaaaaacggttcctttctcttgcaccctctgtctccatccatatagaaacaagagagtttccgtttctgttcatttagccatttttgcatacc

SEQ ID NO: 37287 - DNA, 395 bp, Glycine max
  unsure (1)..(395): unsure at all n locations
  Clone ID: LIB3055-007-Q1-N1-B9
atttgatggcttgtgcgcagactggttccggaaagactgcagcattctgtttcccaatcatcaatgggattatgagaagccaagcccaacccctccagaggccccctcgcggcgtccgcatagtctacccacttgcccttgttctctcaccaactagggagctatccatgcagatacatgaagaggctagaaagttttcataccagacaggggttagggtcgttgttgcttatggtggagctccaattaatcagcagctccgggaacttgagaagaggggtggatatcctttgtgcaactccaggaagattggtagatttactggagagagctagagtttcattgcagatgatcagatatttggccttagatgangcagatagaatgctggatat

SEQ ID NO: 37288 - DNA, 412 bp, Glycine max
  Clone ID: LIB3055-007-Q1-N1-C1
gaaaaggctggtttatctgcatggtgctatatgtgaagcgttgcgtctctttcctcctataccctttgagcgcaagcaagcaataagctctgacatgcttcctagtggtcatcgtgttaattccggtacaatgatattattttctttgtatgcaatgggaagatttgaagaaacatggggaaaagattgttttgagttcaaaccagagaggtggatctcagagaaaggaggtattgtttatgtaccatcttataaattcatagcttttaacgcaggacctaggacttgcttgggcaaagactcatccttcattcaaatgaagatggtggcaactgctattttgcacaagtatcgtgtccaaatggtggaaggttttggtgctactccaagcctttcaattgttcttcttatg

SEQ ID NO: 37289 - DNA, 380 bp, Glycine max
  unsure (1)..(380): unsure at all n locations
  Clone ID: LIB3055-007-Q1-N1-C10
aggcagattgttgtaatactgattcatgttaactcacaggtaagtgtagaacacactgctgaaacacctaccattgatgtgagctcagatgaatctcatggtgatggatatgatgacagtgacaagagaatccatgacatgaccataattaacatgcagctaggatggaatcctaagacttcactttgggacctgcttgaatccactctgacatatcagcacaggacatatgctgaagccgataacaaagtcattgcaaaacccctcgtaggttaagctattacagtgatggtgatgtgctactcttcgaaaaangtgaggtcttgccccaagtgttgtgacatattctactgcttgggcttatataaaatcgtacattt

SEQ ID NO: 37290 - DNA, 352 bp, Glycine max
  Clone ID: LIB3055-007-Q1-N1-C11
agctaaaccatattattacacacacatgctaacaagcaggggggcttatacaatgcagctgaaacatctacaaaagaccgcgatctgtctcaacctcactgcgatggacatcatcaccgtgtccacagaatgcctgccgagactctagctcacacgcagctcacttcgcatcctaatacttcactactggatccaggtcgactacaatctgacatcacagcaacctgacctgatctggccccgaattcaaagacatcgtactactcctcatgaggcaacgtattccagtcatggtgatttcctatgagctcgacagagaggtcttgcacacgcattgcgtcatattctactg

SEQ ID NO: 37291 - DNA, 396 bp, Glycine max
  unsure (1)..(396): unsure at all n locations
  Clone ID: LIB3055-007-Q1-N1-C12
ggtggcaaaggagttgtggaaaatgtgcctacaaatagctccctgaaagcacatccacgctttcaagccgagaacttagacaagaacaagaatatatatgaacgaattgaaggccttgctaagaagcatcaggccactcctgcccagttggcattagcatgggtacttcagcaaggcgaggatgttgtacctatccctggaacaactaagattaagaacctggatcaaaacataggtgccttagcagtgaaactgtcagaaaaagacctgagagaaatttctgaagcggttcccattggtgatgtagcaggtggtagatactacaatggattggatcacttttcatggaagtatgctaacacacctncaaaagattcanaaatctcaacctgacgc

SEQ ID NO: 37292 - DNA, 407 bp, Glycine max
  Clone ID: LIB3055-007-Q1-N1-C2
tgaaattatcaaggttttaggtaccccaacaagggaagaaatcaagtgcatgaatcctaattataccgagtccaaatttccacaaattaaagctcacccatggcacaagatctttcacaagcgcttacctcctgaggctgtggatctcgtctcaaggctactgcaatactctccaaatcttcgatgcacagctctggaagccttggttcatccattctttgatgaactgcgtgatccaaatacccgcctaccaaatgggcgttaccttcccccactctttaacttcagagccaatgagcttaaaaggatgccttcaggcatgctggtgaaactgattccatctcatgcaagaaagcagtgtgccttggttgcgtcatagtgtagcctcgtgtaaatattatctactc

SEQ ID NO: 37293 - DNA, 402 bp, Glycine max
  Clone ID: LIB3055-007-Q1-N1-C3
cacttccccactctctcacatattgcctctctctttcctgtttccattgtccatggcgtccctcatcgaatctggctggcagtacttgatcacacatttcagtgactttcaactggcgtgtttgggaagtttctttctacatgaaggcgttttcttcttgtctggacttccctttatatggcttgagagggcagggtggatgagcaagtacaaaattcaggccaaaaataacacccctgcagctcaggagaaatgtattgttcgtctgttgctttaccattctggtgtcaatctacctgttatgattttttcatatcctgtcttcacatacatgggcatgcggagtagtcttcccctaccgtcctggatagtagttctaattcacataatcttttacttcat

SEQ ID NO: 37294 - DNA, 413 bp, Glycine max
  Clone ID: LIB3055-007-Q1-N1-C4
ctttataaagcatgattcatcatatcatatatgatatatcttctccttcacaagtctttctttatcaattatcatgctatctttttatatatgtggtttgtgtgatacaggaaagcttaagatatttttaatccatactttggaaaagatgatgaggtgtagttggaccatcttatagcttgataatgacaacagaatttggattctttaactgttctttatgtttgaacacattgagttgcttcaaccttcaaacgggtcttggttcagtgtgatgattagcaatctgtactattttagcactcatgttgtaccagtatcttccaccaaagaagacacaacgtcttcgtttctccctggaagtgatctgacctaaaccatcatcatcatgaattcatgatcatcatcttttt

SEQ ID NO: 37295 - DNA, 413 bp, Glycine max
  Clone ID: LIB3055-007-Q1-N1-C6
tgcttatactggagaggttagtgctgaaatgcttgttaatttgggaattccttgggttattattggtcactctgaacggaggcagcttttgaatgaatcaaatgagtttgtgggagataaagttgcctatgcacttcaacaaggtctgaaagttatagcatgcattggggaaactcttgaacagcgtgaagctggtacaacaacggctgttgttgctgagcaaacaaaagcaattgcagctaaaatatcaaattgggacaatgtcgttttggcctatgagccagtttggccattggaaccaggaaaggtggcaactcctgcttcagctcaagaggttcatgctgatttaagggaaatgggttcatgacaatgtgagtgctgaagttgctgcatctgtaagaattatctatgga

SEQ ID NO: 37296 - DNA, 409 bp, Glycine max
  Clone ID: LIB3055-007-Q1-N1-C7
ggcgctgacaaggcttttggccgtgacattgttgacgcacactacaaagcctgtatttatgctggcatcaacatcagtggaattaatggagaagtgatgcccggtcagtgggaattccaagttggaccttcagttggaatctcagctggtgatgagatttgggcagctcgttacatcttggagaggatcactgagattgctggtgtggtggtttcctttgaccccaagccaattaagggtgattggaatggtgctggtgctcacacaaactacagcaccaagtccatgagagaagatggtggctatgaagtgatcaaagcagcaattgacaagttggggaagaagcacaaggagcacattgctgcttatggagaaggcaacgaacgtcgtttgacaggacgccacgaaa

SEQ ID NO: 37297 - DNA, 305 bp, Glycine max
  Clone ID: LIB3055-005-Q1-N1-E6
cccaaacccacagcacaatatgctatgctatgctctctaaggcgcattcgtcgtcacgctcctttccaccacactctccgctctatcttgccgattaaccgtttatcctgctcctgctcctacttagcctacgtcgccgccgccgacgacatggttgctcacgcgaaggacgaggcgtaccttatcgcggcgattccgaagcgcgtccgtctcttcgagaccatccatgcggagcagcgcacgcagcgactatcgctatcgccagatcctatcatggttactctgcccgacggcaacgtcaagga

SEQ ID NO: 37298 - DNA, 409 bp, Glycine max
  Clone ID: LIB3055-007-Q1-N1-C8
ccttactgctaccccaaaccacatcaaaacccatgcctcaaacgccttcaccatcatcagcaaaacccacttctcaaagtccttcattgttcttcttcacttcatctgctccactttccgcactccaaagttccactgcacaggttgctcaggggcacacaccaacaacaggtgccagagacgagcttcagcagcagaaggatgagttttacctcaatcttggcctcgctgtcaggaccctccgtgaggacatgcccttcatcttcgtcaaagacctcaattatgacatttacagggatgatataacattcaaagaccctttgaatacatttactggtattgagaagtacaaattgatcttctgggcattgaggtttcatggtaaaattttgttccgtgagattgctct

SEQ ID NO: 37299 - DNA, 407 bp, Glycine max
  Clone ID: LIB3055-007-Q1-N1-C9
aactgaaccaaatcatcacacacacatactaagaagcaacaattcttctacaatggatctcctccttctggaaaagaccctcataggtctcttcctcgctgcggtggtcgccatcgccgtctccaccctccgcggccggaaattcaagctcccaccgggcccactccccgtcccaatcttcggcaactggctccaagtcggcgacgacctcaaccaccgcaacctcaccgatttggccaaaaaattcggtgacatcttcctcctccgcatggggcagcgcaacctcgtcgtggtttcttcccctgagctcgccaaagaggttctccacacgcagggcgtggagttcggctcccgcacccgcaacgtcgtcttcgacatcttcaccggaaagggccaagacatggtct

SEQ ID NO: 37300 - DNA, 289 bp, Glycine max
  Clone ID: LIB3055-007-Q1-N1-D1
tttctctcttctcgactcgatcccaattccactagggattcaattccgatgcgattccgagcttggtagatccacgacaagggttcgtttcccagattcttttggaaaaaaaaattctttctctggccaacaggtgagttgtaaaaaaatggaccatgacaagactgggtgccaagcttcttctgaaagtgctatattgtgcattaacaactgtggggtttttggaaatgcacataccatgaacatgtgttctaaatgcgccacagacacattgctgtgacacgagcac

SEQ ID NO: 37301 - DNA, 368 bp, Glycine max
  unsure (1)..(368): unsure at all n locations
  Clone ID: LIB3055-007-Q1-N1-D10
attagtttggagaacagtgtttgttatcataaccacttttgtagcaatgttgattccattcttcaatgacgttatgggacttcttggagcactggggttttggcctttaagtgttattctcccagtgcagatgagtatcaaacaaaagaggaccccaaggtggagtggtagatggattggtatgcaaatcttaagtgttgcttgtttcatagtatcagttgcggctgctgttggctcagttgccagtatcgtgcttgacctacagaaatacaaaccgtttcatgtagactattaaactccatccaccctctcctagcaaaggctaanaactgatgtgggcagtgattgggggttggataatctttggt

SEQ ID NO: 37302 - DNA, 411 bp, Glycine max
  unsure (1)..(411): unsure at all n locations
  Clone ID: LIB3055-007-Q1-N1-D11
tttttaatcacctggtttttttttttaaatttgaaggagatccaatccaaatgcatcgaatgccaatcacctgaaattccgccagatctctccctcttacacgctcttgataaaccgaaacgaagcaatagctatagcatcacacacacacaccaccgctagggttagggttaagggttgggggggttccgaagtaacaacaatggcggtctccgacggcgtcgtgaagaaaatcgtcctctcctacacctacgtcgcgatatggatcttcctcagcttcacggtcatcgtgtacaacaagtacattctggatcgcaagatgtacaactggccctacccgatctcgctcaccatgatccacatggcgttctgctccttcctcgcgtacattctcgntcgcgtcttgaagct

SEQ ID NO: 37303 - DNA, 237 bp, Glycine max
  Clone ID: LIB3055-007-Q1-N1-D12
cttggtagctatgaagatgtagaggaaatcaaggctctttactctgctgatgaaaaataggaatgaagctggaagaaagctatctttgtctttcgctactcacaagcaattgttatctaattgttacacatgtcatgtatatgttaagaaaagttattaatgttttgtgatttagaaaaattattttattccttatatctaaatattttaaaatttaataataattataatttatgc

SEQ ID NO: 37304 - DNA, 412 bp, Glycine max
  unsure (1)..(412): unsure at all n locations
  Clone ID: LIB3055-007-Q1-N1-D2
ctctctctctctctcaactcccaattactttgttgcatttcacacaccaacttcccatagaagagagaagagagaagagactcttccttccatcctgcaactcaaatcatcatgcaagactccagctcaatgaagatctcccctctggatctcatgtccgccatcttcaagggcaagctcgacccctccaacgtctcctcctccaccaacgccgccgccgccgccttcctcctcgagaaccgcgacttcctcatgctcctcaccacctccgtcgccgtcctcatcggctgcgtcgtcgtcttcatctggcgcagatcatcctnccccaaggccaagcctctcgagcctnctaaacgcgtcgtcgagaagcttcccgaaatcgaagtcgacgacggcaccaagaaggtcacca

SEQ ID NO: 37305 - DNA, 416 bp, Glycine max
  unsure (1)..(416): unsure at all n locations
  Clone ID: LIB3055-007-Q1-N1-D3
acacaacgcgcactctctcttttctctcttaacacaaaaaccctatcgttcttcgcggtttcgccgattctcgccatgccgaaagccaaatccgacgccaaagccgccgatagccggttgaagcgcaagggcgctggtgctggaaggaagcaatcgaagaaagctgctaaggatcctaacaagccaaagagacctccaagcgctttcttcgttttcatgtccgagttcagagagcagtttaagaaggagcatcctaacaacaaatccgtcgctgttgtcggtaaagctggtggtgacaaatggaaatcgctgtctgatgctgaaaaagcccccttcgttgccacggccgaaaagaagaaacaagagtatgagaaaactatnntggcttacaataagaaattggaggggaagaattc

SEQ ID NO: 37306 - DNA, 417 bp, Glycine max
  unsure (1)..(417): unsure at all n locations
  Clone ID: LIB3055-007-Q1-N1-D4
cccaatctttgcctggctaaggaaaaacaaaaccggaagcgctcactaggcagccatgccaatttggcagttgtgtccaaacatccattccgttcctcaaatcgtagcgtgcacccgcaacgacaaaacgggatcgaaatccgtttcagggagacccaaggtgagccctcaactgaaccggtggttcagagcccgagccgtgcggtccggtcagaaattggaccggtccagtctccgaacccaacccccggagcccaaccctcctgtacgtccacttcctctcccggtggacccagacggcgccgtcaatttggacggcgcagatgtcatgaccgtcaagtccatctatatagtctccgacggaaccggctggaccgncgaacactgcgttaacgccgctttgggtcagttcgatta

SEQ ID NO: 37307 - DNA, 415 bp, Glycine max
  Clone ID: LIB3055-007-Q1-N1-D6
gttctatctgtgacgagcatcatggcctcaagagcagtgttattgttggctatgtgtgtgcttccggcgatggttgtggccattcgcccagcaaagaaccctttttgcgtgaagggtcgtgtctactgtgacccttgccgtgctggttttgagacctcagctaccacctacattgctggtgctgagattatgttgcaatgcaagagcagggttagcaacgaggttgtgtacacgaagaaggggtacaccgactcaaccggagcatacacaatgtacgtggatgaggatcacgcagatcagatctgcagtgccaagcttgtaagcagccctcaccctcaatgcaaggaagtcaccccaggccgcgacgaagccgtcgtgattctcacccgctacaacggcattgccttcgacgata

SEQ ID NO: 37308 - DNA, 374 bp, Glycine max
  Clone ID: LIB3055-003-Q1-N1-F1
gccgtttgctccccaaaaaggaaagaagcagattctgtcctgtgaaatcaacaagaaaagatgtcaggtgaagaggtagctgttgcagttgaggtacctgctacttcaattccaggtgagccaatggacatcatgactgctctacagcttgtgctgagaaaatctctggcctatggtggtcttgcacgaggtcttcatgaaggtgccaaggtgatcgagaagcatgctgcacagctctgtgttctagcagaagattgtgaccaacctgattatgtgaaactggtgaaggctctttgtgcagagcacaatgttagtcttttgacagttccaagtgcaaagacccttggagaatgggctggtttgtgtaagattga

SEQ ID NO: 37309 - DNA, 385 bp, Glycine max
  Clone ID: LIB3055-003-Q1-N1-F10
ccttctcgcactgccatttgaaacccctgacccgaatcgtttccttgctcctcatcctctgcctcagtctcccaggatccaatataaatggaaatggaagcttcaaaatttatggctacaacgaactgaagcctctatcagacttagcttgcccgggttagtggaagaatttggggtgaagtaaagtgaaaaattgccttacgttagaaacgtgatcaagttccatggaagaagagcatcaatgttctggaagtggtgaagaaccacagacacaggaaccagatggagaagatcaacagctgcagcatcaatgccaagtacctcgagctgaagagaaattcgtattgcaatttatggattcgatggataactacctatccctctt

SEQ ID NO: 37310 - DNA, 368 bp, Glycine max
  unsure (1)..(368): unsure at all n locations
  Clone ID: LIB3055-003-Q1-N1-F12
agacagaggttagagaaagagagggagtaagtgggtaaaggaaagagaactaaagaaacaaacctaacacaacacaaatccttgaaacgacgacggaaatggccgtttcgagctcgcacatgcgtttcacctttgagtgccgctccgatcccgatttctcgccccccccgccgtccttcgacaacctccgccgccgcaacttccgctcctccgcaggatccggcgcggcgtttcacggcatctcctncctcatcctccgcttccctcccaacttccagcgccagctaagcaccaaggcgcgccgcaactgcagcaacatcggcgtcgcgcaaatcgtcgccgcttcgtggtcgaacaacagcgacaac

SEQ ID NO: 37311 - DNA, 238 bp, Glycine max
  Clone ID: LIB3055-003-Q1-N1-F2
ggcacccacaagtcattaaacttcgattgagtttcaaaggggtcacaggtagtgtggtacattggggtggtccagggttggaccaaagaagtttgtggcactattaaaggtggttgtgggcaaaggttcatctattctgaaagggacccaaaggtttaagcttctgtaccatgattaaaaatggatggaaggcttcaaggccctaatggcctaacccaaacccagttgacccatccct

SEQ ID NO: 37312 - DNA, 323 bp, Glycine max
  Clone ID: LIB3055-003-Q1-N1-F4
aagaaagagtgttggataatggaaactgagacagagcccaatggaaccgagtcagatttgagcgagttgactcgcgagtgccctataaacattctatgttgaattaacgttcaagatcgattgcgctgcaccaatctcgtttggcagttatgggtcaacgtgttcaaaggaacctttttttaatatcgcttcaaacctcacccttaattcgactcggccaccgaatcaactcgctggtggacccccgagttcgaagccaagatcgataacatgcttcgatctgtcgtcgaatgggcccaatcctgtgtcacccatatacgcat

SEQ ID NO: 37313 - DNA, 424 bp, Glycine max
  Clone ID: LIB3055-003-Q1-N1-F5
ctcgagccggtggatgaaccagaggaggcatctcccgagtcaaccgacctaagaaacattagtgagaaacatgttgcaactgcagaatccgtcgcagggtcgaaagtccttctagtgaacagaagggtccactacacctcaaaggtttcctctaaccgtgccacgtggtctaatgttctcgcagtttctgccgctgtattggtctcagcaatactccttgttaatatatgggcatatgtcagatcttaaactgcttacatgtagtggaagatcatttcttttgtgcgaaatttgcctccattgcttttttgcccggttaaagaagcgtgtaggattgacttgttctgacttggtgataacaatgttggacaatatatatgggcatatgtatgtagtagtcattccacaatatggtagcataact

SEQ ID NO: 37314 - DNA, 421 bp, Glycine max
  Clone ID: LIB3055-003-Q1-N1-F6
accctttctgcccctcagtcactctccctcacctataccttcagccacactggaccaccacaaacttctcctcctcagcatcatatcttctgagttctgagtgttccattccaattccaagttacaacttggctgtgtctatggatcgcgctcagcttctgttgctgggtgtacccctcttcctcttctgctctgacctcttctcccttttcactcatcatccaccgccgccaccccaccaccaccaccaccaccaccatcctcacccgccgcaccaccaccaccacccaccggaccaccatcaccacccaccccaccaccaccatcatcacccgccccaccaccatcaccagccggtgacaatagatttccctcccgagaaacccaccaacaatattgcaacttcgggtctcggcaacac

SEQ ID NO: 37315 - DNA, 425 bp, Glycine max
  unsure (1)..(425): unsure at all n locations
  Clone ID: LIB3055-003-Q1-N1-F7
ctcggttaacttatggaactattggtgggaggtttaagaaaggagaaaacccgtttgttgaggaggcgtatcagcgagtggcattggaccaactccttaagatagctggtattacagatgatgacttgttgattatgtcagatgttgacgagattccgagtgctcacactattaacctcttgaggtggtgtgacgacgtgccttcagtccttcatcttcagctgaagaactatctatactcctttgagtttctcatggatgatggcagctggagagcttctgttcacagatatcagagtggtaagactaggtatgcacattaccgncagtccgataacttattggcggatgctggttggcattgcagcttttgcttccgccatatcagcgatttcatctttaagatgaaagcgtacagtcataac

SEQ ID NO: 37316 - DNA, 413 bp, Glycine max
  Clone ID: LIB3055-003-Q1-N1-G1
catgcattaagccacgtgaccagcattgtctcatttgctgcagtcgctggctctttgactcataccattaaagctcttgagccattcttcactgctgctgcttcacagttcatacttggccaatcaatgcccatcactctgtggctgtcactggctcctgttgttattggtgtgtccatggcatctttgaccgagctctcattcaactgggtcagcttcataagtgctatgatttcaaacatttccttcacgtaccgaatcatctattcaaagaaagccatgactgatatggacagtaccaatatctatgcctacatttccatcattgctctaattgtgtgtataccacctgtcgtaattttggaagggcccacactgttgaagcacggctttcatgatgcttttgctaaagt

SEQ ID NO: 37317 - DNA, 152 bp, Glycine max
  Clone ID: LIB3055-003-Q1-N1-G10
agactcgagatctgttcttggcaggagggatacagagagggggaacagtccggtggtggcacagcgtttgtcaactgatcataatgtagctgatgaggaggtgctcttgcacctatgatcaaactaaaatgtgtaagccagctcttgctact

SEQ ID NO: 37318 - DNA, 399 bp, Glycine max
  Clone ID: LIB3055-003-Q1-N1-G11
gtccaccaggttggggattggcaggcctcctggatgtgcctttggaagggtctgtggccctgggttctccattcacttttgccactacattagagcaggaatacaggagtgatatctttggggagagaggcattttacttggtgctgttcatggggttgtggagtccctgtctaggagatacactgaaaatggaatgaacgaagatctggcctataagaatactgatgagtctataacaggaattatatctaaaaccatctcaactaacggcatgctagctgtatacaatgctttatctgaagatgagaaaagggaatgtgagaaggcttatagtgcttctttatatccttgcatggaaattctgtatgagtgctacgaggatgtagccagtggtagtg

SEQ ID NO: 37319 - DNA, 354 bp, Glycine max
  unsure (1)..(354): unsure at all n locations
  Clone ID: LIB3055-003-Q1-N1-G2
gcatagaagagagggtggaatggaagtagctcccatcgtgggtttcctggtcagaggccccaaagggttcgccttcggcatcttacaagctcttcatggcaacccttgcttctactttacccggcaagaggacctcttcgagctctcattgaggcttatggaatcaaacatctcaaacatctnggagcgtttctcacttcgttgatgatcacggtgcttacaaggttgacattgtggctatggagcattatgagccaccagtactagctggtgctcttaatgaagttcttaataaaattactgaagataaatcctncttgatacctacacttttggtaccatttttggtggaat

SEQ ID NO: 37320 - DNA, 328 bp, Glycine max
  Clone ID: LIB3055-003-Q1-N1-G3
ctcgagccgcataatctgtggctgaaggacatgttatggtagccaagtcttttcgcctttatttgggagctagcctacattcatgggtttaattgaaagccttccaaattaatttggaaaaaaagtttcctttcaactgttttttttcctgcccaattaaactattaaaagcaagagaatggctgtgagaaaagatggtctagaaatttttcatgggcacaagaatcacattgatgaaaaatttgcatgccaaaacctacatcaggtgtctttgttgatactatagattggtcaatccaaaatgaagttgcagcagctctctctgatg

SEQ ID NO: 37321 - DNA, 369 bp, Glycine max
  Clone ID: LIB3055-003-Q1-N1-G4
aatctccaatgggattcatatttgagtcagcctgggcaaattgcgggtaaaccttctcatttttgtgcttgctagtcatgttgttggctcttgctggtacctcttcggtcttcagagggttaatcagtgtttgcgggatgcctgccatagttctaatatacctgaatgcatgaagttcattgattgtggacgtggccatggaaacaatcagcctggcttaagatcagatcagtggatcaacaatacccaagctgtcgcttgtttggatccctctcctgatggtttctcttacggaatttatgagaatgctgtaccacttactatagaaactaatgttgtcaagaaatacgtgtattctcttttttgggg

SEQ ID NO: 37322 - DNA, 404 bp, Glycine max
  Clone ID: LIB3055-003-Q1-N1-G5
gctcttttaaagttctggcccgaaccctttctttcgtcacaatcacaacttggtaaaggtactccgtgcaagaaagatgaagctcgagttcgcaaatgtgctacttctgtgccttgtccttagctcttctttcttggaaatctcaatggctggttctcctttctgtgactcaaagtgcgcgcagaggtgtgccaaagctggggttcaggacagatgcttgaggttttgcgggatctgctgcgagaagtgcaactgtgtcccatctgggacttacggaaacaaggacgagtgcccttgctacagggacatgaagaactccaagggcaaggacaaatgcccttgaagaatatctaatttcatcatcacactccattccaataaactaccttgtattgtatcttcag

SEQ ID NO: 37323 - DNA, 411 bp, Glycine max
  Clone ID: LIB3055-003-Q1-N1-G6
gttccgcaatgagtgaacccagatagagagatagatagtggcgcaatccgggtttggtttgtccccaaataacagaaaatgactatgctttccaagatatcatcatcactgttactatcactatcctccaaacccaaacccaaacccatttgcaacccctttctgctatctcgttcagccgccacagaacatcagaagaataaaaaggagaacgcaaaagcagcgttggcgaatgagaagcgcagaacccgttccgataagcagttcaacagagacgcaataatcgagcgttgcagaataaacgacattgacaccgacaccaagttctctcacgttcccgttatgctgagcgaggtcttggacgtctattccaactccacactaaccttcttcgtcgatggcactctgggc

SEQ ID NO: 37324 - DNA, 408 bp, Glycine max
  Clone ID: LIB3055-003-Q1-N1-G7
gggtaagtaaattgggaatggtggtggtagtgccaggtgtctgtctgaggagaaaatagaataaaaagctatgaaattttggcacaaggtctgattgtagaattgaagaagatgactggggggggtatcactatgcaatcgacgccgggaagctcaggatacttggatttgtatccagagcggaagatgtcctttttcaaaaatccttacattctcggactggctgctgtcgccggcatcggtggtctcctcttcggctacgacactggtgtgatatcaggggctcttttatacattaaggatgattttgaagaagttagaaacagcaatcttctccaggaaacaatagtcagcatggctattgccggggcaatcgtgggagcaacattgggtggttggattaatgat

SEQ ID NO: 37325 - DNA, 424 bp, Glycine max
  Clone ID: LIB3055-003-Q1-N1-G8
gaaggcgaagaagaagctcagaggcttcatcgctgagaagagatgcgctcctctaatgctccgtttggcatggcactctgctggaacttacgacgtgagctcgaagaccggtggtcccttcggaaccataaagcacccctccgaactcgctcacggcgctaacaacggtcttgacatcgctgttaggcttttggagccactcaaagcggagtttcctattttgagctacgccgatttctaccagttggctggcgttgttgccgttgaggtcaccggtggacctgaagttcccttccatcctggaagagaggacaaacctgagccaccaccagagggtcgcttgcccgatgccactaagggttctgaccatttgagagatgtgtttggcaaagctatggggcttagtgaccgagatatcgttgct

SEQ ID NO: 37326 - DNA, 372 bp, Glycine max
  Clone ID: LIB3055-003-Q1-N1-H1
ccgctcgagcggctcgagcggctcgagattctcttcactttgaagttacatagtttttcattgttttacttaatctacaatggctgcttcaacaatgactctctcttcatcatcattggctggccaagctatcaagcttgccccctccacccctgagcttggtgttggaagggttagcatgaggaaaacagcctccaagactgtttcctcaggaagcccatggtacggcccagaccgtgtcaagtacttgggcccattctctggtgagcccccatcctacctcactggtgaattcccaggtgactatggttgggacactgctgggctttctgctgacccagagacttttgccaaaaaccgtgaactcgaagt

SEQ ID NO: 37327 - DNA, 398 bp, Glycine max
  Clone ID: LIB3055-003-Q1-N1-H4
acgagcttgctgtgctcagatccctatgcagctctcactctggccaaatctacatcgagttcctttccaatttccactttgaattccgcttaaccatctttcacttaaggcacccagtgtcaacaacccttggtcctaagaattttccaacactttaacttaattggggtggaccattacaagcaccaaagccgcttaaatgccggtcccgagaggcccccaaaaccccagtgcaataaggcctgcacctgaagttgcagcttctgcatctgatcgtccatcagctgaaagactcttagaatctgaagatgctttgtggagatctttaaggccacatactatacctggtacagcactaagttcattggtaaaccaaccttatttacctatagctgctg

SEQ ID NO: 37328 - DNA, 342 bp, Glycine max
  Clone ID: LIB3055-003-Q1-N1-H5
caaaactttgtccaccccatcatttgtcttctcaattctcatgactaacacacaagtgtgcgttgtagatttctcagtttgcaacatatggcttccatcatcatgtcatttgctccagcaactggtagagtctttgcagccacagcagcaaagggtgctggtggaagcaaagagaagggtcttcttgattggataattggaggattgcagaaggaagaccagctggtagagactgatcctatcctcaagaaggtggaggagaagaatggaggcaccaccaccaccaccactggccgcaacaagaactctgtggcagtgccacaaaagaagaaaggtggcttt

SEQ ID NO: 37329 - DNA, 424 bp, Glycine max
  Clone ID: LIB3055-003-Q1-N1-H6
tcccttcttattcgtcgttctgttcaattcctcgccgagtagttcgtacagatgctactaaccggtgccgttgatccacgcgccggcgaccttccgttttgattcaccggcaccgatttggtacagtaaactcactccttcttcttcgatctgcgatttgccgttttgtttcccgaacaagtgagcgaagaccgacacttcgaaatctcgctttgcgttatttgatttgagtgtgatttcactgtgttcagggctcggcgtttctgattttcttttctcatgcatttgcaagtaactcagaggctttggtttaattgtctctcctattgatgggtgtgcaatgtattctgttttctcggagtttaaattgtgtttgaaaaattgcttgctaactcgagtattcggagtggttgcattgaaacag

SEQ ID NO: 37330 - DNA, 424 bp, Glycine max
  Clone ID: LIB3055-003-Q1-N1-H7
gttggtatggagcagtttcttcacaatcccagcaagttctcctctgatgtccagcctgtactgcaatcatcagggtatacgcctccactatatgctacagcagcagcagcttatatgacctcagcaaatccattttacactaatttgcaggcttcgggtatatattctccgcaatatataggtgcatacccttttagtcccacagctgttcctccatatattgctgcataccctcctcatggttctgtaccacttgttgacggggctactggttctagttttactccccaagcaccaaggatttcttctactggaagaaacatttcacacggagcttgaatgatgcatgcaaacaagttttttggacaatttggatttcctctgcagccttcttttagtgatcctatttacatgcaatatcatc

SEQ ID NO: 37331 - DNA, 415 bp, Glycine max
  Clone ID: LIB3055-003-Q1-N1-H8
atgatcttgaattcattcgtgacgtgtgcaatactcaaattggaaaatattacggtccgtgtgttcctattatgtaactatgtatcattaatcttgttctaatggtcggggctctagtaccttggaaaatcatacagttacctcacggcgagttagctgcacccacacatgatataaatactaccgttgctttagctctacttacatcaattgcatatttctatgcaggtctttcaaaaaaaggattagcttattttaataaatacatccaaccaaccccaatccttttaccgattaacatcttagaagatttcacaaaacccttatctcttagttatcgacttttcggaaatatattaactgatgaattagtagttagtgttcttggttctttaatacctttagtagttcctat

SEQ ID NO: 37332 - DNA, 287 bp, Glycine max
  Clone ID: LIB3055-003-Q1-N1-H9
ctcttaatccccaatttctaagggtttaatcaatttcccaagggcttctgcaaatgtggagtaccgttgctttgtcggtgggctcgcttgggccactgacgaccatgccctcgagagagccttctctcagtacggcgaaatcgttgaaacgaagattatcaacgatcgtgagactggcagatccaggggttttggatttgtgaccttcgcctcggagcagtccatgaaagatgcgatcggagcgatgaatggacagaacttggacggccgtaacatcactgtcaatg

SEQ ID NO: 37333 - DNA, 239 bp, Glycine max
  unsure (1)..(239): unsure at all n locations
  Clone ID: LIB3055-004-Q1-N1-A1
ggaaagagaaaccatggccaatggttcaattccacttccacgggacggtttcttcaaacccaattactcgacaaaacgcccatgtttcaacccttcagcttcaacactcaaaatttcttgctctggaatggctgaatttgatggatctcatcagaaaaaaggaggtttggttaatttcaatggaatcaagggcgtggcttgtggtattcttgcagcttgtgctgntacttctgctgcat

SEQ ID NO: 37334 - DNA, 337 bp, Glycine max
  unsure (1)..(337): unsure at all n locations
  Clone ID: LIB3055-004-Q1-N1-A10
cacattttggcgaaaaacctcagcgtagttcctaacactacgctcttccgccgattattcttcctctgtgccctagcttctcttccgccgctgtcaacgaccgtctcccttgccgcttccggcaccgaacgaacagtctccggccaacttcagctcttgcgtgcgaaaattctcggaatattttgaatccaggaaatcatgcacgctccagttctagttctcaaggactctttgaaacgagagtctggatctaaggtccgctatgctattattcaagcggcanaggctgttgctgatgtagtccgaacaacattgggacctaggtccatgctaaaaa

SEQ ID NO: 37335 - DNA, 380 bp, Glycine max
  Clone ID: LIB3055-004-Q1-N1-A11
aattgcataagccttcctaatttaccagaggactttggtaatctgtttaacctacaaaatctctacatgacaagttgtgcgaggtgtgaattgccaccctcaatcgccaatcttgagaatttaaaggaggtggtatgtgatgaacagacggctgcatcatgggaagatttcaaacctatgcttcccaatctaaagatagatgttcctcaagttgatgttaacttgaattggcttcatacaatgtcctgctaatacttgcttcatgcagttcatgttgtctttccaagaagtcaatgaatgaactaaatacacttttcacattggattgtattgtggtaaacggaaacgtcctttattaatcagtgctgaacgagaatctc

SEQ ID NO: 37336 - DNA, 370 bp, Glycine max
  Clone ID: LIB3055-004-Q1-N1-A12
gttatggcactggttgcctttttagcctctgctgttggaccaagagtagctgcaacttgtgctcatgcagctttagcttcattgtcagggaataattctgggagcacggcacatatagaagcagtggaaaatgataatcggacaaattcagaaagtatacataatagagatggtggccatgatggagaggttgcaaattcaaatcagaaaaataaggacatgtcaaaagtacttggttcatgtggtcaacatgagggagggtcaatcctcctatctgctgaaaaagtcaaagatgctgccaaaagcaggcctatccgttgcagcaatgaaagctaaatggtttgctgatcatgaaaagcgggaaattcaa

SEQ ID NO: 37337 - DNA, 199 bp, Glycine max
  Clone ID: LIB3055-004-Q1-N1-A2
atgcaagctcttactggttttaagccttctcttagtttcactgatgctgggtgtgaggtcattagattcccttcagaatggaagggccatttccccaacatgccagcgccttaagtggtccaactatgaaggcattcaatttggccaccggttccaaattcggcggtattatttaaccggttggaatttgaacaagccc

SEQ ID NO: 37338 - DNA, 293 bp, Glycine max
  Clone ID: LIB3055-004-Q1-N1-A4
gtttaggtggattggagttatagggatgcaatatttgacctggccacgattaaacctaatcagccaaatgaccttccttggccgatccttgcataactccattgccaatggagaataacaacccctcaatgctttggtcaatggactacattgcatcatctaacgaggaactggatttggagataaatctgccaatcattactactagttcgaccaatattaacctgcccctttacgtcaagcgcataccgccgccacaatctgtgaattctgagccctgagatattccggat

SEQ ID NO: 37339 - DNA, 403 bp, Glycine max
  Clone ID: LIB3055-004-Q1-N1-A5
atttttcaagtaacttaaggtttcaaacctaggaagttggaagtcatggcagcaacattgatggcagcaacaacaagttctggtactcttaaagcaactcctttccttggccaaggcaagggtgccaatgccaatgctcttagggatgttgtctccatgggaactgggaagtacaccatgggcaatgatttgtggtatggaccagacagagtgaaatacttgggacccttctcagctcagaccccttcatacttgaaaggagaattccctggggattatggatgggacactgctggcttatctgctgacccagaagcatttgccaagaacagggctcttgaggtgatccatgggcgatgggccatgcttggagcactaggatgcatcaccccagaagtgctag

SEQ ID NO: 37340 - DNA, 400 bp, Glycine max
  unsure (1)..(400): unsure at all n locations
  Clone ID: LIB3055-004-Q1-N1-A6
gcatttcctcgtttttttcttcccttttctctttctgcggcgacgatctcagattccggccactcctctcgccggcgagcccttactcttccctcctccgtcgagccctctccgattcgaatcgttcccagcctcgcaccaccatgaatcccgaatacgattatttgttcaagcttttgctgattggagattctggtgtacgcaagtcatgtcttctcctgaggtttgctgatgattcataccttgacagctatatcagtaccattggagtggactntaaaatccgcactgtggagcaggatgggaagactattaaacttcaaatttgggacactgcgggtcaggaacgtttccgaacaatcactagcagctattatcgtggggctcatggcattattgt

SEQ ID NO: 37341 - DNA, 403 bp, Glycine max
  Clone ID: LIB3055-004-Q1-N1-A7
tgacaaggtgctcaagcttgggtgcacaccatccattgacagtcaaataccttaacatcccaacaaagtcaaacctcccattcgtgaatttgaccatcaattccttccttcttccatctcttccccctaaagcacacaacaaccctcttcaaatcccttcacagaagcttgcaaaacccttaaactctacaccaccctcatcgatcatggcttcaactaccaccgaagacgacagcgaagtaacctacgacctttccccggtcctcaaagtctacaaaagcggtcgcatagagaggcttgctggcacagcggttcttcctgcgggcctcgaccccgaaaccaacgtggaatcgaaagacatcgtaatctccgaagaaaacggaatatacgcgcggcttttcgt

SEQ ID NO: 37342 - DNA, 356 bp, Glycine max
  Clone ID: LIB3055-004-Q1-N1-A8
ctgaatcaaaccaaacttataaaccatttaggctctcttaaaacaaaggtccctcaaaccactttccccacactctttagtgtgtcatttttttttttgctctttccccacaaagaggtcttggacccttcttctgtgtagtgcaatggccatggctaaggttttctgtgttctgcttctggcactccttggcatttccatgatcacaactcaggttatggcaacagattctgcttatcacttggatggaaagaattattggacctggagtctcaagagctcacagtgcccttctgaatgcacaagaagatgtagccagacacagtaccacaagccctgcatggtcttctgcaaac

SEQ ID NO: 37343 - DNA, 423 bp, Glycine max
  Clone ID: LIB3055-004-Q1-N1-A9
cttttctttgcagcatttctcattctttcagtggccattgatggaacgcaggcagacaccatggtcactggcactgtcttctgtgaccaatgcaaagacggacagagatcccttttcgattatcctattaatggtgcaaaagtaactctgtcctgtgctgacagtaatggacaaattacaatgtcaagagaagaaacaacaaactggtttggaagctatacaatgaggttcgatggcgcacccgacttgagtggttgttctgcccatgtctcgggcagtggtcaagggtcaacgggttgtggtgaagtggctggtccttcacaaaatccaaaactcatgtttaggatgtttgacatggagatgtatacagtggattctctccttgctcagcctgcacaacccatgcagtactgttctacatct

SEQ ID NO: 37344 - DNA, 317 bp, Glycine max
  Clone ID: LIB3055-004-Q1-N1-B10
cttctcaatcgcaaattttctcccccaaatcgtagatctacggctaaattggtgtagtgtggtaagatgggaggaggatttagagtgcttcacttagttaggccatttctctcgcttcttcctgaagttcaaactgctgacaggaaagtgccatttagagagaaggtcatatacactgtgatctctcttttcattttcctggtttgtagtcagctccctctatatgggatacactcaacaacaggtgctgatccattctattgcatgcgtgttattctcgcttcaaaccgtggaactgtcttggaacttggaatcac

SEQ ID NO: 37345 - DNA, 364 bp, Glycine max
  Clone ID: LIB3055-004-Q1-N1-B11
ctttaatgagcagactactgtagtgcttgatggaaagttgatatccatggaaatcagatcaaaaatagctgctaaggtaagacaaatgaagaaaggcctaggaaaagttcctggattagctgtaatcttaatgggccaaagaagggattctcaaacttacgttcgcaacaagataatggcctgtgaagaagttggaatcaagtctttggtgactgaattacccactgattgtgcagtaacagatgttcaaaatgccatcatgagatttaacaaagatccatccattcatggtattcttgtgcaacttcctctaccgcaacatctagatgaagaaaaagttttggatgctgtatgtctaggaaaa

SEQ ID NO: 37346 - DNA, 361 bp, Glycine max
  Clone ID: LIB3055-004-Q1-N1-B12
atccaatcgcaacggtgtcgcttggctctcacacccataccctatctgccgaccgtggtccactatcgtatccgccctgacaggaggaaagtccacgaccgtatctaagagctccgatccctaacttgctgtgaatgacaagggagccgccacctaggcttggaaacctgccggcacagagaacgctatgattgaccgtgtcaagccataaaggccgacaagagctggcatcagaatcatggaacactgcaggaaggcattacacaatgaacatcctgaagacaaagcagagtttcctgctggcaaatctgctgaagcaacatgtaagaccatgtatgatgctgaagaagcaccttatgtg

SEQ ID NO: 37347 - DNA, 364 bp, Glycine max
  unsure (1)..(364): unsure at all n locations
  Clone ID: LIB3055-004-Q1-N1-B5
attacacaagaactctccaaggatcctccttcccacgaaattcatttggtgggaaaatccaagaagagggtggaatttcaagccagggaagatggattatttcaatgcaccaggaagaaaccatctctttgttccggggccggttaacatcccggaccagatcattcgggccatgaacagaaacaatgaggactaccgttctccagcaattccagctatgaccaaaacactgcttgaggatgtcaagaagattttcaagaccataactggaatcccatttctcatccctacaactggtactggtgcttgngagagtgctctcacaaacacactgtctcctggggatcgaattgtatctttcctg

SEQ ID NO: 37348 - DNA, 340 bp, Glycine max
  Clone ID: LIB3055-004-Q1-N1-B7
atcacttcatcatggcttcctcgtgtgcttcctctgccattgcagctgttgccatctccacaccaagttcccagaagaatggatcactcttgggaagcacaaaagcttcttttcttagtgggaggaaactgaaggtgaacaactttacagcaccagttggagcacgatccagcactacagtttgcgcagttgctgagcctgataggcctctgtggttcccaggcagcacccctcctccatggctagatggcagtttgccaggagattttggctttgatcctctaagtcttgcatctgatcctgagagcctgagatggaatgtccaagcaaaacttgtgca

SEQ ID NO: 37349 - DNA, 351 bp, Glycine max
  Clone ID: LIB3055-004-Q1-N1-B8
cagaaaacgaagattcctgcggaatccgcgtcaccggcatggaattctcctacgacgtgcagcaaccgccgctcttcctcgacttcaacctcaacgtctctcccggatcccgctgccttctcgtcggtgccaatggatccggaaagacgactttgctgaagattctggcggggaagcacatggttggaggaagagacgttgggcgcgtcttgagtggttccggttttcacgacactcagctcgtttgtagcggagatctcgcttatttgggcggatcttggagccaaaaacgtggctccgctggagaaattccgcttcaaggagacttctctgctgaacatatgatctttg

SEQ ID NO: 37350 - DNA, 405 bp, Glycine max
  unsure (1)..(405): unsure at all n locations
  Clone ID: LIB3055-004-Q1-N1-B9
agaattcgttgcatcagacttttcagatgctgcagaacgaatgccaggtttctctgaacactgttgacagcattgaaacctttgttgctgatattaatagtggaagatgggatgcgatattgcctcaagtttctcaactcaagcttcccaggaataagttggaggatttgtatgagcagattgtattagaaatgattgaacttcgagaactggatactgcacgtgctattttaaggcaaacgcaagtgatgggtgtaatgaaacaagagcagcctgaaagatatttgcgtcttgatcatctcctagttagaacttattttgatccaaatgaggcttatcaagactcaacanaagagaagcgacgtgcacaaatagcccaagctattgcagcagaagttactgtag

SEQ ID NO: 37351 - DNA, 402 bp, Glycine max
  Clone ID: LIB3055-004-Q1-N1-C1
ctcgagccgctcgagccgtgcacacgaataccatcatcacgagcatgataatgggaaagaggagtaatgcgggaaaacgatgatgtggccaggttgaggaaggtggtgagggaggtctgggagttgcttggggcgtttaactcgggggatgacattgcgttcatgaggcctttggatctgcaagggtttgtgaagaagaacatggaaactcaccacaaggtggatgccatgatggagaacgtgttgagggagcatgacgaggctagggctaatgaagatgctgactctgataagaagaaagatctttgtgatatttggctgaacctcaatgaatctgatgatgctgacaataagctcactatacagagtgccaaagcctatgctcttgacatgttcatcgac

SEQ ID NO: 37352 - DNA, 386 bp, Glycine max
  Clone ID: LIB3055-004-Q1-N1-C10
gtgatttcagtgagtgatcggtgttcacttgatctgatcagagatcgtcagcgtcaattgaagaagatgccgatcagaaacatcgccgtcggaaggcctgaagaggcgactcaccccgacacgttgaaggcggctttggctgagttcatctcaaccttcatcttcgtgttcgccggctcaggctccggcatcgcctacaacaagctcaccgacaacggcgctgccacccctgccggcctcatctccgccttcatcgcccatgcattcgccctcttcgtcgccgtctccgtcggcgccaacatctccggcggccacgtcaaccccgccgtcaccttcagcgccttcgtcggcggcaacatcaccttcctccgcggcatcgtctacgt

SEQ ID NO: 37353 - DNA, 297 bp, Glycine max
  Clone ID: LIB3055-004-Q1-N1-C11
ggagatgatgaagagatctggaaaacatgaagcggagggaggagaagacatactcatcgacagattcctcaagcgcctctctttcgtagccatcgcagtagcctccctcacgctcctcttcctcctcctccgcacgcccgacacgtgtgtcccccaccacgcgccccggaagccgcacctccgcttccccaaatccacgtgcgacttctcctccacgcgcccccacgtccccgccgagaagcgcgccctgcgcattcaatccacgcgcctctggaccgccaaggtcctctccttctc

SEQ ID NO: 37354 - DNA, 268 bp, Glycine max
  Clone ID: LIB3055-004-Q1-N1-C3
cgaagactactagaatctacttcagattcttgttcttgtggtctttttctgttgttgtgtttgatgttcagatgtaccagtaccgttgtgggttttaatttggatgcattgtttttatgcttcgctgcttctgttacagacccaaacggaatggcaatatatattttgaccattgtctgaactactattttgttttagctgtgttaattattgactttttttcttttcgattaagtgtggtacttttttcgaaaaaaaagagtagact

SEQ ID NO: 37355 - DNA, 406 bp, Glycine max
  Clone ID: LIB3055-004-Q1-N1-C5
tggctgcagtgttctgggctttggctttggtaagcctctgtggccagctaccttccaatgcccaagcacctgcaactgcgccggcaaactcaccacctacaaccccagctgcaacatcaccatcttccggcacgccactggcggtaacactaccaccaacagtggtggcatcccctcccaccacaagtacaccaccaactacatcccaaccacctgcaattgtagctcccaaacccgcacctgtgacaacaccagctccaaaagttgcacctgcttcaaacccaaaagccccaacaacccaaacttcaaaaccacaaccaccaaaaagtatcaccagttgtaactcccacatcgccacccccgatacctccaccacccgtttctacgccaccgccattgccaccac

SEQ ID NO: 37356 - DNA, 401 bp, Glycine max
  unsure (1)..(401): unsure at all n locations
  Clone ID: LIB3055-004-Q1-N1-C6
ctcgagccgttcgaagcaactattctcagagatccacaccagcttttagggcttcttcaagcttgcgcttgggacatgtgacatctgatgatggattgcctatggtagctgaaagttactcttctagacatccaaggccattgagcaccattggctggaggaatggtgatagaaatgggaggtcaagaatttctagtgaaagatatcgatcattgactgaggagagtggtctccatgatcgattttcctctgagggtttcgtggttgttgagcgtgcatcagtgtatggttccaggaatatgcttgatcagcaccgagacatgaggatggatgtagataacatgagttatgaggaactacttgcactnggtgagaggattggctatgtgaacacaggagtc

SEQ ID NO: 37357 - DNA, 359 bp, Glycine max
  Clone ID: LIB3055-004-Q1-N1-C8
cgccgcgattttccggccatgtgcctcgaaatcgaggtttcggaccggctcttccggtaaactcaaccgggaagtgactatgaggccaatggggtgccctccttctgcctctttcaaggttgaagccaagaagggagagtggttacctggcttggcctccccaacttacctcaatggcactcttcctggtgacaatggatttgaccctctgggactagctgaggacccagagaacttgaggtggtacgttcaagccgagcttgtgaatggacgttgggccatgttgggtgttgcaggaatgctacttcctgaggttttcaccaagattggaatcatcaatgcccctcaatggtatgatg

SEQ ID NO: 37358 - DNA, 414 bp, Glycine max
  Clone ID: LIB3055-004-Q1-N1-C9
gtgatttcagtgagtgatcggtgttcacttgatctcatcataatcgtcagcgtcaattgaagaagatgccgatcagaaacatcgccgtcggaaggcctgaagaggcgactcaccccgacacgttgaaggcggctttggctgagttcatctcaaccttcatcttcgtgttcgccggctcaggctccggcatcgcctacaacaagctcaccgacaacggcgctgccacccctgccggcctcatctccgcctccatcgcccatgcattcgccctcttcgtcgccgtctccgtcggcgccaacatctccggcggccacgtcaaccccgccgtcaccttcggcgccttcgtcggcggcaacatcaccttcctccgcggcatcgtctacgtcatcgcccagctcctcggctccatcgtcg

SEQ ID NO: 37359 - DNA, 161 bp, Glycine max
  Clone ID: LIB3055-004-Q1-N1-D1
tcctcaatctggttcaatcgggaccaggctcaatggcttaaggagcagggtaatggtgggctatgtgtgtgcttccggcgatggttgtggccattcgcccagcaaagaaccctttttgcgtgaagggtcgtgtctactgtgacccttgccgtgctggtttt

SEQ ID NO: 37360 - DNA, 410 bp, Glycine max
  Clone ID: LIB3055-004-Q1-N1-D10
gaaattgtatggttatggaggtctcagcatacattggcaacaacaacttcatcttctcttcttctcgtgccataacacaaaaatcttctgcttctttctcatcacctatgcttgtcaaatccatggccactcccaagcctcttccctcagtctctagaactgtaggctctagaaagaactcaactgtgttcccacttggggaacaacctaggagcagccccgcgacagccacgcctcccataaagcttttgacaaggatggagcagctgaagctgctgagcaaagcagagaaagcagggttgctatctgcagcagagaagtttggattctccctctcaacaatagagaggcttggactcctctcaaaagcagaagaagtgggtgtgctatctgctgcaactgatcctgga

SEQ ID NO: 37361 - DNA, 413 bp, Glycine max
  Clone ID: LIB3055-004-Q1-N1-D12
agtttttcaactcttccatagcctttgtcttctgtcttcgggtaaaacagtttattttggacctgcttctgctgcaaaggagttttttgcttcaaatggttttccttgtcctcctctcatgaatccatctgatcatttactgaaaactataaacaaggattttgatcaggatattgaagcgggtttagcaggaactgaaaacatactcacagaagaagtaatccacatccttgtgaactcatacaaatcatctgaaaggaatcaagaagttcaaaatgaagtagctttactatctaagaaggacaccagttcattggatatgaagaaagggaatgcatgcttccttaatcaatgcttagttctaaccaaaggatcgttcattaacatgtatcgtgatctaggctattattggt

SEQ ID NO: 37362 - DNA, 402 bp, Glycine max
  unsure (1)..(402): unsure at all n locations
  Clone ID: LIB3055-004-Q1-N1-D2
gaccatcttagaaattaacctacctattcaacccttatattgggaccgcgttaacctaccaccacttttttatttccccttggctggacatggtgaaaccagcctggctagtgttgatcttcttcctttcttctgtaaaatgattcattttcctctaactacagcattgatacttgcaagatgtacaaaggggtaaggaagagaaaatggggcaaatgggtgtccgaaattcggcttnccaacagccgtgagcgcatatggttggggtcctatgacacccaagtgaaggcggccagagcatttgatgtcgcactttattgcctacgtgggcaaagtgcgaagtttaactttctgacacacctcgacacttggaaattaatatggggttaccatgtgacatac

SEQ ID NO: 37363 - DNA, 252 bp, Glycine max
  Clone ID: LIB3055-004-Q1-N1-D3
gcctatgaacttatcgagcacccagattactcctgtcgttttggtgatattgtgttcaaggtggctcaaaaacttggttatgaagctgatagagataatgcaaagtcagtgactgacttgaatgtggaagttcctctgataaactgggaccaaatcagttatccgaataagtctgtagataacagttacctctgctgtattggcaatgttactggttttgaagatggtgccgtggaggtgaaatgggctact

SEQ ID NO: 37364 - DNA, 401 bp, Glycine max
  Clone ID: LIB3055-004-Q1-N1-D5
gaagaaccctaacctctcaccagcgcaagcttctcctgcaacgctccagacgatcaactgggatcccaaccgctctctcgccctcgccaggtgctgagtggctttaattgtaaatcttggcgctccatgtgtgaacctttgttgggtggtttaggctcagacttgctttgtttgcagatttgattggatcggcttcctgcatacttggactcgggaatttggaccagaaacagttctcgaaatcttgcttgcatctaagtcgagggcctgtttctaagtcgttaatgccagtgccttggaagtatttctggcaaggtggtagtacaaggtccgtcaatggggcaagggaagggaagggtccaaatttgggctccaaataacccgggttaaccaatttgggg

SEQ ID NO: 37365 - DNA, 407 bp, Glycine max
  Clone ID: LIB3055-004-Q1-N1-D6
agcgttgaaaattcccagactctctcgcttcctcaaaatttcaccctctttcattcaattctcttctctgctcttctcttctgttcccaccttctgatccatcatccctcgttttctccgaacaatggctgctggtgtcactgtcaagtccgaggttctagaatcttctccccctgaaggagtatgttccaacacggaggaaaaccacctggttcagaccaatttgtctgatgggtcacccaacaagtctgtgccagcatctggacttaatgcagtgattcctagtgcaaatcagcttaccatcttctataatgggagtgtttgtgtctatgatggaatccctgcagagaaagtgcatgaaataatgcttattgctgctgctgctgccaagtctactgaaatgaaaa

SEQ ID NO: 37366 - DNA, 405 bp, Glycine max
  Clone ID: LIB3055-004-Q1-N1-D7
gctacatcagacgagctagtggggctactgttaccatacaagaagcaagaggtgttcctggggagatgacagttgaaatcagtggaactgcttctcaagtacaaacagtacagcaactaatacagaattttatggctgaagctgcagctgcagctgcagcaccagcacagccgcaaacaactgtgcctgctgcagaccaaggatacaattcttaccatgcccatggttctctctatgcgtctactacttccaatcctggacatgctgtaagctatagctcagttaatggtgcaagctatgggtactaggctggactgtgcaactaatgcctgctattatcgaaatgtaaaatgctggtaacggaattactgtaataatttatgaaatattagattattgtctgac

SEQ ID NO: 37367 - DNA, 402 bp, Glycine max
  Clone ID: LIB3055-004-Q1-N1-D8
aatagcatcagtgatatgaggcacgacctaaagatgaaaacaccataataagaataagaataataattataatgataataataatattaggaccaacatgtaaaatgaaaaccttggtttataaattatcatcacaataaaaacatagtacaaattggtttaggccaaacctgaacagtttttcctaaatagtctccttttctttctttgtcaatgacagactgtcatgaaaaacaggaaaagaaaagtaaactttagtgaaaaattttgtaatgatcttcaaaatctgcgtcataactctaaagtctaaacataaacaacttgcctggtaaatcttcccagtagttatgttgttatcacgggtcaacttgatgtctataaaacgctcatagtttccaagat

SEQ ID NO: 37368 - DNA, 413 bp, Glycine max
  unsure (1)..(413): unsure at all n locations
  Clone ID: LIB3055-004-Q1-N1-D9
cggaaaggctcttggtttatccatacatgtccaatggcagtgttgcttcccgtctcaagggtaagccagtgctggactggggcacaaggaagcacattgctttaggagcaggaagaggactactttaccttcatgagcagtgtgatccaaagataatccatagggatgtgaaagctgccaacatattgcttgatgactattatgaagctgtagttggagattttgggttggcaaagcttttggatcaccaagattcacatgtcacaactgcagtgaggggcactgtggngcatattgccccagagtacttatccacaggacaatcctctgagaagactgatgtttttggatttggcattctcctccttgaattgatcacaggccaaagggctctagagtttggaaaatcagct

SEQ ID NO: 37369 - DNA, 289 bp, Glycine max
  unsure (1)..(289): unsure at all n locations
  Clone ID: LIB3055-004-Q1-N1-E1
ggaagatcgagaganagagagagcgcaaaggacaagtttggaggttgcaagtacagagaaattcagatcacatgattgcgaagacaaattacacgatgcctatcattggcaaactgtactgatcgtcgtctgagacggtgcctgtggtgaggaagaggccacacgtggtaaatgggtggggattagtagtcatggattgtagtgccagagggttgagttcaggatcgatggttgtggtgttcgtggcaaatagggagacttgattctaagagaaggagatggagacgct

SEQ ID NO: 37370 - DNA, 410 bp, Glycine max
  Clone ID: LIB3055-004-Q1-N1-E10
ctttctcccctacacaaaacatggctttgcccaatcagcaaaccgtcgattaccccagcttcaagcttgtcatcgtcggcgacggtggcacaggaaagacaaccttcgtgaagaggcatctcactggtgaattcgagaagaaatatgaaccgaccattggtgtggaggttcatccgttggattttttcacgaactgtggaaagattcgcttctattgttgggatactgctgggcaagagaagtttggtggcctcagagatggatattatatccatgggcaatgtgcgattatcatgtttgatgttactgcccgtctaacatacaaaaatgtccctacctggcaccgtgatctttgccgggtctgtgaaaacatcccaattgttctttgcggtaacaagggtgatgtcaag

SEQ ID NO: 37371 - DNA, 322 bp, Glycine max
  Clone ID: LIB3055-004-Q1-N1-E11
caaatcttttctaagtgtagtagaggagaggaaccgcgccaaccctctcttcttcttcttcttcttcaatccttttataacctttatagtttcattcttaatcgttgggaaaaatgttcatcgagaattttaaggtagagagtcctaatgtgaagtacaccgagactgagattcagtccgtgtacaactacgaaaccaccgaacttgttcacgagaacaggaatggcacctatcagtggattgtcaaacccaaatccgtcaactaccaatttaaaaccaacacccatgttccaaaatttggggtgatgctcgtgggtttggg

SEQ ID NO: 37372 - DNA, 372 bp, Glycine max
  unsure (1)..(372): unsure at all n locations
  Clone ID: LIB3055-004-Q1-N1-E12
acattccttggttgaaacgcaggattcatctgttattgcacagttggggatacctgacatgcgcttaccgctcctttatacattatcttggccagaaagaatctattgctctgaagtaacttggcctcgtcttgatcttagcaagtattgttctctaacattttatgcaccggatgacaagaagtttccatcggtgaatctttgctatgctgcgggacgtgctggaggcaccatgacaggagttcttagtgcagcaaatgagaaagctgtagaaatgtttgttgaagaaaagattagttatctggatatattcaaagttgtggaactaacttgtcaggaacatcanaaggaattagtagcatcttcgtcact

SEQ ID NO: 37373 - DNA, 180 bp, Glycine max
  Clone ID: LIB3055-004-Q1-N1-E2
tacttcaatggctactgaaaaggttaccaaacctcaatcacttcctccataccctgagatgatagtgaaagcacttgaagcactgaatgagccaaatggatcgaacaagtcagcattatcaaagtccatagaaaccacctacggtgagttgccagacgcaaccgttttggggagtcacct

SEQ ID NO: 37374 - DNA, 169 bp, Glycine max
  Clone ID: LIB3055-004-Q1-N1-E3
gcaatttcagtattagttttgacccaatctctttccattccggacacaagtcatcttacttcaagctgaatccttagatactggcaagactcatacctgtgctaccctgaacttgactggatctggaccggaacctgcatctctcaaagcatgcatctttgtgagcagc

SEQ ID NO: 37375 - DNA, 339 bp, Glycine max
  unsure (1)..(339): unsure at all n locations
  Clone ID: LIB3055-004-Q1-N1-E4
gttaaatcatttcaattgaacaaggttaacctcaatccatggggaatattccaccaaacccaatgtccggaaccttcaacgtaccgtaagggagccccaagagataacacangaatgatcacatctttaccagtatctacctgttcaagtcctttgcgacagtatgggccagcacacaagagctgtttcctttctcctgctcacccaacttacactntgatggggcaaaataccctcccctcatatccagtgagatcaaatgccacattcactcttgacccttttcatgaaactgctttctacaaagcccacacacccggtggatccccaagaagactc

SEQ ID NO: 37376 - DNA, 270 bp, Glycine max
  Clone ID: LIB3055-004-Q1-N1-E5
cttcgttctgaaaatcgtagatttttgttttagggtttctcttatataatcttttcgtaacacaaaaaaaaatcacataaatcttcctttatatttattactatttcgttttttctttggattaattaactaggcttgagctatccgaataataataataatagtttcggagaatggaaaagaaaaaggtagcagttcccctcgtgtgccacggacactctcgccccgtgggtgatctcttctacagtcccgttacgcccgaatggtttt

SEQ ID NO: 37377 - DNA, 399 bp, Glycine max
  Clone ID: LIB3055-004-Q1-N1-E6
cttgattggaaattttcactccttgtaatggcgagatggttgtccttggagctttgcttagaattgaacttttcatcttttattggggtgtagcagtgaattgggttgatgtgcaatgcagagatcacggaaagctcttctggaaagaagggctatacagaaggctacaagtgggaggaactatgtctatctgtataaagtttctctgtcgttggtttttgttttgtggggtctggtcttcctcttcagcttatggacaagccatggccatggttatggagatcatgaatctagagaagttccagttggtgtatcaaattggaatgaagatgaacacagacaatgtagaaaatctaattctgctgatgaatatttaactaaagagactgatgatgtcta

SEQ ID NO: 37378 - DNA, 368 bp, Glycine max
  Clone ID: LIB3055-004-Q1-N1-E7
gtgcgatcccagtgttagtgtgtatttcctctcttctcactccgggatcgatattttcaagaacagatcgaaaagccgttcatcgatttgttggatctgtgagtgagaagatggttactaagacagaggagactcaattgaacaggctcgaaaaccaggtcgataacggcggcggcggcgcgtgggagtacctctgcctcgtgcggaagctcaaagttcggcggtcggagaaagttctgaagcacggtctctccatcttgaacgacctcaaacaacgatcctctctcggctccgatgaatggaccttgtatgagcaggttgctgttgctgctatggactgccaatgtctcgacgttgccaaggactgt

SEQ ID NO: 37379 - DNA, 390 bp, Glycine max
  Clone ID: LIB3055-004-Q1-N1-E8
ggaaaaatgagcaacttgctgagattacttctttctgcaaataatttcacagggataataccagatacatatggaaatctaaagaatctcactcagtttaggatagatgggagcagtttatctgggaaaatacccagttttattgggaactggaccaaacttgatagattggatttgcagggcacatccttggacggcccaattccttctgtcatatcttacttgacaaatttgacagaattgaggatatctgatttgaagggaccaactatgacatttcctaatctgaagaatttgaaaattttgctaagactggaattgaagaattgcttaataactggtcccattccaaactacattggagaaataaaaaggttgaaaaccatgttc

SEQ ID NO: 37380 - DNA, 411 bp, Glycine max
  Clone ID: LIB3055-004-Q1-N1-E9
gtcttaatttgttctcttcagccatggcgatggtgcaagatgaacgatgcgttcagaaaagctactggattgaacatacgacggacttgtccgtagagtcaatgatgctcgattccaacgcctctgatctcgacaaggaggagagacccgaagttttgtccctactaccaccatatgaaggaaaatcagttgtagaacttggagcaggtattggaagattcacagttgaattggccaagaaagctggccagttacttgctgtggatttcattgagagtgctataaagaagaatgaaagcattaatggacaccactagaatgtcaagttcatgtgtgctgatgtcacttttccaaacttgattaattctgaaggatcggttgatctgatatcttcaaattggttactcatgt

SEQ ID NO: 37381 - DNA, 413 bp, Glycine max
  Clone ID: LIB3055-004-Q1-N1-F10
cgaatatcctttgctcatggaatgggacttatttctgatgaactatacaggtcactgcaaaaaaattgtaaaggagagtacataaatgtagacaccaaaaatgtattatgttctagaaatatcgagacattcaatgaggttacatcaggacttagtatggtcaatattttggacccgtcatgtgattggcttgatactgaaacatcttggaggagatctctacttaagaaatatccgagaaagaatttccttaatactcatctcaaattgccatccttaaactgtcggagttatgcatacttcctctgcggttattgggccaatgatgatagtgttcgcagtgcactgcatatccgtaagggaactataggaaaatggcgtcgctgtaccttcaatatacctaacaaggagga

SEQ ID NO: 37382 - DNA, 306 bp, Glycine max
  Clone ID: LIB3055-004-Q1-N1-F11
ttctgattcgtcacgtcagacaaaggaaggggttagggtgtgacctgagatcaaaatgttgcggaggcttctctcttctcacctcaaaaccctagcctcctccgccgacgccgtcaccgtcactccccgatctgcttccgcctacgccagattcgccggtctctctcgctcctgcctctacttctcaacccaatccgaggatgctactgcgatcaaaaagaacgttgaggacataatgccaatcgctactggccacgagcgcgaggagcttcatgctgagctcgaaggaaggaatattcctgaaat

SEQ ID NO: 37383 - DNA, 413 bp, Glycine max
  Clone ID: LIB3055-004-Q1-N1-F12
aaaagaaaatcctcacccattttcttcgtagccaaacactctgaaattctcagttatgtcgtggcaagcgtatgtggatgatcacctactgtgtgaaatcgaaggtaaccacctcactcacgccgctatcatcggccaagacggaagcgtttgggctcagagcaccaacttccctcagttcaaacctgaggaaataactgccatcaataatgactttaatgagcctggatcacttgctccaactggattgtatatcggtggcaccaaatacatggtcatccagggtgagcctggtgctgtcattcgagggaagaagggtcctggtggtgttactgtgaagaagaccggtgcggccctgatcattggcatttatgatgaaccaatgactccaggtcaatgcaacatggtagttg

SEQ ID NO: 37384 - DNA, 212 bp, Glycine max
  Clone ID: LIB3055-004-Q1-N1-F2
ggggttctggttcaggtctctcaatgcaatccgatgccccaggttgtactgatgcctgaacttttgcattaaactggcttgctggcatcaacggggaaattaagcttgaacaactcaaaagctacacctgacagacagcagtctggaaactctgaaatgtttgaaccaccatctttcatgaccttggttgatcctagtcaggttagccccaa

SEQ ID NO: 37385 - DNA, 375 bp, Glycine max
  Clone ID: LIB3055-004-Q1-N1-F3
ctcacatcacacacactctcatagctgtagcggcgacactaagatcggggaaagaatggcgaaaacgacgtcgttgctgctctttacactgctcctcttcggaaccctagctctcatccaggcgaagaaatcgaaggaggatttgaaggatgtgacccacaaggtttactttgatgttgagattaatggaaaagaagcaggtcgtattgtaatgggtcttaatggaaaggctgttccaaaaactgcagaaaacttccaagcactttgcccaggggaaaagggaactggtaaaggtgaaaagcctttccttaccaaaggtacttaatccaataaaataatcctaagcttaatcctcaagggaggtgattttacaac

SEQ ID NO: 37386 - DNA, 247 bp, Glycine max
  Clone ID: LIB3055-004-Q1-N1-F4
gttaaatctcccttattcttattcctgtaattaatcctcccttgcttaccagtgccaaccacaaccacctttgcaacacaccacacataacacgtaccaaagagaatgagagcgctaaattcgcacgtgctcctcggagatcttcactcccaccatcacgtgccgacctcaaccctgtcctacctcaaaaactcccgcttaatatcatccctccgtcgacgcttcccaagaaccggaatccgatgta

SEQ ID NO: 37387 - DNA, 346 bp, Glycine max
  Clone ID: LIB3055-004-Q1-N1-F7
aaaaaacacagcaaagtgatggaagtgacaagtgctgttcaccttcactcagttgggtttctgcatttacagacacacgttgaaaggctcaacggtagagctttcttcctctccacaagaccaagataagtgaaggttcatcttctttgtcatcaccatcatcatctaaaccacttaagcaataccaacggtattggtgcttgcagtgatagaacaagtgttatactcaactccacttctgttacttccacaacttcttctgctgcggggtccctctctgaagtggaaaagataaagcagaagtgccttacatggcagtggaagggtcaatattccatcaactact

SEQ ID NO: 37388 - DNA, 349 bp, Glycine max
  Clone ID: LIB3055-004-Q1-N1-F8
gtctgaatttcatgttaaacaggatttcgtgactagtaaagatggtaccaagatcccaatgttcattgttgccaaaaaggatattactttggatggttcacacccatgtttgttatatggatatggtggttttaacatcaatattacgccatatttcagtgtcagtcgcattgtactcacaagacatttaggtgttgttttcagcatagcaaatattcgtggtggtggagaatatggggaggaatggcataaagcaggctcccttgcaagaaagcagaattgctttgatgacttcatttctgctgctgaataccttgtatctactggttacactcaacccaaaaaggta

SEQ ID NO: 37389 - DNA, 401 bp, Glycine max
  Clone ID: LIB3055-004-Q1-N1-F9
gaaacggatccgctgttcaattcgggccgtggatctgccctgacagaaaaaggaacggtggagatggaggctagcatcatggatggtccaaaacgacgatgcggcgccgtttcgggtcttaccaccgttaagaacccgatctcgcttgctcgtttggttatggacaaatccccgcattcctacctcgccttctccggcgccgaagaatttgctaggcaacagggtgtggaggttgtggacaacgagtactttatcacacctgacaacgttggcatgctcaagctggcaaaggaagcatacacaatcctgtttgattaccgaatcccaacatcggggtcgaagacgtgcgaatccggtgtgaagagtccactgcaaatgaatggactcccattaagcgtgta

SEQ ID NO: 37390 - DNA, 154 bp, Glycine max
  Clone ID: LIB3055-004-Q1-N1-G1
gaccggcagtggcattcataccatcagtcacagccggacaccattgctcaggtaggccacattacgcccgtgcgtgctcgtcacgctgatcactcttgctggtacttcctctgcacttagagggcccaatatcattcagcgacaatgcctgcca

SEQ ID NO: 37391 - DNA, 413 bp, Glycine max
  Clone ID: LIB3055-004-Q1-N1-G10
agactcgagagctgttcttggcaggagggatacagagagaaagaacagtccggtggtggcacagcgtttgtcaactgatcataatgtagctgatgaggaggtgagaaaagaagttgaagctctccatcccgatgactcacacattgtggtttatagccgtggagtttggaggattaagggcattatacaggtgtcaagatctattggtgatgtgtatttgaagaaaccagatttctaccgtgacctgggttttcagcagtttggaaatcctattcctttgaagcgttctgtaatgacagctgaaccatcaatcattattagggagcttgagtcagaggatttattcttgatatttgcatcagatggcctctgggaacaattaagtgatgaggctgcggttcagatcgttttca

SEQ ID NO: 37392 - DNA, 380 bp, Glycine max
  unsure (1)..(380): unsure at all n locations
  Clone ID: LIB3055-004-Q1-N1-G11
ctgaaagcgaacaagtagagaacaaagaaagagagagagaattgaatgtgaatggggaatcagaagcagaagtggacgcaggacgaagaatatgctctcatcgccagcgttgaaaagcactgtccctgaaagtggatgaacattctcaaggatccccaattcgcccctttactaacttcccgttccaacatctacctcaaggataaatggcgcaatttgagcgtcagcaacggtgctcacggctccaaagaaaaatctagggttcccaagcttaaagccctacatgctcctgctgctcctaccgncactcctcagaacgccgctcctgctctgcataacgcagcatctgatgtcactgcatcagatgcttctcagaatga

SEQ ID NO: 37393 - DNA, 407 bp, Glycine max
  Clone ID: LIB3055-004-Q1-N1-G12
gctttgcttccaagagtaagtacatgtttggccgtgttagcatgaagatcaagctcatacccggagactctgctggcactgtcactgcattttatatgaactctgacaccgacactgtacgtgatgagctggattttgagttcttggggaaccgtagtggtcagccttacacagttcagacaaacatctatgctcacggaaaaggagatagagaacaaagggtcaacctctggtttgacccttctgcggattttcacacttatactattatgtggaatcatcatcatattgtattctacgttgatgattttcccattagagtgtacaagaacagtgaggggaaagggaatcccatacccaacaatgcaaccaaatgggagtgtattcgacattgtgggaagctgata

SEQ ID NO: 37394 - DNA, 234 bp, Glycine max
  Clone ID: LIB3055-004-Q1-N1-G3
ctcgagccgctctagccgctcagtgaaagagaatccgaggcgaagagaggagaaaaattaagatggacgggaaggagcacgatgtgtcgctgggagcgaacaagttcccggagagacagccgattgggacggcggcgcagagccaagacgacggcaaggactaccaggagccggcgccggcgccactggttgacccgacggagtttacgtcatggtccttttacaagagcagga

SEQ ID NO: 37395 - DNA, 381 bp, Glycine max
  Clone ID: LIB3055-004-Q1-N1-G4
ctcgagccgataaaattcataatgctgcaacagaaaatgttggaaataggcctagtgcaactactcaggaaattccttcagttgtggatattgatggccaagcttcttcaatcttttagacaatgtattttgaaactcttaaaattggaagggtctgattggttgtttaaacagaatgatggggctgatgaagatctgattgaccgtgttgcttgcagggagaaatttgtttatgaaattgaaaccacagagatgaaccgcaatcatatgggagaaactcgatatctttcttctgatgggaaaggcttgtcttcaatgaagaataatggagcaaaatggtctaatttttctggaacctcaatccctaactgtggggaaaga

SEQ ID NO: 37396 - DNA, 333 bp, Glycine max
  Clone ID: LIB3055-004-Q1-N1-G5
gcaagagtgggaagtcaagctggaatattcagccctcgctttaggcattgttgggtatatttgcttagccttattgttctttccggtcacgagagggtcttcaattttgcggttcattggcttaaacttagaaggaagcatcaagtatcatatctggctaggacacattgcaatgaccctcttcacagcccatggtctaggttatattattttttggggaaagacacatcaaatcttggagatattcaaatggaacaaaattggcatctcaaatgtggcttgagccggttctttggtaactggaataaaaccgtgggctggtaccctaacctt

SEQ ID NO: 37397 - DNA, 404 bp, Glycine max
  Clone ID: LIB3055-004-Q1-N1-G6
aatgaaaacaacaaaatagacacctgttaagaaggaggacaacgatggtgctgccgctatttactgctttcattctctttgcttttattccgaatggattgttagcagttccttccaccgtcccggcattcctttggtcatcacattatgaactggcctctgaaaatatattgaaggaatctgtaaattaccaagtcatttctccgaaggatctagcaaaatctattttatctgaagcaggctggtcaaattttctgtgcaaaggaaagaaatttcatgagcctctggatctggcactcttattcgttggtagagagttacaatcttcagatttaagcatgaacaaacatgcaaactcagctcttttggacctgctcaagaactctttcgccagatccaacact

SEQ ID NO: 37398 - DNA, 408 bp, Glycine max
  Clone ID: LIB3055-004-Q1-N1-G8
gcctccagtaacagtggagaagaaagtacaaagcgaaggagagtgtcttcagcaaagcaaacagctgaaagctcgtcatccagtgatgatagtctgacagcattcccgtgtctagtcacactaaatccagggataaggatagctagtgttgctgctggtggacgtcatacgctagcgttatcagatacaggactggtgtgggcttggggctatggaggtgaagggcagcttggtttgggttccagaatacgcatggtttccactcctcatcttgttccttgtattgattcctcttattatagtaaagatagatctgctacactggctcgaggaaacaagggttcatagggacaaacttttagagttcccggaagttatataaagagaattgcttgcggaggtcgacat

SEQ ID NO: 37399 - DNA, 422 bp, Glycine max
  unsure (1)..(422): unsure at all n locations
  Clone ID: LIB3055-004-Q1-N1-G9
ttctttttttgttctcatctccacaccatgtcctaatcttgctgcaccatcgttctccatttttggctttacaaaaccactgtgtctgattaagggttctttaatatttccaatatttcttgtagtgaaaaagttgttagctaaaagaagaccaagtttttggtgttgtagaaggaagagaagaattaacatgaaaattcagtgtgacgtgtgtgagagagctccagcaacagtgatttgttgcgcggatgaggctgctttgtgtgccaaatgtgacgttgaagttcatgctgcanacaagcttgcaagcaagcaccaaagacttcttcttcaatgtctatcaagcaagctttccacatgtgacatttgccaagacaagccaacattcatattttgtgttgaagacagagcactcttctgtc

SEQ ID NO: 37400 - DNA, 388 bp, Glycine max
  Clone ID: LIB3055-004-Q1-N1-H1
agctagtctagttatctactcttatctgcatgtgtgttctctcaacgactcctccgcgaaagagtattattcaatattttggtcgggttgaatcccggggctgaagcgttgcagacatcacggctattctaagagtgtctcgctccatcattcatgtccgatctgtacgacggaggacgggtagttgcgtaactgccgttaacccttcgtcgcacggtgagcgtggtgcttcgccttctgatggtggcagccattcagacttgctcttcctcgctggtgggggcttcttctagttgcttcactcttttcattacttctagcctgcatagttttaagtcagatactatacacagcgactctgtgactagataggatcaccgtctctact

SEQ ID NO: 37401 - DNA, 394 bp, Glycine max
  Clone ID: LIB3055-004-Q1-N1-H10
ctggcaactgtgctagcagcagatagtatcccagcacttttgtcttagttgttgttgctgaatggggcgacaagtcatttttctccacaattgcccttgcagcagcttcttctccccttggagtcatagctggagcactggctggtcatggtgttgcaactttgctagctgtacttgggggttctttacttgggacgtatttgtcagagaaggttattgcctacatcggaggtgttctctatctcgtctttgccgcaataaccttatttgaaattgtgcaataggggttaaaagaaatgcagtataatctccgtgcaaagggttcaataacgtaatgacctataaagttgcatgattctgcactctccatgtatggcggctacagaatgaaaac

SEQ ID NO: 37402 - DNA, 306 bp, Glycine max
  Clone ID: LIB3055-004-Q1-N1-H11
ggcgcatgaatctgaatggggcactacacataatgtcatgtgcgttaccagttcaaggtcactcgatcccaatgagtgatatcgctagagcatacaatggaagagcagtgaggacaaccatagtgaccactcaactcatcgtagctactattcttgcaacattactaatagagacagagacagatatacaaatgatgactgtgaaattgcctagtgcagatgctgattcacctgaggtatgcgaaaatacacagtgaattgccttgactgactagggaccgactgtcttaaaggcaatcatgatgt

SEQ ID NO: 37403 - DNA, 394 bp, Glycine max
  Clone ID: LIB3055-004-Q1-N1-H5
catttagctacccttactttctatggcttccaacagactcctggccaccattttggtgcttactctcctctcttactcaacattcactcatgccaattgcccaccacccactccatctccaaagcccacaccaccaactccaataccaacaccactcacaccaaagcccacacgacccactccaaagcccacacaaccaactcctaaagccaaacgactcacaccaaatcctacaccacctactccaaagcctagttgtcctcctccttctcctccttcaccaccatcaaacaaagcctcatgccccaaggacacattaaagctaggtgcttgtgctgatctcttaggacttgttaacattattgttggaactcctccttcgagccagtgttgt

SEQ ID NO: 37404 - DNA, 366 bp, Glycine max
  unsure (1)..(366): unsure at all n locations
  Clone ID: LIB3055-004-Q1-N1-H6
ataaacaccactacactccttttttagggttagggtattgcactgcggctgctacttcggctccatcttctccgatctcctcaaactctatcagcgcagaaccaagcctctatcaccatggggaagacacatggaatgggagctgcccgcaagctgaagtctcaccgtaggagacaaaggtgggctgacaagtcatacaaaaagtctcatctgggaaatgaatggaagaagccttttgctggttcatcccatgccaagggtattgntctttgaaagattggtattgaggctaagcagcccaactctggcattcgaaaatgtgccagggttcaactcatcaaaaatgggatgaagattgctgcattt

SEQ ID NO: 37405 - DNA, 373 bp, Glycine max
  Clone ID: LIB3055-004-Q1-N1-H7
atgcaagctctttttgcttttaagccttctctcagtttcactagtgctggttgtgagttcatcagatacccttcataatgtaggggcaattcctccaacatgcaagcgcatagagtgtcccagctatgatgtcattcactttggcaacggctacgaaatccgtcgctataattcacccgtttggatttcgaacagccccattctagacatttctctggttgaagccacaagaactcggcttcatgaaggctattggataatatcaaaggttagaataactacaagcaaaaaattgacaatgacagcgccctgtgatcaagtgaagtttttacccaatgattggacccttcttgtgaagtcctcaatttgttgt

SEQ ID NO: 37406 - DNA, 407 bp, Glycine max
  Clone ID: LIB3055-004-Q1-N1-H8
atcatcctccttttcatcttcttggccttctccttcctctggacatctcgcggcttcgtctgcatctcctcttcctacagccccgtctctggcgccggcttcttcggcttcgatggcctcgactccgatttcggatccctcggcgtgccctgctatcgaaacatggtaaaactgtggaatggacatcaaaagatttactcaaggggttagaagagtttgttcctatatatgaaacccggccaattaagaacaacatgtatgggatgggttttgaccacagctttgggctttggtttattgcctgctggctgaagccagatctgatgatcgagagtggtgctttcaaaggacattcaacttgggttttgcggcaggctatgccagacacaccaataatttctctttca

SEQ ID NO: 37407 - DNA, 400 bp, Glycine max
  unsure (1)..(400): unsure at all n locations
  Clone ID: LIB3055-004-Q1-N1-H9
ctggattggctcctttcagaggtttcttgcaggaaagattagctctgaaagaaggaggagctgaactcggcccctcagttttattctttggatgcaggaaccgtcaaatggactacatctatgaagacgagttgagtcacttcgttaatactggcgcacttgatgagctcattcttgccttctctcgagagggacccaccaaggagtatgtacaacataaaatgatggagaaggcttcagaaatttggagcatgatatcacaaggagcttacatttatgtgtgtggtgatgccaaaggcatggccagngatgtacaacggngccctgcacacaattttgcaagagcagggttctctcgatagttccaaggctgaaagcatggtaaagaatctacaaacta

SEQ ID NO: 37408 - DNA, 426 bp, Glycine max
  Clone ID: LIB3055-005-Q1-N1-A1
ttgatcataactcttcctttcctttatcgtttcatttagaagacatggacaccgtgacactgtcactcctttctctccctccggttccggtccgtacagtgtccgcgtctgcatcaacctcgtcctctgtccctctcactcactcctactcctgctcggccaggcagaggctctcctctcacagaacaagactcagtttccggaatcattcctctgcggttccaaaacttacggtgacatgcggtgcggctgtgacggagatcaacgagacccaattcaaagacacggtgctgaaggctaaccgtccggttcttggtgagttcgtcgctacttggtgcggtccttgccgtctcatctcttccgccatggaatccctcgctaaggaatatgaagacagattaacggttgtaaagaatgatcatgatg

SEQ ID NO: 37409 - DNA, 429 bp, Glycine max
  Clone ID: LIB3055-005-Q1-N1-A10
agaataccccctcttttgctgcatcagaggagttgtaaattaagagcatggctgcacaagctcttgtatcatcatcttctcttaccttctcagcggaggctgcaagacaaagtcttggaccaagatcactccaatctccatttggcttctccagaaaagcctcctttcttgttaaggcagctgctaccccccctgtcaagcaaggatcagacaggcctttgtggtttgcatcaaagcaaagtctttcttacttggatggcagccttccgggtgactatggatttgaccctctgggactttcagaccctgaaggaacaagagggttcattgagccgaaatggctagcatatggtgagataatcaatggtcgttatgcaatgttgggtgcagttggtgcaatagcacctgaaattctaggcaaggctggtc

SEQ ID NO: 37410 - DNA, 422 bp, Glycine max
  Clone ID: LIB3055-005-Q1-N1-A11
gttccatcagtaccttatagttgaagagttgggcattaaggagcttctgccagcatatttgaaacccaatctccaatctagtgatttgatcacaggggtctgttttgcttcaggtggctcaggctacgaccctttgacatcaatattagagtcatcgatgccattaactgggcaagtggatttgttgaaagaatacatagggaaactaaaagggctggttggagaggacagagcaaagtttatcttagccaacagtctattcattgtagtagcaggcagcagtgacatttctaatacctatcgcactagatccctcctctatgatcttcctgcttacactgatcttttggtcaactcagcttctaatttcttgacggaaataaatgagctgggtgcacggaggattgcagtattcagtgcac

SEQ ID NO: 37411 - DNA, 312 bp, Glycine max
  Clone ID: LIB3055-005-Q1-N1-A12
aactcggaattaggctctagacttctctcttcaccatgcaccaagccatttcccggagaagcttcatccccatacgagcacgtgacatgccacacgcaagaggaatcaaagaatccaatggcaccgatccatccaaagctgccacaatggtatcggagaacgcggtggtaatcattggaaaacggggatgctgcatgtgccacgtggtaaaaagattgttacaaggtctgggagtgaaccctcccgtgtaccaggtggactaggaccacgaagccaccgttgctcttcacctgtccctcaaaggcgccgaaa

SEQ ID NO: 37412 - DNA, 324 bp, Glycine max
  Clone ID: LIB3055-005-Q1-N1-A4
atcatggcagctgcttccccaatggcaagccaactcaagtccaccttcactaggactcttgtagctcccaagggcctctctgcctcttcaccacttcacctcgtgccttctagaaggcaatttagcttcactgttaaggccatccaatcagagaagccaacctatcaagtgattcagccaatcaacggtgacccattcattggaagcctggaaaccccagttacatccagccctttgatcgcatggtacttgtccaacctggccgcatacagaaccgcagtgagcccactactaaaaaggaatcgaaggtggcctggccccacg

SEQ ID NO: 37413 - DNA, 262 bp, Glycine max
  Clone ID: LIB3055-005-Q1-N1-A5
ctcgagccgaatcggctcgagatttgcaaaaaaaaaaaaaagaaaaaaaaaaaaaataaaaaaaaaaaaaaaaaaaaaaaaaataaaaaaaaataaaaaaaaaaaaataataaataaaaaaaaaaaaaaaaaataaaattaaaaaaaaaaaaaataaaacgtagcttgacctttagaatatataggccactatattattattgggccctgataactgctggcaaaatcattttactttacatgctcaaatataaaatattag

SEQ ID NO: 37414 - DNA, 414 bp, Glycine max
  Clone ID: LIB3055-005-Q1-N1-A6
ggcaagagtggtggcactccaacagaaccaactatctttctgtaccttagcttcctctctttctgacttcagtggaaccagacttcaaactcaacttcagttcaagagaaagcaatgccatccaaaagggtctttctacgtctccgcatcgagcaccaagaaaatcctaataatgggaggcaccaggtttattggtgtgtttttgtctaggctccttgtcaaagagggtcaccaggtgactttattcacaagaggtaaagcgcctgtcactcaacagttgccaggtgaatcagacagtgattatgctgatttttcttccaagatcttgcatttgaaaggagaccggaaggacttcgactttggaaaatccaatctctcagcagagggatttgatgttgttatgacataaatgga

SEQ ID NO: 37415 - DNA, 356 bp, Glycine max
  Clone ID: LIB3055-005-Q1-N1-A7
gtgagagtacatggcctgctcgtaagcatgtggttgcatgtgctgctgtgtgcaagtcctggagagaaatgtgcaaagaaattgttaccagtcctgagttctgtgggaagattactttccctgtctccctgaagcagcctggttcaagggatggaaccatccagtgtttcatcaagagagacaaatctaatctgacataccacctattcctttgtcttagtcctgcattgctagttgaaaatggaaagtttcttctttctgcaaaacggaccagaagaactacatgcacagagtatattatatcaatggatgcagataacatatcaagatctaatagcacttacattggaaaactg

SEQ ID NO: 37416 - DNA, 416 bp, Glycine max
  Clone ID: LIB3055-005-Q1-N1-A9
cgcaagcaaaaagaaagaatcccaggcgaggagaaagatggaggggaaggagcaggatgtgtcgttgggagcgaacaagttccccgagagacagccaattgggacggcggcgcagagccaagacgacggcaaggactaccaggagccggcgccggcgccgctggttgacccgacggagtttacgtcatggtcgttttacagagcaaggatagcagagtttgtggccacttttctggttctctacatcactgtcttaaccgttatgggagtcgccggggctaagtctaagtgtagtaccgttgggattcaaggaatcgcttgggccttccgtggcatgatcttcggcctcggttactgcaccggttgcatcttcaggggacacataaacccggcggtgacatttgggctggtttttg

SEQ ID NO: 37417 - DNA, 428 bp, Glycine max
  Clone ID: LIB3055-005-Q1-N1-B1
gtttagttgttaggttgttattttttttttttttgtgttagtgagtaggacttgaaaccacatctccctcttccttttccagtcaaccttataatttctccctgaatttttttattcgcaagtgttgatattcttttgtttccaattacaatttcagtaactgttggaaaaccaggtattgtaaataatgaaactaaaattattgtgctataattttttttcattctttcgtcacatgaaaattagtgcagctcctgaaattttaatgaatcaagtttgctacattagctagcaaattagcaatgatcatgggcatgcataaagagatgggaagtctggaaaaaaaattcaaaagagtttttgattccttcaagttattctttgacttttttgatagtactatgccaaatatgtaatcttgaaaatga

SEQ ID NO: 37418 - DNA, 426 bp, Glycine max
  Clone ID: LIB3055-005-Q1-N1-B10
gtgcacaacactaaaaaaaatctctcgtggagactaatagaggacttaaaccccataagttcgaaacttggagcatgtctagctcagggaatataactgctaattgattactgattacataataacctgcacacagtagattttggttgacaagaatcacaagataggcatgtagcctggttaagagtagcctgtcactctatttttcagagatatataaatcaatgatgcaatttcttgttctgataattgcaatccggttgggttctgataatgcatgcaggggacacaatcgcagaagaagaaaactgaagcattttctattgaaagttattgatgaagttgccagcatgtaatttgaagttgaagcactagcatatttggcgttttgaaaaggataaaaatgtgccccttgattaatatatg

SEQ ID NO: 37419 - DNA, 420 bp, Glycine max
  Clone ID: LIB3055-005-Q1-N1-B11
gtgttaaaactagggaattatttttgaagaacaaggctgcagagcttgatagagaaatgggcctgattcgcacacaagaagaaactggtcgacatgttaggatgttgactcatgagattagaagcactcttgatagacacacaatattgaaaacgactcttgttgaactgggtagaactttggcactagaggaatgtgcgttatggatgccaacacgaactggtttggagcttcaactctcttacacattgcgacagcagaacccagttggatacacagtacccattcatcttcctgttatcaatcaagtatttagtagcaacagggcagtaaaaatttcacctaattgtccagttgctagattacgaccttatgctggaaaatacatgcctggggcagtagtagctgttcgagttcctc

SEQ ID NO: 37420 - DNA, 429 bp, Glycine max
  Clone ID: LIB3055-005-Q1-N1-B12
atcttcttcttctccttttgtactctcattcacattcttataggctaattaacatacactctcttccaaagttgagtactttgccaaaaaaaaaaaaaaaagttttccctttgagaaagaaaacccaaagacagtcttttgatcattttgagcagttgcattccttgttttcttccattttgggtcccctcaaaagtagtttcaaaagggttcctcttcctccacagatatcatggcagatcataccccgggttcaagaaccgtttctgttgaagcttcttcacaagaaagaaggaaacttccaaactttctcctatccgtgagacttaagtatgtgaagcttggttaccactacttgatctccaatgctatgtaccttttactcataccccttcttggggtagcttctgctcatctttcaacaatctc

SEQ ID NO: 37421 - DNA, 425 bp, Glycine max
  Clone ID: LIB3055-005-Q1-N1-B2
ctgatgttatttcagaacttcacaaactctatcactccccagaattagttgctcttcatgagattcttgaagaatgtggaattggagttgacaattctggttctgagggtgcggttaacgttgggcagcatagggtcttgatattcgctcaacataaggctttcctggatataattgaaagagatttgtttcacacacacatgaaaagtgtcacatatttgcggttggatggatcagttgagccagaaaagcgttttgaaattgtcaaagctttcaattcaaaccctaacattgatgtcttgctgcttacaacacatgtcggtgggcttggtttgaacctgacatctgcagatacccttgtttttgtggagcatgactggaatccgatgcgagaccatcaggctatggatagagcacacaggtta

SEQ ID NO: 37422 - DNA, 429 bp, Glycine max
  unsure (1)..(429): unsure at all n locations
  Clone ID: LIB3055-005-Q1-N1-B3
ctcgagccgcatacccaaagaacacggagttggcggcgaccctttctctctctgatttcgatcatggcagctgttgctccttcttctgacaaaactgcagatttattgcagaatttgaccctggactctgagtccaaacccattggagttgctgagcctgcgaagaagaatggacccactttttccagtggtgcagctaaagggagggccaagccattcaatccaaattcatgctttgttccaaatggatacccttctgcgtattattatggaggtaaggttatgatgggcaaggtgattggaatgcttattccagatatatgaaccttgatgganggatggctcaaggtgtttatgggggataactgctctatatgtaccatcaaggttatgggtatgcaccatatggaacatatgcatctcccaatt

SEQ ID NO: 37423 - DNA, 429 bp, Glycine max
  unsure (1)..(429): unsure at all n locations
  Clone ID: LIB3055-005-Q1-N1-B4
gattaattatagtttaggcagcaaattatggaatcccatgatgaggagcatgctgccaaactacttagagctcaaacccacatatggaatcacatatttagcttcataaactccatgtcccttaaatgtgtggttgacttaggcataccagatatcatacacaactatggccaacccatgccactctcaaacctcattgcttcactaccaatccacccatccaaaacttgcttcgtccattgcttgatgcgaatcatgatccattctggcttcttctctcaacaaaaccatgacttgnagaatgagctagaagccaagtatgtgctaaccgatgcatctgtactattgcttaagaaccatccgctgagtgtgacacctttcttgcatgccatgcttgatccagttttgacaaatccatggaatcaattt

SEQ ID NO: 37424 - DNA, 419 bp, Glycine max
  Clone ID: LIB3055-005-Q1-N1-B5
gtggcagtttgataggctctcctgagaatctggtttgtgaggaggacttgtattgtgagtttccatccaaaggaaacatcgctaagagtaagagtgttcaatcaagtaattccagttctaaaaaggtgtcccaaaaaaccagaggcatgctccaacctgtgatccatgcaacagtggctgctgataaaaagggtattagcaatctgagccgcatagattcgagatcagagcggatagaagcctgccggtgaaagaagaatcactgtgatggagtgtagtttgattctgattgtgcattgtagttgtaagtttgtttcaaggacaagtttgtgaagtggttcagatttttatcattttcctcagtttgtttaacatgtctgatttctagaatgacactatgatgaacactactgaaataa

SEQ ID NO: 37425 - DNA, 332 bp, Glycine max
  Clone ID: LIB3055-005-Q1-N1-B6
caacattccacctagctccccaatcacatcttcaccacaccgtaaaccttcttaatttctctcttcattttctcctctattgtcataatcatggggaccttccctcgcttcgacccaatcaccacccaagaccggtccaaccagaccgtggcctccgaccttgacggcaccctcctcgtctcccggagcgccttcccctactacctcctcgttgccctcgaagccggcagcgtcctccgcgccctcctcctcctaacctccgccccctttgtctactttacctacctcgtcctctccgaaaccctcgccatcaagacgttaatcttcataac

SEQ ID NO: 37426 - DNA, 394 bp, Glycine max
  Clone ID: LIB3055-005-Q1-N1-B7
tttagtcacaccaagatcaacttttcagttgagaggtttatgcttgattactaagagcaccaagccaacccatatgagcaaaaacaccaagtagtgttttcactcacactgtttaacaaattcttgctccaatggagagcatattttttcagtctctctcccttgcaaagattccaaagtctcaaacttcacctctgctgaattcaccactcttgtttcactccaatgcaacctcagttgctttcagttcggtaccctatcatcaccaccatttgctcaagtgctttctgtttagatccaaagcaaacgaaaagcagaacctggtgggagttttacgtgcctctgaggctgcaacaaccccaacaaccaatgatgcagaaagatggcttcttga

SEQ ID NO: 37427 - DNA, 422 bp, Glycine max
  Clone ID: LIB3055-005-Q1-N1-B8
gcgaaaataaatgcaatcaatgctcagtatgaggaaaaactggcagcactccgagctcagcatagcagccgcagagctgaatttcttcaaagggaatcacatgctaggcaacagcagtaccagcaaatcataagggatccttaccccagtggtggcatggcacccggagaccctcatggttacaacaatgtgaatgcttcaggtacaggtgaagtgcaacgaggctattctgccgatcaccttgatccttaccgagagagagctcgatttcttgggggtggtagagatcaaggatttgaacctagaggtccatatactggtggccgtgtctatgacactggttcacgctattacaattgagttctgacccagaggtttatctctcatttggggtcttactgcaagtgaaattgcttatattg

SEQ ID NO: 37428 - DNA, 187 bp, Glycine max
  Clone ID: LIB3055-005-Q1-N1-B9
agaaaaaggggagggagtaactattgtctaatttttaatgagacaaatgtatcatcacaaaattagaaaaaggggagggagtaactattgtctagtgactagtatcaacgtggcctttcgttttcaccaaaaacaagaaacgtggccttttgttgctaaatttgtgtttgtaaagtcacactttgac

SEQ ID NO: 37429 - DNA, 395 bp, Glycine max
  unsure (1)..(395): unsure at all n locations
  Clone ID: LIB3055-005-Q1-N1-C1
aattgttttgccttgattcgtttgggtgggttaaaccggttcttttatttgttttccttgttcgtgaaacaaagtaccttttgtaacaaatagcttttgagttggaatcgtttttcttcaggtgattgttctgattgaatgggaggagattgtggaacctgngcaccacatctagaatcaccaaatttgaatctccttgacactgggaagccggttggtatttctgcagctatgaaccctggctttaatatggtctctagcaatgctacggtgcctgctttcggatcctctacagtgcctcatttgcagttaggacattcctatgaacccagtggttggtcttattgtttgccctgctttccacagggatttgctcctgctctgaacttcaatgc

SEQ ID NO: 37430 - DNA, 391 bp, Glycine max
  Clone ID: LIB3055-005-Q1-N1-C10
accaaaccctcttgaccttgtgatatctctctcttttaatggctaggatcaaaccaaaaaatggtcttagaagagagtgtagtgcatgatgtgaggctatcctcagttgggccgggccgggccaccgggtcggacgtattccacaacccgggtggcttggacttggccatgaagcttcactaccttagagtggtgtacttctttgatagtgaggctgcacaagacctaaccatcatgaaaattaaggatggcatgttcactttgttcaaccattacttcatcacctgtggccggttccggcgatcggattccggtcgacccttaatcaagtgcaatgattgtggagcaaggttcattgaggccaagtgcaacaaaaccctagatgagtggc

SEQ ID NO: 37431 - DNA, 407 bp, Glycine max
  unsure (1)..(407): unsure at all n locations
  Clone ID: LIB3055-005-Q1-N1-C11
gagagagagatagagagagatctatctatctatcaagatggcgttgttggttgagaaaacaagcagtggaagggagtacaaggtgaaggacatgacgcaagccgatttcggaagattggaaatcgagctggcggaggttgaaatgcccggcctcatgtcctcccgcaccgagttcggcccctctcaacccttcaagggcgctaggatcaccggctccctccacatgaccatccaaaccgccgtcctcatcgagaccctcaccgccctcggcgccgaggtccgctggtgctcctgcaacatcttctccacccaggaccatgccgccgccgncatcgcccgcgacagcgccttcgtcttcgcctggaagggtgagaccctccaggaatactggtggtgcaccgagcgcg

SEQ ID NO: 37432 - DNA, 388 bp, Glycine max
  Clone ID: LIB3055-005-Q1-N1-C12
cccaactcaatttttctctcaaccggcccaatttagcataagcccagcatggccaccgcaacagcagcagccacctcgtccttcatggggacgcgcctcctggaggcccattccggggcggggcgggtgcaggcccggttcgggtttggcaagaagaaagccgccgccccgaagaaagtttccagggggtcgggctctagctccgataggcccctgtggtatccgggcgccaaggcgcccgagtacctggatgggagccttgtcggagactacgggttcgacccatttgggctagggaagcccgccgagtacctgcagttcgagttggactcgctggaccagaaccttgcgaagaacgtggctggggacatcattgggaccaggaccg

SEQ ID NO: 37433 - DNA, 425 bp, Glycine max
  Clone ID: LIB3055-005-Q1-N1-C2
cagaaatagaatcatctctctgtctagggtttcattctttttcagctttatttgttctgtagatccatctagcttcggtgctgcaaatggacgtcgcagtcactgccgttcggtcaccgctgatcgtcctgggaagtccggtcaacgggtccgcctcagctcggttgggttccacttttgggttttccagaaagctatgcttgaattcagtatttatcccgaagcaagttcgtagaagagggtttgttgttagagctgcatcctcatctccggagtgggatgatgccaagatcgctcctcttcagctggagtccccaattgggcagtttctttctcagattttgaaagatcacccgcatcttgtgcctgctgccgtcgaccagcaactccaccagctccaaactgaccgcgatgctcatctacaa

SEQ ID NO: 37434 - DNA, 397 bp, Glycine max
  Clone ID: LIB3055-005-Q1-N1-C3
cgcgtatggggttgtaattaatccacataatggatgcaacagctgctacggcatcagtgctccatgtgccatcatcggacgctgaaaaagggaaacccaaaggagtgggaagctgatgcatatcggtgaacctaccgatgactcaaagagaagcagggattgtgcgaacactcagcaggtcaaggcatacgcaaaagcccattcgaagaccatggatatagatgagaatgactctgcatagaaggcgacgacggctatcttacacgccccgaggacttttataaatcagctacctgactggagcatgcttctggccatcatcaccacacgcgttactcgcaggcgaaaagcattggatgatgctgagattggaagacgctccgccccgacatgctca

SEQ ID NO: 37435 - DNA, 281 bp, Glycine max
  Clone ID: LIB3055-005-Q1-N1-C4
ctcgagccgattcggctcgagggctacgctggccaagtgaagagagtgtgtggataataatgttgataacggttagggaagcttcttcttgttcttcttctcccctcagcttctggcttaatcgtttcaacgcaaaaccctccaaaacactcaaaacaacatccatttgccaagctagtttctctgtccaaagaagacccactcattcatggaatactcgccatctctctaccagcagtgagctagcacattttgatcccttgggtattaactcagattta

SEQ ID NO: 37436 - DNA, 397 bp, Glycine max
  Clone ID: LIB3055-005-Q1-N1-C6
atctgtttcccgccatatatccaataagctttaaccatgtctgcctttgttggaaagtacgcagatgagcttatcaagaatgccaagtacatagccacacctgggaagggcatcttggcagcagatgagagcactggcaccattgggaagcgcctatcgagcattaacgttgagaacattgaggccaaccgccaagctcttcgcgagcttctcttcaccgctccagatgccctccaatacctctctggtgtcatcctctttgaggaaactctttaccagaaaacctccgatgggaagccttttgttgaggtccttcaagagaacaatgtcatcccaggcatcaaagtggacaagggtgttgttgagttggctggcacaaatggtgaaaccaccactc

SEQ ID NO: 37437 - DNA, 157 bp, Glycine max
  Clone ID: LIB3055-005-Q1-N1-C7
cggcaagggagtgacctttagctaattttaattgagtttaatcatgtcgtacccttttaatactttcatggaaaatttctgggaatatgagatttgaatggtcagtttatttggagcctaataattttccatacataaatgatgaaatttgcaacat

SEQ ID NO: 37438 - DNA, 422 bp, Glycine max
  Clone ID: LIB3055-005-Q1-N1-C8
ttgcaatcaaattagttcattctctttgcgcagttccctacgtctcctttcaagatgcagatcttcgacaagaccctcaccggaaagaccatcacccttgaggtggaaagctctgacaccatcgacaacgtcaaggccaagatccaggacaaggaaggaattcccccggatcagcaacgtctcatcttcgccggaaagcagctcgaggacggccgtaccctcgccgactacaacatccagaaggagtcaacccttcaccttgtccttcgtctccgtggtggcatgcagatcttcgtcaagactctcactggcaaaaccataaccctagaggtcgaaagctctgacaccattgacaacgtcaaagccaagatccatgacaaggagggaatcccaccagaccagcaacgtctcatcttcgccgg

SEQ ID NO: 37439 - DNA, 437 bp, Glycine max
  Clone ID: LIB3055-005-Q1-N1-C9
tgcatatgcttcagaaaacgcaggcgagcattcatccaaacgactcgaatcgtctctagtacctcaatcaagcgttgttcatgaactccctcaagttacagacactacctttctggctttgttctcgtgcaatcccttgagaaaagtttctgttctgtgcttggtgacgcatgcgcactttttcatttggtgggtatcgttaatttctaagatttcctaaaaattgaaaaaaagaagaagaaacccttgaatttgggagcgttggattgaattgactgtgttgtgttgtttgattgtagcatttaagaaggggttttgggaaatggggaagcctttgttttatgagatcttggaaaaacctgccacaagttgcatcataggaatatgcagcatgatttggttctacatacagaagaaaaatattgggtattcacatg

SEQ ID NO: 37440 - DNA, 423 bp, Glycine max
  Clone ID: LIB3055-005-Q1-N1-D1
gatgaaatttgagtatttggcttcaattcactcactgaaagttaaatatgatcagtgtttggataatggtgggacaaaagatgccactgctgtagaggacattcgaaggcgaaatgatgagcgtgctctggagagagaagaagaacggtactttaatgaggacagtgatgaggaggatagtgcttctgcatctgttccacgcaatcagaaaggacaccagcaacctaatctatccaatggagttgctgcaagctattcacagttaagtccaaggtcactggttgactatgaggatgatgaggatgatgaagattataagccacccccaagggagcagccagaaacttctgaggaagatgatgggataatggagtctctcaggctgaagaggaaattaccttccaaagataaagagcctgaact

SEQ ID NO: 37441 - DNA, 421 bp, Glycine max
  Clone ID: LIB3055-005-Q1-N1-D10
caaggagttaccaggatttatctgcaatgatgctctccttgatggtgtagagactaggactagttccccaatccaaattccacgcaatggtgacacttatgaatgcacttcggtaaaaggactatatccagttggtgaaggagcaggctatgctggagggatcattagcgcagcagtagatggaatgcatgctggttttgctgtggcaaaaaaattcagcttgtttcatggagatgttgagtctgttctgggcaaggctcaaaatgttggagttgtcaagtactaggaagatctaagtttcttcagacactgtctttggtgggaggaacgccaacttaaacaagttatcttctacatttttgagttgtcagtttcagcttgtcgtggaagaacatcgatgataattgccacatctctctct

SEQ ID NO: 37442 - DNA, 434 bp, Glycine max
  unsure (1)..(434): unsure at all n locations
  Clone ID: LIB3055-005-Q1-N1-D11
gaaaaatgggaatgtcaagctgtgacaggtgcttttccatgtcttcaatatctttctataaggtattgtcccaagctgaaaggtgacctcccagagcaacttcttcctttaaagaagctacaaattagtgagtgcaaacaacttgaggcttcagctcccagggctctagtactagacctgaaagacactggaaagctgcaactgcaacttgactgggctactttgaaaatgctcagcatgggcggacacagcatggaagcattgttgctggaaaagtctgatactttgaaaaacctgtatatttattgttgcccgatagatgaaatgtgttgcgattgtggaatgagtgatgatggccgtgactctctaaagacttttccgctatatttcttcccagcactcaagaccctntgtctcagtggctttcgtaatct

SEQ ID NO: 37443 - DNA, 413 bp, Glycine max
  Clone ID: LIB3055-005-Q1-N1-D12
gctgtgttgcatattctggatcctatcatcttgtggctttgatgtctagagcattggaacatgattacatagggttggcagagaatccgtcaatggacggaagctctgacaaactgtcttctgaggatggtaaaacctcatcactgaacttgaaggagacagagctgaggcttggcctccctggttgcgagtctccagagagaaaatcaggttctgcactctgtctttttggcaaagagttgcagaacaataacaatgtttgctcagttgtaagccctttgaaggctggggccaagaggggcttctctgatgtcactgagggatctcaaggagctgctttgttctctccaagaggggccaatgttgggaaacctattattggtttagacaactcaaactaacacccaacaaca

SEQ ID NO: 37444 - DNA, 422 bp, Glycine max
  unsure (1)..(422): unsure at all n locations
  Clone ID: LIB3055-005-Q1-N1-D2
gtgcaattacgtagtgtgtgggagacaaagagagatggctaagtggtgtatgttggtgttggttcttgctctagctctggctgtggccacaagtgccagagatgcacccgaagatgttggtctcaaggaccagaagaacttcatcagctatgctggagttggtggctattcaggaattggaagcaatggactaccttttggaggtgccggaataggtggtggcaccaccgggataggtggattgggaagattcggaggtcccattggcggtggtactggtggcagtgttggaggtggcgttggcggtggtagcatacctcatnccaccccttgagtgaatgaacatgcatgcatgcatgcatatggaaatttctctttccgcttctttaatttggattatcttagtcgagctagcttttctt

SEQ ID NO: 37445 - DNA, 410 bp, Glycine max
  Clone ID: LIB3055-005-Q1-N1-D3
ggcattatggctacattaaagaagtatgagtttgatgttcatgacaaggttccaatcaactggctcctcagtttaggcccctctctaggcattgtcagggtcaagggaattggcctcatacacaccgagctcgtatctgggatcccagctattttctcccactttgttaccaatctccctgccttccaccaagttgttatcttcctttgcattaaatcagtccaagtgccacatgttagacctgaagaaaggttcttggtgggaagagttggcccaaaggagtatagactttaccggtgcatagcgcggtatggctaccatgacattcacaaggatgacattgagtttgaaagggatcttatttgcagcatagctgaattcatcagatcagatgcatctgaatatggctt

SEQ ID NO: 37446 - DNA, 417 bp, Glycine max
  Clone ID: LIB3055-005-Q1-N1-D5
cgacagatccatctcctgctacgaccaaggcctccagatccagatccaagccctcggcgactccgatccccgcgtcggtgaaacttgccgatacttagcggaggcaaatgtgcaagcaatgcagtttgataaagcagaggatctgtgtaagaagacgttggagattcatcgcgcacatagtgaaccagcttcgcttgaggaagctgcagataggaggctgatggcactgatttgtgaggcaaagggagattatgaatcggcgttggagcatcttgtgcttgctagcatggccatgattgcaaatggtcaagataatgaggttgcatcaattgatgttagcattgggaacatttacatgtcgctttgtccgtttgacgaggcgattttctcataccagaaagcgcttacggtgtttaa

SEQ ID NO: 37447 - DNA, 395 bp, Glycine max
  Clone ID: LIB3055-005-Q1-N1-D7
ggaaaatgttccacatttatatgaacttgaagggaatgaaacgttaggttcttatttgcaaattcaaccttgctctgataatgcccctgaagtttcaaaatgttcaattcagtggtatcgtgtatcatctgatggtgccaaaaaagaacttatctcaggagcaacaaaatcagtttatgcccctgaaccttttgatgttggacgcatattgcaagttgatattatttcagaaagcgagcatgtcacactttcaaccgctggtccaatagatccagctgctggtttgggaacctatgtagaggcactagtgcgcaaacatgacactgaattcaacgtggtagtaacacagatgaatggttcacatcatccaactgaatctattcatgtgcttcatg

SEQ ID NO: 37448 - DNA, 406 bp, Glycine max
  Clone ID: LIB3055-005-Q1-N1-D9
cctcttttagcgttcgaacaaaattagggttttctcaacccgagggtttaccttctcttcccctgttcgaaattaggcaaatcaaaacagaaacacgactacaaaaagaagaaaagaagaaaaagaatcaatcattcattgatcgctgaaacgatacgatgacagggaaggcgaagccgaagaagcacacggcgaaggagatcgcggcgaaggtggacgcggcgaccacgaaccgcggcggcgggaaggcgggtatgaaggaccgaaccgggttggagaagggcgggcacgcgaaatacgagtgccctcactgcaaggtgacggcgccggacgtgaaatcgatgcagatccaccacgacgcgcgtcaccccaagatccccttcgaggaagacaaagttgtcaatct

SEQ ID NO: 37449 - DNA, 384 bp, Glycine max
  Clone ID: LIB3055-005-Q1-N1-E1
ctcgctttatcttcccttcccttcatctacgcttcaaaataatatccgactctctatctctgttcgaaacatgtccaacaccagcaacacactgcttcaatctcaatcgggcacattgagaaatggttttgagtaatgggaaaactgaggcaccattgtcaagtagtaatgggggaggtgctgagattgataacaatgagaagaagcccttcaagatcttcgtaaggtatgaccctcgcgaagatcttgcctatgaggtatgtcgccactccatcttgaaaaggtcttcaatccctgttgagatcataccaattaagcagtcagatctgaggaaaagtggtttgtatttgcctgagaggggccagtttgagagcactgagttct

SEQ ID NO: 37450 - DNA, 426 bp, Glycine max
  Clone ID: LIB3055-005-Q1-N1-E10
ctcgagtttggctgcctaactctgatttccctggtcttgctatggctcgggcatttggagatttttgccttaaggactttggattgattgctgttccagatatctcatatcaccgtcttaccgagaaggatgaatttgtcgtgttagcaacagatgggatttgggatgttttatcaaatgaagaagttgtggacattgtagcacctgctccacggtctagtgctgctagagcactggttgagtcagctgttcaggcatggaagacaaaatttcctttttgtaaggttgatgattgtgctgccgtatgcctcttctttgattctgattcagatttcaagtcaacagataccaaagacaagttgataccggaggcatctattgaccaatctgagaagttatctttacttgtgaaaagggagttggaat

SEQ ID NO: 37451 - DNA, 403 bp, Glycine max
  Clone ID: LIB3055-005-Q1-N1-E11
atttcctagatctcccaaacaaattgtagcataagtcccatggccaaagagactagtgttgtttatctatatcccagcaaatcacaagtttggggtgagaattttgatcataaaaaacttgtaataacaacactagctgctaatggaaagaaggaggagagtaatggagcacctaatgacacatatcctgcgtttcccgggtggtatgctgatgtttcctggccaggagaagcacacacatataaaatagaaaagattctattccacgggaaatcagaattccaagagcttcttgtatttgagtcttctagacaaggcaaggttgcaattcttgatgggcatatccagctgacagaaaacgatgaatttgcttaccaagagatgctcactcaccttgcactct

SEQ ID NO: 37452 - DNA, 383 bp, Glycine max
  unsure (1)..(383): unsure at all n locations
  Clone ID: LIB3055-005-Q1-N1-E12
ttggtgaatttctgagcagtgagcagcatgttgtcattattccctaacttgttcctcttcctatcactgttaattggtctatgcaattgcagggtgcaaaccctaaacactaacccaactcacttcaacccacaggtcccacccctccgaaccctctcgtcctcgaagcgcttcgaggggtcctcggagttcgtcaagctgaaataccacatggggccggtgctttcatctccgatcaatatctacctcatctggtacggcaagtggccccaatcccagaagctcctcatcaaggacttcctcaactcaatctccgaccaccgcgccgncccctccccctccgtctccgactggtggcgcaccgtctccctctacaccgacca

SEQ ID NO: 37453 - DNA, 405 bp, Glycine max
  Clone ID: LIB3055-005-Q1-N1-E2
gcagaaagcatgctcatcctagagttttaaaaatggcagcagcctccgccatggctctctcttccccatccttggctggcaaggccgtgaagctgggcccatcagcccccgaagtcgggagggtcagcatgaggaagaccgtcaccaagcaggccttcttcggaagcccatggtacggcccagaccgcgtcaagtacttgggcccattctctggcgagcccccgtcctacctcactggcgagttcccaggtgactacggctgggacactgctgggctttcggccgacccagaaaccttcgccagaaaccgtgagctcgaaatgatccactccaggtgggccatgctcggggccctgggctgcgtcttcccccgactattgtcccgcaacggggtcaaagttggag

SEQ ID NO: 37454 - DNA, 429 bp, Glycine max
  Clone ID: LIB3055-005-Q1-N1-E3
ctctttctctgctaaattatttaaattttctctctttctctggttaagtccctttgttatcaaaatggctgtggctatggctgcttgcagtcttggacttcacttgagtgctgacaacaccttgagaccttttgaaaaaaccactatcttgaaggccctctctatctctgatgctactaaaccatgttacatttctcacaaaacaagattatcatcttcatcttcaggaataacaatgatcccacgagcaacaacagttactggtactgtggaggatggaaatcaaggagaggctgataccattccaactccggtagttattattgatcaagactctgatccagatgcaactgtggtcgagataacctttggtgatcgcctttgggctcttcttgacactatgaatgcgttaaaaaacttggggctgaa

SEQ ID NO: 37455 - DNA, 429 bp, Glycine max
  unsure (1)..(429): unsure at all n locations
  Clone ID: LIB3055-005-Q1-N1-E4
ctattccacttcattgaaagctagtcccacttgagctttctgtccacaaatctctctttgcatatcttcaatgaaaacctgagtgtcaccaactccatctttcagtttcatctttcacacatacacacttaaaaaaccacttcttcttctagtgcttctgatccaaaccaccaccatacacaaaattcatattgaaactgtgttctgtttgtttgtttgttactctactaatctttagaacaattcagtctttggatttgtttgtgtcctttttatcaatcaaggccacactcaaaatcccaagttttataaatcaagcataatggaatctgaaaatggagttgctatggaggacgagaaacatgtcattggggaaacaaccaaggagaacatanacaaagaagctgaaaacagttgtaatgctgaaat

SEQ ID NO: 37456 - DNA, 424 bp, Glycine max
  Clone ID: LIB3055-005-Q1-N1-E5
gttagaagtagagaagaaaatgaaagtcattgttttcttcggtgctataataattctaggtgcagaatggcaatgcaatgggtcagagcatgagcatgagcatgagcatgagcatggccacagctaccaaattttccctctgcgaatgaaaaccggtcccggtggccactacattccggaggtatcgtgcaaaagttggaggcttggtgtggaagcacacaacgtcattgactggagaaccattcctcaagattgcgagggatatataggaaactacatgcttggccaccaatatagatcagactccaaaacagtttgccgtgaagcttatttttatgctaaaaccatcaacatcactgccaaaaccacatgggtgtttgatgtaaatgagactacgctctctaatctcccttactttgctgat

SEQ ID NO: 37457 - DNA, 251 bp, Glycine max
  Clone ID: LIB3055-001-Q1-B1-E2
gttaaactcactcatcagatacggttaggtggattgaagattatctcaataactattgtcaatgcttatggaacatgtccatgagcatgtttcaagttacgggacttcgccaaggtggacgtgaattcacaatgtcaacgttcctgattgaatccagctatagtgggattccaacttcagtgcaatgatggactgcacatgcgcacacgtcacgaagacctccaggatttctcggacagcacatcatcgta

SEQ ID NO: 37458 - DNA, 316 bp, Glycine max
  Clone ID: LIB3055-001-Q1-B1-E3
tctgagctcactaagcttacactgttagggcgcttgattttatctctgaatttgatgtgccatcctttagagacaagaccatcatcatgtttaaagtgacgggacttcgcactggtgcacttgggttcacgtgttcggcattcctgtctatcccagttacaacgggattcgtacttctctgctatatagatatcccttgtgaacatgccacaagatatcatgtatggctgggacatcacataatggtgctttttactgtcgatggactcctctaagttattgcatgggcaatagaaggtcaccttgtacaagaatt

SEQ ID NO: 37459 - DNA, 281 bp, Glycine max
  Clone ID: LIB3055-001-Q1-B1-E5
attgaaatgcttatcaggagggtgaggattcacggaattacattagggtttacaataacgttagcggttgctggcattgtagcagtgcaacgcatctctcgttaagtacgccttcggaacttgtctaatattcattaggaatgaaaggagtactatagagctcgctggtcaattactcagccatcaacagcatgctgcaagtctctgagaaatgttgacatgtcctgcatgtgccgacatactaacaaatttcactcagacgtgatcgcgggactagttgt

SEQ ID NO: 37460 - DNA, 314 bp, Glycine max
  Clone ID: LIB3055-001-Q1-B1-E6
attagtttctctttttcattgggtttgtgagcttagcacaacatgagacctcaactatggtacctcgaagtcgctcctttctctggttggccggcctctggatcctcgccttggctcaggctgaatctcatttcaaatgctttgattccgtgatatgatatgcgagctctaagactcttccatcggatccagtctcgctacgatcaccaggctcactcagactctatctcttgatataatcgaatgcacacacaagtctcggggatcagatcacgagaaagcgtatttgctcaggaacttcgatttcagggact

SEQ ID NO: 37461 - DNA, 253 bp, Glycine max
  Clone ID: LIB3055-001-Q1-B1-E7
agcgattgccacaatatctcactcatgaaatcgtacatttcacttcagacgtatgcactctcaccaggtgcagagaacactagagtcgtatcgtacagtcttcatactttgtcatgctgatcacgacgcaacttggactgctttcaagtccagatctgatagctcgcggatcatcttctccgacgtatacaggattacaaaggtgacccattaagtttagtactgcatgtctgttaatacatgacattacacc

SEQ ID NO: 37462 - DNA, 96 bp, Glycine max
  Clone ID: LIB3055-001-Q1-B1-E8
atagattcccccaagttctcactcacgcaagacaacagattgcgtcactggtatgctctctcagcatggtcagtgaatatgacattcccaacctac

SEQ ID NO: 37463 - DNA, 124 bp, Glycine max
  Clone ID: LIB3055-001-Q1-B1-E9
agagaatgggaccaaatctggaacgagtgagaggaggggaatcgcggtggggagactcgacactgacacgaggtgacaatgggtcttgagacgaagaattggcaggagatcacaggttgaacac

SEQ ID NO: 37464 - DNA, 249 bp, Glycine max
  Clone ID: LIB3055-001-Q1-B1-F10
atccaactctctttctccctatcccaataatctcactcatacctcttcagtctaacaaacttagtttcttttgttttgagtttcttagagaatggatgataagggagcacgaggtagcaacacccttttaagttgtgaggacgagatggaccttcgaagaggtccttggatcgtctatgaacaccgcactcttaacaattacattgcgacgcatggcgagggtcgctggcataggctggcggtctctgc

SEQ ID NO: 37465 - DNA, 57 bp, Glycine max
  Clone ID: LIB3055-001-Q1-B1-F12
cttttatatatggaacataatgagagatgacgttgccttaattaatagctcgatttg

SEQ ID NO: 37466 - DNA, 282 bp, Glycine max
  Clone ID: LIB3055-001-Q1-B1-F2
gaaaatctttccaatgtgagcttgtctttgccaagatgggaatcaaccccatcatgatgagtgctggagagttggaaagtggaaatgcaggagagccagcaaaactgatcaggcagagataccgtgaagccgcagacttgatcaagaagggaaagatgtgtgctctcttcatcaacgatcttgatgcaggagctggtcgtcttggtggaaccacccaatacactgtcaacaaccagatggtgaatgccaccctcatgaacattgctgataaccccaccaatg

SEQ ID NO: 37467 - DNA, 309 bp, Glycine max
  Clone ID: LIB3055-001-Q1-B1-F3
attgtttgttgttgtaactcgttcttcttcttttgttgttctgtgtttgtgtttgttttttctctcacctgaaaatgtcttgctgcggtggtaactgtggttgcggaagctcctgcaagtgcggcaacggctgcggaggctgcaagatgtacccagacttgagctacactgagtcaaccaccaccgagaccttggtcatgggagtggcacctgttaaggctcaatttgagggtgctgaaatgggtgtgcccgctgagaacgatggctgcaaatgtggaccaaactgctcctgcaacccctgcacttgca

SEQ ID NO: 37468 - DNA, 261 bp, Glycine max
  Clone ID: LIB3055-001-Q1-B1-F4
attgatagatgtagtaactcgatcctacagagcgtgtcgtaatatgtgcgcgtctgtgaattcccgcatgtcatatcgtctttcatcttggcgtacgcgtcgttgatgttgcatctgcatctctggaaatgatagactgcgttgcaatctatatcgagaagtccgggattcaggttggtaacgcctgctgagagctttagtgcattgagcactgtagtcagcctgattggcagatgtgaaatgactataccgttggcggag

SEQ ID NO: 37469 - DNA, 288 bp, Glycine max
  Clone ID: LIB3055-001-Q1-B1-F5
accgggtttccctgattgaattaatggcattcatcaaggtgaaatcaaatcttttcctcctgcacttcctaagacagcgtcacaccaaattacacgtagtgtttacgcacaggttgactgtcaatccgcaaaaaactttttaaccaatatctaacttacccggatgaatctcatgctgagaatcttcgccctggatgtactatactgcagcatgttcaacacctgctgttatataaatgccacgaagtggagcacataactctgtaataagccatctgagaagctatc

SEQ ID NO: 37470 - DNA, 265 bp, Glycine max
  Clone ID: LIB3055-001-Q1-B1-F6
atcgatacccgcagcatgagtcactcgaatcccatcaggagacataacacagcatttcccttagcgtaggaaatggaagtcacacttacagcctgcaagtcggttatctcgccttcagtgcacgtcgcatgtttgtttgcggggaatggcggaattaagagctcgcaatgcagtttcttagccggagcgatgaaagtgaggtttcccaggcaggtaagtcaagttagccaccttcgcagagagcggcagacgcgtcactgcggtg

SEQ ID NO: 37471 - DNA, 305 bp, Glycine max
  Clone ID: LIB3055-001-Q1-B1-F7
caacactataggcgaaggactttaggttgggatttgggaattagggttgttcgcgtggcgaagatgattgaggtggttttgaacgatcgattggggaagaaggtgcgcgtgaagtgcaacgacgactatgccagcggcgacctgaagaagcttgtggcagctcagactggcacaagagccgacaagatccgcatccagaagtggtacagcatctacagcgatcacatcactctcaaggattacgagatccatgacagcatgggtctcgaactctactacaactaaacacaacaaagtgtgtttta

SEQ ID NO: 37472 - DNA, 235 bp, Glycine max
  Clone ID: LIB3055-001-Q1-B1-F8
cacgactgcaggccaatcaccttcggttgagatatgagagctaaggtcgttcatcgtacaataactattgaagtagttttgcacgatcaagcagggattccagtacatgtcatgtacatcgcctatcatggtcacgctaagctacagcagcgtgtgccagctcagattgcaacaagacactcaaagatatacacccagacttgacacagcatctacaatgatgacatcactctca

SEQ ID NO: 37473 - DNA, 252 bp, Glycine max
  Clone ID: LIB3055-001-Q1-B1-F9
aggaaaagttaggtttttccttacatttaatagtcaaccttgtgagaaattacggtaagccctgtagttaagaatgtgtttgtgatctgggaattggattagtttgtggcttcaatgcattatattgtgttaagagcagatgctggtgcctgttaagattgatcagatgtgacattgtgatacatgggttgactttgccaccctgctaactggggaagtatctggatgtggcttacgtggtgggagttttgt

SEQ ID NO: 37474 - DNA, 222 bp, Glycine max
  unsure (1)..(222): unsure at all n locations
  Clone ID: LIB3055-001-Q1-B1-G1
atggcttctgcttctgttcccatggctttctcgctgagctctgttatcaacaacaacaagccttcatccgaagccttcttcaagccactacccctacggcaaccaaagaggaccctcttcaccacanaggcagtgtcaaactccaaggctcaaatcaatgcatctttgaaggagaaggcagttgcangactcacagcagcttctgtgacagcatctatggtg

SEQ ID NO: 37475 - DNA, 331 bp, Glycine max
  Clone ID: LIB3055-001-Q1-B1-G11
acaggtttcgcccgttacaacatcatcaagatctcttccgtcctctctttgccaccgacgttggcattgcatttgacatgatgcttctcgctcacaacgccggcggcaaagagaggacggaagagaactggaagtggctgttcaaagaaacaggtttcgcccgttacaacatcatcaagatcaacgctcttccttccatcattgaggcgtttccaatctaacgaagaggaagccactagagtgcatgtgcgtgggtgtatgttgcatgtgttgttattattattaagagctatgtgatcttcgtgtgatgtggggttcagccctacccgtg

SEQ ID NO: 37476 - DNA, 351 bp, Glycine max
  unsure (1)..(351): unsure at all n locations
  Clone ID: LIB3055-001-Q1-B1-G12
ctttttcccttgaaagctcaaaattgttcatgaaagcttcgtttccgattaacaattctttgaagaatagagactttactttctgaggttttaacccctttaaggctttccctaacttgaggctgtgctcatttgctgagagttttgctgcaaggacttgacacaaattgtgtaaatgtctgtggcttttaccaacctctcttggtggttgtggagtggaaaacatcaagagccaagaatcgcaaatgggggtgcgataaattcttccggcgattcaaatttgtgggaatcngatgttttgaggtttcctttggttcaggcgaatgtggngtcctcatcgagaaaggtgaa

SEQ ID NO: 37477 - DNA, 311 bp, Glycine max
  Clone ID: LIB3055-001-Q1-B1-G4
agagatttcaaccagctctctctcccaaaatcccaaagtgtgctgcttcaatttcggtaacaaagatgggcacaattactggctccattactttgtctccaaaaatttccatggtcaatcaggaccaacaactgcctcatatgagtccaaagcagtagcaatggggactagatctctaaagcagacagatactcatagtggacttagaatttttaacccggtggatgagctacttaacagaaccccaattaaaaccaatgcaatgcaagctatgaggaagggacctcaaggcaagaatgtctggccaaaaa

SEQ ID NO: 37478 - DNA, 291 bp, Glycine max
  Clone ID: LIB3055-001-Q1-B1-G5
attcatacataccatgtcacgtagcatgtgtaatgtggagagtgttgcattgtgttgagaccactagacttggtttcattgtgaaatgagacggcgtaacaatgttgatgtggcttgatagacagactaaactgattcataggtatgtatgacggtgtcattggatgggtttcaattactgacatttactgtgcgcatgtagataaatggcacagtactattctcttagctataatactgtgttcatttgataattctgacgatattgatgatgattctgaggatcatata

SEQ ID NO: 37479 - DNA, 226 bp, Glycine max
  Clone ID: LIB3055-001-Q1-B1-G6
atcgacacccacatcaacagtcactccagatgccatgcatgtgccaagagacacatgagttcccttagcgtacgaaatgggcgtcacacgttcagcgctggaaatcgagttaggtctccctcggggaacgtcgcatgcatgtttgcagggaatggaggagttaagagctcgcaatgcaaattcttagcaggagcgatcatagtaaggttacccaggccactaaggc

SEQ ID NO: 37480 - DNA, 303 bp, Glycine max
  Clone ID: LIB3055-001-Q1-B1-G8
ggaaatcggtctggagatacagcacttggaggactccacacttcagcatgtttacccattaggattgatgtggggacatgcaagggcaagctgcagcttggagacttataaattgggctattgcacgcagcaccacctgggcatgactatgtcgaccttatgcacgaatttatgacagcatgcacgcaaacttacggggaaaaggtcctatgtcactttgatcatcttggcatccacactgcttttcatctgcttgagaaatatcaatctacacctctggtctgtacagatgattttcaggga

SEQ ID NO: 37481 - DNA, 243 bp, Glycine max
  Clone ID: LIB3055-001-Q1-B1-H1
acatcacattgctagcactcgaagcgtcactacaggtatccacgtcctacatgcaagtcactctattcaacacagagatcactttgcatcacaactccagccactccatctacatcgcattcgcttcgggccctgatagacctctgcgagtgacatgatctctacacgcagatcctacagacctgggccaaaagtgagtcgatggtacaattcatgcatgattccccctcgtcatcttcgccg

SEQ ID NO: 37482 - DNA, 204 bp, Glycine max
  Clone ID: LIB3055-001-Q1-B1-H10
ctcgagcagacacggcacgggctcgagacgaatcgggccaagtcgaattcacgcacatcatcgcacgtaagacgcacacagctcatagaagttctcggctccgtccgagatgtgtcgtcgcgtatcacacacacttggcgcacggatgaggttgtgatgctgtgaatcacgcgtactgtgcctaatatggcggttaagaagcta

SEQ ID NO: 37483 - DNA, 332 bp, Glycine max
  Clone ID: LIB3055-001-Q1-B1-H11
cacaggagttgtaaattaagagcatggctgcacaagctcttgtatcatcatcatctcttaccttctcagccgaggctacaagacaaagtcatggaccaagatcacgccaatctccatttggcttctcaagaaaagcctcggttcttgttaaggcagctgctactccccgtgtcaagcaaggatcatacagacctttgtggtttgcatcagagcaaagtctttcctagttggatggcagccttcggggtgactagggagttgaccctctgggactttcggaccctgaaggaagaggagggttcattgacgggaagtggctagcatatggggag

SEQ ID NO: 37484 - DNA, 404 bp, Glycine max
  Clone ID: LIB3055-001-Q1-B1-H12
agccttccaaaatatcctcccagcaaggagatggatgcaaagctacgggatgaagaagctaggagattgagagcagctggtaaagctaatgctgatggtgtcaagaaatctcgtccacgtgagcgagttgggaggggaattgcagttccagaggccaatgccgaactgcaagcaaatattgatagacgacggctgatcacacattcaaatgctaagagcaagagtgagaagtttcctcctccccaccaagatggagctctaggctatcctttgggttcttcacatcacatggacccagtttttgatccccctgatgttccatttagttctacaaacttctcacaacctaaagcagatatccagacctggtccggcccaatggtagatccttctggtgtgggcgt

SEQ ID NO: 37485 - DNA, 295 bp, Glycine max
  Clone ID: LIB3055-001-Q1-B1-H2
gttccttctttctttatcatcaccagtgttccatatttcagagaaaatggctttatcatctccctctctagtgttcaccgtacagaggtgtcaaccggagctggtggctcctgctaaacccactcctcgcgaagttaaacccctctccgacatagatgaccaacagggcttgcgtttccaaattccattcatactattctatggtaatgaaccatcaatggcagggaaagaccctgctaaggtcattagagaggcacttgcgcaaactcttgttttttactacccttttgcgggt

SEQ ID NO: 37486 - DNA, 305 bp, Glycine max
  Clone ID: LIB3055-001-Q1-B1-H3
cagtgttcactgcaaagaacacctcacctgaccgcctcgcatcgaagactctgacgccgatcctcttcccaagcgcgtctccaccgtctggagagctcgcacaaacgacatcgccgtcaagcatacgataatcacggtgtgctaggtgcctgaggaggcaggtttctccgacagtgatgcgttgattttccccgacatgatcacatacatgggtgtggacgagtcacacgtggatgtgttttttaatgatgtgagactgactggtaaagagtggcgtggtggaaagcaacggaacggggtgttga

SEQ ID NO: 37487 - DNA, 333 bp, Glycine max
  Clone ID: LIB3055-001-Q1-B1-H5
aaaaaaaaaatcctccactgaagtttagggtttggagagtggcacttaatttgcagcaatcatgaacaccacctcaaactaatgcacgttctcgatactcactccattcttccaagcactaattaacttctgttaatccaatcagcaattacgagcatcgaagttcctccacagttttaatctgctatggcagcgaggctcgcaattgtgaggagcaccagatggagattgagcagcgttttagggttcaataggtttattcattcggtgccccaatctcctcctttagctggaagcattgatcttggggttcggtcgccgcaatccgttttg

SEQ ID NO: 37488 - DNA, 294 bp, Glycine max
  Clone ID: LIB3055-001-Q1-B1-H6
aaaaataagacattgtttggtttggttacttgctcgaatttcctcgaatcgcttaatttgtatttgattagttaaaccgcaacgcggaatctcttttctcgaactggctaactctcaggcaagtggttcggacgctgattccagcaacaagcggctggtgctcgcactgtatgacgccctaaactccggcgactccgacgccgtcgtcaagatcgtcgccgccgacctcgagtggtggttccatggtccgccctcacaccagtttttgatgcgcatgctcaccggcgactccgc

SEQ ID NO: 37489 - DNA, 314 bp, Glycine max
  Clone ID: LIB3055-001-Q1-B1-H7
cgcggcaatacaaaaagccgcgtttgctttgctcgctcgcactcacaaccacaacacaacgcggcagagcgaagagaaggggcaaaagagaaagaagcgcttatcgaactcggacggaagcactgagttgactcggagggagtggaaagtgttgttgcgtaatgtctggtggtatcgctcgtggacgcctcaccgaggagcgcaagtcgtggcggaagaaccatccccatggttttgttgcgaagccggagacgctgcccgatggaaccgtgaatttgatggtgtggcattgcactattcccgggaagactggg

SEQ ID NO: 37490 - DNA, 259 bp, Glycine max
  Clone ID: LIB3055-001-Q1-B1-H8
caccgatcaaagaagaaacaaccgcaacagatctccgtttctcgccaaacaaacacaaaatggctgccttcagcggcgacgaaaccgcacctttctttggcttcctcggagccgccgctgccctcgttttttcctgtatgggagcggcgtacggaaccgcgaagagcggcgtcggggttgcgtcgatgggcgtgatgaggccggagctggtgatgaaatcgatcgtgccggttgtgatggctggtgtgttgggtatcta

SEQ ID NO: 37491 - DNA, 326 bp, Glycine max
  Clone ID: LIB3055-001-Q1-B1-H9
ctgtagttcactgcttgaaaaattgatgagacacaagcatggttgggtgtttaattctcctgttgatgttgagactcttggtttgcatgattattttactatcagcactcatccaatggacttgggaactgtgaagacaaggctgaacaagaattggtacaaatcaccaaaggagtttgcggaggatgtgagactcacttttcgtaatgccatgacatataatccacagggacaagatgttcatattatggcagaggttttatcaaagatattcgaggacagatgggctatgatcgagtcagattacaatcggggagatgagatat

SEQ ID NO: 37492 - DNA, 371 bp, Glycine max
  Clone ID: LIB3055-002-Q1-B1-A1
gaaaacgacgccgacaaacagcgtcgttccaccagcgtcattgccaagctcatgggcctcgagcccctaccagattcggagcccggacctgggcccgggcccgtggcgaagctccagagatccgcgtccgagtccagagtccccagagatccgcctctgcccctaacaacgcagtgtcgtttcttcgaccccaacaatttcttttctgcccagttcacaaccaatgtggtctacgagaataacaacaacaacaacgctgccatcgaatcacgattcgttaatagcagagtcgccgcagatccaccgaaacagaggttaaagaagagtttctacgactccgcggatttcttccccgagccgaaacacaccgt

SEQ ID NO: 37493 - DNA, 264 bp, Glycine max
  unsure (1)..(264): unsure at all n locations
  Clone ID: LIB3055-002-Q1-B1-A10
gaaacgannataacanataagaagaagaaacaatgaacgacttgttctcaagttccttctctcgcttccgcagcgaccagtcattcccggaccgccaccacgacatcgagatgggcgccgccgccggtggcccccgcggcggcgaagtgaacctcgacaagttcttcgangacgtggaaggcgtgaatgangaactaaaggaattagaaggcttagcgcagagtttaagaagcagccacgagcagagcaagacgctgcacaacg

SEQ ID NO: 37494 - DNA, 347 bp, Glycine max
  Clone ID: LIB3055-002-Q1-B1-A2
gatattcgttatgtggttggatttggtgacttatttgcaccatcatggccatgaagacaaattaccttggtaccgtggaaaggaatggagctacctcaggggtggtctaactactcttgatcgtgattatggatggatcaataacattcaccatgacattggcactcatgtcattcatcacctatttcctcaaattccacactatcacttagttgaggctactgaggctgctaagccagtgtttggaaaatattatagagaaccaaagaaatcagcagcacctcttccttttcaccttattggggaaataataaggagcttcaagactgaccattttgttagtgaca

SEQ ID NO: 37495 - DNA, 392 bp, Glycine max
  unsure (1)..(392): unsure at all n locations
  Clone ID: LIB3055-002-Q1-B1-A3
agaccgcattggtgcccagtagaatttctcaacactctatgcacctctcatccgtgatgggcgtatggagaagttctactgggcaccaacaagggaagaccgcattggtgtttgcaccggaattttccgcactgatggtattcctgaacaggacattgtcaagcttgttgacaccttccctggccaatccattgatttctttggtgcactgagggccagagtatatgatgatgaagtgaggaagtggatttctggtgttggtgttgacagtgttgggaagaagcttgtgaactcanaagatggacctccaacctttgagcaagccaagatgactctggagaagctcttgctgtatggtaacatgcttgtccaagaacaagagaatgtcaaga

SEQ ID NO: 37496 - DNA, 119 bp, Glycine max
  Clone ID: LIB3055-002-Q1-B1-A4
cccgggcccccactcccaactttcgaaaacgattccagcaggcaccttaaaggagcagatgttgctacatctttatccaaaattcaagatagaatacagatcttctttgctgttctttt

SEQ ID NO: 37497 - DNA, 362 bp, Glycine max
  Clone ID: LIB3055-002-Q1-B1-A5
gaaagaacagcaatggaagctgcattatgcagtgcacttgctctttcacccaatcaagtattcaatgcagcaaatcctggagataaaaatgttcctttgaaatatagcaaagatcggagtgttgtaatgacagtggcagccactggaatattagggaaaggtggtgggttgttggagaggccaaccatagagacaacatcacctggtcgggaatctgaatttgacttaaggaaatcgcggaaaacatccccaccttaccgagttttgctgcacaatgacaacttcaacaagcgagaatatgttgtgcaagtgttgatgaaggtgatacctggaatgacaattgataatgcggttaacatcat

SEQ ID NO: 37498 - DNA, 409 bp, Glycine max
  Clone ID: LIB3055-002-Q1-B1-A7
ttgggaaccatttcagatgacctagtgaatgaaaaattgaatgttgccaactgagattctaggtctggttgtgaccaattttggaaagaaaaaaaaccttgaggcttcatttcatgtgacatcaattcaatccaattcttctaagttttcaatcttgttcaaactcatctagtcctgtctgttatttgatctcgtttcgaagtcatgtctttgttatttttttcggagctttcttttgaagttctttggtctgttcgtgttctagagcatccttctgatctattagttctctgcctgctatgtgcaagccatggctgtctgaagaagcttgcattttttttgtttctgaaacctaagaaatgggttttttaattaaaataaacacttgaggatcttcggactgaaattt

SEQ ID NO: 37499 - DNA, 395 bp, Glycine max
  unsure (1)..(395): unsure at all n locations
  Clone ID: LIB3055-002-Q1-B1-A8
cacttgtttcttccctctgttcctgttctctaattcctttttcctcatcatttccgttgacatctaatcactatggttttgccaacatattcagggcccaaatccaatcctcagcttccacgaatatttgcacccaaaaaatcgacaccaatctcttaaccatcgctgaatccttctacgaggatgagctctgggctgctgcctgtcttcgcgtccgttccttcaatcagttccgcgccgacgccttcggaatacaagatcatacgaggtacttggctgaccgcgagttcgaagcactgaaggagcgtgtttcaagganaagaatgggcttcagaagagtctcttgcataaatgcttcgcttccattgccccatattgccaccctctccgatgat

SEQ ID NO: 37500 - DNA, 350 bp, Glycine max
  Clone ID: LIB3055-002-Q1-B1-B10
ttgacaacaaaatcctctctgcttccaacaacatctcaaccatgggtacttgggttcttcaacaagtgacctctattgattggaattggaaccatgaatcctacccagactttcgtgatttctctgttatacccttcttcgctctcttcttcccctcccttcgcttccttctcgacacgttcctattcgagcaagtggccagacgattgatttttggaaagggacacaagaagatggattttcaaacacttgagagaaaaaagaagattagcaaatttaaggaatcggcatggaaatgtgtttattttccatctgcagaaatttttgctttgggagtaacatatgatgaa

SEQ ID NO: 37501 - DNA, 369 bp, Glycine max
  Clone ID: LIB3055-002-Q1-B1-B11
cttgctttgtcagctagagattctgtagtttatttaggaggaccttcttgggaagtggggttggggagaagagattctactacagcaagcagaagtgatgctaataatagcattcctgggcctttcctcagtctaactgctctgataaacaattttgctaatcaaggcctctcagttacagatttggtggctctttcaggggcacatacaattggcctggctgaatgcaaaaatttccgagcacacatctacaatgattccaacgttgatccctcttaccgaaagttcctgcagagcaagtgccccagaagtggaaatgataaaacaatcgaaccccttgaccaccaaactccaatccaatttgataat

SEQ ID NO: 37502 - DNA, 353 bp, Glycine max
  Clone ID: LIB3055-002-Q1-B1-B12
gacagccagagccaccttcggatctgagagatcgccacgcacgcacgcacgcttcctttgattttgtcttccgcttcgtcatttcctattctcagcttccaattctcctcctccttcttctaattctacttcttttcgagggttttcgttcctctgtgcctgattgatccctaattcgataccatgcggaagaagctcgatacccgtttccccgctgctcggataaagaagataatgcaagcagatgaggatgtcggaaagatagcgttggcagttcctgttttagtttctaaagctctggagttatttttgcaagattcttgtgaccgcacttatgaagtaacccttcagag

SEQ ID NO: 37503 - DNA, 340 bp, Glycine max
  unsure (1)..(340): unsure at all n locations
  Clone ID: LIB3055-002-Q1-B1-B2
gagatggaaagactttcgtttccacagcacgtggtaagaaatatcccgtgactgtcaacctaagggaaccaaagaaaaatgcttttgaatgggctacatccttgaaagcccctcaaacaaaaggtgcaattccggttaatcaatccaaaacaaactttttcaaaaattaagccaaggaatccacaaacaaaactgaagcccaaaaagtgcgagataatctcatctacaattacaaacctacttttggtggaacggctgggaaaggatatgatcaagtgtatctctttgaataattctatctgtangaggtgtccttgaatttgattttatgcacaataaa

SEQ ID NO: 37504 - DNA, 412 bp, Glycine max
  unsure (1)..(412): unsure at all n locations
  Clone ID: LIB3055-002-Q1-B1-B5
ctcgagccgattcggctcgagctcgagccgctcgagccgctcgagccgcaaagtcagtgaatagtgagtgagtgagtagcagctagcaatggaaaggactgccatggcttcttcagctactcctccacgaccttctcttccaactccttccacttctccacacacagtagtcaccagcacctttagcaaacctcaactcagacgctctcacatagcactaccaacttcaaccaccatttcattgctcgctctcttcgcccctccaaacgaagccaaagccgctgtcagcatcgccaaggaccagaatggcccttctctcaaccaagtggagaaaacgctggatcaggttcanganatgggttcgggtgtgctggacacggcacaacgtgttgctgaagtgatacggaacgct

SEQ ID NO: 37505 - DNA, 358 bp, Glycine max
  unsure (1)..(358): unsure at all n locations
  Clone ID: LIB3055-002-Q1-B1-B7
acaatttatctctatcagaaaaggagaaaaactgcgtctaatagttttagattctgaagaggaagagaaagatacgttgtaactagcaaaggatacgccctgtttggcgtaatccttaaacgtagcattagtgttaacgttgtaggttgtgaagccaaccttgtgatccccttctgcgcctttagcatagcctttgaaagtatccgaaccagggttaaaagaattcccgtagtttttgaaatccagtttggtcctttctttggtgttcttagcataagattganacgagtcatcagctatgttagcctggtctctgtaattagcaaaactctcagtgctagcgtgagttctaacagcg

SEQ ID NO: 37506 - DNA, 311 bp, Glycine max
  Clone ID: LIB3055-002-Q1-B1-B8
acaatttatctctatcagaaaatgagaaaaactgcgtctaatagttttagattctgaagaggaagagaaagatacgttgtaactagcagaggagagggcctgtttggcgtaatccttaaacgtagcattagtgttaacgttgtaggttgtgaagccaaccttgtgatccccttctgcgcctttagcatagcctttgaaagtatccgaaccatggttaagagaattcccgtagtttttgaaatccagtttggtcctttctttggtgttcttagcataacattgatacgagtcatcagctaggtgagcctggt

SEQ ID NO: 37507 - DNA, 360 bp, Glycine max
  Clone ID: LIB3055-002-Q1-B1-B9
tatacactttggtagggtgaagcatgcagaaccaggtagttttggaggatatggacttgggatgaatccaatattaccttccattaattagtgtgcaacagtagcacgaaacaagttcctatttaatccaatattacttggaggatatggacttgggatggataggttttttctttaaacttgtatagttgtatagcaattcataaattcaaaattgtgtagcgtatcaagtacgtacagaaaagttcattgaaaccccaagattggtatatgacgtgatacatttaatgcatgtttggtttcacaattgaatttgagtctaaatatttcgtatcaggtataattgtaaaaaaaaattga

SEQ ID NO: 37508 - DNA, 208 bp, Glycine max
  Clone ID: LIB3055-002-Q1-B1-C10
gacactcttacgcagtccagaatctaagttcctagaaccaacatcattgcgcaagtgcagcacattgtcgcaaacgtcgcatgactccagttccgacagactgtcgttcagctcatctcggcacaaatcagggattatgatcacgtcaggcagatctaagagacgtttgacgcaagcgtgttcattggaacatcagaggatgacacgc

SEQ ID NO: 37509 - DNA, 311 bp, Glycine max
  Clone ID: LIB3055-002-Q1-B1-C11
cgaaaaaatggttacctacaaaatggtggttctgtgcatccttatgctgatccagagcaatgtgcagatacaaagcactcctttggagcctcttccagtggggttacctctcatgatagcatccagaaagataagttgaacatacattctgattctttaagctgtatacagacacaaattcatatgacacgccctgactatagtcatgctccagatcacacgtcgctctttccgacattgtctggatcaagatctgagcatgatggacatctgtctccttctcttaaagaatcatcttatgcatcaaacat

SEQ ID NO: 37510 - DNA, 318 bp, Glycine max
  Clone ID: LIB3055-002-Q1-B1-C12
aaattttaaaagaataccccctctttttgctgcatcagaggagttgtaaattaagagcatggctgcacaagctcttgtatcatcatcttctcttaccttctcagcggaggctgcaagacaaagtcttggaccaagatcactccaatctccatttggcttctccagaaaagcctcctttcttgttaaggcagctgctaccccccctgtcaagcaaggatcagacaggcctttgtggtttgcatcaaagcaaagtctttcttacttggatggcagccttccgggtgactatggatttgaccctctgggactttcagaccc

SEQ ID NO: 37511 - DNA, 330 bp, Glycine max
  unsure (1)..(330): unsure at all n locations
  Clone ID: LIB3055-002-Q1-B1-C2
ctcactcactggaagccttgttgtgagtaagggaaaggcttcctgcactgagcaccaagttgaaacctcttgattctttgcttagaattccacagaatatggagactgttcttttcaatgactccccacctttggagttcaagggtatgagcaaggaggaggaagactcattgctanggcaagttgaaatatggaggtacatgacatgcttcacggactccgtggccttgaaatccgtcatagagctgcgcatagccgacataatagaccgttatgggaaaccactatccttgtcacaaatcgtggagaacatagatgatgcaccctccc

SEQ ID NO: 37512 - DNA, 429 bp, Glycine max
  Clone ID: LIB3055-002-Q1-B1-C3
cgaagaaagattcgaaacgaagaaagaaagcgttgtgaagaatggcggaagagggacaagtgatcggtgtccacagcgtagaggagtggaaggaacatctcaagaagggagaagagtccaagaaattgattgtggtggattttactgcttcttggtgcggtccatgccgtttcattgccccaattcttgcagagtttgctaaaaagttgccgaatgtcaccttcctcaaggtggatgtggatgaattggagactgtttccaaggagtggggaattgaagctatgccaaacttcctgttcttgaaagaaggcaagctggtggacaaggttgtgggtgccaagaaagaggagctgcaattgacaatagccaaacatgccgcaattgctgctgcttgaagtgccatatgaatatgttaagaataatagacta

SEQ ID NO: 37513 - DNA, 275 bp, Glycine max
  Clone ID: LIB3055-002-Q1-B1-C4
gagggtgtgtaattaatttgtgtcaagtagtgagtgaggtcatttttggttttgcttttccccttgttagccattggtgttgcacaattggcattaaggttctattataacatatgccaaacttgacctgtgaaagatatcctaattcctaagtgctaatgctactctactttatcacttgcatctccttctttctgtttttaaagcctatcctctctctcaaatcactcccgtcatgggcaagtgaagtgaggttgatctcccctttgttttac

SEQ ID NO: 37514 - DNA, 354 bp, Glycine max
  Clone ID: LIB3055-002-Q1-B1-C5
caaaattcatcagcctttcacgtaatcttctctcctcttctctacgcgcactttgcgagatactcactttcgaaggaatccactattacgtcgtaggctaaacaaaacaaaacaaaaattactgtgttttctttgggatcgctctgaatatctcttaagaaaagcaacacaacacgcagatacggtaccctttcgttgggaaatagcaatgggggatggtaactatgatagaactttgagggagttctgtattccggattacatattagtgccgggatctgacgtgagaagtgtttcacatgtacctgcttgccctgtgaatgttttcaataacaccaaaagtggtggccagct

SEQ ID NO: 37515 - DNA, 369 bp, Glycine max
  Clone ID: LIB3055-002-Q1-B1-C6
ttatgtttcaagatattactcccataacaacgattaccttgaaatttgccgttgctacaaggcactatatgagattccatctgtcaaagaagagcctgccaagtggattccaatcctaaggaaaatatgtcggtacttggttctagcgccctacgatccaatgcaatcaagctttctcaattccaccttggcggataagaatctatctgagattccagacttcaagctactcttgaaacagctggttagcatggaggttatccaatggataactcctatgggatacatataatagtgaatttgagaatgagaacgcctctgggaaatctttgggagaaaaagcagcagaagatctaaggcagggaataa

SEQ ID NO: 37516 - DNA, 375 bp, Glycine max
  Clone ID: LIB3055-002-Q1-B1-C7
gaccctttaacaatgtagtccttaaatttaacatggtatcagagttggttgatctcgttctacttattgttgccctctgtcatctgctaccgtctgttatctccggccagctagtgttatttttctccagcgggttggtgcgccttgtcaagcacagtcgaacccaagtgttttggatctagattttgacccagtaatgaagagtgggttctcttttttcttctcttgtcattttcttttctttgtcagatctacttttcttcggtaggcctttgttgtcaccaatgccaccattgtactcgtctccctttagcaagtctaacctagtggtcagttgctattgcctttgccagagccgtcacaccgatcgctaga

SEQ ID NO: 37517 - DNA, 385 bp, Glycine max
  unsure (1)..(385): unsure at all n locations
  Clone ID: LIB3055-002-Q1-B1-C8
gtgaagctgggcccatcagcccccgaagtcgggagggtcagcatgaggaagaccgtcaccaagcaggcctcctccggaagcccatggtacggcccagaccgcgtcaagtacttgggcccattctctggcgagcccccgtcctacctcactggcgagttcccaggtgactacggctgggacactgctgggctttcggccgacccagaaaccttcgccagaaaccgtgagctcgaagtgatccactccaggtgggccatgctcggggccttgggctgcgtcttcnccgaactattgtcccgcaacggggtcaagtttggagaagctgtgtggttcaaggccgggtcncagatcttcagcganggtgggctggactacctgggcaacc

SEQ ID NO: 37518 - DNA, 346 bp, Glycine max
  Clone ID: LIB3055-002-Q1-B1-C9
ggcagcgtcactacaagcagcagctactttcatgcaacccaccaagttgagcaggagcaacactttgcagcaaaagtctactcagtccatttccaaggcttttggtttggaacctgttggagctaaaaaggtcacatgctcccttcaggctgatcttaaggacttggctcacaagtgtgttgatgctaccaaaattgcaggattcgcccttgccacctctgccctcgttgtctctggggcaagtgctgaaggtgttccaaagaggctaaccttcgacgaaatccagagcaagacctacttggaagtgaaggggacaggaacagcaaaccagtgcccaacaattgat

SEQ ID NO: 37519 - DNA, 318 bp, Glycine max
  unsure (1)..(318): unsure at all n locations
  Clone ID: LIB3055-002-Q1-B1-D10
gtgtctttcatgcttggttganagatattctcccttcacatatgtggagtaagacttcagatccttcaacagtgttgggtgaataagaccagtgatctcttatggaaaatattgtcatcaaaggctctcatcaatgcaaagcacctgattcaaatgggaggtccatgaacaacaaactagattagactagtactcaggatccaaggtgagactagtttaaccaacagatccttcatagtgttccatcgtatgcaatcttcaagcatatcacatgccaagatcaatggggtctgagttgcctcataagcagtctccacg

SEQ ID NO: 37520 - DNA, 330 bp, Glycine max
  Clone ID: LIB3055-002-Q1-B1-D11
cctagaaatcgatcactgatccagttggagtacctctacaggatagacctcaacagaaaactgaagagtaacggcagcaagtgattgagttcagtagttcctcatataaaattattgactctcgagatacagtaatatggagaagacatgattgtttcaagcagcgacagaaccggaagcaccctttgtttcaaagtttcaaagaggggaggacgggttattcacatttcatttgatggtcagaggcgaattgagagctaagctgtggtaattctaacgattctccccgggaaaaatatagatgtctccgacgtcacccgtacgatgtgg

SEQ ID NO: 37521 - DNA, 350 bp, Glycine max
  unsure (1)..(350): unsure at all n locations
  Clone ID: LIB3055-002-Q1-B1-D12
gcaaggagtttggtgattgagaccttgggacaatttgangcaacaaccttggggaatgctagttttcgtaccgtgctggaatgccgacnatcaagttgagaaatatgaaagtcttgcatcanaagtggctctaggacttcgntttcacnctgagaatgttcaagaatgcattcgattgacagaagaatttcggttacttcccagaggccatatatccaaggaagataaattggagataaagaagatggcactatatgctgcggatgttgcaataaccgaagccactaaactgatgagaggaaatgatatgtcagatgaagccaaggaagtcccccagcaacacattttta

SEQ ID NO: 37522 - DNA, 320 bp, Glycine max
  Clone ID: LIB3055-002-Q1-B1-D3
gaacaagagagagggcatcaccaaagaacacgttcactctcgattttgccttgcaaactgcgatttctctgcagtttcttctaccctccaactctgacctttctttacgcgattttggctttcatcaacttcttattgaaatccttcctcagtcttctcccattttccagagttcttaaaaattgatgcttccttacaagtctttctgagcattccgtttccttcctccagggaaaagttagcgtgtctttaggtcacaggattttgagagatttactttttaatctgcctctgaatcaattctgcaggaagatatataa

SEQ ID NO: 37523 - DNA, 377 bp, Glycine max
  Clone ID: LIB3055-002-Q1-B1-D4
tctctgtctcgtttacacatctctccaacctttcactttcgtttctcagttttattcgaatccctctctcaatctcctttccaaatggccagcgttgaggttgcacagcaaacaccaacaacagttccagaaaatgaaacaaccgaggtaagcaagacccaggaaacaaccccagtcactgaggctcctgcaacagaacaaccagcagctgaggttcctgcaacagaacaaccagccgctgaggctcctgccccagaatcaaccaccgaagccacaaatgaagaaatcaccgaggcaccaacagaaacagtagaaaaaacaactacagaagtaaccacagaggaagagaaccaaccagctgagtcagttgaaacccc

SEQ ID NO: 37524 - DNA, 362 bp, Glycine max
  Clone ID: LIB3055-002-Q1-B1-D5
gaaaaaccttgatatgtttgaaggagatatagagaagccaaaggcagagagtatgaaagtggacttacaagggttgatgcatgacagtgtaaatgcaattgagtttggtagaaataagaatttgtcttccaaagttgaaaagcttcatgaggaagttgacattcaagagcttggtgaaatatctgctgaagctcaacaatatatttttaatttgcaatctcgtttgtcttctatgaaaaaggagctgcatgaagtaaagaggaaaagtgctgctcttcaaatgcaacagtttgttggagaagaaaagaatgatttattggattacttgaaattccttcaacctgaacaggttgctcagcttt

SEQ ID NO: 37525 - DNA, 360 bp, Glycine max
  Clone ID: LIB3055-002-Q1-B1-D6
gttacttcttcttcttcttcttcttcttcttcttctctctggaattttccctgacttttgtgtgcatcgatggcggcgatcagtctccggaaggggaacacgcggctgccgccggaggtgaaccgcgtgctgtacgttcggaaccttcccttcaacatcacgagcgaggagatgtacgacatcttcggcaagtacggcgccattcggcagatccgcatcggcaccaacaaggacactcgcggaacggccttcatcgtctacgaggacatctacgacgccaaaaccgccgtcgaccacctctccggcttcaacgtcgccaaccgctacctcatcgttctctactaccagcaagccaagatg

SEQ ID NO: 37526 - DNA, 137 bp, Glycine max
  Clone ID: LIB3055-002-Q1-B1-D7
ctcaattcgacttcagccgagatatgaatcacattcttggggtcaataccgagcacctttgcacgactgatttgacgtctcttaatggacgggaggggaataccacgttttcgactcccgttaacctcatactgtac

SEQ ID NO: 37527 - DNA, 133 bp, Glycine max
  Clone ID: LIB3055-002-Q1-B1-D8
gtgctgttttaggattttatatatgttgtggttctacgtttgattgattttgaacctactaatgtctgttccatatgtatggtcaatgattgtagttcatgacaagtgaaaggaattattgtgagttttaatt

SEQ ID NO: 37528 - DNA, 217 bp, Glycine max
  unsure (1)..(217): unsure at all n locations
  Clone ID: LIB3055-002-Q1-B1-D9
gtgttttttagtctttgttgagagatatttctcccttcgcagttgtggtgtgatgctttcagatccttcaacagtgttggttgattgacaccattgttctcttatgcaaaatattgtcatcaaaggctctcatcattgctaagctcctgattcanaaaagaggtccatgaacaacanactactttagactacaactcagaagccaaagtgagactat

SEQ ID NO: 37529 - DNA, 396 bp, Glycine max
  unsure (1)..(396): unsure at all n locations
  Clone ID: LIB3055-002-Q1-B1-E10
gaccggagcgccctcccacaaatcgacacccggcacactccccgtctgaacagcgttcgcctcctctcctctcccctccgaggactccttcctcaccctccagatcgttcactccaaaccctccgacacccccaaacccctcgtcgccgacctccgcctcccctcaaagacctccacgacctccacgactccacgcgcctccgcaagttcnccctctctcgcgcctctggccgcncccacggcaagatccacctcaaactcggcctcctcggccgcccccaattcgattacgcctcccccaaccctaaccctaaccctatacctagtcctaatttcgtctgctacagaagatacacccccttcccttcccattcccattctcactccccttctcca

SEQ ID NO: 37530 - DNA, 363 bp, Glycine max
  unsure (1)..(363): unsure at all n locations
  Clone ID: LIB3055-002-Q1-B1-E11
atgtctttgagccaaacaagaaaactgcttaaaagtattgagcggtttcatgtnttagaaatcanagattatgcatttttgttgcgggctacatagatcactctttatttcattgttatttcgttgggttttgataagaaccttactagaaaagctagccatgtagttcttgttctcatagctacaagtgattccagtttcagcatagttccatcatgttactgtgtttagagggtgacaagtataataattgggccagatatggttcctaagttaacatttctgtagctttattctagtttgtagcgtcctctgttaagagcagccttagaaaataaggtcttgttacctaaaagcttttgc

SEQ ID NO: 37531 - DNA, 343 bp, Glycine max
  Clone ID: LIB3055-002-Q1-B1-E12
ctcactcactcttcaatgccccgagtccacgttccccagctgttgcagccaccaggtcgccgtcacacatgccgcaccaccttcgcgtaagctgccgcgaagttgctttcgtggctgccgtcacctatatagaaaatacaggcattgttttccagggatacacttcagatcaaaggagggcagcctcccttcccgcgactgatgattaggtggatgactatgaagaacctgatgctagaggacacgggaacacaatgctttgataggatgtgacattagggtataagttctatattaattgtatgaagttttagacgaccttgttttgagccgaagtgaattt

SEQ ID NO: 37532 - DNA, 180 bp, Glycine max
  Clone ID: LIB3055-002-Q1-B1-E2
tatatgtatacatgtataaatttaaattatataattcaggtttggatggatcaatgggacgcaccacgatggccacatattctaaagattatatattactattatgttaagagcgtgttccagaatcaattgccacttgcaatgattgtagtaataagatcaatatttgtgtcaatgggt

SEQ ID NO: 37533 - DNA, 339 bp, Glycine max
  Clone ID: LIB3055-002-Q1-B1-E3
gttgacatggcttcttctacactcgctctgactctcagcctctccaccaccaccaccacctccaccacctcctactcctatcaacaccggtttccatgtcctagaataaagttattctcttccaagcaccgctccttctccgtctcagcttctgcttccacctcaaattcgcttcaggctctcatattcgactgcgatggcgtgatcctcgagtctgagcacctgcatcgccaggcctacaacgatgcctttgttcacttcaacgttcgctgcccttcttcttcttctccgggcccactcaattgggacgttcaattctacgacgaactccagaactca

SEQ ID NO: 37534 - DNA, 392 bp, Glycine max
  Clone ID: LIB3055-002-Q1-B1-E5
aagagattgaagagacccagcagaccgacaaggacagatggaagggtcttgcctatgatatctcagacgaccaacaagacatcacaagaggaaagggtttggttgactcccttttccaagctccacaggatgctggaactcactatgcagtcatgagctcctacgagtacctcagcactggacttcgccagtacttggacaacaaaatggatggattctacattgctccagcttttatggacaagcttgttgttcacatctccaagaacttcatgaccctgcccaacatcaaggttcctctcattcttggtatctggggaggcaagggacaaggaaaatctttccaatgtgagcctgtccttgcccagatgggaatcaaccccatcatgatg

SEQ ID NO: 37535 - DNA, 384 bp, Glycine max
  Clone ID: LIB3055-002-Q1-B1-E8
gttcaactgaggtgatggctttgaatttgccttctcccgcccaagtgaagcccttatttttctcttcaaataactccacaaaacttccaggtagcgggtctttgaagagaaaagatagtgacacaacagtagagagacgagtttattgctctgccgctgctcaatcaccaccaccagcatggccaggaacagctattcccgagccttctgatttcaagacatgggatgggcaaaaacctatttctgtcttaggatctacgggttcaattggaactcagacactgagtatagtggctgagttcccagaagattacagttgtgagccttgctgctggctctaaatatactcttcttgctgaccagaataaaacatttaaaccctga

SEQ ID NO: 37536 - DNA, 333 bp, Glycine max
  Clone ID: LIB3055-002-Q1-B1-E9
attggttcctgtatattaaaatggtttctcatgaaaagttagaacttgaagtccaataaatgcattgttttggacaaggtgctatactaaccacctacaaaattggtagcagctctaaacgaaagcaaaatagaaataagaacttttgaaatactttgatggatatggttctgtctctatccatctgtgcatgtgttgtctggattttgtatatggctaagggccatgttcactgttgaaaatgttgttatttccatatatattaatatattggaagtttctgatcacaaaacatagctttggctgctaatgggtgagaccatttgagttgtt

SEQ ID NO: 37537 - DNA, 130 bp, Glycine max
  Clone ID: LIB3055-002-Q1-B1-F11
tccaacaatgatgttcaattaaataaccaatgtgaaaccccaagaaaatttaaaacccaaaaccaaccgtcctggagcacaaggataacaagttaaaatgggggttccgtcaagccttattattccaaaa

SEQ ID NO: 37538 - DNA, 391 bp, Glycine max
  unsure (1)..(391): unsure at all n locations
  Clone ID: LIB3055-002-Q1-B1-F2
acaccccccacttgctcctgagccatacaatacaaaaaaaaaagtcgcttttttttattttttctttccaatcatggctggtgtgaaccccgaggcaggagggtggaaggcttatccttctgttatggagactgctcttggtagtagtggtgatggaaggcgtggccataacatgaatgatgatgggtcggtgatgcatttctctgctacaaggccagtggcagtgccatcatctggacagaataaagtagttcctaatccaactcagtttagcatcctctacaaggggaaaatgtgtatctatgaaggaattcctgcagaanaggtgcgtgaaataatgttgattgcttctgtctctgctaagtctgctgaaatgaagagtgggataccc

SEQ ID NO: 37539 - DNA, 335 bp, Glycine max
  Clone ID: LIB3055-002-Q1-B1-F3
gaaagagatcacatagcagaatggcttctactcaatgtttcttgcaccaccatgctcttaccacccctgccagatccccatcacaacgcatcatggttagcaccaagcctaaccagcttgtttgcaaggcacagaagcaagaggatattgatgtcagcccaatctctcgccggttagctctaaccgtgctcattggtgctgctgctgttggctccaaagtccaacctgctgatgcagcttatggggaagctgccaatgtgtttggaaagccaaagacagacacagatttcctgccatacaatggagatggattcaaactatcgattccctcaaag

SEQ ID NO: 37540 - DNA, 345 bp, Glycine max
  unsure (1)..(345): unsure at all n locations
  Clone ID: LIB3055-002-Q1-B1-F4
gtgtctctacgatcaggatccaacggtccaaaatgttcggggcttgtgctgtttgttttcccaggttttagagctccaaaccttcagatccacctcagtcgtctccagatcttccttcctggataacgttttcgggttcgagaaggcacttgtgttgtttttcgtacgaaatggagactaaacagagttcggtgacggttacgctcagttacggcgcgttgacgtgcgccgcggaatttctcgcgactttgctagcttctgctgtcgtcaaagcctcgcttttggccccggatctctaccggctgctattgatcaacacgcctactgccanaggagagagcaaaa

SEQ ID NO: 37541 - DNA, 360 bp, Glycine max
  Clone ID: LIB3055-002-Q1-B1-F5
ctcgagccgtgaatttgcatcatggttcgtatatttagaattatgcgaaccagttgaaaactcgaaccatcctgtttgtgtatcatgatgatgtttctagtttccccactttcccctttttggtttgtggcgcggggaatgtcatttgtgtaatattttatttgttttcaagttgttgagccatacagctattgtgaatggttactatgtagtgtacatgagaattttgagttctagggcattgtctatagtggagttgatataaccgacagttcaatacatgcatgaaaaaaaactattagtaattcattagggtaatgattgttagtataacttaatgttatttttctatgtaagaat

SEQ ID NO: 37542 - DNA, 145 bp, Glycine max
  Clone ID: LIB3055-002-Q1-B1-F7
ggcctcatttgcacgtggagccgcatctctaacccgcattggtctctcctcttctaagacgccccttcatctcatccaccgccgtggcttcgccggggatatggccctcccatagttgcctgctggacagaccctatgatcccgt

SEQ ID NO: 37543 - DNA, 338 bp, Glycine max
  unsure (1)..(338): unsure at all n locations
  Clone ID: LIB3055-002-Q1-B1-F8
ttctaatccacaaaaaatgaccttaaattacaacattgccctcgccttctctgcggtgctcacgctgctcctctttcccctactgaccgtaggggagctcgtggaggagcagccactagtcctcaagtaccacaacggccagctcctgaagggccgcatcaccgtcaatctcatctggtacggcaccttcaccccgatccaacggtccataatcgtggacttcataaactcgttaagcagcgcgccaaacgcgcctctcccctcgaccgccacgtggtggaaaaccacggagaagtacaaggtgggaggaggattccctgcgctcgtcgtanggatgc

SEQ ID NO: 37544 - DNA, 242 bp, Glycine max
  Clone ID: LIB3055-002-Q1-B1-F9
ggttaagcggtgagatttgcgaatctgagaaatggcggattcttctcgggaggagaacgtttacatggcgaaattggcggagcaggccgagcgttacgaggagatggttgagttcatggagaaggttgcaaagactgtggaggttgaggagttgacggtggaggagaggaatctcctctctgtggcttacaagaacgtgattggtgcgaagagggcttcgtggaggatcatatcctccattg

SEQ ID NO: 37545 - DNA, 361 bp, Glycine max
  unsure (1)..(361): unsure at all n locations
  Clone ID: LIB3055-002-Q1-B1-G10
aatacactcataacacaaagcacaaagcaaagctcatccttgagttaaaaaatggcagcagcttcttccatggctctctcatccccatcctttgctggcaaagccgtgaagctgggcccatcagccccagaagttggaaaggtgagcatgaagaagaccgtcaccaaacaggtctcctcangaagcccatggtacggcccagaccgagtcaagtacttgggcccattctctggcgagcccccgtcctacctaaacggtgagttcccaggcgactaccgctgggacactgctgggctttccgcagacccagaaaccttcgccaagaaccgttaaatcgaattgatccactccaggttggcca

SEQ ID NO: 37546 - DNA, 358 bp, Glycine max
  Clone ID: LIB3055-002-Q1-B1-G4
ctttcctgggaaaaaattggaacctgcctctgttaaagtttgtatttttctgagtgggtgggttgattgagagtgctgtgcaagctttggaactttttcccaacctgctacttcaatggccactgaagaggttaacaaacctcaatcacttcctccataccctgagatgatagtgaaagcacttgaagcactgaatgagccaaatggatcgaacaagtcagcaatatcaaagtacatagaaaccacctacggtgagttgccagacgcaaccggttttggggagtcaccttaacaagatgaaagacagtggagagctttctttcaaacagaacaattacatgaaagctgacccaaatgc

SEQ ID NO: 37547 - DNA, 215 bp, Glycine max
  Clone ID: LIB3055-002-Q1-B1-G5
cacactctctctctccaccctccaactgcaatggccgtcccttccttctccgcgcgttctttttctctccctgcccaaaaccactactgccatctctcttctctcccactaccctccttcactctctcatctcgccgcccaagacattcttcttccaacctcttcacacctcttcgctctcccacaacccccatttttgcatcggcccctggcgg

SEQ ID NO: 37548 - DNA, 412 bp, Glycine max
  Clone ID: LIB3055-002-Q1-B1-G6
gtttcttcaggtcgagtagatttgccaggctccaaggtattcagtgtgctatggctgggaagaatgcttatttgagattcacttgtagcacgggtgatgccatggggatgaacatggtttccaaaggggtgcaaaacgttcttgattttcttctgaatgatttccctgacatggatgttattggcatttctggaaattattgttcggacaagaaacctgctgcagtaaattggatcgagggacgtgggaaatcagttgtttctgaagcaattatcaaagaagaagtggtgcagaaggtatttgaaaacaacgtgtctgccctggtggagcttaacatgctcaaaaaccttgctggttctgccgtcgccggtgctcttggtggaattaatgcccatgctagtaacatggtttc

SEQ ID NO: 37549 - DNA, 368 bp, Glycine max
  Clone ID: LIB3055-002-Q1-B1-G7
cgcatattgcatgttacatcatagcccttagaacagccagaggaacccagaagataaatctttcaaagaaaaaaggagagtgcttagagagagagcagaacatattattttcattttcatctttttttgagtatcaacaaatggcaaccactgtgatgaccactctcccccaattcagtggtcttagaccccaattctcagctgcccctgtgaagaacttggttgctgtgcaacccatgagtcgcaaggggaagggtgcattgggagctcgatgtgactacattggttcatccactaatctgattatggtggcttctacaaccctgatgctgtttgctggaaggtttggatttggctcatcagcaaac

SEQ ID NO: 37550 - DNA, 331 bp, Glycine max
  Clone ID: LIB3055-002-Q1-B1-G8
gagatggaccatgggaaatgatgagggaatttgatgataacatcccttctcgggcatttgacaattttcagtttgtgaattttactgaaataatgacaaggaatgtagattcaaccagaaaagagacagattttgccctttcagctttgatggagataccttcccaatacaaggcaaccctaaagcttggcaaattgggtacacggagggggcattcaccagatagggttgctctacccccacctctttatagtaaaacctcttccagcatcagcacaaactctacagggtcaaacagttttcaccaggggacacctacacatactaccta

SEQ ID NO: 37551 - DNA, 222 bp, Glycine max
  Clone ID: LIB3055-002-Q1-B1-H2
ggaaatggtacctctgcaatcgcttgcaatgtccactcgaatcgccaagtcacctcaaaaaccaggctcatgtacagtcccatccacaattgttcatgagcgtgtaaccctttaatccatggtcaatgattaaaagggtcctgttgaacgttacctgtgctaagaaaacatactcccatgcacatgtctgttatcaagaggggcaaaccatccatagagttc

SEQ ID NO: 37552 - DNA, 310 bp, Glycine max
  Clone ID: LIB3055-002-Q1-B1-H3
accaggcgcacgttagcacaaactatcatggccacggcaacagcagctgccacctcgtcctttatggggacgcgtctcctggaagctcactccggggcggggcgagtgcacgcccgattcggcttcggcaagaaaaaggctcccgccccaaagaaagcctccaagggatcgggccgagacaccgacagacccctttggtatccgggcgccaaagcgcccgaatatctcgatgggagtcttgtcggagactacgggttcgatccgtttgggctaagggaaccccgcggagtacctgcagttcgagctggac

SEQ ID NO: 37553 - DNA, 293 bp, Glycine max
  unsure (1)..(293): unsure at all n locations
  Clone ID: LIB3055-002-Q1-B1-H4
gagaagaagaaattagtagcctatcatgaggctggccatgctctagtgggtgctttaatgccagaatatgaccctgtagccaagatatcaattattcctcgtggccaagctggtggtctcacattttttgctcccagcgaagagaggctcgagtctggattgtacagtagaagttaccttgaaaatcagatggctgttgccctgngtggaanggttgccgaagaggttatttttggccaggaaaatgtcaccaccggagcatcaaacgacttcatgcaagtttcacgagtggc

SEQ ID NO: 37554 - DNA, 349 bp, Glycine max
  Clone ID: LIB3055-002-Q1-B1-H5
aggtcgacactaaaggatcccctcggggaattccaattccacattttcaagaaataaggaggcaaaaatgttcatatatgaattggaattatttgttttcttattaggcctatcctgaagccaaaggaaatgagatcggaattcctcggggaattccaattccacattttcaagaaataaggaggcaaaaatgttcatatatgaattggaattatttgttttcttattaggcctatcctgaagccaaaggaaatgagatcggaattcctcggggaattccaattccacattttcaagaaataacgaggcaaaaatgttcatatatgaattggaattacttgttttctta

SEQ ID NO: 37555 - DNA, 332 bp, Glycine max
  Clone ID: LIB3055-002-Q1-B1-H6
cagaaatgggcagtgcttctctgattccagtttcctggttgccttggcggccactttctcctttcaagggaacggtgaaaaccttggtcgcaaaagcatggctgaagaagattcagcaagcaagacccctcatttccgtggttaacaaggctgcctctctatcttcccccgtgacagcacccagcgtcggcgttcggtttcggctggacaatttggggccgcaaccgggttcgaggaagagggctaagagaaagggtagaggaatatccgcacggcaaggggcaagttgtggttttgggatgagaggtcagaaatctcgatctggacctggc

SEQ ID NO: 37556 - DNA, 360 bp, Glycine max
  Clone ID: LIB3055-002-Q1-B1-H7
cactacctcaattactcaactaaagcttcattcattcatcgtgtcgtgttgtgttctttgcaaccatgcttcttagaacagcgtcctctttctctctcttcaacgccaacggcgaccatatactactcccttcctctgttcgctactctcagggcaaacacttggttccatgcgctaccaagaactccaataaccggcccttaaccggcgtcgtatttgaaccctttgaagaggtcaagaaggagctcgaccttgttcccactgtcccacaagcttcccttgctcgccagaagtacaccgatgaatctgaggctactatcaacgaacagattaatgtggagttaaatgtttcgtacgttt

SEQ ID NO: 37557 - DNA, 299 bp, Glycine max
  Clone ID: LIB3055-002-Q1-B1-H8
attttatgtttgtttttgcgagcgtaaggttgaggagaagagatggtgggagcacggccacgggacatagatgacttgcccaagaacgccgccaacgacacagcgcttacgccgttgtggtttctagagagagctgctacggtccaccccaccagaaactccctcatccacggatctcgtcgctacacgtggcagcagacttaccaccgttgccgtcgattcgcctccgctctttctaatcattccatcggtcttggaaacactgtagctgttattggcaccaacattccagctcttta

SEQ ID NO: 37558 - DNA, 376 bp, Glycine max
  unsure (1)..(376): unsure at all n locations
  Clone ID: LIB3055-002-Q1-B1-H9
gtgtctatgcaaagttctggaatcaacccctaaggtcnccccactccttcaaaaatcctctcttttatcctacaacactctaatcatcgtcatcaaggacctcctccatcctcccccagtaacaacacaacataacattcagagaaaaacaaaactatcatacccacatggatttgcaatgaaagtgagagagtccaattatgcgaacgctttgtgatgcttgtgagagcgccgcggctatagttttctgcgccgctgatgaggctgcactttgtcgtgcctgtgatgagaaggttcacatgtgcaacaagctagctagtaggcatgtgagggttggtcttgctagtccaagtgaatgtacacggtgtgacatatg

SEQ ID NO: 37559 - DNA, 368 bp, Glycine max
  unsure (1)..(368): unsure at all n locations
  Clone ID: LIB3055-003-Q1-N1-A1
gacttgttggtcatgagttcgaatccgaaaacagcctctttgcatatgcaagggtaagactgcgtacaacatccctccccaataccttcgcatagcgaagagcctctggacaatgggctgagcttttggggttggccggtttcatacgtccctatgcaagtgctggagcccgagacatattttacggagtcaattatgcttcagcagcttccggaattagagacgaaactggacaacaattgggaagccgtatcagtcttagagggcaggtgcanaaccacataaggaccgcgtaccagatngtaaattcactgggagatgtgaacagaacctttaacttacctgggcaggtgcatttattcaattgg

SEQ ID NO: 37560 - DNA, 348 bp, Glycine max
  unsure (1)..(348): unsure at all n locations
  Clone ID: LIB3055-003-Q1-N1-A10
gagcaacactgcactgggtgggaaccgaaccttggcaggagtggtggccctccaacagaaccaactatctttctctaccttagcttcctctctttctgacttcagtggaaccagacttcaaactcaacttcagttcaagagaaagcaatgccatccaaaagggtctttctacgtctccgcatcgagcaccaagaaaatcctaataatgggaggcaccaggtttattggtgtgtttttgtctaggctccttgtcaaagagggtcaccaggtgactntattcacaagaggtaaagcgcctgtcactcaacagttgccaggtgaatcagacagtgattatgctgatttttc

SEQ ID NO: 37561 - DNA, 411 bp, Glycine max
  Clone ID: LIB3055-003-Q1-N1-A11
cttttggcgcttattaaattacaccggaaatgggtgcacactttgtaatgtacctagctaagttgaatgaaaaatcaaaatcaggactacccctgcctggtgtgaagagatttatctttgtgctccaaggtgctgtcaccctcactaatgctgctggtgttagccaactactgaacgttgattcttatgcttattttcctgcaaattttgagcattcaattgaatgtgatacacctgctactattgtggtatttgaacggagatattctacgctaccaaatcatatcccagagccattggttggttcaactgataagcagccactccttgagactccaggcgagatttttgaactgaggaagctaattccaacatctttggcatatgacttcaatatccacataatggatt

SEQ ID NO: 37562 - DNA, 389 bp, Glycine max
  Clone ID: LIB3055-003-Q1-N1-A12
cccacttacctgttcacttctttatcttcttcttcttcttcggcttcttcctttgtctcttccaccacgccaccgcgatccaccatgctgcaccacgaccctcttgtctctgacgtctacgccaccgccatttccggcgtcgttgccctgtccttcctcagattgttccaagatactgcaaaacgagacctattcgaccaggtgggtcttaatgtgtgaaagattgagttgtttttgatctagggtagggttaagttgaaggaaaatgatattggggtgtcgaaatttgttgcaaattacaagcttggtggaatcgacagtttttgcattcaatttattgtacacgtgttggattgattacagacaagcattagtggagtgtttttcat

SEQ ID NO: 37563 - DNA, 397 bp, Glycine max
  Clone ID: LIB3055-003-Q1-N1-A3
ctctcattttcccacgacccattttcatttttccaaaaagatgtcaactttgcttcaaactagaacactccctctttttacgttcccgtttcatgggcatctcttggaatcgggaaccatagacatcgccatggaaaaggacaagtctcacactcacagctttcttcacagtatcgtcaaacacttcaaattcggttcaccgaaagagcgaaacaatgaagctgacgtacaccaaatggctgcacaggagcagaagatctttgcctacgaaaccttgacagctgcaactaagaattttagtgctattcataagcttggtgagggaggttttggaccagtctacaaggggaagctgaatgatgggagagagattgctgtgaagaagttatcacacacg

SEQ ID NO: 37564 - DNA, 425 bp, Glycine max
  Clone ID: LIB3055-003-Q1-N1-A4
tgagaactaataagaaggaaatggcttcctcaatgatctccgccccagctgttaccaccgtcaaccgtgccggtgccggcatggttgctccattcaccggcctcaaatccatggctggcttccccacgaggaagaccaacaatgacattacctccattgctagcaacggtggaagagtacaatgcatgcaggtgtggccaccaattggcaagaagaagttcgagactctttcctacttgccagacctcgatgatgcccaattggcaaaggaagtcgaataccttctaaggaaaggatggattccttgcttggaattcgagttggagcacggtttcgtgtaccgtgagcacaacaggtcacctggatactatgatggacgctactggaccatgtggaagctgcctatgtttggctgcactgatgct

SEQ ID NO: 37565 - DNA, 342 bp, Glycine max
  Clone ID: LIB3055-003-Q1-N1-A5
ggcctagcatgaaagaggctactcaagaccaaatccaacaacgttgatttgatcaatgatatagatgatgcgtcttctagatgagtttgttatgggtttgtgtacaaggataaacttctacatggtcattattgtcttggacaatctctatgtgacatataatcacatttttctcaatttatgaaaaaaaaaggttaataacgtgttacatgaagatcagcctagaactatatgatttcagaccatgtaataatttctccaaaaacatggatcttcttggctttgtcaagagccccatattttgcttcctaaatcctgtgcttatgttttattttgtttttt

SEQ ID NO: 37566 - DNA, 392 bp, Glycine max
  Clone ID: LIB3055-003-Q1-N1-A6
cacttctcttcttcaattcattctagttctggattccgactcgccgcattgactcggtccgggttggggtcgactcagttcggtttttcattctctcgcgaatctaatctataggaaaagctaagggcacatcacaatgaaggcattgattctggttggggggtttggaacaaggctgaggccactgacactcagttttcctaagcctcttgttgattttgctaacaaacctatgattctgcatcagatagaggcccttaaggccattggagttactgaggtggtgctagccatcaactaccaaccagaggttatgttgaatttcttgaaggattttgaaacaaagctcggcatcaagatcacatgttctcaggaaactgaaccattgggaa

SEQ ID NO: 37567 - DNA, 387 bp, Glycine max
  Clone ID: LIB3055-003-Q1-N1-A7
aactaaccaacgtagttatggcttcctctctacacaactatgttcttgctatcttacttttggccataacccaattcaaaaccacatctgcgggctcccatcaccacctccagcacctcaaatcccttcacttctctctgtttcaacacgagaccataaacaaaaccggatacatcatagtggatggtataaaaggaggagcaggggtgactcaaaccacaaccccttttggcaccttatttgcctttcaggaccctttgactgttgcagccaacaggtcctccaaactagttgggattgcagaagggactacagtcacatctagtctcgacgggcttcggagcatttcgatcgccaagctaaccctgcgtttgaagcaccacaagg

SEQ ID NO: 37568 - DNA, 425 bp, Glycine max
  Clone ID: LIB3055-003-Q1-N1-A8
caggttgactggattgggcagaaaaatcaaatagatgtcgccaaggctgctggagtgaagcacattgtgttagtagggtctatgggtggaacggaccttaaccatcctttgaacagcttgggtaatgggaatatattggtttggaaaaggaaggctgagcaatatctggctgattccggcatcccatatacaattataagggctggtggcttgcaagacaaagatggaggtcttcgggaactacttgtagggaaggatgatgagcttctccagactgaaaccagaaccataagtagatctgatgttgcagaagtctgcattcaggcactaaattttgaggaggctaaattcaaggcatttgacttggcatcaaaacctgagggagcaggttcagcaacaaaggatttcaaggctttattttccca

SEQ ID NO: 37569 - DNA, 384 bp, Glycine max
  Clone ID: LIB3055-003-Q1-N1-B1
gttgaaagttatataagtagcaaagatgtttccattcgggcacaagggtgaaaagataaaggggactatggtggttatgcagaagaatgtgttggatatcaacagcatcaccagtgttgacgggatcgtcggcaccggcttagacttcttaggcagtgcactcgatacagttacttttttagcctcctccatctccatccaacttattagtgctaccaaggctgatggtgggaaaggaaaagttggaaaggctacacatttgagaggaaagattacattaccaaccataggagctaaggaagaagcatacgatgctcaatttgattgggacagtgacttcggaattcccggtgcattttatattaagaactacatgcaaaacga

SEQ ID NO: 37570 - DNA, 422 bp, Glycine max
  unsure (1)..(422): unsure at all n locations
  Clone ID: LIB3055-003-Q1-N1-B10
cagagaacgaccaaagccaaagccaaagctactagtcataacgggccgaaccgcttccgggaagtcgaagctagccgatgatttggcctcccacttccccgtcgaactcatcaacgccgattccatgcaggtctaccgcggcctcgatgttctcaccaacaaactccctctctctcaccagaacggagttccgcatcatctcttgggtaccgtaagccccaacgtggaattcactgccaaagcgtttcgggattccgctattcccattattgatgatatattggctcgtaatcacttgcctgttatagttgggggcactaattactatatccaggctcttgtgagtccgtgtcttttagatgattctgcagaagatatggatgaaaagctgttgggtgatccaactgngtctggtaacaatt

SEQ ID NO: 37571 - DNA, 393 bp, Glycine max
  Clone ID: LIB3055-003-Q1-N1-B11
tggcttcaattggcctggaaaaccactgaacctaaccgtcaggcttcccgtcccttcctggtgacagttccaggccttggtcagtacatctctggtgccattctctttgaggaaacactctaccaatccacaactgatggcacgaagattgttgacgtgctgcttgagcaaaacattgctcctgggattaaagtcgacaagggtttggtgccccttgcaggttccaacgacgagtcatggtgccaaggtttggatggtctagcctatcgctcagctgcatactacgagcaaggtgcccgtttcgacaaatggcgtactgttgtgagcattcccaactgtccctatgctcttgcagttagagaagcaacctggggtctggctcgctatgctgca

SEQ ID NO: 37572 - DNA, 410 bp, Glycine max
  unsure (1)..(410): unsure at all n locations
  Clone ID: LIB3055-003-Q1-N1-B12
gtcactagcttcgcatttaaatttgcggggcattctgatgagtcaagaggtttgatgtgcaggccatgaggatgacttagtgatagagcttgccaatgaagtgaggaaagtacttggaatgggaaatgtagtaccaaaggagaagaaactggttggagcagcacaacttccacaccctcctcatgtaacaatccctacccttcaactgcacccactgccagaacctattgcaatggatatatagctgaggggggagatgaccaaaaactgacgctgagttcggctactaaactgatttcctgctaaccctcattcaaatttaaataacatcacatatctattcctcttcgcctacttttagcggctttccagccattcccttgagatattgcttanattcagtgaggcgc

SEQ ID NO: 37573 - DNA, 335 bp, Glycine max
  Clone ID: LIB3055-003-Q1-N1-B2
gtccggaaatcgttcctatcatcaattcttaaatctcgaaccgtctggttcgtgccgatcactaagtcacactttatcaatggccggtagaggcaaaaccctaggatccagcgccgcttagaatgccaccttaaggagcagcaaagccggccttcaattccccgtcggtcgtatcgccaggttccttaaagccggaaagtacgccgagcgcgtcggcgccggagcccccgtctacctcgccgccgttctcgaatatctcgctgctgaggttttggaattggctggaaacgctgcgagagataaccagaagactcgaattgttccacgccacattc

SEQ ID NO: 37574 - DNA, 230 bp, Glycine max
  Clone ID: LIB3055-003-Q1-N1-B3
atctaattcatgcaatcaagaagcaaaagcctcataaccacaactacaggagctactctcaatctgaaagctcaaaccgcagctaccacatgctattggcgtctgaatccttcacaggatcttctcacagaagaacaaggtctgattttcagccccccacaagtgagttcttagagcagagatatggtgttgatggattcttggtcagccccagagcccaagttactact

SEQ ID NO: 37575 - DNA, 99 bp, Glycine max
  Clone ID: LIB3055-003-Q1-N1-B4
gggaccaattatttactatgatctcgctatttgtaaccaagaagttgttgctattgaattactacaggccactcaatctgtagtaggaccgtccccctt

SEQ ID NO: 37576 - DNA, 434 bp, Glycine max
  Clone ID: LIB3055-003-Q1-N1-B5
tatctgtatcccttccttaatacaacaagcaagtcaagaccatttgagtacttgaggcttaccagtcttggtgtaattggtgcattggtgaaggttgatgatacagaagttataagtttccttctttcaacagagataattcccctgtgcctgcgcaccatggaaatgggcagtgaactatccaaaacagttgcaacatttattgttcaaaaaattctgttggacgatgtgggcttggactatatttgtactacagcggagcgctttttcgcagtaggtcgagttctggggaacatggtggcagctctcgctgagcaaccctcatctcgtctattgaagcatatcattcgatgctatcttcgcctatcagataatccaaaggcttgtgatgcattaagaagctgtctaccagacatgttaagagatgctacttt

SEQ ID NO: 37577 - DNA, 425 bp, Glycine max
  Clone ID: LIB3055-003-Q1-N1-B6
caaaatcatcaatggcaatggcctctcttgcatcctcaagtgttcttttgaacctcttgttcatcgtttctgcgctccatttgggagcagcagcagcaagaattctgagtgaaaaggaggaccaacaacagttgcagttccaataccacaaaggccctcttctcagcggcaatatctctgtcaatctcatatggtacggtagcttcaagccttcccagcgagccatcatctccgatttcatcacctccctttcctcttctccaaaatccacagcccaaccatccgtcgccacgtggtggaaaggcactgaaaaatactaccaactcatcaagtcggcaccaatacccagcctcaccctcgctctcggtgcccaaatcctcgacgagaactactcccttggaaaatcactcaccaccgacaacatc

SEQ ID NO: 37578 - DNA, 382 bp, Glycine max
  unsure (1)..(382): unsure at all n locations
  Clone ID: LIB3055-003-Q1-N1-B7
agaaaaacttcacttcacttgcatgccaaatgagaacaaccggttcttagaataatttcctcggtgtttaagccttgtcgatttccgaacaccaatccgagttaattaaacaatgagagtttcgacagaaaagttagagacagagccggagagcaaaaagataaaacgcattcgtggcggcggcggcggtgactcgagcaataagcaccctttgtaccgcggcgtgcggatgcggaactgggggaaatgggtgtcggaaatccgcgagccgcggaagaagtcgcggatatggctaggcacattcccgacgccggaaatggcggcgagggcgcacgacgtggcggctctcagcatcaaaggcttcgncgccattctcaacttc

SEQ ID NO: 37579 - DNA, 412 bp, Glycine max
  Clone ID: LIB3055-003-Q1-N1-B8
gtgtttcatttgtgaaactaacaacaacacaaggccatcatcatggcagctgcttccccaatggcaagccaactcaagtccaccttcactaggactcttgtagctcccaagggcctctctgcctcttcaccacttcacctcgtgccttctagaaggcaatttagcttcactgttaaggccatccaatcagagaagccaacctatcaagtgattcagccaatcaacggtgacccattcattggaagcctggaaaccccagttacatccagccctttgatcgcatggtacttgtccaacctgcccgcatacagaaccgcagtgagcccactactaagagggatcgaagtgggcctggcccacggataccctctggtgggcccattcgtgaaggccgggcctcttaggaacaccg

SEQ ID NO: 37580 - DNA, 407 bp, Glycine max
  Clone ID: LIB3055-003-Q1-N1-B9
catcaatcacctatcctttttggccgttcctttctgatcgaaagccgtccttcaaattccggccggccaatctgcaattccgattttccttcgatctcttgcgaatcccctttctgcaccttcctagggtttcattgacaacatgactctttccgatgacgaagacgagaatctagctcaatttctggaatcagaagtcctctcggaggtctctgacaaggaagaggaaaatgtggaggaaccgaaagcaaagagaaagcgcgtggaggaggatgagattactaagcagatacaaagttctgattcatcatctgcgcccaagaacattgttgtcagtaatggggtggtgctgagaaggattgagactggctatttcagtcaaatcccacctgagcttttcaatcata

SEQ ID NO: 37581 - DNA, 389 bp, Glycine max
  Clone ID: LIB3055-003-Q1-N1-C1
tatgaaggagcctggcatgaaggcagaaggcaaggacttggaatgtatacatttagaaatggtgaaacccaatctggtcactggcaaaatggagtccttgacattccaagcacacggaacaccacttctccagtttctcctgttggtgtctattattccaaagtactcaatgcagtgcaggaagcaagacgagctgccgagaaagcctatgatatggctaaggtagatgaaggggtgaacagagctgtagcagcttctaatagagcagccaatgcagctagagtagctgctgtaaaagctgtacaaaaacagaattatcatgttagcagtgaaagcttctcaattcctgttgtgtaaagagtatctcagctgcttttatattagaagag

SEQ ID NO: 37582 - DNA, 378 bp, Glycine max
  Clone ID: LIB3055-003-Q1-N1-C10
ggtgtttcatttgtgaaactaacaacatcacaaggccatcatcatggcagctgcttccccaatggcaagccaactcaagtccaccttcactaggactcttgtagctcccaagggcctctctgcctcttcaccacttcacctcgtgccttctagaaggcaatttagcttcactgttaaggccatccaatcagagaagccaacctatcaagtgattcagccaatcaacggtgacccattcattggaagcctggaaaccccagttacatccagccctttgatcgcatggtacttgtccaacctgcccgcatacagaaccgcagtgagcccactactaagaaggatcgaggtgggcctggcccacggataccttctggtggg

SEQ ID NO: 37583 - DNA, 341 bp, Glycine max
  unsure (1)..(341): unsure at all n locations
  Clone ID: LIB3055-003-Q1-N1-C11
ggaaaaccgcttgttcgacctgcccaaatcttaatcaagaggggtgagttttgtttttccagccatgacgccgctgatcctgcatgctgggaaaaccaacgaaatcttaacagacactcattgcagncgagtttgctggcgtgcaagttgattttgcccctaatttgagatggtgtctccaataaaacttctgaatttttaaagatcaatcctattgccaaggttcctgtgctggaaacccccgttggtccaatattcgagagcaatgccattgctcgctatgttacccggttgaaaggtgataacactttgtatggatcttccttgattgaatatgccca

SEQ ID NO: 37584 - DNA, 412 bp, Glycine max
  Clone ID: LIB3055-003-Q1-N1-C12
ctctagtggtgctaaagtcgaacttaatcactctgtttctctcgttaccgttctctatctatgcccatctcttcaggtaagcaataatttctgtttgttgtttatatgtcgttttacaccactttctgctctcatactcgttcatcgatgggtataaattagtgtgttgaaattgcaaaacagaaaatgaaaaactggtgttgtgaattgaggcatcgtaaattgactctttaagttgtcctcaatgaccaaacttaaggccactcctattcttctattctgttattaaaattgtcggagtatttctttgtggttattgtaatattctcattgtatctcttaattagagagacaactccatggccatgagtttcttgtcagcatatagaatacaatgatgcttaatatcata

SEQ ID NO: 37585 - DNA, 344 bp, Glycine max
  Clone ID: LIB3055-003-Q1-N1-C2
caccaaggggagtggcttgattaacgctcgtatgttcaaaacgtgtattcatttagtaatggtgtaaccttccgttcggaccttcaacctcggaaactgagaaattgcatttcaatcaacatcggtcaggccggttttcaggtcggaaacgcctgctgggagctctactgcctcgaacacggcgttcaacctgatggccagatgccctgtgataagactgttggtggaggtgatgatgctttcaccaccttcttcagtgatactgcggctggtaagcacgtgcctggtgcgatttttgcagatctcgagcctactgtgattgatgaagttaggactgtgacata

SEQ ID NO: 37586 - DNA, 276 bp, Glycine max
  Clone ID: LIB3055-003-Q1-N1-C3
cccttggtgaatttcaaattcaatttttttaaaaattaggagcaaaaatttcgtgtgtgattgggaattattggctccctaattaggcctatcctgaagccaaaggaattgagatcggaattcctcggggaattccaattccacattttcaagaaataaggaggcaaaaatgttcatatatgaattggaattatttgtttccttattaggcctatcctgaagccaaaggaaatgagatcggaattcctcggggaattccaattcacattttcaaga

SEQ ID NO: 37587 - DNA, 274 bp, Glycine max
  Clone ID: LIB3055-003-Q1-N1-C4
cggcatcctacactaacgggccgacggaaatctcgccggaactcattctccggctccggaagtgcaatcattccgagtcttacctcttcgccaggaaattcaccccggattgcttggagaccttgatgcgcattgctaaatcggtcatcttcagggattgaaattcaaattgtggaaaaggtctgtgaagagatttatggtgtgagatgatattttgcttgcttgtgctgtgacttgaagttgatggtggtgtataggttgaaaggcacgaaca

SEQ ID NO: 37588 - DNA, 425 bp, Glycine max
  Clone ID: LIB3055-003-Q1-N1-C6
aaagaatcattaatgttctttattacacacaaattatatcaagagggtctaacttggttggtttagcttggcagagagtatgagttgtcgtaaaccttctcatattgtcttcgattcctaaggtgttaaaaacacacacacactaattgtgttgagtcactgaggttcaaagaatgtgtcactgttcattatcaatggccacactatactaccactgattgtgttttaattctcatcttccatatacaaaggtgttgcataaaccctctgtcttttctaggtggcatgatcctgcttcaaccactacttagtatattattgccacccacagaaacaccaccattccactgtcacaaagaactaattgtctttttgtttctcttttgttgtttatcttgtgtcattctttgatctattctctctct

SEQ ID NO: 37589 - DNA, 399 bp, Glycine max
  Clone ID: LIB3055-003-Q1-N1-C7
cacgccacatatcttcccaaatcaggaaactctttctcttctgccgtttcctagtctcacacccaaacctcatggaaggctctgtcaacgaacgtcttgattttgggaagatgggatatgggtgcaatcattaccggagaagatgcaggattcgtgctccctgctgcaacgagatctactcatgccgtcactgtcataacgacgctgcgagcttgttgaagaatccctttgatcgccacgagctcgttcgccaagatgttaaacaagttgtttgttcagtttgtgacactgagcaacctgttgctcaagtttgcacaaactgtggcgtcaaaatgggagaatacttatgcaacatctgcaaattcttcgatgatgatgttgagaaagaacaatttcact

SEQ ID NO: 37590 - DNA, 421 bp, Glycine max
  Clone ID: LIB3055-003-Q1-N1-C8
attctcagagtcacacacacgcacatatattttcttcatcttcgtacaccactgtctcatcatctccttttccttgttctggtggcgctcttgattttcagatgacaacagcaattgggtgaaacgtgaacgccaccaccgatcggggtttgccaaaaccttacaatggaggtcgaaaggatgagacagttgatgctgatgtggtgtagaatacgaagcaaccgtgtcgctcttgtgggtggaaaccataccgctgccaggttttgcagtcgctgaaattctctccttcctatatcgctggctttgtttgttttttctcttccaactttactcaataggatctcatctcgctcggttaatttaatcatcgatggggagcacgatgaagaataagcatttgcacgatggaagaacaattgct

SEQ ID NO: 37591 - DNA, 434 bp, Glycine max
  Clone ID: LIB3055-003-Q1-N1-D1
cccaatttcattccatggccgattcaacctcaagcgattcactctctgtagacatcgattccttatctccttcacctcaggaacatatcatcagaacacgtcatggttccgtatctgttgctgtatatggagaccaggataagccagctcttatcacatacccagatttggctttaaattatgtctcctgctttcaggggttattattttgtcccgaggcatattaccttctgctccataatttctgcatttatcatattagtccacctggacatgagttgggagctgctgaaatcgatccagattaccctattctttctgtagatgacttagctgatcaaatagctgaggttctcaacttttttggtcttagtgcagtcatgtgtatgggagtaactgctggggcttatattcttaccttatttgcaatgaag

SEQ ID NO: 37592 - DNA, 294 bp, Glycine max
  Clone ID: LIB3055-003-Q1-N1-D4
gtatctttcaatttccatccacgggtatagccttttctatttgggcgttctaatgttcaacggcatgcacaccaatggccaataaaacggcgtagtccaggaggcccttttaccatcctactttgacaggatgtaacggagccttagcaattctcaaggagagaaccggttcgagccattacgcgataaccaatttcatctaaggcaggcccaaggagttgcctccaacctacaaaaagcttgttctcgttcatctcaagaagtctgttgttgctggcaagctcgttaaggtca

SEQ ID NO: 37593 - DNA, 398 bp, Glycine max
  Clone ID: LIB3055-003-Q1-N1-D5
tcacttttcaatatggaagcgttttacacaactctctgctccgctgcttccacgtctgttctcaattttcagggctctgaattgcctagaagaaagctttgtaagaaatcttcacacactattttggcatcacctacgctgcctaaaccatttcttcagatttatggtagacctcagacattgctttataggtcaaccagactctcttctggagcacatagagtaacaatatcagctgaagctggcagacaaaattgggattttggaagatttgtaaaaacactgttcttcttcaatgggttcccatctcctgctaagttctttgattttctagttgagaaactatctgatccttcctcaagtgaagtggtcaacacaatgggaacttctgatattgt

SEQ ID NO: 37594 - DNA, 420 bp, Glycine max
  Clone ID: LIB3055-003-Q1-N1-D6
tggaagccacggcctccgcaatgagcttcgcccttccctcaacaaaagcccaagcccaagcccaactcctgacccggcccaccaatccattcaccattccctcccgcagcccagcccaccgccccccgccgcgcctccccaccatccgcgccgcaattccccgcacaaagaaagaggcaacggtggagactgtgcgggagcagctcgagaactgttacctcctcgccggcatcaactacaagggcttcacggtgaagcagttccaggagcttcgaaagacgctcccagaaacaacgaaactgatcgtggcgaagaacacgctcgtttacaaggccgtggaaagcacgccctgggagacgctgaagccctgcatgaagggcatgaacgtgtggctcttcgtccacaccgaggagatccctt

SEQ ID NO: 37595 - DNA, 418 bp, Glycine max
  unsure (1)..(418): unsure at all n locations
  Clone ID: LIB3055-003-Q1-N1-D7
tggctgtggaaagacattcatagatgctggtgcattgaggaaacattctcacatccatggagagaggcaatatgtttgtcactacgatggatgtggaaagaaatttctggatagctcaaagttgaaaagacattttctcattcatacaggggagagggattttgtgtgtcctcatgaaggctgtggtaaggccttctccctggatttcaacttaaggtctcacatgaaaacacattctcaagagaactatcatatctgcccatatccagattgtggaaagagatatgctcatgaatacaagctaaagaatcacattgcatctcatcatgaaaagaatgcacccttggatgtggcaaagtacactactccacctccagagaagcanacanaaacttctaaaccatctggaggggcatac

SEQ ID NO: 37596 - DNA, 423 bp, Glycine max
  Clone ID: LIB3055-003-Q1-N1-D8
catcaattctctctcatactctcactactctctttgctctttgttttctccactatggctgcacaacgaaacttccaagactacttgcctgtgatggccaacaagcttggtggggatggcctaattgatgaactgtgcaatgggttcaatctgttgaaggattctgataaaggggtcatcacctttgagagcctcaagaggaactctgccttgtttggccttcagggtcttagtgatgaagatcttcggtccatggttttggaaggtgactttgatggtgatggtgcactcaatcagttggagttctgtgttttgatgttcagactcaaccctgaattgatggaaggctcaaagatgtggcttgaacaagtccttcaacaagagcttaaggattatttctaactttcctttttttttttctcc

SEQ ID NO: 37597 - DNA, 381 bp, Glycine max
  Clone ID: LIB3055-001-Q1-B1-E12
gttggggaacatattgccctggggagtatcctagtcctcccccagaatattcaacctgcttgggtgatctgtacagtgttgcttggatggaagacagtgacagacacaatttacgaacagaaactctgcatcaacaatataaattggttaaagagaggactatatctggagattcatactatggctctcacgtgatgcagtatggtgatgtacggcttagcagtgatgttctcttccattatttgggtacagatcctgctaatgataatttcacttttgtggacgaaaagtccttatggtcaccttcagaaccagtcaaccaacgtgatgctgatgtcatccatttttgggataagttccgcaaggctcctgagggttctc

SEQ ID NO: 37598 - DNA, 430 bp, Glycine max
  Clone ID: LIB3055-003-Q1-N1-E1
gcagttacttgggctttaaaaagccggcaattgaagacccagtgaagactaataaaattcctaggcaggtacctgagcaggcatggtatatgaaatccgtcttctcaattcttattggaggcattcttccatttggtgcagtgttcatcgagctcttctttatcctgacatcaatatggctgaaccagttctattacatcttcggctttcttttcatagtgtttgtgatcctattaatcacctgtgccgagattaccattgtgctttgctacttccaattgtgcagtgaggattacaattggtggtggagatcttacctcactgctgggtcctctgcgctgtaccttttcctctactcaattttctacttctttaccaagttggagatttcaaagctggtctcgggcattctttactttggatacatgat

SEQ ID NO: 37599 - DNA, 417 bp, Glycine max
  Clone ID: LIB3055-003-Q1-N1-E10
tgtacatcgtataacgaattacagacctaaaacttgggaatggcacgtctcttttgatattcacaaacattatctcgtacttgccagcttcttttggtaggacaattgctcaagcatttaatgatgcaaactacattggacttggtaccattgttttgtccttctttttgttggtagttggtattgtttatgttcaggaagcagagagaaaaatcccgcttaactatgcttctagattcaccagcagaagcactggtcttgaaaagtccgcttacctaccctttaaggtaaatagttctggagtaatgcctatcatattttctacatcatcattagctcttcctggtactttagcgcgcttcactggtttaactgcactaaagaaggctgcagtggcgttaaatccaggaggttctt

SEQ ID NO: 37600 - DNA, 414 bp, Glycine max
  Clone ID: LIB3055-003-Q1-N1-E11
ttcaccggagcttgggttgagactgctcctttcacccgttacttccgaccttcttctccgcacagcatgctgttctatagggcttgcgcttcccgtatattccacgtttaaagctattgagaacaatgacccatatgagcaacaaaggtgcctattgtattgggcagcttatggatcttttagtgctgcagaaatgtttgctgaaaaattactttcctggattccactctattatcacatgaagtttgcatttcttgtttggctacagcttcccactcttgatggtgcaagacaactgtattctagtcacttgcgtccattcctgttgaagcatcaagctagaatggatctgattgttgaatttgtgtatggtgcaatgaagtaaattattagtgcatacccaccagattagag

SEQ ID NO: 37601 - DNA, 388 bp, Glycine max
  Clone ID: LIB3055-003-Q1-N1-E12
cttagtcccaattttctagggttttattcattttccgatggcttctgcagatgttgagtaccgttgctttgtcggtgggctcgcttgggccactgacgaccatgccctcgagagagccttctctcagtacggcgaaatcgttgaaacgaagattatcaacgatcgtgagactggcagatccaggggttttggatttgtgaccttcgcctcggagcagtccatgaaagatgcgatcggagcgatgaatggacagaacttggacggccgtaacatcactgtcaatgaagctcagtcccgcggtggcggcggcggcggcggatgaggaggatacaatcgtggtggcggtggatatggtggtcgtagtggcggtggcggtggtggataccgt

SEQ ID NO: 37602 - DNA, 417 bp, Glycine max
  unsure (1)..(417): unsure at all n locations
  Clone ID: LIB3055-003-Q1-N1-E4
cagatctttggtttgggaaaggcccatttggcaaccggtggtggaccatttttcaagtagaagcattcaaccaggggtcccaaacctaatggaaggcagtttggtgacctcaaaaccatcaactgtcattgatgttttaaacccagcacccaaagaagttgtttcacaggtcccttggtctcctgatgaagagttaaacgaagctgtatcagcagcacagaaggcatttccatcatggcgtaacactccaattacaacacgccaacgtgttatgctgaagcttcaagagcttatacgcagagatatggataaactngctctgaatgtgaccacttgacacggaaagacattgaaggatgcccaaagagatgtatntcgtggtttagaagctggtgaacatgcttgtgggatggcaac

SEQ ID NO: 37603 - DNA, 377 bp, Glycine max
  Clone ID: LIB3055-003-Q1-N1-E5
ttccaatttccaattcaaaaccctaactccgttcgaagcaccaaatcgtgatggcaccaaaggcagagaagaagccagcagagaagaagcccgcggaggagaagaaatcgacggtgggagacaaggctccggcggagaagaagccaaaggccggaaagaagcttccgaaggagggaggcgccggcggagaagggaagaagaagaagagaaacaagaagagcgtggagacatacaagatctacatcttcaaggttctgaagcaggttcaccctgacattggtatctcaagcaaggccatgggaatcatgaacagcttcatcaacgacatcttcgagaagcttgcccaggaatcttctagacttggccggtacaacaag

SEQ ID NO: 37604 - DNA, 422 bp, Glycine max
  Clone ID: LIB3055-003-Q1-N1-E6
cagcactggagccattccattttcactctttgtaatactaatcttgctttggttctgcatatctgtaccccttaccattgttggtggctactttggagccaaggcaccccacattgagtatccagtccgaaccaaccaaattcctcgcgaaattccccagcagaagtacccatcatggctgttagttcttggtgctggcacccttccatttggcaccttgttcattgagctcttctttatcatgtccagcatttggatgggtcgcgtttactacgtctttgggtttctcttcgctgttttgatccttcttgtggtggtttgtgccgaggtatctctagttctgacttacatgcacctgtgtgtggaggattggaaatggtggtggaaatcgttctttgcctacggttctgtcgccatataca

SEQ ID NO: 37605 - DNA, 414 bp, Glycine max
  Clone ID: LIB3055-003-Q1-N1-E7
cttcgacctcgcatcgcaccttcaacttaacctattccacttgtaatcgtaaacgctttgctagaagaagagacaaagtgtgtctgtgtgtgtgagagagagagcaatggctggctcgtgtgcacgccgttctatgattgttctagccatcatttccttcggatgtctatttgcgattttcattgctaaggaggaagccaccaagttagggacggtcatcggcattgatcttggaacaacctattcatgtgtcggtgtttacaagaatggccatgtcgaaatcatagccaacgaccaaggtaaccgtatcaccccatcgtgggttgctttcaccgacagtgagagactcattggggaggctgccaagaatcaggcaactgtcaacccaaaaaggaccatctttgatgtcaagag

SEQ ID NO: 37606 - DNA, 424 bp, Glycine max
  Clone ID: LIB3055-003-Q1-N1-E8
gctggttcaactgaggtgatggctttgaatttgccttctcccgcccaagtgaagcccttatttttctcttcaaataactccacaaaacttccaggtagcttttctttgaagagaaaagatagtgacacaacagtagagagacgagtttattgctctgccgctgctcaatcaccaccaccagcatggccaggaacagctattcccgagccttctgatttcaagacatgggatgggcaaaaacctatttctgtcttaggatctacgggttcaattggaactcagacactgagtatagtggctgagttcccagaaagatttaaagttgtgagccttgctgctggctctaatattactcttcttgctgaccagattaaaacatttaagcctgaagttgttggtcttagaaatgagtctttaattgatg

SEQ ID NO: 37607 - DNA, 332 bp, Glycine max
  Clone ID: LIB3055-001-Q1-B1-A1
cttgactccgttagatctgttattaacggctgtcatggtgtctttcacactgcttctcccgtcaccgataatcccgaagaaatggtggagcctgcggtgaatggagctaagaatgtgatcatagcagctgcagaggctaaagttagacgcgtggtgttcacctcatccattggtgccgtttacatggaccccaaaaggagcatcgatttggtggttgacgagtcctgttggagtgatttagaattttgcaagaacaccaagaattggtattgctatgggaaggctgtggctgaagaagcggcatgggacacagcacaagagaaaagggtgga

SEQ ID NO: 37608 - DNA, 359 bp, Glycine max
  Clone ID: LIB3055-001-Q1-B1-A12
attgaatcgactaaaaaatgaaatgaatcatttcatattgatagtattgctatgcttagtccccaaagaaccagatttcgtaaacaacatagaggaagaatgaaaggaatatcctatcgagggaatcatatttgcttcggaagatatgctcttcaagcacttgagccagcttggataacatctagacaaatagaagcgggacggcgggcaatgtcacgaaatgttcgccgaggtggacaaatatgggtacgcagtagttccagacaaaccggttacagtaagacctactgaaagacgtatgggttcaggaaaaggttctcccgaatattgggtagctgtcgttaaacctgggaaaatac

SEQ ID NO: 37609 - DNA, 308 bp, Glycine max
  unsure (1)..(308): unsure at all n locations
  Clone ID: LIB3055-001-Q1-B1-A4
tctgcctcccttttccgtcgcaaatcaaatcgaactcgtcctcaagttgaaaatggggctgtcgttcaccaagttgttcagccggctgtctgccagcaaagagatgcctatactaatggtgggtctcgatgctgctggtaagaccagcattctgtacaggctcaagcttggagagattgtcagcaacattcccagcactgggtttaatgtggaaactgtgggatacaagaacatcagcttcactgtctgggatgttggacgtcatgacaagatccgtccattgtggcgacattacnttccaaatacac

SEQ ID NO: 37610 - DNA, 324 bp, Glycine max
  Clone ID: LIB3055-001-Q1-B1-A5
attatagctatccttggcttggacgaattatccgaagaagatcgcttaaccgtaacaagagcacgaaaaattgagcgtttcttatcacaaccttttttcgtagcagaagtttttaccggttcgccggggaaatatgtgagtcgagcagaaacaagtacagggttgaaattgattctttctggagaattagatggtcttcctgaacaagccttttaattggtaggtaatatcgatgaagctactgcgaaagctacgaacttagaaatggagagcaatttgaagaaatgactttaaatccttgtgtactgacccccaatcgaaatg

SEQ ID NO: 37611 - DNA, 294 bp, Glycine max
  Clone ID: LIB3055-001-Q1-B1-A6
aaaaacacagcaaagtgatggaagtgacaagtgctgttcaccttcactcagttgggtttctgcatttacagacacacgttgaaaggctcaacggtagagctttcttcctctccacaagaccaagaaaagtgaaggttcatcttccttgtcatcaccatcatcatctaaaccacttaagcaataccaacggtattggtgcttgcagtgatagaacaagtgttatactcaactccacttctgttacttccacaacttcatctgctgcagggtccctctctgaagtggaaaagatta

SEQ ID NO: 37612 - DNA, 236 bp, Glycine max
  Clone ID: LIB3055-001-Q1-B1-A7
caaacatcagaagccattcgctattgctacaagatgacgctggtcgtcgaatagattgcgatatcggatcaacaatagttacggtagtaccgaaatcagttgtacaaaacatgtgattgttaaccatgtgtacacctcatcaagtcgaatggacatcactaaactagaatggtgaagccatcgaatctgcacatttcgaatttgatgaagtcaacttgttgccaccgtatacattt

SEQ ID NO: 37613 - DNA, 298 bp, Glycine max
  Clone ID: LIB3055-001-Q1-B1-A8
ctaacaacacaggcgcagacgcaaacgcaaacgcaaacgcaaacgcaaacgcagagcgtgatccattgacgaagatggtgcagcgtctcacctaccgcaagcggcacagctatgccaccaagtccaaccaacacagggtcgtcaaaacccctggtgggaagctcgtttatcagactaccaagaagagggccagcggacccaagtgccccgtcactggcaagaggattcaggggattccacacttgaggcctgcagagtacaagaggtcaaggttacccagaaaccgtacgactgtcaa

SEQ ID NO: 37614 - DNA, 304 bp, Glycine max
  Clone ID: LIB3055-001-Q1-B1-A9
agcccacccaccttcgtcgttcgctctttctcgccgtttccctttagtcgtcgtttggtcttcccttttgggttctcgtgtttctctttgatctcatgaagaaggtgaaaggggttgtctccttggaccctccttatgaggtatatcaggatcagagggccaggctgaggcaccagagtctcttggaggactatgaagacctgcacaaggaaacagaagccatgggaaggaaattgcaggggacgaggcagagggagttgatgctggaggatgaagttagattggtgagggaacgttacaggta

SEQ ID NO: 37615 - DNA, 315 bp, Glycine max
  Clone ID: LIB3055-001-Q1-B1-B1
gccaaacacgaccttatcggcgatccaatttcgatctgtgcaaatcgtaaccctactcacttgcttctgcaattctggtggactggatccattttcatctcaattctcgtctctcttcagtaagttagggcacagcacacaataacaattcattctcttagacatggcttccgctgcgccaggtgcaaccaatgatgctttatacaaggaattgtggcatgcctgtgctggaccccttgtcactcttccgcgtgaaggggagagagtttattacttcccgcaaggtcatatggaacagcttgaggcatctatgaa

SEQ ID NO: 37616 - DNA, 159 bp, Glycine max
  Clone ID: LIB3055-001-Q1-B1-B10
ccgaatagccgctattctactcgcaagcaaatcagaacatgagaagagaatggcaggagcagaggggctaaacagggaacagtacgtgtaccttgcgaagctgtcggagcaggcggagcggtacgaagagatggtggagttcatgcagaaggtggtggt

SEQ ID NO: 37617 - DNA, 323 bp, Glycine max
  Clone ID: LIB3055-001-Q1-B1-B11
tttggtgactctggagtggtgatctatggaatgatccctcttacgcactcttggtatggaactcgatcacatccttcagggctaacagcagggttccataacagagttatcagggatggctagggaccagttgcacagatctttgctcggaactcgtgcacgattagagtacctgccatggacctttcggacgcggaacaagcagaggatgatgattctagccctgagttgctacttgcgggcattatgggaggcgtgcgaaagcatgaggttcaggtttcaggtcgaaatgcgtctgaatctggtgttccagggggggttga

SEQ ID NO: 37618 - DNA, 304 bp, Glycine max
  Clone ID: LIB3055-001-Q1-B1-B12
ggattccactctctgtatttctgacacaagctgtgttgtgtctccttaggtgaggatgaacaagaggaaggcgcttcgagatctttgcaatcgagaagtcgggcgcctatcccccagaaatttcgctctccgtcttggctcttccgaggatcttgtccttcgacttcaattactgaggaatctgcaaaagcaccgaggttgtgtcaacgctgtgagcttcaatggagatggtgacatgcgggtctctggttggggggagtgtgggatgagtctctgggactgggaaactcgccgcattagactc

SEQ ID NO: 37619 - DNA, 216 bp, Glycine max
  Clone ID: LIB3055-001-Q1-B1-B4
ggctagcaattgaataacatgactatccacatatgatcatagtgtggccacggtgaatcgtcctattgctccagatccatctcctgtttgccagtactctgattacttcaaagattcggtttccacaagtcgtgtcaaaggtgaaggatactcttctgcatatttctgactatcaccacacgcttgttcatatgaaactcccacatgttgaccatg

SEQ ID NO: 37620 - DNA, 274 bp, Glycine max
  Clone ID: LIB3055-001-Q1-B1-B5
gaagcaatgggaaaagttcttgcacgcgggcacagccgagttccagtctattctggaaatccaaggaatattaatgggcttctactggtcaaaagtcatcatactgtacgaccagaaatagagacagtctgtcagtgctgtatccatccggagaattccaagggttccatcagatatgcctctccatgatatactaaatgaattccaaaacggaactagtcatattgctgccgttgttaaagctatgggaaaaggcatagaaactccacaaatc

SEQ ID NO: 37621 - DNA, 296 bp, Glycine max
  Clone ID: LIB3055-001-Q1-B1-B6
atacactctagcttctagcctgctacctttccttatcaccagcaccaatggcttcagacgccaaactctcctcttctgagtccctcaacggtttgaaattcggccaaaaaatctattttgaggatgttggtcttgctactccagccacctctcttacttcttcttcttcatcttcttctgctgctactgttacttcttcttcttcttcaaggaaaggaacaagtgggtctgttcaaccagctcaacctcccaggtgtcaagttgaacggtgcaaagtagatctgagtgatgcaaaa

SEQ ID NO: 37622 - DNA, 299 bp, Glycine max
  Clone ID: LIB3055-001-Q1-B1-B8
ctcgagccgattcggctcgatcgagggcgtaatctttttcatcctaacttctttgatcccttgcatttcttcaatcttggatagacataggactggcctagttcttacgtccctgtcttgcgctttttcggattttactcaaacttgtgtacacagtttgttcatgaaagtttattacgtcccactgtccagacatatgggtctaaccggaagtattgcaccatggatgcttttcttggcatatttgcattagtttactatcttgtacagaaatttcagtaatgctgataacttgctat

SEQ ID NO: 37623 - DNA, 345 bp, Glycine max
  Clone ID: LIB3055-001-Q1-B1-B9
gcttcttctatgttttgaaagcttgctacgtcactgatttctcttttctccagcgatggcttatgttccacatggaaatgcaaattgcaactctttattccagagatttggcagttctcatgtgggtatttctgctttgcccttcctgcaaccgggactaaaatcttgtacagttttcaacagaggaacactcattcccctgtgcttaaatggaaagaggagctgtgctttatcagaaaagggatttaattgcaagttttcaaagagagagagattctctatcgctagaagtagtagttcttctaactctagtggaagtacagatgaaacctcgaaggagacaaa

SEQ ID NO: 37624 - DNA, 355 bp, Glycine max
  Clone ID: LIB3055-001-Q1-B1-C10
gctgcaaaagttgacgagtatgctcgtggcatgatcagtggttctggatcatcactttttgaagagcttggactctactatattggtcctgttgatggtcagagcataaatgatcttgttgccattctcaatgaagttaaaagcactaacacaaccggtcctgtagtgatccatgttatcactgaaaaaggccgtggatacccatatgcagaaaaggcagctgacaaataccatggggttgccaagtttggtgcaccagctgggaagcaattcaaatccaaggcgaccacgcggtcttatacaacagacttggctgaagctttgattgcagaagccgaagctgacaaagacgttg

SEQ ID NO: 37625 - DNA, 341 bp, Glycine max
  Clone ID: LIB3055-001-Q1-B1-C2
gccaccactgtagttacaggcatagttggttgtgcacgattaaagccaacagttgcagcaattgaagcacggaaagacatagcattggcgaacaaagagacaatgattgcgggagccccttttgttcttcctcttgctcacaaacataacataaaaattcttcccgctgattcggaacattctgcaatttttcagtctatccaggggttgccaaagggtgcacttaggaaaatccttttaactggatcaggaggtgctttcagagaatggcctgctgaaaagatgaacgatattaaacttgctgatgcattaaagcatcccataatgagtttggggaaaaa

SEQ ID NO: 37626 - DNA, 306 bp, Glycine max
  Clone ID: LIB3055-001-Q1-B1-C3
atggcatgtctgtctgcgatggttcaccttgaactagctcatggttgtatcctctcaaacatggaccttgtgacatcggagaacgatcgtgaagattttttggatccagagtgcagctttttactggctgacttgcatcaccggatgggtcctcactatgcatcgctgaatactgctttgattgaattggtacataggtagaccatgggtagttctatgccattacacttaacgaaggaaagaagtacacactatgtactggcccaagttgacaactgcattcaatatcgagaagatgcagatgtg

SEQ ID NO: 37627 - DNA, 290 bp, Glycine max
  Clone ID: LIB3055-001-Q1-B1-C4
ggaattgattcgggaaaagattgaagaattacttcaacaagaaagtcttatcaatgaataccgtgttcgattacatttcattggagacttgcaactattgactgagcctgtcatggcttctgtggaaaaagcaatgagagttactgctcacaacaaccagagagttcttttgatttgcgtagcctatacttctcgtcacgagattgtgcatgccgttcaagaatgctgcaaggaaaaatggaatgaagttcaagcatcaaaagaagcaaagcttacaaatggtgcatttg

SEQ ID NO: 37628 - DNA, 349 bp, Glycine max
  Clone ID: LIB3055-001-Q1-B1-C5
cccagagagagtttctcaccaaacacacacttctcttctcttctcttctcttcattttctgtggttctcactttcttttctctaatcttctaatctcttattttcttcccccctctgttactccccgcttctctgaatccctttctgttaatcatctgtctttcaactcgtgattttttgggtttgcctcaccaaaaagattcaaactttgaaaaattttctcgaaagccaggtgttttcagaatcgagatccagcttttttttttgtttgtttttaaaaaattattattttctttcgttcagccgcgagggttgtttttgattcctcaaaaactctcgttcctttttt

SEQ ID NO: 37629 - DNA, 310 bp, Glycine max
  Clone ID: LIB3055-001-Q1-B1-C6
cgaagatagcataacagcatacagggacatgtattctgtgacaacatctactgcacagccataacgatgtggtgttcagatctttactacagcacttcgatcactcttaggttcatcttcccgacggcttagattcattctttcaaggagtagcagtaatcactgtcgtctccattttagtgatatcatccgtctgtatgctcggaatggtgaatttatcggatctgcgtcatgaatggttcatgctgttagcactcacagtgtactatctgaaaggatagagcagtatagggcggcatcttttctgcga

SEQ ID NO: 37630 - DNA, 307 bp, Glycine max
  Clone ID: LIB3055-001-Q1-B1-C7
gtcgatctccggtggtgttgccggtgagtggtgagagactgaccaagccgatcaggccgacgccgattgtaccggtgcctccgtcttcgaagatggctaacttgaacttgaaagggaaagcttctcggacaaatctcattgagcctttgccgttgtcgttgaatctgccatcgccaacaccgctgtctcaggatcagtcgccggcgaatactggccactcgtcgccgtcatcgtcttctgcggcggcttttcatgctatgtctgcagcgaagttcggctgctggggggatagtatcatcagcgttgc

SEQ ID NO: 37631 - DNA, 249 bp, Glycine max
  Clone ID: LIB3055-001-Q1-B1-C8
gtcgatttgctgtagcgttgcctctggtttaagttgtcataacacagccgctaaagtcgcagctgatcgttagatctgaaggattcttgataatggttcacgttatgatgacgcctgaatcggcgggcatctatctcatggtggcagtagtgttggcatacttcaaggcaagtttgatactaattttgacatatacataatctgccaacttcgaccaccagtactctgagttcagcatcagaagtttcg

SEQ ID NO: 37632 - DNA, 304 bp, Glycine max
  Clone ID: LIB3055-001-Q1-B1-C9
atttatagtgtgtgcttttgatcgtggagcaagacttcaattcatatacaccaaagacacataggatcttcaggagcagaggactcaaagtaatagttttcgacgagaaaattggagtttggggggggatctacatctggatgggattatcactttccttagtctcatcatcctgggaagaaatcgttagacattcacgagttggtcggtctttgaacttcactgtgggttccagggatgcggctatgatggggagatgatgtaactgggagataagagaatgggagacgtcttcaaaggggtg

SEQ ID NO: 37633 - DNA, 293 bp, Glycine max
  unsure (1)..(293): unsure at all n locations
  Clone ID: LIB3055-001-Q1-B1-D1
aanggttccccttccacctcacatggttccgacggaaaggggttcactctcttttactcgaaattcagggtttgtcatagtaattatccatttattcatgtgggttttcctttgccttcaagtttattgaaaattcggcgtgattgatgctaaaaatgtgtatatgtcactctgggtacccccagtgcttcgtttctttgacaaaatgaaaactttttcgtaacaatttcgcaccttttcccatgtttggggggtttttgttaatcctgtgaggggtttatagcaattgggga

SEQ ID NO: 37634 - DNA, 389 bp, Glycine max
  Clone ID: LIB3055-001-Q1-B1-D11
ctcatcaagggttgtgaaagcagagaagtgagatacactaagttatcctcataaatacactctaattaggtggcaagataagtgtctaaccttagtaacattggcgacatattgtgttcattttggaattgtgccactagagttctattcaattcatctatggctgccgcttcttatgctatgcaatcaatcctggcaaaccctttgatgcgcatttccagcgggtcgagggtgaaccaagtgggcgttccggcggtggcacatgagaaggaatgttggcctgagaggtagggccatggctaaggaaggagaacggagtgagcctgcagccccagttagacggccaccatcagtagaagccaagccagaggcggtcgctgctccttcac

SEQ ID NO: 37635 - DNA, 307 bp, Glycine max
  Clone ID: LIB3055-001-Q1-B1-D12
atttccctgtctctgttctcttcaccattctctttcttctttgtttcaagtttcaacaacccagattcactctctctctcgtaattttctctcttattgaggctggaaaaagagagcaaaaaaactaaaaaatgcctgcggtcggaggtataaacaccggagggggcaaggagtaccctggaagcctcactctagttgtgacggtaacatgtatagttgcagccagtggtggtttaatcttcggttacgatagggggatttcaggtggagtgacgtccatggattggtttcgggccaagttttttcc

SEQ ID NO: 37636 - DNA, 288 bp, Glycine max
  Clone ID: LIB3055-001-Q1-B1-D3
tgaccatggcaaacatgattatggcttcaacaaaacctcgggttccagtctgcaccagttcccgttcccccaaaccaaatctcccaagtctccaaatttcaccccccaaagccccaaccttgaaactgaaactcccaatttcaaagccccaaatgcagtccctcctgggagggatagcaccactggtcttggccagaccctccctagcagaagaatttgagaaagcatcactctttgacttcaacctcaccctgcccataataatggtggagtttctgctgctgatgg

SEQ ID NO: 37637 - DNA, 245 bp, Glycine max
  Clone ID: LIB3055-001-Q1-B1-D4
acatgtgtatggctttaagctgccaatctttgtgattcttatcatcgttaccatttgtgtgacaattgtggggacatactttttgttaaatgctgagaactaccactggcaatggacttctttcttttcagctgcctcaacaactgtttatgtttacttggacgcaatataccacttctatgtgaagacgaagatgtcacgcttcttccagaccagcttttattttggatacactttgatgtttt

SEQ ID NO: 37638 - DNA, 329 bp, Glycine max
  Clone ID: LIB3055-001-Q1-B1-D5
gttgcaaagtagagaaaagaagacacagaaacaaaacaatggcgactctgaatctgttctctcagccatggcaacctacaatttcacctttttgttgttctaatactaacaacaacaacaacgttgtttatgcttatcataatcataataattctaaattacatttcttttccaattctcgtcaattctctgttctttctcaattgtccaccaactcctcaaaatcagttagtggaagttcagggctgcagaacagttcctttgtttctggcattgagtacaggaagcgtcctctatattctgtatttcccacaaagcctggtcaaatt

SEQ ID NO: 37639 - DNA, 302 bp, Glycine max
  Clone ID: LIB3055-001-Q1-B1-D6
tgtggaagttgcatgcttagtttctgggatcttgtcctttggatctgagacactctctgagctttctttcttagaaaacgatgtcgtctcaacaagaagaccttcctcgtcatctcaacttcaaggtcaacctcatatggtggacctcactctcagtcaggaagctgattctaaaggagctgtctgtttggatggaacggtgcctggataccatttggatcgtggatatggatctggtgcagatagttggggtattcatttggatggacgaggatggtgtaatagcatcagaaactgtgtct

SEQ ID NO: 37640 - DNA, 269 bp, Glycine max
  Clone ID: LIB3055-001-Q1-B1-D7
catgatcagaaccagagatcgctgatgtatgcgttcgtgtcacgcggcaaggtgattctcgccgagtacactgagttcagtggcagcttcaacacaatcgcgttccactgccatccagaagctccctgcctccaacatcaggttcacctacatctgtgacagccagaccttcaactacctcgtcgacgacagattcacttagtgtgttgttgcggatgaatctattgggagacaggtgcctgtggcttttctggagcgtgtgaaggatg

SEQ ID NO: 37641 - DNA, 264 bp, Glycine max
  Clone ID: LIB3055-001-Q1-B1-D8
gtggattcagtgaatgtttggtgctcgcatgattacacatcactcggcagcaacatcctcatcaccaacgctgaatgcagagaatgccgatgaaaaatatcgatatcatgacagcctgaatacgggagccgctacgacaccgtgcacagtagagttgtgctgagcttcaactccaacttgatagtcgtctacagagatacatgttccagcatctccgactagtactagcaccgagagcagcacctgaagtctcgctggacagat

SEQ ID NO: 37642 - DNA, 306 bp, Glycine max
  Clone ID: LIB3055-001-Q1-B1-D9
ctcgagcgggttcggctcggggcttatggtggagacggatgcatctatagacgaggaacggtgtggtaggcgacgacatgcttcggggagttgaaaatagacgtggatccggggattcccgaaataggtcaacctttcggactgcagctgaatccactggcaagcaagagacaatctgatgaactgagagatcttactatccagaagagagtatggcatgtgcacagtgtattcgttaggggcatatgatttgggtgcacgtcaatcgtggtctgtgcctttggccagaacgctaatttcaggtgt

SEQ ID NO: 37643 - DNA, 334 bp, Glycine max
  unsure (1)..(334): unsure at all n locations
  Clone ID: LIB3055-001-Q1-B1-E10
ggaatccacgacgaaacttatctctcacaccgccggaaacttcgccggagtcttttgccatgggaaggcctccgctattcgaccaatcgccccgccaattcttcccttcgttgccgaacctctctttcgatctcgccacggtgtcttcttcgaagctctcggttctgttctctccttgctccactccggagcacgagatgcttaccggcagtttttcgtcgattcgatgtcgctcagtcaagatattctaggggtggtcgtcactcaggtgttaatggatcctcgagatccgcngtgacgctcaagtgtggttcggattccttctcgggagttg

SEQ ID NO: 37644 - DNA, 193 bp, Glycine max
  Clone ID: LIB3055-001-Q1-B1-E11
agtgaatctacgcacaatatgagcgccttcggcggtaagaattgagcgtgatagacttaaagatggtatgagcgtgggaggcaaccatacacacatataattgacgtgcatcaatggtgtcaggaggatgaaggttcacggcgggaatgtgaattggcacgctttgaagctttatactggcatcgacacctga

SEQ ID NO: 37645 - DNA, 89 bp, Glycine max
  Clone ID: LIB3055-001-Q1-B1-A10
attgtgggaaatgggagggtttatgttctatgttactttgtactccaatcttttatgaatgtacgagggaaacttgttttgtttgatta

SEQ ID NO: 37646 - DNA, 334 bp, Glycine max
  Clone ID: LIB3055-001-Q1-B1-A3
acgtcgcacgcacgcatacgtaagctctcggttcagggcctaatgaaaatccgtctggacaagaaaatttcaaccaatggcaagggaaatggcccccccaagaatgatcctaaacgttcccttgggtcctgttgcaccctaggcttttgcttttgccatctcgagtcaattggtgtggcattgggattatattggatgccacagctcacggtcatgtggcggattggatctttgccatatcaatgggtctggcttgtggagtatttatctatgtatcagtaaaccatctgttggcaaaagggtacatgccccacataccaacaaaggttgactc

SEQ ID NO: 37647 - DNA, 310 bp, Glycine max
  Clone ID: LIB3055-001-Q1-B1-B3
ctctagtgattcaagaacattagtaaatccatgatgatcataccgtagcaacttccactgttgctattactccggatccatcggaagcatgccatttccgcgagtgcatcacagagtcggtttatcctgatcctttcaaggttgccgaattccttgcaccataagtcagatcgtcactagtcacttgttcaactcaagctcaacgacttccacaatttgctggctgataaggtgggacttaagcggatatcccaagatgggagagatcggacaatctcgtttcactaaccatagaaggcgtttattccaa

SEQ ID NO: 37648 - DNA, 314 bp, Glycine max
  Clone ID: LIB3055-001-Q1-B1-C1
ctcgagacgtgggtggataacactgacacgcatcatcgctctcacattctcaaaatgctaaccttcaatctcaatgctatctcatcgtcgttctcagttgttccatttcatgccaatttatcactgtctactcaaacccaattgttagttccttccaatcttaggtactcctttgctatatcaggaaccagaaagttcaagtctttccagctcaatgctggattttgggaatcaattaaatctgggttgatgaagaataactccatgcaagtcattgatccatcctctgcagatgacgaagacgaagaacctct

SEQ ID NO: 37649 - DNA, 304 bp, Glycine max
  Clone ID: LIB3055-001-Q1-B1-C12
ccctattcccttctctttctctgaaccttcttcttctctctttcacattctcataagatataagacccatacacacacacacacacatatctgcttcttgtagaacaagttaagtttgttttgttttgtcgtttgcttagggattaatcaatcaattatctgatgagggaagagccggttgtggttaacaaaggagattatgatcatgatgatgatcagcctttgcatttacctccagggtgcaggttccagggcgcagatgaagagatgatcacttgttacgtcgcagagaaagtcctcaata

SEQ ID NO: 37650 - DNA, 305 bp, Glycine max
  Clone ID: LIB3055-001-Q1-B1-D10
atctaaacttattaaatgcagtattccttatatatatatatatatatataaggaatactgcatctaaacttattaaatgaaaaataagtgtgaaaattgaaaatggatcttaagtagttctctagtccaaaattatggtgttcatccaaataaattccaactcatagctgtatcttgagtataaagtgttggatgattgtgcccaccaaagtaggggagagaacgagagggcgcgcgcggggtagtgagctgggcgacccgggaattagggtccggaccggtacgtggaggggtaccagctttcc

SEQ ID NO: 37651 - DNA, 278 bp, Glycine max
  Clone ID: LIB3055-001-Q1-B1-D2
gtacgtaagctcaggattccgatcctgaatggttcaaagtcgacgtcaaatgattccgacggaaaggggttgaatcacttttagaccagtttcaggggttgtccaagcttttactaaagtagtcctatgagatctccggtgacttcaggttcaatgagtattctgtgtgataaatgctaccgctcagtattcgtcacactaggtaacccgaaagcatcaagtctttggcctgaggtgcccattgactgagctaattcacatcatttgccatgtgcgca

SEQ ID NO: 37652 - DNA, 322 bp, Glycine max
  Clone ID: LIB3055-001-Q1-B1-E1
ctaaatctcattcttcacctgcaactatttggattgctgatttttgttaataccatatttactgatattggcgcatttctttgagaaagttactaattcctagatagaggcaaaaatgttgggaattttcaaggagaagttggttaaagcacccaaagagctgaacagtccagcttcgttgaattcatgcactaagcctaagctaagtcacgaaatccttcaggatttcatgtcctgcaattcctccaatgctttctcaatgtgctttgggaatgaagctttgctagcctattccccttcaaacaagccctccattcatcaa

SEQ ID NO: 37653 - DNA, 360 bp, Glycine max
  unsure (1)..(360): unsure at all n locations
  Clone ID: LIB3055-001-Q1-B1-F1
gtacgtaagctaggnattcggctcgaggtgaaaatggattggcaaagcatgatgggcaacctggacccattccaaagaacaatcttaatcctcgtcccactaacactactcctgctgctgttactatctcgtacccgtccaagaccgccctatccaccaggccctaagggcttcccaatcataggaaacatgtttatgatggaccagctaacccaccgcggtctcgccaacctggccaaacactacggcggaatcttccaccttcgcatgggcttcctccacatggtcgccatctccgaccccgatgccgcgcgacaggttctccaagtccaagacaacatcttttccaaccggcccgcc

SEQ ID NO: 37654 - DNA, 349 bp, Glycine max
  Clone ID: LIB3055-001-Q1-B1-F11
ggaggaggaagagaaaaagaagataaaacaagagggaaagtctagcatgattcttaaagaaaagaggaactataatggagctaatccaattgttttggtagacaggctttggtttataattagataattgaatgaaaatgtgacttgtcttttgttactttgaccattaattcattcgtgtttctcagtttgtaaaggaaaagaaaaaaggcggcggccgacgaggggggctcgtcgacgggggaattaattgcggagcggtacctgcaagggtaccagctttccggagagtgagtcctatgagagctgggggtggtcaagggcagagctgtgtcgtgggtgaaagtgt

SEQ ID NO: 37655 - DNA, 323 bp, Glycine max
  unsure (1)..(323): unsure at all n locations
  Clone ID: LIB3055-001-Q1-B1-G2
cttttattgaaatcctcaagcttcaatttgctttgtgcacactcatccaactattataaccaaacactcctcttcaaattcttcgtcttcgtcttgatcgtgttctatctgtgacgagcatcatggcctcgaaagcagtgctattgttggctatgtgtgtgcttccggccatggttgtggccattcgcccagcaaagaaacctttttgcgtgaagggtcgcgtctactgtgacccttgccgtgctggttttgagacctcagcaatcaactacattgccggtgctgagattatgttgcaatgcaagagcatggttancaacgaa

SEQ ID NO: 37656 - DNA, 293 bp, Glycine max
  unsure (1)..(293): unsure at all n locations
  Clone ID: LIB3055-002-Q1-B1-A11
gtacgtaagctaagnattcggctcgagctcgcaagcaaaaagaaagaatcccaggcgaggagaaagatggatgggaaagagcaagatgtgtcgttgggaacgaacaagttccccgagagaaagccaattgggacggcggcgcagagccaagacgacggcaaggactaccaggagccggggcccgcgccgctggttgacccgacggaatttacgtcatggtcgttttacagagcatggatagcanagtttgtgggcacttttctgtntctctacatcactgtcttaaccgttat

SEQ ID NO: 37657 - DNA, 309 bp, Glycine max
  unsure (1)..(309): unsure at all n locations
  Clone ID: LIB3055-002-Q1-B1-B1
caacaatattcttctcaagctgtgctattggccggtggacacgcagctaatggtgctgtggcccaaggttcccattctgaangggatttaaacaacaccactatatttgttgganggcttgattctgacaccagtgatgaggatctcagacaaccatttttgcaatttggtgaggttgtctctgtgaaaattccagtgggtaaagggtgtggatttgttcaatttgcagacagaaagaatgctgaggaagcaattcacgcattgaatgggacagtaattgggaagcagacagtgcgactttcttggggt

SEQ ID NO: 37658 - DNA, 297 bp, Glycine max
  Clone ID: LIB3055-002-Q1-B1-B3
caaaagcatcattagaagtggtacacaaacatgggccatgctcccaactaaatgatcatgatggcaaagctaagtctaaaacaacaaacaatgacattctgaaccaagacaaagaaaaggtgaagtacattaactcaagggcccctaagaacttgggccaagatagtaatgttgaggaattggactcagctaccctaccagccaaatctggtagccttattgggtctgggaattactttgtggttgtggggtcttggggacaaccaaagagggacttgtcactcatttttgacactg

SEQ ID NO: 37659 - DNA, 350 bp, Glycine max
  unsure (1)..(350): unsure at all n locations
  Clone ID: LIB3055-002-Q1-B1-B4
cagcaacaataacaatggcagcctcactacaagctgcagctaccttcatgcaacccaccaaggtgggcatggccactcgcaacctcaaatctacacaatgcatttctaaggcttttggcttggaacccgctgcagctaaactcatttgctcccttaagcccgatctcaaagattttgctcaaaaatgtgtcgacgccaccaaaattgcaggattcgcccttgccacctcagctctcgttgtttctggagcgagtgcagaaggtgttccanagaggctaaccttcgacgaaatccagagcaagacatactttggagtgaagggaactggaactgctaatcagtgcccaacc

SEQ ID NO: 37660 - DNA, 300 bp, Glycine max
  unsure (1)..(300): unsure at all n locations
  Clone ID: LIB3055-002-Q1-B1-C1
ccggtaacgatttccccacactctaagcgcctctcatccgtgatgggcgtttggagaagttccaacggggcaccaacaagggatgaccgcattggggtctgcactggaatttttcgcacccaatcaattcctgaacaagacgttgtcaagattgttgacaccttccctgggcaatccattgatttctttggtgcactgagggccanagtatatgatgacgaagtgaggaagtggatttctggtgttggtgttgacggcattgggaagaagcttgtgaactcaaaagatggacctccaacc

SEQ ID NO: 37661 - DNA, 325 bp, Glycine max
  Clone ID: LIB3055-002-Q1-B1-E4
cttgtttctctcaaagatggcgttgcccaaaggtgaattccaaggttggaacgaagggggttccgtcaacaacaagttcaaaccaacccttaaaggcttgggcaatccaaattaccatggggttaaaaaaaaaatttgataaggcaccaaggaggaatgatgtaaaagctatagttttgactggcaaaggtggcagattttctggtggctttgatatcagtgttatgcagaaggttcaccagactggggattcctcgcatctccctgatgtctccgtggaactagtagtcaattcaattgaagattcgaagaaacctgttgttgc

SEQ ID NO: 37662 - DNA, 379 bp, Glycine max
  unsure (1)..(379): unsure at all n locations
  Clone ID: LIB3055-002-Q1-B1-E6
accagttcatcttgagagcaggtgcagccaaggcccttggatcattcaggagtaacccccataattgagatgtctttctcttcatgatgatggctctagtggaaagaagataattggagagatggaggttgatatggcaagtttaataatgggaaatgcttttggctttgtatttgcaacgtttctttgaccctctcgattatgtcttcaagattgtggataagtgtagattaaagtctctttcatgacagggggagccttttgcactttcctctgtggtgttcttcnctttagtgtgtcatttttcttttttaagttattctcttctgtcatctctgtactcaaacanatcatgggaaatattttaaattttaatttt

SEQ ID NO: 37663 - DNA, 393 bp, Glycine max
  unsure (1)..(393): unsure at all n locations
  Clone ID: LIB3055-002-Q1-B1-G1
ccctcttttgctgcatcagaggagttgtaaattaagagcatggctgcacaagctcttgtatcatcatcttctcttacctttccagccgaagctgcaagacaaagtcttggaccaagattactccaatctccatttggcttctccagaaaagcctcctttcttgttaaggcagctgctaacccccctggtaagcaaggatcagacaggcctttgtggtttgcatcaaagcaaagtctttcttacttggatggcagccttccgggtgactatggatttgaccctctgggactttcanaaccctgaaagaacaggagggttcaatgagccgaaatggctagcatatggtgagataatcaatggtcgttatgcaatgtttggtgcagttggtgcaat

SEQ ID NO: 37664 - DNA, 312 bp, Glycine max
  unsure (1)..(312): unsure at all n locations
  Clone ID: LIB3055-002-Q1-B1-H1
ctggatcaactgcaaccattgaggttcctgcattggaggttggaaactctttgtgctgggatttgactgttctcggttgggaggtgagttacaaggaggagtttgttccaactgatgaaggctcttacacggttattgttcaaaaagggaagaaaatgggttcacaagaatggcctcttaggaacacttttatgaacagtgaaccagggaaagttgtcctcacaatagagaacacttcaaacaagaagaagagggtactgtaccgttacaagnacatcaagagctccttctgagaaacacattcagaagttg

SEQ ID NO: 37665 - DNA, 62 bp, Glycine max
  Clone ID: LIB3055-002-Q1-B1-H12
gtacgtaaactaagaattcagctcgagggagaacttgttcagtgaacgaacgcccaattttc

SEQ ID NO: 37666 - DNA, 409 bp, Glycine max
  Clone ID: LIB3055-003-Q1-N1-C9
tatgacgtcgatgcacgcgtactagctcggaatcggtcgagatcggatatagagagagaagagggatggaaaacggaggaaaagtgccgtggcttccaatccaatggataacgggggaaaaaatgaatatcaaaggggaatgatccctcctaacacggtgtttggagatccaaagggcattcccatccagcagaccatttacagggacactcctgctcctttcaactgcccttactgcggtgacaccgctctcactaccgtcaggtaggtttttctccaatttcaattcaaatcatcttatctcataacaaattactagattcaatttgcaatcaaaatcgctcttcttttattggtattagggttaaacaatttttttgctcattctattattatgattttgtttcgt

SEQ ID NO: 37667 - DNA, 174 bp, Glycine max
  Clone ID: LIB3055-003-Q1-N1-E3
ctacgtaagctcggaattcggcttgaggatgctctcggtgactgcctttgaacatccaagttcacctttggttgactgtaaatgccaccaacttagttatgcctaaaacgccgattggtgccgtccaagggccgacaatttcaacggcgacaggatcgccaatttcaaggaggc

SEQ ID NO: 37668 - DNA, 332 bp, Glycine max
  Clone ID: LIB3055-003-Q1-N1-F8
ctcaattgaaagcctttcttccaagagtgggcacgacgaggaagaaaaatccaaagctgatcacaatgctcttcttgatgatgggtggtatattttgtcggactgaattccggagtttactgactatttgttctgctgagagtggaaaaacataggagttaatgctatattgtttatacaacaaaataaaaccttagaatccttggatgattttgctttatgtttcagtagcatactagcatgcatacaatttttatatacgttctcgaggttgggttctcattgttttccagattttgtatagaaaacgtcacagggaattactagattaa

SEQ ID NO: 37669 - DNA, 474 bp, Glycine max
  unsure (1)..(474): unsure at all n locations
  Clone ID: LIB3055-003-Q1-N1-F9
tatgacgtcgcatgctnacgcgtacgtaagnnctcggaattcgggctcggagggtttttcaattaaaatttttaacccaaatttaaggaaaggggtggtttggaaggaatgtgttagaaagacatgagcctatacatatagaattatagatcccttgcataatctatgtaccacattcaattgaataagaaagcatttcccattctcaaaattctgtctatgatattcatttctatctttctctaaatctccccttctaaattcaacatctatgtggatataagaacattttgtaactttaacgttagaagcatacatagtttgagatggtgatgattttaattctggattttcttgctttaggatagttatattgcacaaaagtgcttacatatttttgcaactctntctttctagctaggggttttcattttaagaattaattangtttgacttttgagaaataatacacac

SEQ ID NO: 37670 - DNA, 415 bp, Glycine max
  unsure (1)..(415): unsure at all n locations
  Clone ID: LIB3055-003-Q1-N1-H10
tgcacgccgtacgtaagctcggatttcggttcaggctcagccgcatagttaaggaaccgaaactccacataggaatcacttggtttctttgctctcccccaacccaatggctacttccattaacagcagtgctctggggtggaaacattcatccttcttcgtacaatccaataatggcttcaacgttgcttcgcctcctttcaaaccaaagccgncacgctcctccaacttttctctctattgctctgccgcctcctcttcttctgatccactgttggttaaggctgctaggggagatcctgttagtcgtcctccagcatggatgatgcgccaggcaggaaggtacatggctgtttacaaaaatcttgctgagaaatatccatccttccgagagaggtcagagacaactgaactc

SEQ ID NO: 37671 - DNA, 315 bp, Glycine max
  Clone ID: LIB3055-003-Q1-N1-H12
tggcccgattccacttccggactttcggctcgattgtccaaccacctttggggcttaaattcggtccagtccttccccaacacgctctccatcctccccatcgcgtacgtgtggtacgtcacgaaccaccccttcccaaccctagttccgtccggcaatacgtcgtcgtttaggcactccatcgtgtcaaccggcactggcgggtacaacctcatcggctgcgaaatcgccgcttgcagaatccagaaaaaccagctcagagcagacgacgtcgtatcacgcccctgcagaataaaacttatcacatcgtctcgc

SEQ ID NO: 37672 - DNA, 92 bp, Glycine max
  Clone ID: LIB3055-004-Q1-N1-B6
cgactagtgagctcgacaactccggtaattaattccagaccagtacctgtaggcgtaccaactttccctatagcaagtcgaattaaagctgc

SEQ ID NO: 37673 - DNA, 160 bp, Glycine max
  Clone ID: LIB3055-004-Q1-N1-C12
ctcgagccgattcggctcgagaaaagaaatcagatataatagttaataaggtaaccttgtcaattttggattttctttgaggtttcgttctggctttatgtttaggatcttgctataatacattatggttttcgaatcttattagcctttcaatttttta

SEQ ID NO: 37674 - DNA, 327 bp, Glycine max
  unsure (1)..(327): unsure at all n locations
  Clone ID: LIB3055-004-Q1-N1-H12
tcggggaattccaattccacattttcaagaaataaggaggcaaaaatgttcatatatgaattggaattatttgttttcttattaggcctatcctgaagccaaaggaaatgagatcggaattcctcggggaattccaattccacattttcaagaaataaggaggcaaaaatgttcatatatgaattggaattatttgttttcttattaggcctatcctgaagccaaaggaaatgagatcggaattcctcggggaattccaattccacattttcaagaaataaggaggcaaaaatgttcatatatganatggaattatttgntttctta

SEQ ID NO: 37675 - DNA, 464 bp, Glycine max
  Clone ID: LIB3055-004-Q1-N1-H2
actatataagagctatgacgcccccgtcctaagcttggaattcggcttgaggaggaggaaaattaccggcccattattccatgacctaatccacaggtttaggattgcattttcaacagtggttggtttaactggaatttacacaaaaaagcttagctggcatgggcatggagaactgtttacaagtgaccacagtaggcacagccacaccccaatgcctttctgcattctttcaatcttcaagggataagcttgccttcccaactcacagaggtttcaagaaatccttgcaaaactcaacactgtcatgcccttgtctctactcaaccggtgctgcctatagaaagtcccgttttgtttgcaatgctcgtgaagcagtaaatgaagttaaagtggtgactgactcaagctggaataaccttgtgattgcaagtgagacccctgtgctggtagagttttgggca

SEQ ID NO: 37676 - DNA, 384 bp, Glycine max
  unsure (1)..(384): unsure at all n locations
  Clone ID: LIB3055-004-Q1-N1-H3
gaagcactatgacgtccatgcacgcgtcgtaagctcggattcggctcggctcccaacagtgtccaaatccaacgcacactttttcccccatggggttgaacaatggcgtccccgccactggcaccggcctcatcgttagcttcggcgagatgctcatcgacttcgtccccaccgtctccggcgtgtccctggccgaggcccctggcttcctcaaggcccncggcggcgccccagccaacgtcgccatcgccgtgtcgcgactcggcggcaaagccgccttcgtcggcaaactcggggacgacgagttcggccacatgctcgccggaatccttaaggagaacggtgtccgcgccgacggcattaacttcgaccagggtgcacgca

SEQ ID NO: 37677 - DNA, 403 bp, Glycine max
  unsure (1)..(403): unsure at all n locations
  Clone ID: LIB3055-005-Q1-N1-D4
atgcacacgtacgcaagctcggacattcggctcgaggcgttggccattgcaatcatgattgtggcttccaccaaacctctggtgccagtctgcaccagttcccgttcccccacacccaaagtccccattctccaaatttcactccccaaagccccaaccttgaaactgaaactcccgatttcaaagccccagatgctgtccctccttggagggatagcaccactggtcttggccagaccctccctcgcagaagaaattgagaaagcagcactctntgacttcaacctcacccttcccataataatggtggagtttctgctgctgatggttgccttggacaagatatggttcaccccgcttgggaaattcatggacgagagggacgcggcgatcagggagaaac

SEQ ID NO: 37678 - DNA, 206 bp, Glycine max
  Clone ID: LIB3055-005-Q1-N1-D6
gctgcttttacggggcttcaggcccatttgaagttgaataagggatgtttattgttatctgtcaatgcttaatctgcacctgagagtgtaaacaatttctgaatgactcatgtttggtttgtaagttacggtttttacattggaccaattacagtctcgcatattcctgattaatggcgtttcaataaataataattttgaattga

SEQ ID NO: 37679 - DNA, 506 bp, Glycine max
  unsure (1)..(506): unsure at all n locations
  Clone ID: LIB3055-005-Q1-N1-G4
tatgactgtcgcatgcaccgcgttnacgtaagctctnggaattcggcttcgagcggattcgcttgtcttggatatttcgagtatggagccacggttgtcgtggtgaccgtgagtcacaacgaggtcaccagtgatacctacgatggacgcttactggaccatgtcggaagctgcactatgttatggttgcacctgatgcattctcaaggtgttgaagagagccttcaaagaggcttaagactggcatactcccaacgtgcttcattccgtatcatcnggattcgacaacggttcgccaagtgcagtgcatcagcttcatcgtctacaagcccccaggcttctaagtgtgaaaaatttgcaaagcattagtagccgncaccccactttgtttgtttgtacttaaactacattcccatttgtatttgctttctgagatttcatcatcctgtatttttggattctggaatcggactttaatggacattaatggatgagaactaatgaat

SEQ ID NO: 37680 - DNA, 347 bp, Glycine max
  Clone ID: LIB3055-005-Q1-N1-H1
cacgcacgcatacgtaggctcggaattcttctctaggctgtttaatttgcgccgaggatctgccctgacagagaaaagttctattgagatggaggctagcatcatggatggtccaaaacgacgatgcggcaccgattcgggtcttaccaccgttaagaacccgatctcgcttgctcgtttggttatggacaaatccctgcattcctacctcgcctacttcgtctcctaataatttgctaggcaacaagatgtggaattagttgacaacgagtactttatcacacctgataacattagcatgctcaatctttcaaatgaagcatacacaatcctatttgaataccaaa

SEQ ID NO: 37681 - DNA, 212 bp, Glycine max
  Clone ID: LIB3055-006-Q1-N1-D8
tcctatgacgttatgagcacgcatgcactcagctcgtgagctcggtattcggctcgagctcgagccgaatcggctcgaggaagcgttcctggaaagttgggagcccaacggctaagactacctccatgagagcttcttcgaaccgtcgtaagaggccaagctcttcgtcgggaacttgccttactactttgatagccagaaatggtcaaagc

SEQ ID NO: 37682 - DNA, 120 bp, Glycine max
  Clone ID: LIB3055-006-Q1-N1-F12
ggagaactcatttaaggttgtatttggaaaactctatgcttaatttcttttaagcattatatgatgatacttgtgtgactactgctgctgctgcattaattcactcattgtatattctta

SEQ ID NO: 37683 - DNA, 380 bp, Glycine max
  Clone ID: LIB3055-007-Q1-N1-D5
tgcagccaataataaagacagtgccacttattttcatttataatagaggcaaatataaggtatacatagatgagccagctagctaataagacataggcaactgaacacaacacatgatatccccacaaaggataaatcataagacgtacaaaagcacaaaggtaaggactattattaattcatggcccttaaaaaatactaaaaacaccaagggggcatgcaaatgatacatatgtaattattattaattaagcaagaatctccttcaaaggcttggcctcaagttttgccttctgatcaagttcttgcaaatgcttttcattctcaaggtcctgcaaatgcttttccttagccagcttcttcatccttgcaatctcaat

SEQ ID NO: 37684 - DNA, 128 bp, Glycine max
  Clone ID: LIB3055-007-Q1-N1-G1
gtttgtttgtacttaaactacattcccatttgtttttgctttttgagatttcatcatcctgtatttttggtttctgttttcggacttcaatggaaattaatggatgagaactaatgaataagctaaaa

SEQ ID NO: 37685 - DNA, 412 bp, Glycine max
  Clone ID: LIB3055-007-Q1-N1-H4
tcgaggcaattgaagttgaagtcttgcccttctctcttcaactccgaacacaagacatcatcatccatggctgcctccgtctccactgtcggagctgtcaacagagctcttttgaacctgaatgggtctggacctggggtttcagctcccagttcatccttctttgggagcagcttgaagaaggttattggctcaagggtccccaacacaaagatttcctctggaagcttcaagattgttgctgtagaagagaagaaagagattgaagagacccagcagaccgacaaggacagatggaagggtcttgcctatgatatctcagacgaccaacaggacatcacaagaggaaagggtttggttgactcccttttccagctccacaggatgctggaactcactatgctgtcatgag

SEQ ID NO: 37686 - DNA, 306 bp, Glycine max
  Clone ID: LIB3055-008-Q1-N1-C1
atagaagatctgaacgtcgtgtgcacgcgtccgtaagctgggaatcggggttggagcagatcttgtatgggattaaacaaggacgccttgtgatatgcgctttggcattcccttcagtgatggaaccacctcaaaatataggagcttatcaaagtcgctggtaatataaagaggttcattccatcaggatttgccgcggaagaagattcagtaaaacctcttcctccattccaagctgttcttgataagaaaagaaaaattagaagggaaattgaagcagctgggatcccttacacttctatatct

SEQ ID NO: 37687 - DNA, 285 bp, Glycine max
  Clone ID: LIB3055-008-Q1-N1-D12
ggcatattgaatgtctttttatgttatgtgaatactgacataggagatggttcttgtgtcctttttttttaaaaaaaaaagtaaggtttgtatattatctttggagtcgaattattatttgaaagttattatattgtaaatcctagagccctgttgtctgaatccatcaggcggcttggcaaagaccgagattttaggactgattgtaagcataaacccgaatattcttttcctaatttctttgtgcaataatgtatgaaaaaggctcgagcttctttttaaaaa

SEQ ID NO: 37688 - DNA, 304 bp, Glycine max
  Clone ID: LIB3055-008-Q1-N1-G9
ttaattttttctaaaaaagacagccgaaagaaaggaaaggactaaagagatttttttttctctttttttttttttggaagattaatcttccattaaattgtcctgtagattagataagatgttgttaattacattctttgatgtaaataggttaatttttctgtttttttaagtccttgatagtattaacaaaggacatgatctgaaattgtctagatctggtataattttcatgtgacatctggatatatctgatgtaattctggctaatgttaattttctcttattccaataatttctgctt

SEQ ID NO: 37689 - DNA, 158 bp, Glycine max
  unsure (1)..(158): unsure at all n locations
  Clone ID: LIB3055-009-Q1-N1-A11
gtaagctcggattcggctcgagagcaagcacnctcgcagtgaagtctgagcgtcgcacccgagggtatttaccaattataatataaggttgtaattagtaagcaaaagaagatggtgaagatatgtggaattggagcagggtatgtatggggtacaac

SEQ ID NO: 37690 - DNA, 243 bp, Glycine max
  unsure (1)..(243): unsure at all n locations
  Clone ID: LIB3055-009-Q1-N1-B11
gcacgcgtacgtaagctgggaattcggctctagcgaacagacttattgaacgacgcacctatacttcaaagaacagtanttttcaaagaacaccagcgggccaatactacgcccaatccgaccttatatctaccttgttacagcgcttgctctcagtccatgtagctgccaacatacgtcacaaacacacccaaaataaatacataccaatacatatgactaaacatgctcatagacgccaac

SEQ ID NO: 37691 - DNA, 263 bp, Glycine max
  Clone ID: LIB3055-009-Q1-N1-G6
gagctacgacgatgcatgcacgcgtactttagctggtaatttggctcgagactttttgctctagggctcgaaaacacgtatcggaggcgccaatgctctcaaggatctaggattgacatatcttatagacgcctgaatgcaaactctgcgaaatgagagcggtattactgcatggaatccaatttcagatatacaaggtgtatatgtgcgacaatgtgcatgtgtgtattgtgagtacaggatgactgatcatagcctatact

SEQ ID NO: 37692 - DNA, 252 bp, Glycine max
  Clone ID: LIB3055-010-Q1-N1-A3
tcgcacgcgtacgtaagctcggaatgcggctcgaggacggcgaacttttttagacagagcacctgcaccagcaccagcagcagaaccaccactcggaggaacagcgaatgctttatgctggtggtaacagtggccacggcggtggcttttgggacaacacgccggcgccagtgcaagtgcctgcgttttgccagtattctgctcacaggggaccccttcagttcagtaacaccccttcgattcgtgcttgga

SEQ ID NO: 37693 - DNA, 176 bp, Glycine max
  Clone ID: LIB3055-010-Q1-N1-C8
tccatcaccgtactaagctcgaattcggctctaggccttatttctccctcttttggagaactctcattggtatattaaattaaccggcttcactatttgtattttataaaattttttttttattattttttttttttttttaatttatattttttattttttatattatttatttt

SEQ ID NO: 37694 - DNA, 295 bp, Glycine max
  Clone ID: LIB3055-010-Q1-N1-D4
ggggggtttttttttttttttttttttttttttttttttttttttttttttttttgaatgaccaaatttttaggcaatgaagttttaaacttttaacaatttgatgtccattgtccaaagctttggttaaacaaacacttaaatggagagacaatatcggttatttatttcctaacttttttcaacgaactgaagcaaaaatggactgttggttgtacaattttgggactccatttgggatcttttgcctgtttttcctcctttttgagacaacttttaaacctttaacaatttc

SEQ ID NO: 37695 - DNA, 306 bp, Glycine max
  Clone ID: LIB3055-010-Q1-N1-E10
acgcgtacgtaaggtgggaattcggctctagctatcagctactctcaccgcgacgtcagcgaagcctacgtagttttttaaaagcaatgagagtcgataacacagagttgaatgtttgggacggcgattcgatgtttggcgaagaaaccgaagccgaagatgggacccgcgatcctgaaaacgccgacggagcacaggcagacaatcacaagaaccctcttcgatataattaaggagcatgggcccatcactgtagctaacacctgggaacgtgtccagcaagtaggattgaaagattgaacaagc

SEQ ID NO: 37696 - DNA, 354 bp, Glycine max
  Clone ID: LIB3055-010-Q1-N1-E4
agttatgacgtagcacgcacgcgtacgtacgctcggaggtaatttcgatctagcgaggagatacaccttcaccagcagcagccatggttggcgggaccgtactatgcctattcagcggtgccaagatctacccagtgaaaggcatcaaatttgttcgtggtgattctcaggttttcctgtttgctaactcgaaatgtatgaggtatttccacaacatgttgaagccatcaaagcttacctggactgcaatgtacagaaagcaacacaagaaggacattgctcaagaagctgtgaagaaaagaatacttgctgcctaaaagccttacttcaggtccattgtcagagccacttttg

SEQ ID NO: 37697 - DNA, 391 bp, Glycine max
  Clone ID: LIB3055-010-Q1-N1-E9
cacgcgtacgaaggtgggaattcggctctagctatctgctactctcacctcgacgtcagcgaagcctgcggagtttgttgaaggctatgcgggtcgatatctcagagtagaatgtttgggacggcgattccatgttagccgaagaaaccgaagccgaagatggaacccgtgatcctgaaaacgccgacagagcagaggcacacaatcacaaaaaccctcttcgatataattaaggagcatgatcccatcactgctgctaacacctgggaacgtgtccagtaagttgaattgaaagacttgacaagcaagaagtacatgaaaatagtgctgaaatggatgatagaaatacagaagatacagcttctttacaaccacattggagcacacaaac

SEQ ID NO: 37698 - DNA, 437 bp, Glycine max
  Clone ID: LIB3055-011-Q1-N1-A1
tgacgtgatgccgcgtacgtagctcgaattcgctcggaaaggtgctgaaacatggtgacctggttgtgtgccccggaggaccacgtgcagagagccctatttattaagggtaaccctttgtttcggaactgtgcgttgaaataatccctgtggcaattgatgtcatgtgacaatgttccatgcacaaccgcagaagtcttaagtgcttggacccatttttcttcttgatgaatcccacaccttcttactcttgtcagttgctagagaaagtgtcacctttcattaccgctagtaatgttatcaatgacgattatgcgagatttgaagtggctaatcacgtgcaaacgcatattgggaaagccctgggttttgaatgcactcaacttaatagaaaagacaagtacttgattctggccggtaatgaaggtatagtatcg

SEQ ID NO: 37699 - DNA, 378 bp, Glycine max
  unsure (1)..(378): unsure at all n locations
  Clone ID: LIB3055-011-Q1-N1-C3
caccatctgaagtggcacaattgaaaatgcctgattacgcctggaaacttatgtgcccgtacttggtggtaccaaaaaaaatttactttggtttaaccgtattggctggtaacttgtgtcacagtatttgaaggtaggtaagttcacaacggttggtgtttctggtgggtggccatgggntctacagaggtagttctttntgttatttgagtgtcaattgttgttttctgtagtggataagcatcatgtttgttgttgatacttgactgatgattcaacacaacagtgaaattctaaaactggtgcctatgagaatgcttgacatgatacccttgtgtggaaatgaatcaaatgatatctcgtgccattacaacttan

SEQ ID NO: 37700 - DNA, 261 bp, Glycine max
  Clone ID: LIB3055-011-Q1-N1-E5
gaaattaatagttgtcattattaatcaatccaatacacagcacacaggaaaaggccccaaagaccatttttacccctatgtgaagagggttctcctctctcttgaaaacaaataaaaaaattcaaggtttaaattaaacctatatatacacgtgtttccatcacacgcgcggacaccagccattggagtcctgtatagttaggccaaaactagctcatggccaaaaaaggaaaaaaaaatatataaacagctcccgcaaag

SEQ ID NO: 37701 - DNA, 456 bp, Glycine max
  Clone ID: LIB3055-011-Q1-N1-H4
tacgatgcacgccgtccgtaagctcggaattcggttcgaggttcactggagggaagggtttgaatttggctttttccggcccagtggaacccttaattttctctttcaattacttcaccaaaatttcaaggtagctttcttttgagaagaaagattagggccccaccagtaaagagacaagtttattggctttggccgctgctcaatcacccaccaccagcatggccaggacagctattccgaaccttctgatttcaagacatgggatgggcaaaaacctattctgtctaggatctacgggttcaattggaactcagacactgagtatagtggctgagttcccagaaagatttaaagttgtgagccttgctgctggctctaatattactcttcttgctgaccagaataaaacatttaagcctggaagttgtggtcttagaaatgagtctttaattg

SEQ ID NO: 37702 - DNA, 174 bp, Glycine max
  Clone ID: LIB3055-012-Q1-N1-A4
ctcgagccgaatcggctcgaggcaatactccaaggtttagtgtgccttgcgcagctacactttcatttgctacaatgctggtgcagcactgcatgtatattttgagtggtaacatttagttgtaactagaatatttaaggaacttgcctaaatgattgaattgctgctttaaaa

SEQ ID NO: 37703 - DNA, 355 bp, Glycine max
  unsure (1)..(355): unsure at all n locations
  Clone ID: LIB3055-012-Q1-N1-C4
acctgctggtgggggttaggcaaaaaaattgaatgctaaccttaattaggggngcacaactaaaacatgagccttaatttgatgatttagttgtgcccctgagtaaggtaagcatcaaattaagctcatgttttactctactaatgctatctaagaaataaaaattgatgtattatggggcttaattgacccttaattccatcaatttcatatgttaaaagctgaataaagtgcatcagccacgactaggcgtgagttgggcacaagtgtgttatgttgttctattgtgtttcgtgtgattgtcgttgattgtaacctgagactgaaaagtcatttgctttgaaatctccaaaaa

SEQ ID NO: 37704 - DNA, 236 bp, Glycine max
  Clone ID: LIB3055-012-Q1-N1-D9
gtggtgtctccctctgtattactgggtatcttttaatgttatttctggacctttcagcctgtccaaagaatatatttgaagacactagacagatatattctttggacaggctgaaaaggtcaagaaagtaaaactcagcacataatttgtgtggtgtctccctctgtattactgggtatcttttaatgttatttctggattttatcttctataaaattgtccctatcaaaacatag

SEQ ID NO: 37705 - DNA, 213 bp, Glycine max
  Clone ID: LIB3055-012-Q1-N1-G1
ctttatttttcggtcgggaaataattgggggttgtgcttggacctggcggtaatcggtcaagctttggtctagtggttctctcgcctgtggaaagtaaaaaatagttgtaatgggtcattctggggctttcatttgcttaaggtttgggtcaaccatagtcactcatatacgtggttcttttacatatggaatatttcatatttagcatggaa

SEQ ID NO: 37706 - DNA, 336 bp, Glycine max
  Clone ID: LIB3055-013-Q1-N1-A4
agctatgatcgctcgcatgcacgcgtcatcgtgagctcggattgaggctcgagcaatattctcatgacaatccggggatcaagatggtatactcgcgagggcatgtgagatcctacttacgtggtagaatgtgtcaagtgttgtgagggcttgaatggactgggagccggtagacttgtagtgacttcagatgacagcatagtgttgcctacctgctgcataggagctataagaattggcatgacagtgtgagcgtctaaagaatcatcactgatgctcaaggatctaacatgaagctcaactcagctgcagcaagacttcaaacgcaactcactg

SEQ ID NO: 37707 - DNA, 136 bp, Glycine max
  Clone ID: LIB3055-001-Q1-B1-B1.R1
agggggaaaattgctcgatatacatacattaaatagtatatataatagaaagttatatatacagaaatgagatgcaacataggtgaattacaaaagaaccaaaaaagaaactccaaatgcatactagatagtaaga

SEQ ID NO: 37708 - DNA, 437 bp, Glycine max
  unsure (1)..(437): unsure at all n locations
  Clone ID: LIB3055-001-Q1-B1-B1.R2
ccccccctttttttttttttttaaaagggaaaaaaacccccccaaccccccccccaaaaaaaagtttaaaaaaaaaaaaaaaatttttttcccccccccaaaaaaaaacccccccccccagggggttttcccccccacccccccccccaaaaaaaacccccccacaccccccccccccaatagagaaacccccccccccccccccaaaaaaaaaattttttcccccccccccccccccccccccnacaaaaaaaaaatccccccccccccngggccccccccccccaaaaaatctccgtaaacccccccccccccccccccattaaaaaaaaaaaaaaaaaacccccacccccccccccccccccctctctttntttttttttggggaaaaagaaaaaaaaaaaaaaaaattttattttttcccccccccccacccc

SEQ ID NO: 37709 - DNA, 549 bp, Glycine max
  Clone ID: LIB3055-002-Q1-B1-H9.F1
gtgtctatgcaaagttctggaatcaacccctaaggtccccccactccttcaaaaatcctctcttttatcctacaacactctaatcatcgtcatcaaccacctcctccatcctcccccagtaacaacacaacataacattcagagaaaaacaaaactatcatacccacatggatttgcaatgaaagtgagagagtccaattatgcgaacgctttgtgatgcttgtgagagcgccgggctatagttttctgcgccgctgatgaggctgcactttgtcgtgcctgtgatgagaaggttcacatgtgcaacaagctagctagtaggcatgtgagggttggtcttgctagtccaagtgatgtaccacggtgtgacatatgtgagaatgcacctgctttcttctattgcgagacagatggaagttccctttgtttgcagtgtgatatgattgttcatgttggaggtaaaagaacgcatggaagatatcttctgttcaggcaaagagttgagtttccaggagataaatctagtcatgctgaaaatccgggcttcac

SEQ ID NO: 37710 - DNA, 520 bp, Glycine max
  Clone ID: LIB3055-002-Q1-B1-H9.F2
ggctcgggtgtcttgcaagttctggaatcaacccctaaggtccccccactccttcaaaaatcctctcttttatcctacaacactctaatcatcgtcatcaaccacctcctccatcctcccccagtaacaacacaacataacattcagagaaaaacaaaactatcatacccacatggatttgcaatgaaagtgagagagtccaattatgcgaacgctttgtgatgcttgtgagagcgccgcggctatagttttctgcgccgctgatgaggctgcactttgtcgtgcctgtgatgagaaggttcacatgtgcaacaagctagctagtaggcatgtgagggttggtcttgctagtccaagtgatgtaccacggtgtgacatatgtgagaatgcacctgctttcttctattgcgagacagatggaagttccctttgtttgcagtgtgatatgattgttcatgttgggaggtaaaagaacgcatggaagatatctttctgttcaggcaaagagtttgagtttcca

SEQ ID NO: 37711 - DNA, 538 bp, Glycine max
  Clone ID: LIB3055-002-Q1-B1-H9.R1
taaaagtcaacacacaattcattgaaaggggtcatagatatacagttaccaatgctttgagaacagaatatgatgtgttgaactaccaaattaagttcctacgtaggcgaacaaactcctcaaaggattctggtgcctcatttgccagaatatataggatattaatagagtatgtcatccttgtgactagcatgcacgagaacaaaacgaagcttttgccattggtagatttttggtttaggatcctgtcagaactgcattgcctagttgcgccatttactgctgattatttgatgcttgttcatgtattctattaggcttcatgttcaaatcaatcattttactttccatcttggcatgcccatcagcatcaggtcctggcgttggaaccataggcatcttgtgattttgttgcttctctcccatttttagtttgggaagtggattttgtctccttttagcctcaccttggttccaatggttggtgaagccggattttcagcatgactaggattaatctcctgggaactcaactctt

SEQ ID NO: 37712 - DNA, 351 bp, Glycine max
  Clone ID: LIB3055-002-Q1-B1-H9.R2
taaaagtcaacacacaattcattgaaaggggtcatagatatacagttaacaatgctttgcagaacagaatatgatgtgttgaactaccaaattaagttcctacgtaggcgaacaaactcctcaaaggattctggtgcctcatttgccagaatatataggatattaatagagtatgtcatccttgtgactagcatgcacgagaacaaaacgaagcttttgccattggtagatttttggtttaggatcctgtcagaactgcattgcctagttgcgccatttatgggctgattatttgatgcttgttcatgtattctattaggcttcatgttcaaatcaatcattttacttttc

SEQ ID NO: 37713 - DNA, 586 bp, Glycine max
  unsure (1)..(586): unsure at all n locations
  Clone ID: LIB3055-004-Q1-N1-D2.F1
aacaatcttagaaataaacctacatatccaaccctcatataaatacgccattaccctacaaccatatattatacacatagctagacatggtgaacagccatggctagtgttgattcttcttccttttcttcttgtaaaaatgattcattttcctctaactacagcattgatacttgcaagatgtacaaaggggtaaggaagagaaaatggggcaaatgggtgtccgaaattcggcttcccaacagccgtgagcgcatatggttggggtcctatgacacccaagtgaaggcggccagagcatttgatgtcgcactttattgcctacgtggcaaaagtgcgagtttcaactttcctgacacacctcgacacttggaaattaatatggtgttaccatgtgacatacaacaacaacctctctcccatccggagattcaagagatagcctcgaagtttgcgaacaacgaccacgtccctttggaggaggagagtgcttttcaagaacaagaacaagacccctcggatggagtcacaaagtggggnntctaaatctgccaatacaataacggagatgagcaacttccctaat

SEQ ID NO: 37714 - DNA, 589 bp, Glycine max
  unsure (1)..(589): unsure at all n locations
  Clone ID: LIB3055-004-Q1-N1-D2.F2
aacaatcttagaaataaacctacatatccaaccctcatataaatacgccattaccctacaaccatatattatacacatagctagacatggtgaaaccagccatggctagtgttgattcttcttccttttcttcttgtaaaaatgattcattttcctctaactacagcattgatacttgcaagatgtacaaaggggtaaggaagagaaaatggggcaaatgggtgtccgaaattcggcttcccaacagccgtgagcgcatatggttggggtcctatgacacccaagtgaaggcggccagagcatttgatgtcgcactttattgcctacgtggcaaaagtgcgagtttcaactttcctgacacacctcgacacttgngaaattaatatggtgttaccatgtgacatacaacaacaacctctctcccatccggagattcaagagatagcctcgaagtttgcgaacaacgaccacgtccctttggaggaggagagtgcttttcaagaacaagaacaagacccctcgatggagtcacaaagtgacgagtctaaatctgccaatacaataacggagatgagcaacttccctaata

SEQ ID NO: 37715 - DNA, 532 bp, Glycine max
  unsure (1)..(532): unsure at all n locations
  Clone ID: LIB3055-004-Q1-N1-D2.R1
gtctttatggtccatttgacataaactctagtcatagcctaactattataattgagaaacagccatgtataaatggctacaaaaaaacataatagagaggcttgcttgctagtaattatttactagttgaaacttatgcaaagtagagggtatctaagttaatttgcaggtgaatcaaaagttccaactccaaagtaaggaatggttagaaaaagcatcatgatcatcatcaccttcaatttcatcctcatgaaaaagcattggagcttgagtgggaccaaaaactcacccgggtgcacttngtctggccccaaatagaggccaaaatccgagccattcaagtcatccaacatgttaaaaaatgtccaatccatgctgtcccaatccccttgtaattgatccacttgtacattagtatgagttccaccatcataaatattagggaagttgctcatctccgttattgtattggcagatttagactcgtcactttgcgatccatcgaggggtcttgttcttgttcttgaaagca

SEQ ID NO: 37716 - DNA, 547 bp, Glycine max
  Clone ID: LIB3055-004-Q1-N1-D2.R2
gtctttatggtccatttgacataaactctagtcatagcctaactattataattgagaaacagccatgtataaatggctacaaaaaaacataatagagaggcttgcttgctagtaattatttactagttgaaacttatgcaaagtagagggtatctaagttaatttgcaggtgaatcaaaagttccaactccaaagtaaggaatggttagaaaaagcatcatgatcatcatcaccttcaatttcatcctcatgaaaaagcattggagcttgagtgggacacaaaaactcacccgggtgcaacttgtctggccccaaatagaggccaaaatccgagccattcaagtcatccaacatgttaaaaaatgtccaatccatgctgtcccaatccccttgtaattgatccacttgtacattagtatgagttccacccatcataaatattagggaagttgctcatctccgttattgtattggcagatttagactcgtcactttgtgactccatcgaggggtcttgttcttgttcttgaaaagcactctcctcctc

SEQ ID NO: 37717 - DNA, 209 bp, Glycine max
  Clone ID: LIB3055-002-Q1-B1-H9.F3
gttttgttctcgtgcatgctagtcacaaggatgacatactctattaatatcctatatattctggcaaatgagggcaccagatcctttgaggagtttgttcgcctacgtaggaacttaatttggtagttcaacacatcatattctgttctgcaaagcattgttaactgtatatctatgacccctttcaatgaattgtgtgttgactttta

SEQ ID NO: 37718 - DNA, 575 bp, Glycine max
  unsure (1)..(575): unsure at all n locations
  Clone ID: LIB3055-002-Q1-B1-H9.F4
gctgattatttgatgcttgttcatgtattctattaggcttcatgttcaaatcaatcattttactttccatcttggcatgcccatcagcatcaggtcctggcgttggaaccataggcatcttgtgattttgttgcttctctcccatttttagtttgggaagtggattttgtcctcttttagcctcacctggttccaatggttgtgaagccggattttcagcatgactagatttatctcctggaaactcaactctttgcctgaacagaagatatcttccatgcgttcttttacctccaacatgaacaatcatatcacactgcaaacaaagggaacttccatctgtctcgcaatagaagaaagcaggtgcattctcacatantgtcacaccgtggtacatcacttggactagcaagaccaaccctcacatgcctactagctagcttgttgcacatgtgaaccttctcatcacaggcacgacaaagtgcagcctcatcagcggcgcagaaactatagccgcggcgctctcacaagcatacaaaagcgttcgcataattggactctctcactttcattgc

SEQ ID NO: 37719 - DNA, 390 bp, Glycine max
  unsure (1)..(390): unsure at all n locations
  Clone ID: LIB3055-002-Q1-B1-H9.R3
caggtgccattctcacatatgtcacaccgtggtacatcacttggactagcaagaccaaccctcacatgcctactagctagcttgttgcacatgtgaaccttctcatcacaggcacgacaaagtgcagcctcatcagcggcgcagaaactatagccgcggcgctctcacaagcatcacaaagcgttcgcataattggactctctcactttcattgcaaatccatgtgggtatgatagttttgtttttctctgaatgttatgttgtgttgttactgggggagatggagggaggggtgtttgatgacgatgattagagtgttgtaggataaaagagaggatttttgaaggagtggggggaccttaggggttgattnnagaantttgnnataga

SEQ ID NO: 37720 - DNA, 342 bp, Glycine max
  Clone ID: LIB3056-014-Q1-N1-G11
caaaactcaagctaaattctcactctcacaacttcaatctctttctctctctctctctctctctctctctaccaaaaaaatggctttggaaactctcaactcaccaacaacaaccgccccatctttccccttcgacgacccaactattccatgggccaaaagaaaacgttcaaagcgttgttcacgcgaccacccttcggaggaagagtacctcgctctctgcctcatcatgctcgctcgcggcggcaccacccgccgcgtcagcactccaccgccgcaaccgactccagatccttccaccaagctcagttacaaatgctccgtttgcaacaaaactttccc

SEQ ID NO: 37721 - DNA, 363 bp, Glycine max
  Clone ID: LIB3056-003-Q1-N1-H1
ctcgatcaactcaacacaaaccaaaactcaagctaaaatgctcactctctctctcatctcgagatcatagtatcatattcaatatcatttcataccaaacacatggctttggaagctctcaactcaccaacaacaaccgctccatcttttccctttgacgacccaactattccatgggcgaaacgaaaacgttcaaagcgttctcgcgaccatccttctgaagaagagtacctcgccctctgcctcatcatgctcgctcgcggcggcaccaccaccgtcaacaaccggcacgtcagcccttcaccggcacagccacagccacagccgacaccagatccttccaccaagctcagttacaaatgc

SEQ ID NO: 37722 - DNA, 428 bp, Glycine max
  Clone ID: LIB3056-003-Q1-N1-A8
gtacctcgctctctgtctcatcatgctcgctcacggcggcgccggcggtgtccccgccgccaagcctgctgtctccgacaacaattccgcgccgctacccgccgccaaactgagctacaaatgttcggtctgcaacaaagccttctcctcttaccaagcactcggtggacacaaggccagccaccggaagctcggcggcgagcaccactcgacctcctccgccgtgacaacgagttcggcgtcgaacggcggtgctaggacccacgagtgctccatctgccaaaagacgttcccaacaggacaggccttgggaggacacaaacgttgtcactacgaaggcgggaacagcgccggaaccggcttttgaggaatggggttcacttacacagggagccccccggatttcgaattggaacctccgggttttt

SEQ ID NO: 37723 - DNA, 409 bp, Glycine max
  Clone ID: LIB3056-008-Q1-N1-F9
cataagcacaagcacaagcacaagcacttctctaattccctttcacactctattacagatttcacaagtgcttacacttcaaatggctttggaagctcttcaatcacccaccacagccactccatcgtttagtccctttgaagaaaccagtctcagttacttagagacaccgtggacgaaaggaaagcgttctaagcgtagccgcacggagcaacaactgcaacacccttcatgcaccgaggaagagtacctcgctctttgtctcatcatgctcgctcgcggcggcgccggcagtgtctccaccgccaaacccgctgtctccgacaacaattctgcgccgctatccgccgccaaactgagctacaaatgttcggtttgcaacaaagccttctcctcttaccaagcactc

SEQ ID NO: 37724 - DNA, 414 bp, Glycine max
  Clone ID: LIB3056-014-Q1-N1-E2
cccaaacgttaactcagacgaagcaccaacagaagaagaagaaacaaaaccgaacctctctaaactctccaacgtcgccacccgattcatcgcatttcgcaggctgcaatggcgacgttcgaactgtaccgcaggtcgacgattggaatgtgcctgacggagacgctggacgagatggttcagaacggcactctaagccccgagctcgcgattcaggttctggtccagttcgataagtccatgactgaggctctggaaacgcaagttaagagtaaggtctccatcaagggacatctccatacatatagattttgtgacaatgtttggaccttcatcttacaagatgctttgttcaagagcgaagacagccaagagattgttggacgggttaaaatagtggcgtgtgactcgaag

SEQ ID NO: 37725 - DNA, 350 bp, Glycine max
  Clone ID: LIB3056-001-Q1-B1-B4
caaatacctcactccacagttgaacaacaacaccaacaccaacttctggaatgaacattttcaaatccccactggaccatgatttgaactgtggtggaatattccacgactcagcagaagcatcttattcgtctgaaacaaggagcaccccctcagacgaagaagtgattctagcgtcagcgcggccaaagaagcgagcgggaagaagagtcttcaaggagacaaggcaccccgtctaccgaggagtgcgtcgcacgaacaagaacaagtgggtctgcgagatgcgagtccccaacaacaactcacggatttggctcgggacatacccaacgcgcgaaatggccgcacgt

SEQ ID NO: 37726 - DNA, 371 bp, Glycine max
  Clone ID: LIB3056-004-Q1-N1-B8
ccaacactgatcttaaccgagcttcgtaaagatgaatcgggaaaagtttatgaagatggacggttccgttagaactggatgaaagggtactgctagaagaaagaagaaggctgtctacaagacaacaaccacagatgacaaaaggcttcagagcaccctgtacagaataggggtgaatgccatccctgctattgaagaggtcaatatctttaacgatgacgtctatatccagtttctaaatcccaaagttcaagcatacattgctgctcatacttgcgttgtcagtggctcaccgcaaacaatagaattgcacgatatactccctagcattatacaccaattaggaccagataactcggaagacctgaaga

SEQ ID NO: 37727 - DNA, 345 bp, Glycine max
  Clone ID: LIB3056-011-Q1-N1-D1
ataagcacaagcacaagcacaagcacttctctaattcccttgcacactctattacagatttcacaagtgcttacacttcaaatggctttggaagctcttcaatcacccaccacagccactccatcgtttagtccctttgaagaaaccagtctcagttacttagagacaccgtggacgaaaggaaagcgttctaagcgtagccgcacggagcaccaactgcaacacctttaatgcaccgaggaagagcacctctctctgtgtcaataacgctctctcgggggggcccccactgtgtctacagcgacaaacgctgtgtctgagaacacatttgtgcccctatatgcc

SEQ ID NO: 37728 - DNA, 391 bp, Glycine max
  Clone ID: LIB3056-009-Q1-N1-A1
caaaacttatggttgagcctttttttgaggttttcagcgctgctttctcacaatggttcttcagaatgatattgatttgctgaatcctccagctgagttggagaagagaaaacacaaactcaagcgtcttgttcagtcaccaaactctttcttcatggatgttaagtgccagggatgcttcaacataacaactgtgtttagccactctcaaactgttgtggtgtgcggaaactgccagactgttttgtgccaaccaacagggggacgggcgaggttaaccgaaggttgctcatttaggaagaagggagattgaatggtttgttaaccagacttttctttgtcaatgatttgagattttcggttgttaggtttttgagatggaatcaatttc

SEQ ID NO: 37729 - DNA, 344 bp, Glycine max
  unsure (1)..(344): unsure at all n locations
  Clone ID: LIB3056-005-Q1-N1-G1
tagagaagagcttcgaggaggagaacaagcttgaacccgagagaaagaccaaactagccaaagaccttggtttgcagccacggcaagttgctatttggttccagaaccgtagagctcggtggaagaacaaacagctggagaaggattacgagactctgcatgcaagttttgagagtctcaagtccaactatgactgtctactcaaggagaaagacaagttaaaagctgaggtggcgagcctcactgagaaggtgcttgcaagagggaaacaagaagggcacatgaagcangctgaaagtgaaagtgaagaaacaaaaggattattggatttgcaggaacaggaa

SEQ ID NO: 37730 - DNA, 356 bp, Glycine max
  Clone ID: LIB3056-002-Q1-B1-D5
attgaatcctgtgcatacatcctcacttatcctcttcctgcgactctcttctcattggttctccgtattctccctcaatcctattaaccttttcttctttcatttcccaccccattctataatcaatcaatggcaatggcttcttcaatccctaatgcgccttctgcgttcaattctcagagctacgttggtctcagagcgccactgaggaccttcaacttttcttctcctcaagctgccaaaattcctcgctcccaacgccttttcgtcgtcagagcctccgattcggagttcgaagccgccgttgtcgccggtaaggttccgccggcgcctcccgtgccgcccagaccggcggc

SEQ ID NO: 37731 - DNA, 411 bp, Glycine max
  Clone ID: LIB3056-009-Q1-N1-A10
acctacctctttttcttctctctcaacaacttcaccttggtcctcctcgatcatgtctcacttcaagggcaagtaccatgatgagcttatcgccaatgctgcgtacattggcactcctggaaagggtattcttgctgctgatgagtcaacagggacaattggcaagcgtttggccagcatcagtgtagagaacattgaatccaacaggcgagctcttagggagctgcttttcactgctcctggtgttcttcaatatctcagtggtgtcatcctctttgaagaaaccctctaccagagcacagctgcaggcaagccctttgtgaatgtcttgaaagaagctggtgtgcttcctggcatcaaggttgacaagggcacagtcgagcttgctggaactaatggagaaaccaccac

SEQ ID NO: 37732 - DNA, 418 bp, Glycine max
  Clone ID: LIB3056-014-Q1-N1-E1
ctctaacctacctctttttcttctctctcaacaacttcaccttcttcctcctcgatcatgtctcacttcaagggcaagtaccatgatgagcttatcgccaatgctgcgtacattggcactcctggaaagggtattcttgctgctgatgagtcaacagggacaattggcaagcgtttggccagcatcagtgtagagaacattgaatccaacaggcgagctcttagggagctgcttttcactgctcctggtgttcttcaatatctcagtggtgtcatcctctttgaggaaaccctctaccagagcacagctgcaggcaagccctttgggaatgtcttgaaggaaacctgtgtgctttcttgcattaaaggttgacaagggcacagtcgagcttgctggaactaatggagaaaccaccact

SEQ ID NO: 37733 - DNA, 369 bp, Glycine max
  Clone ID: LIB3056-010-Q1-N1-G8
ctcgagccgaatcggctcgagaacctacctgtttttcttctctctcaacaacttcaccttcttcctcctcgatcatgtctcacttcaagggcaagtaccatgatgagcttatcgccaatgctgcgtacattggcactcctggaaagggtattcttgctgctgatgagtcaacagggacaattggcaagcgtttggccagcatcagtgtagagaacattgaatccaacaggcgagctcttaaggagctgcttttcactgctcctggtgttcttcaatatctcagtggtgtcatcctctttgaggaaaccctctaccagagcacagctgcaggcaagccctttgtgaatgtcttgaaggaagctggtgtgc

SEQ ID NO: 37734 - DNA, 362 bp, Glycine max
  Clone ID: LIB3056-008-Q1-N1-G8
gttggagaagggcgcgatcgcgaatcccgatgagagtcgcatggtgggacactattggctgagggaccctaagcgtgcgcccaactcgttccttaaaacgcagattgagaacactctcgacgctgtttgcaagttcgctaacgacgtcgttagtggtaagattaagcctccttcgtctccggagggtcgatttactcaaatattgtctgtgggaattggaagttctgctcttggaccacagtttgttgcagaagcattggcacctgataatcctccactcaagataagatttgtggacaacacggatcctgctggaattgatcatcagattgcacaacttgggcctgagctagcttcaacac

SEQ ID NO: 37735 - DNA, 415 bp, Glycine max
  unsure (1)..(415): unsure at all n locations
  Clone ID: LIB3056-013-Q1-N1-H11
gttcgtgccttggagaatgagatgctcaaccgcatcaagaagcaaggccttgatatcacccctcgtattctcattattactcgtcttctccctgatgcagtaggaactacctgtggccaacgtctagagagggtatatgatactgaatattgtgacattctccgagttcctttcagaaccgaaaagggaattgttcgcaaatggatctcaagattcgaagtctggccatacctagagacttacactgaggatgttgcccttgaacttgccaaggagttgcaagccaagccagatctgatcgttggaaactacagtgatggaaacattgttgcctctttgttagcacatanattaggagtaactcagtgtaccattgctcatgctctagaaaagaccaagtaccctgagtctgaca

SEQ ID NO: 37736 - DNA, 381 bp, Glycine max
  Clone ID: LIB3056-014-Q1-N1-G8
gttcattctgttttccagttgaagtctttccctagccaatggccactgatcgtttgacccgggttcacagtctccgtgagaggcttgatgaaaccctcactgccaacaggaacgaaattttggcccttctgtcaaggatcgaagctaagggcaaggggatcctgcaacaccaccaggtcattgctgagtttgaggaaatccctgaggagaacaggcagaagcttactgatggtgcctttggagaagtcttgagatctacacaggaagccatagttttgccaccatgggttgctctggctgttcgtccaaggcctggtgtgtgggagtacctgaaagtgaatgtgcacgctcttgttgttgaggagttgcaacctgctgagt

SEQ ID NO: 37737 - DNA, 358 bp, Glycine max
  Clone ID: LIB3056-014-Q1-N1-G7
ggcactttgatttcttacgaaggaagggttcagcttttggaaattgcacaagtcccagatgaacatgtcaatgagttcaagtcaatagagaagttcaaaattttcaacacaaataatttgtgggtgaacttaaatgcagttaaaaggcttgttgaagctgatgctcttaagatggaaattattcccaatccaaaggaagttgatggaataaaagttcttcagctggaaactgcagctggtgctgcaataaggttctttgacaaggctattgggattaatgttcctcgatcacgattccttcctgtgaaggcaacttcagatttgcttcttgtccagtctgacctctacactttggaag

SEQ ID NO: 37738 - DNA, 404 bp, Glycine max
  Clone ID: LIB3056-012-Q1-N1-D4
gattgttgttatataccaaaactccaatattgagattcatacttttaaccagagccagtatcctcgattggttgctgaggactttttgccattgccttccaaagggcatactgacaaggatggatggtaccctcctggccatggagatgtctttccatcattattgaacagtggcaaacttgatgcactattgtcacagggtaaagagtatgtatttgttgccaattcagataacttgggagctatagttgacttgagtatccttatttaagtttcattggttctttctgtattgtttgtaatgagctttggccacattacttattattacataaaatcagtgtctttctttagtgccatcagtgtacttgactcattgatgtagaaatcttaaatcatttgat

SEQ ID NO: 37739 - DNA, 422 bp, Glycine max
  unsure (1)..(422): unsure at all n locations
  Clone ID: LIB3056-013-Q1-N1-F3
caatgtcccatttcatcagtggctacacagccctggttgctgggacagaggatggtataaaagaaccacaggctacattctctgcttgtttcggggcagcgtttataatgatgcaccctaccaaatatgcagcaatgctagccgaaaagatgcagaagcatggggctactggatggcttgtcaatactggctggtcaggaggaagttatggattaggcaatcggattaagttagcgtatactaggaaaatcatngatgctattcactctgggagccttttgaatgcacagtacactaagactgaagtgtttgggcttgagatcccaacagcactaaaaggagtcccttctgaaatcttggaccctgtgaatacttggtctgacaagaaggcctatcaagatacacgcttgaaactagcaagc

SEQ ID NO: 37740 - DNA, 366 bp, Glycine max
  Clone ID: LIB3056-012-Q1-N1-C3
ctgcattgcatgtatctgcatcgagaatgatgttctggttgtcactgatcaagtctatgacaagtgggcttttgatatggagcacatatcgatggcttatttgcctgtaatgttcgaaaggacagtgacattgaactccttggggaagacattctccttaacacgatggaagattggttgggccatagcacccgcacacttatcatggggagtgctacaggcacacgctttgctgactttcgcaactgcccattcttttcagagtgctgctgcagcatctatgagagcaccagactcttactatgtagagctgaagagggattatatggcatatagagctattttgattgaaggattgaaggctgt

SEQ ID NO: 37741 - DNA, 354 bp, Glycine max
  Clone ID: LIB3056-003-Q1-N1-H12
caacaacttctgctacttcctactccaaccgcacttctgttccgcaattatcatgggcaaggtcaagatcggaatcaacggatttggaagaattggccgtttggtagccagagtggctctgcagagagacgatgttgaactcgttgccgttaacgaccctttcatcaccaccgattacatgacatacatgtttaaatacgacagtgttcatggacactggaagcatcacgatgtcaccgttaaggacgagaagacccttctcttcggtgacaagccagtcactatttttggacacagaaaccctgaagagatcccatgggggtcaactggagctgacatcatttgtgagtccca

SEQ ID NO: 37742 - DNA, 365 bp, Glycine max
  Clone ID: LIB3056-012-Q1-N1-H7
ctcgagccgcttctgctacttcctactccaaccgcacttctgttccgcaattatcatgggcaaggtcaagatcggaatcaacggatttggaagaattggccgtttggtagccagagtggctctgcagagagacgatgttgaactcgttgccgttaacgaccctttcatcaccaccgattacatgacatacatgtttaaatacgacagtgttcatggacactggaagcatcacgatgtcaccgttaaggacgagaagacccttctcttcggtgacaagccagtcactatttttggacacagaaaccctgaagagatcccatgggggtcaactggagctgacatcatttgtgagtcccacggagttt

SEQ ID NO: 37743 - DNA, 396 bp, Glycine max
  Clone ID: LIB3056-007-Q1-N1-G5
ctctttaccagttgccacactacaccgagattccccctaaacccgtttgcgttgttgtttgcgaagaaatggcgactaagaggagcgtgggaacgttgaaggagggtgatttgaaagggaagagggtgttcgtgagggtcgatctgaacgtgcctttggatgacaaccttaacatcaccgatgacactagagtccgtgctgctgttcccaccatcaagtacttaactggtcatggagccaaagtgatcctttctagccacttgggacgtcctaaaggtgtaacacctaaatacagtttgaagcctcttgtgccaaggctgtctcaacttctcggaattgaggttacgatggcaaatgactctattggggaggaagttgagaagttggttgcacaac

SEQ ID NO: 37744 - DNA, 396 bp, Glycine max
  Clone ID: LIB3056-002-Q1-B1-A8
atagagagtaagcctgagatcatggaaaaagttggtgtggctgtaaatagcaaaaatcaagaatccaaagcaacttccaccattaccattaagggtttcatgagccttctaatgaaaagtgtagatgagaatggtgatggtagcaagagagttatttctctgggtatgggtgacccaactctcaccacttattttcccatctcaaatgtagctgaaaaagctgttgctgaagcacttcagtcacacaggtttcgtggctatgctcccactgcaggtcttccacaggccaggattgcaattgctgaatacctgtctcgtgaccttccttaccaattatcaagtgatgatgtttacatcacctgtggatgcacacaagccattgatgtttcagtggcg

SEQ ID NO: 37745 - DNA, 418 bp, Glycine max
  Clone ID: LIB3056-013-Q1-N1-H5
ggaaccttgttgcagagctttctacgccgtcggattttggagccgcgagaccggccaagccatcgatcgcctcggctctcgtctccaaggcaactacctctttcaagaacagctatctaggcatcgacctctgatgaatctgttcgacaaagctccctcggttcacagggatgcatttgtggcccccagtgcctccctcctcggcgatgtccacgttggcccagcttcctccatttggtatggatgcgttctcagaggtgatgttaacagcattactattggaacctggacctaatttccaggccaatcctctggttcatgttgcccagtctaatttaagtggaaaagtcttgccaactatcattggagataatgtcactgtaggtcatagtgctgtgttacaaggatgtactgttga

SEQ ID NO: 37746 - DNA, 108 bp, Glycine max
  Clone ID: LIB3056-013-Q1-N1-H6
tcaactacctctttcaagaacagctatctaagcatcgacctctgattaatctgttcgacaaatctccctcggttcacaggtatgcatttgtcgcccccagtgcctccc

SEQ ID NO: 37747 - DNA, 393 bp, Glycine max
  Clone ID: LIB3056-013-Q1-N1-H8
actccatgtgaaagctagataggtaggcacacactcgggagggaccctgctaggaattcaagagcctcactcatatatatatatataacatggttggaagaagcaacctaattaagttctatctcccaatatatatatcattcctttatttagtatttatatataacctttcttctcttatattcattcctattctttagtgagacaaatatttaaagcactcaattagctaagtgtttggaggttagatttcttgtgaggcttatttgcttttttaacttgttgaatttgaatcatcttgtgaaaaacagactcgatcgttattgaagaaagaaagtaaggtgtttggaatgaagtttgatccgaaatcattgtctcaatttcattcattta

SEQ ID NO: 37748 - DNA, 363 bp, Glycine max
  Clone ID: LIB3056-013-Q1-N1-H9
gacttgctagcatgcatgcacgcctactctagatgatcctctcggtgaagatcaattacacattttcaagatgtaaagatgcttaaatgctgatatatgaattgggattatatgtatagttattaggcctatcctgaagcctaatgtaatgagatcggtatttctcatggaatttcaatagcacattttcaagagatactgaggcaaaaatgttcatatatgaactggaatgatgtgatgtcttattacgcctatgctgatgccaaaggaaatgagatcggaattcatcggagaatacgaattgcacatttttatgatatcaggaagctcatatgtacagatctgacttggaatgatgtgatt

SEQ ID NO: 37749 - DNA, 379 bp, Glycine max
  Clone ID: LIB3056-014-Q1-N1-A10
attgtggcataggaatgccctcttgttctctatttcaccacacaaattcccaattctaacttggtttttttttgtctctcacacactcctttcaatctccaattaattacttttcttcaatttgaagcgtgtctgaagttggttgaagcattgtgttattgttctggttttggtctccgaggtttgtgtcggattccgatgtattatgtaaaagaagctgcgcatgtcgaccccatgttcgtagctgataacaccaaccccaaggattattacaaagtgctggaggttgaatatgatgcaaccgatgaaaatatcaaattaaattaccgaagactcgcgctgaaatggcattctgacaagcaccgaggagatagtgctg

SEQ ID NO: 37750 - DNA, 409 bp, Glycine max
  Clone ID: LIB3056-014-Q1-N1-A11
atgaacatgataaggaactcacagctttgtgggcaggctatgattgcttatctacagcagaagggctttcctgaggttgcactgcattttgtgaaagatgagaaaattcggttcaatttggctttagagagtgggaacattcaaattgcagttgcttcagcaacagcaattgatgagaaagatcactggtaccgattaggggttgaggctcttcgccaaggcaatgctggtattgtagagtatgcataccagagaacaaaaaattttgagagattgtctttcctttatcttgtcactggtaacatggagaaactgtccaagatgttgaaaattgctgaagtcaagaatgatgtgatgggccagtttcacattgccctatatatgggtgatgttcgagaacgtgtcaaga

SEQ ID NO: 37751 - DNA, 410 bp, Glycine max
  Clone ID: LIB3056-014-Q1-N1-A12
ccacgttgttgtccgctctgtggctctctacatttcatcattcatcggaaaaatggctctcgaggttgctgttaaggctgctggtggtgctccaaatgttctcggagattgtccattttcccaaagggtcctcttaactttagaggagaagaaaatcccttacaaactccacctcatcgatctcagtagtaaacccgaatggtttttgggtgtgaatcccgaagggaaggtgccagtggttctttatgatggcaaatgggtggctgattctgatgtgattgtggggatactcgaggaaaagtacccagaaccctctctcgtcactcctcctgaatttgcctccgtgggatcaaagatattcgggtcttttgtgagttttttgaagagcatggatacaaacgatggaactg

SEQ ID NO: 37752 - DNA, 352 bp, Glycine max
  Clone ID: LIB3056-014-Q1-N1-A2
gcaaaaagcactttcaaattttacggctgcagaatggttggatggaggggagaaggagtaccattgtcaacggtgcaaacagaaagttagggctctcaaacagctaacaattcataaggcaccttatgtgctaacgatccacttaaagcggtttcacgcccatgatcctggacaaaagattaaaaagaagattcaatttggctgtgcactggacttgaaaccttttgtcagtggctcgtatgatggagatgtaaagtactctctatatggcgttctggttcatgctggttccagcactcattctggacactattactgctatgttcgcacttcaaaataacatgtggtatta

SEQ ID NO: 37753 - DNA, 127 bp, Glycine max
  Clone ID: LIB3056-014-Q1-N1-A3
ctcgagccgaatcggtttgagatgactatctctctaagtcattgtcaacgttgagaactgctcagagtccaagccatgtactgtgaaaccaccaagagctaatccttgacgctagtagccgtatgat

SEQ ID NO: 37754 - DNA, 307 bp, Glycine max
  Clone ID: LIB3056-014-Q1-N1-A4
aactctccttcaaacaccagcgattaaacttgtctctctttaatctcttaataccaaaacgctaccgttttgctcttttatttctctctctctctatggattgcaagaagcgagttcgggatgactcggacgaatcaattctggaatcgcccgaggcgaaacgactcagggacgatttactcgagttcttcgacgacgccgatgatgcagcttccactcaggaccttgactccgtcatgaagagcttgcatgaggagatttccggcgtgacgtcagattacggcgagtctcatgcgcagatcggata

SEQ ID NO: 37755 - DNA, 267 bp, Glycine max
  Clone ID: LIB3056-014-Q1-N1-A5
tctctctctctctctctcatccacacgaatcacactctccacagtgcgattcattcaccaatggatcgcaacggcgttctctgtctcgcattcatctgcattgtagtcgccggcgtcggaggacagtctcccgccgcatcgccgtctaacactccggcaactcccgccggcgacactcccgcccaagcaccttccacagtaccgaaatcaccagcttccgttgcttgtaccaaatcatgtacaccagctgcgacccctgcatctact

SEQ ID NO: 37756 - DNA, 265 bp, Glycine max
  Clone ID: LIB3056-014-Q1-N1-A6
aataattaagagagataggcatacgatgggttctgaaggaaaacctatgcttcctgttctagattcaccatagaagatttgaagccagggaccaattcctggttatcaacatgcacaagtgtgcgccaagcatttgaggagaatggttactttgttgctgtgtatgataaagcttctattgagctacaaaatggtgtatttggctccatgaaggagctgttcgatcttccaacagaaaccaaacgaagaaacatatttgagggca

SEQ ID NO: 37757 - DNA, 379 bp, Glycine max
  Clone ID: LIB3056-014-Q1-N1-A7
ccgctaccgaggtctccgtcgcggcggaaaggggcatctccgctccactacggcggctattgactactatggttaattgcattaattgtacataaatagacctctaaatcaaagttatggaagattctgatcaacctgccaaatctgctgaaaaccagcaaactgaacaagtgtgtagttttttcagaaagccggttaataaaaagaatttaaggaagcgaactattgaaattgaagataatgaggaggactcaaacaatgaaacttctctgttgcatattcagaagaaaaccttaaaggctgacaataaggtggacttttccaaccgctcttcaaaaagcttttcatttggttgacccaattgaggattctgaaaaac

SEQ ID NO: 37758 - DNA, 384 bp, Glycine max
  unsure (1)..(384): unsure at all n locations
  Clone ID: LIB3056-014-Q1-N1-A8
gcatactctcaacttcaaaaggtggaagctaatgtgcacatcaaggcttctgctgatcagttccataatgttttatgcaacaggacacaccatattgccaacattttccctggaaaagtacagtctgttgaaattcataaaggtgaatggggcactgagggatccgtcatctcctggaattatttacatgagggcaaagtttgtgtggctaaggagatggttgaaggcatagacatgaaaaacaataaaatgacctttaaggtcatagagggagacctgctgggacattacaaaagcttcaagtttttattgcaagttactccaaaggaaaagggaagcgttgtgaattgngtcctggaatatgagaaacaaaatgacaatact

SEQ ID NO: 37759 - DNA, 380 bp, Glycine max
  Clone ID: LIB3056-014-Q1-N1-A9
gtcatcctcaaatgcctaagcaaattgaggatgctaaaattgctatcctcacttgcccctttgagcctcccaagccaaagaccaagcataaggttgatattgatacagtggagaagtttcagacgttgaggttgcaggaacagaagtattttgatgacatggttcagaaatgcaaggatgtgggtgcaacccttgtcatttgccaatggggttttgacgatgaagcaaatcatctcttaatgcacaggaacttgcccgctgtcagatgggttggtggtgtagagttggaattgatagctatagcaactggtggaagaattgttcctaggttccaggagttatctccagaaaagttgggaaaaggctgtatggttcgagaa

SEQ ID NO: 37760 - DNA, 327 bp, Glycine max
  Clone ID: LIB3056-014-Q1-N1-B11
gttgggattgtgttcttcggagaagttttccggggcatatggaatggcacagatgttgctatcaaggttttcctagagccagatttaactgctgaaaacatggaagatttctgcaatgagatatccattctcagccggctccgacatcctaatgttatcttatttcttggtgcatgcacaaagcccccacgcttgtcaatggtgactgaatacatggagaatggatctttggtttacttgattcatgtgagcggtcagaagaagaagcttagcttgcggagaagactaaagatgttgcgagacatatgccggggcttaatgcacata

SEQ ID NO: 37761 - DNA, 310 bp, Glycine max
  Clone ID: LIB3056-014-Q1-N1-B12
atctgccatcttttagtcgactatatataatatcttttttaatgtcaatcacccaaaattgctgaatcgtaagtggacaccagcgttactcttcatataccagaacaaattgactacataatgtgtatgcccatgtcgatcttgataatagtcacttattatctgcctactacttctaaccttaattcgtccactactcatgcacaaaatacgacttctttatagctttccccttcttcctgtctagttaggcttagtatgatgacacgtaacagctgtcacagttctgctaataaacccatgtacaaat

SEQ ID NO: 37762 - DNA, 398 bp, Glycine max
  unsure (1)..(398): unsure at all n locations
  Clone ID: LIB3056-014-Q1-N1-B2
ggaagagaaacctttgacatgatctgtgaggagttgaattcagcaattgtgaaggaagacaccactttgaggaatgctattcctgtgaggcaaagggtggctgtgtgtttgtggagattagccactggggaccctcttaggattgtttctaagaggtttggtttggggatatcaacttgtcacaagcttgttcttgaggtttgcaccgctattaagtctgtgcttatgccaaagtacttgaattggcctgatgaggttgcattgaggagggtgaagagtgagtttgagggtgtttctgggatccctaatgttgtaggctctatgtacacctctcatgtgcctattatagctcctaagattagtgtggctgcttatttcaacangaggcacactgagag

SEQ ID NO: 37763 - DNA, 393 bp, Glycine max
  Clone ID: LIB3056-014-Q1-N1-B3
aaacacacacacacccatctcctccatccttgttctccacaattctagctacctagcacaaaaattgtagtcatgttggggaagaggccccagccactgatcggaaaaatctccgaattattggtctccggcggtcgtgccggcgtgcttttcgatgccctcggaagccctagaagcccgtttgacatgatgaacttaaagatgcaatcaccaaagggcctaaaaagctatgaccttggtggtgttggtctaggaattgtggtggcccttgataaatcatcatccgaggaacaaggccatgtttgcacatcaaattcaaaccgatccgtaccaatcccagttactaaccaacgtgggtttcaaaaaggtgtgaatgaaattcccgcttgaagc

SEQ ID NO: 37764 - DNA, 382 bp, Glycine max
  Clone ID: LIB3056-014-Q1-N1-B4
gctatctcagcttgttagcactttctttttcttcatttcattatttttctcaaaatgtcaactttcatgttgaaaatcttccttctaatttccatctttcaaatctctttcgccactaggaggttgaatgagttagttcaggaccaaactcagcttcttcgttaccacaatggccctcttctctctggcaaaatctccattaacctcatttggtacggccacttcaaaccttcccagaaggcaatagtctccgatttcatcacctcgctgtcaccctcatcccctcacagcacccaacccatcctcggccacgtggtgaaaaaccccagaaaattcctaccaccacctcagtattcctaaaaaaactctccctttttcaatt

SEQ ID NO: 37765 - DNA, 401 bp, Glycine max
  unsure (1)..(401): unsure at all n locations
  Clone ID: LIB3056-014-Q1-N1-B5
gttttctcttcaaattatccagaattggattcaaatttccttcaacacgattaacacagatcgcgttcgttcttgttcagacttcacaattcgcgcgcgcacttcatgaattggaagactaaagactagagcagncctccgatccagctgagttcgccggcgacacgagttggacactcgccaccgatgactccgacggtgcgtacctgttccccggcgaccgggagcggagcatactcagggaattcgggtnggaacctcgaaccggaccagccaaaccggatcggcaccgacgacggatcgtggagggccggtcagtcctctctgaccggttcgatcgaaccggccgncgncatgtcgtctaggtcgaataaccaatcggtgtcgtccagctccagcga

SEQ ID NO: 37766 - DNA, 354 bp, Glycine max
  Clone ID: LIB3056-014-Q1-N1-B6
cttcaatcctttcgttattctcttattcatccttctcttctgaataatccagatctctttctgcccttttctccgtcacgcttttcgtgaccggatctgtatggatttgatccagatctacacgccgatggtggttttggccgggtctttcatagatctggtgcgtagaggctcagatctacggtaccgaggtacaacagataatcgatgacaagaacgcagatccgacggtagatccagccgattccgcttgttcgatcgctacagacccctgtatcggatcattaagcagcgtgtcttgcgcgttctacacgtgttgccgatctcagatgatgtaaaattagtctatgatgt

SEQ ID NO: 37767 - DNA, 317 bp, Glycine max
  Clone ID: LIB3056-014-Q1-N1-B7
gctatggataacgtggtgaggactcatccaaagttggactggttctgtagtgaaagcaccgctgacactataatgaagcatggttcaaattcgttcatggcaaatattgaggattcacgagcaatcatggaatccaaggacggcaatgactgcatggtggcaatcaacttgaccattgattggaagcatgatctgccaagggcagcaaatcgaatgacacagtgcatgggtagggcattcgcattacaagatgagccataagttcataaggtatggctgacttttgatgatgcaccatgactagcaatggctagagc

SEQ ID NO: 37768 - DNA, 329 bp, Glycine max
  Clone ID: LIB3056-014-Q1-N1-B8
gagaaagtggaatccccaatcttgtaacggaactttttttcttatcagttccatagctagctgtgtggagacgacaactgccacccattccaacatacagagaggctatttactaattactgttcctcgtgtgaacaaacatataaaccacctcggattttgcttcctctgctgtgttttaacgacaacgcgtttctttgcttatacactaagatttcaaacggcgattcgttttgcgactgtgtggtcgcgatctggttttgttttgattcatttgtacgttggactgtgaaacacacgccgaaatgtggtggatgatgggcgagact

SEQ ID NO: 37769 - DNA, 312 bp, Glycine max
  Clone ID: LIB3056-014-Q1-N1-B9
ggaaccttgaactccccagccagaataagcaccaacctggcacccaccctctataaacccacgtattctaaaaggttatcagagtcattcaattctacaacatcaactaaggagtcattcagatccaacatgcttgctttacactccataactcaatggaatgctcattataaagccaccaaagaaactaacacgctgacggtacttgatttcacagccgcattgtgtggaccttgcctactcatggaccctgttatcctagagtttgatggaaattacacactatgttgagttcatcaagattgatgtgca

SEQ ID NO: 37770 - DNA, 409 bp, Glycine max
  Clone ID: LIB3056-014-Q1-N1-C10
gtaataataatgactttgactgtcggagtggcatccctgcacaacataacaatcttgttaatgataacaaagctttggtatctgatcgttgagttttccactcacaggaaatgcaagtccttgactgtgacattcgcaggtttttagtaattccattcagtttgacctatagaatgtacagtatatagcaaagctctcgtcaatacaagagaggtctatttctatactctctgatcagttgcattaaactgtttatctatgactgtacaaactggaatttggaatgacttgatcgaatacaagagatctattcctatactctcggacagttgcattaactgtttatctatgaatgtataaactggaatttgaaatgaaccttggccctaatccatggtttggtggtttt

SEQ ID NO: 37771 - DNA, 365 bp, Glycine max
  Clone ID: LIB3056-014-Q1-N1-C11
gtggttattcctgattggagcagtgctgccagttcccatttgggtgttgagcaaaatcttccctgagaagaaatggataccactgatcaacataccagttataacctacggctttgctggaatgccaccagcaactccagccaatattgcaagctggctagtgactggaatgatcttcaattactttgtgttccgctacaacaaacgctggtggcagaagtacaattatgtactatcagcagcactggatgcaggcacagcttttatgggtgttttaatattctttgccctgcaaaatgctggccataatctcaaattggtggggaagtgaattggaccattgcccattggccacttgcccaact

SEQ ID NO: 37772 - DNA, 304 bp, Glycine max
  Clone ID: LIB3056-014-Q1-N1-C12
gtcgagccgattacgttagagagtggacggcattggattcacagagtacaggtcgatatacgagtgcctctggtggggaggtggttagaactgcatagaggatgcatactaggttgattctgaataaggaatctgctgctaggtcacagtcatgatgacaggcatacgcacatgaactggagattaaagtgtcacgattagaagatgcgaatgtaaggattaaaagactaaatgaaatggagagcgcattgacatctgtgccaacagctgaacctagaccgaagctacagcttatcagaactag

SEQ ID NO: 37773 - DNA, 322 bp, Glycine max
  Clone ID: LIB3056-014-Q1-N1-C2
gcgcaaccctgcacctgcacccgtaccgcagtgacaacatcggcgtgcataaactctaaaccctactatgtccgaagacaagtacgacgtgctcctgtattacaagtacgttgaaattcccaacctaaacgacctcctcaccttctaccactccaactgctcctgcctgagacttctcggacgtgttcgcctttcttctcacgacgtcaatgtcaccgttggcggcaacttatcctctctcaagaatgacatcgaagccctcaaagcctacagaaccttgtttcaccacactgatttcaagctcgacactagtcatcatcca

SEQ ID NO: 37774 - DNA, 327 bp, Glycine max
  unsure (1)..(327): unsure at all n locations
  Clone ID: LIB3056-014-Q1-N1-C3
gccgaaagggtctccgtcaccatcgacatcttcaaccaaggaacctcgacggcctatgacgtaagcttatcagacgatagctggccaagtgatgcttttgatgtaatcagcggtagcacttcaaagtcatgggaaaggcttgatgctggtggcatgctttctcacacatttgagctggagcgcaaaatcaaagggagtatttgccggtgaaccagctgtcataaagttccgtgttcccacaaagtctgctttgcaggaggcatattcgactcccatattgcctttggacgttctttctgatagacctnctgagaagaagtatgaatg

SEQ ID NO: 37775 - DNA, 328 bp, Glycine max
  Clone ID: LIB3056-014-Q1-N1-C4
attgacggtgcccttattaattggtccctctcctccaaaccccaactgggtatcgcaaagtttccaaattgaatgcaaaaacagaaacttcttcctcaaatgccttctgggtcgctcttctttctatccagattacgaagatttcggtcgccagtgaggttgtgattcaagtgctattttagcatttttttttacctggacggtaagggtcaacttgcatgcacatgttagtgaaaaaccacaataagggggatggatctaagtccctggccgatacactggcgaaatggaaagaatataatgcctggctggagtctaacaatgaagc

SEQ ID NO: 37776 - DNA, 402 bp, Glycine max
  Clone ID: LIB3056-014-Q1-N1-C5
ggaaagggagattgaattcgatcctgggacgttaacgttgtttcaattcaattgtggtcctgtcggtgccctatctcagacgacgatgtcatctttatatagaggggaatccaggaggtacaacaataaaccaagaggacgtcataatttgacaacgcagaagaagcaagagattaaggaagcctttgagttatttgatactgatggctcaggtactattgatgccaaggagctgaatgttgctatgagggcccttggatttgagatgacagaagagcaaatcaatcaaatgatagcagatgtggacaaggatggaagtggagcaattgattatgaagaatttgagtacatgatgacagccaaaataggagaaagggacactaaagaggagctcatgaaagc

SEQ ID NO: 37777 - DNA, 362 bp, Glycine max
  Clone ID: LIB3056-014-Q1-N1-C7
catttacatgcgctcttggactggcaccattattggcccccataatactgtacatgaaggaagaatttatcaattgaagctgttttgtgataaagactacccagaaaagcccccaagtgttcggtttcattcacgagtcaacatgacttgtgttaatcatgaaactggagtggttgaaccaaagaaatttggtcttcttgcaaattggcaaagagagtacaccatggaggacatactgacccagctgaagaaggaaatggctgctcctcataaccggaagcttgtccagccttcggaaggtacctacttttagcatccaacaagatggtataaatgtcggatcgtattgcatatgctgcatg

SEQ ID NO: 37778 - DNA, 305 bp, Glycine max
  Clone ID: LIB3056-014-Q1-N1-C8
gagaatccgaggcgaagagaagagaaaaattaagatggaggggaaggagcaggatgtgtcgctgggagcgaacaagttcccggagagacagccgattgggacggcggcgcagagccaagacgacggcaaggactaccaggagccggcgccggcgccactggttgacccgactgagtttacgtcatggtccttttacagagcaaggatagcagagtttgtggccacttttctggatctatacatcactgtcttaaccgtcatgggagtcgccggggctaagtctaagtgcagtaccgttgggattc

SEQ ID NO: 37779 - DNA, 293 bp, Glycine max
  Clone ID: LIB3056-014-Q1-N1-C9
gttttatagatgaagaggaaaaggttgcagaaagcaccatagatacgccggagaaaggtggtgggtcttcacctttagagccccaggttgttcccgcatagatatagttgtttaatttgtgtttgttattgtacatggctttcatcttttttcaatttgctgacagagggacaaacaaaacgcatatgataaccgctaaataagaattattcgtttctgatttttcttatatgaatataccatagactggccaatcccaatactattttcagctggtcgagccttgatactct

SEQ ID NO: 37780 - DNA, 397 bp, Glycine max
  Clone ID: LIB3056-014-Q1-N1-D1
ctcgaaagtggaaggaaaaagggagggtcaaaattccgccggagaaaatctttgttcggtatttgcaatcgggagaggcgagcgagcgagcgggcgagagacataaggtcccttctcaggcatggcgatgacagtacacgtccttgctgggttggcttttatgttttcagctagcattttgcttcagattctggcatgtgcaatatataacaattggtggccaatgttatcagctctgatgtatgtgcttgttcctatgccttgcttattctttggaggtggatccactcaatttctaatgacccgtgattggtgggggttggatagatgctgcaaaatttttgactggagcatcagctggtgggaggcctagccatcctatcattctcaagcacgc

SEQ ID NO: 37781 - DNA, 310 bp, Glycine max
  Clone ID: LIB3056-014-Q1-N1-D10
ggctgtaaatcaccaaaccggaatcgtgtgacagaagcatgatatgactacagcggtcactatcgcagaggtgatagcgacgagatctacatgaacatatcttggactaatatcctgataccatcacacatcactccgtgtcaagagaattcacctactgttccacagctgaagcatcgaagatcacgactaaacgctatgctgatattgacagaagatcgtggtgccgttcatactcctgatctggacttgcacagaatgattgctctctaatatgccagttaacagctggatacgagctaatttacga

SEQ ID NO: 37782 - DNA, 320 bp, Glycine max
  unsure (1)..(320): unsure at all n locations
  Clone ID: LIB3056-014-Q1-N1-D11
gccaaattactaaccctctcttcgccttcgccgcatctacccacttcctgttgtatccctagcttcctgccattcttcctcttctcaacaaggtttggggtgtttgtttggtttctttctgattgtttaatcagtagaaagaaaaagaaaaaaaaattgtcgacttttctgggtagtgttgtggcgaaagaaagttcagttttttttaggagaatggcgggttgttcttcaaattntgctgtggctcgttttgccaatgtgaggaaagaagttgttttggggaatgaagagacaaatttgattaagttgagtttcaaggg

SEQ ID NO: 37783 - DNA, 331 bp, Glycine max
  Clone ID: LIB3056-014-Q1-N1-D12
ggacggcgtctacgtcctctcgctctccctcggtggcggttccgcaccgtacttccgcgacacaatcgccatcggcgcgttcgccgccatggcgaaaggtatcttcgttgcatgctccgccgggaacagtgggccccagaaggcctcgcttgccaacgtggcaccgtggataatgacggttggtgcaggaaccctagatcgtgatttccctgcctacgcttctctcggtaacaaaaaaagattctccggtgtttctctctatagtggaaaaggaatggggaacgaaccggttggtttggtttatgacaaaggctttgaaccagtcaggtag

SEQ ID NO: 37784 - DNA, 330 bp, Glycine max
  Clone ID: LIB3056-014-Q1-N1-D2
attttataaagagcccctaacggttttgttggagtgagatcaaggaaacagagaaaaaatggcatcctcaagagcttgtaccaaacccatcatcttcctctctgccttcaccaagtcaaagttctctcatcaatatcatgtctccttcatcaacaccacctcccacatacccatctacccaaagctctctcagcaacgttccttggtggtcaacaacgtattgaaaacagttgagccgacagaaagctctttgcggagctccaactccgaggaatttgggtctctgggtgaaaagcccaccatcctggtctccgagagacttggagaggc

SEQ ID NO: 37785 - DNA, 355 bp, Glycine max
  unsure (1)..(355): unsure at all n locations
  Clone ID: LIB3056-014-Q1-N1-D3
ctcgagccgtctctaaccactttgcttcagctatggagtttcgttgccttccattggttttctctctcaatctgatcctgatgacagctcatgctgccatacctccagaagtttactgggaaaggatgcttccaaataccccaatgcccaaagcaatcatagactttctaaaccttgatcaacttcctctttggtatggtgctaaggaaacccaatctacagatcaaatattcctgtatgatgctaagaaaacccaatcaacagatcaagttcctcctatcttttatggtgataagaaaacccaatcaacagatgaagttcctcctatcntttatggtgctaagaaaactcaatc

SEQ ID NO: 37786 - DNA, 386 bp, Glycine max
  Clone ID: LIB3056-014-Q1-N1-D4
tacaaattcatataaagttgacattcaacttccagatgaaaatgatgtttctgtggtttctttggatgagcaactggaagactggactgacaaagaaattagtgatttttcatcttcgataggtggatcatatgctcctgatgcccttgagccattaaatggagtgcttaccattccattggcaaatggtgcctcagtgaatcttcatatgtcaaagaaagcagaaaggaagttcatcataggtcttatgtctctcacacgtaatgtccaaagagcaattcaaatgcatgacaatttatcacagagtgcaaagagtcctgctgagttgttaacaggatgcttcaatggcattaaggttttgcaagagcaatatgaaactggaagta

SEQ ID NO: 37787 - DNA, 380 bp, Glycine max
  Clone ID: LIB3056-014-Q1-N1-D6
gcaccatagatggtcagggtgagttttggtggcagcaatttcacaggaagaagttgaagtacactcgcccatacctgattgaattgatgttctcagacaacattcagatctcaaatctaactctcctcaattccacatcatggaatgttcatcctgtttacagcagcaatattattgtgcaaggcatcaccattattgctcctgtcacatctcctaacactgatggcatcaacccagattcttgcacaaatgtaagaattgaagattgctatatagtctctggtgatgactgtgtggctgtaaagagtggatgggatgagtacggcataaaaaatgcgtggcccaccagacagctaatgataagaaagctaacatgcatt

SEQ ID NO: 37788 - DNA, 342 bp, Glycine max
  Clone ID: LIB3056-014-Q1-N1-D7
acagggcttccgccgccgtaggagagaagcttccggcaaccgctccccgttcaaccccgttatcgtcctccgcggccccggcgacgactccgccgacgccgaccacgacggcgtcagcacgttcgagctcttctacgacgacggcgacggcaccggccttcgccctcttcctcccaccatgtcggagttgctcctcggctctggctttgacagacttctcgaacagttcgcgcagatcgagatgaacggattcgggcggccggagaatccgccggcgtcaaaggctgcgatcgagtccatgccgacggtcgagatcgaagaaacgcacgtggaaaccgaagc

SEQ ID NO: 37789 - DNA, 415 bp, Glycine max
  Clone ID: LIB3056-014-Q1-N1-D8
ggcaaagctgagagaggtggcatctttggagggacatgttcttttgaaaaagctaagagatgcattagaatctttaagaggacgttttgcaggaataaacaaagaggatgtggagaaagctatctctatggtggaagctttagcagttaagttaactcaaaacgaaggtgaattgattcaagagaagtttgaagtgaagaagcttgtaaactttctcaaacaggcttctgaagatgctaaaaagttggttaatcaagagaagtcttttgcttgtgccgaaattgaaagtgctagagctgtggtgctgagaattggggaggcgcttgaagaacaagaaaaagctttccaagcttctaaaccacaggatgtggatggactaattggagaagttcaagaagctagaagaatcaaattg

SEQ ID NO: 37790 - DNA, 359 bp, Glycine max
  Clone ID: LIB3056-014-Q1-N1-E10
tgcaaacgctctttcttacaaaataaaactgtcaacttcaattttttcttcaaaagcttcctctgtgggggaatttattgttccttgcaatatagataggaaacaccaccatagtttttgtgtaacttaaacgtagaaaatattatcaagttgttgcacaaatcattatgggtactctcatgcttctcaagaagttcaccctcctctttctcctcatttctggatcacttttatcaacttcctttgcaggtagagtacgatccaactctatcaagaacttcgctaaagatgtgaatgcaatcgaagagggaacaccaaggaaaccactgaataaggaagaagtaagaaccatccatgag

SEQ ID NO: 37791 - DNA, 411 bp, Glycine max
  Clone ID: LIB3056-014-Q1-N1-E11
tgtgttcaaggtagacaggcgcaggcacaggcacatcatgttattgttattgttggcttcttcactcagcaaccaccaaaccacaccgtcgcacccattccatcgctgattcccccaatggcttccactgccaccaatttctctctttctctctgcgccaaccaacaaactccaatccccaaaccctctttcttctccaataacaaccatttgcacttcaactctaataataattgggcctgggcctctgtttccacctctcgcaagtcaaggatatgcgccacctcctctcaagttatggatccctccgcagcaaaatccgaacccgctcttcccaccatcgtcgaagtcgatttgggtagccggagctatcctatttacatcggatccgggttactaaaccaacccgac

SEQ ID NO: 37792 - DNA, 348 bp, Glycine max
  Clone ID: LIB3056-014-Q1-N1-E12
aaaagatggaagctgctaagtcggtgtctagtgatccaagtgagagaccagacacataccgagtcgcttacataattcatttcttgcttggtgctggcaacttgcttccttggaatgccttgatcactgcagcggattactttgcctacctctatccaacaaaacacatagaaaaggttttctctgtggcctatatgatttcatcagtgatggtgcttcttgggatgatcagttgtgggggttggagcaaaacaacattgaagctgacaatgaacttggggttctccatgtctgttatgtctcttatggtagcaccagtcatagactggacctcaagcagcaccaagc

SEQ ID NO: 37793 - DNA, 417 bp, Glycine max
  Clone ID: LIB3056-014-Q1-N1-E4
cccttttcctttacaactattctactcaccaacttcatggaatctttgaggctgcaagttttggagggacaaatattgatccatcagcttgggaggataagaagtgccctggtgaatctcgtttccccgctcaggtacgagtgataactaggaaaacttgtgaaccactggaggaagattccttcaggccaatccttcaccactatgatggtcccaagttccgtcttgagctgaatgtgcccgaggcgttgtctcttctggatatttttgcagaacaagacaccttcaatgacgctttcgaggctttgccggcataaaaggagattaatagcaaaaaatgcaacaagaatatcactcacagagacaatagataattagaggtttcggttggtttgaaagttatattaagtatggact

SEQ ID NO: 37794 - DNA, 383 bp, Glycine max
  Clone ID: LIB3056-014-Q1-N1-E5
ccgagtcgcgaactcggccacgccacataatcatcacgccctctcttccacttctatcatcctcggatcgcataaattccccaatggggctttcgcggaagtccaagcttccaaatttaactgactttttcacctctgaaacccgcttttcttgtttcattggaaatggccgaatctcgagacgccgccgccgccgatggggttcccggaacgcccgccataagggaagtgagacccgagtcgggaacccatgcgggaatcgggtcgggtggtattcggagggttaatttccgagcggagattgacacgtcgccgccctttgggtcggtgaaagaagccgtgacccgttttggaggtagcggtccttggatacccttttttaa

SEQ ID NO: 37795 - DNA, 335 bp, Glycine max
  Clone ID: LIB3056-014-Q1-N1-E6
agagaatccgaggcgaagagaagagaaaaattaagatggaggggaaggagcaggatgtgtcgctgggagcgaacaagttcccggagagacagccgattgggacggcggcgcagagccaagacgacggctaggactaccaggagccggcgccggcgccactggttgacccgactgagtttacgtcatggtccttttacagagcacggatagcagagtttgtggccacttttctgtttctatacatcactgtcttaaccggcatgggagtcgccggggctaagtctaagtgcagtaccgttgggattcaaggaatcgcttgggccctcggtggcatg

SEQ ID NO: 37796 - DNA, 328 bp, Glycine max
  unsure (1)..(328): unsure at all n locations
  Clone ID: LIB3056-014-Q1-N1-E7
gcaagttaaagtgagtaaaggaagcccacttgtcacttgtctccttgaaggttcccgtggaagtggtaaaactgcactttcagctactgttggtgttgacagtgacttcccatatgtcaagatagtttcagctgaatcaatgattggtctacatgagagcaccaaatgtgcacagattattaaggtttttgaggatgcatacaaatcaccattgagtgtcatcattcttgatgacattgagagattattggagtatgtgcccattggttctcgattttcaaactttatttctcagacactactggtgctgcttaaaacggcttnctnc

SEQ ID NO: 37797 - DNA, 152 bp, Glycine max
  Clone ID: LIB3056-014-Q1-N1-E8
cttgaaactggtcatgaatcaagcgactctctttctcgatcctcgtagagccttactacagtcattacgcatgctcatggtttgcactgggtgtcgagttctgatggcatgttgcagagaatattgctgcgtcagaccgtgaatacaatggc

SEQ ID NO: 37798 - DNA, 412 bp, Glycine max
  Clone ID: LIB3056-014-Q1-N1-E9
ctcgagccgcatcaaccatttctttctttcggatttctgtttctctggtttcattttagtttttccggctagaagaatgtccagctcatcggaatatttggtattttccggccaccacccggcgaactctccggcggaaaagtccactttctctcagacttgtagtctattgagccaatacatcaaggaaaagggtaccttcggagaccttaccctcgggatgacttgcactgccgaaacaaacggttcccctgagacatcttgtcactctgcaacaaccatggagttgtttcccacgatcatcacgcaacggaacccaactactgtggatttcctatctccccagactgcttatcctcaccactcagaggttccaaccatggttaaatcaagtgcttttaagtctatggag

SEQ ID NO: 37799 - DNA, 363 bp, Glycine max
  Clone ID: LIB3056-014-Q1-N1-F11
caaatgggaaatgtacatggtcgcgttgatggtgctaatgcaaatgctgaagctttattgattggatctcacatggacactgttgttgatgctgggatgtttgatggatcactaggaattgtctctgcaatatctgccttgaaggctatgcatgtcaatggaaagctacaaaagctaaagcgccccgttgaggtgattgcatttagtgatgaagagggtgttagatttcaaactactttcttgggcagtggtgctatagctggtattttgcctggcacaacattggagatatctgataagagggaggtgatgattaaagattttcttaaggagaactcaatagacattacagaagaaagtctt

SEQ ID NO: 37800 - DNA, 378 bp, Glycine max
  Clone ID: LIB3056-014-Q1-N1-F12
gcaaaaagaaagaatcccaggcgaggagaaagatggaggggaaggagcaggatgtgtcgttgggagcgaacaagctccccgagagacagccaattgggacggcggcgcagagccaagacgacggcaaggactaccaggagccggcgccggcgccgctggttgacccgacggagtttacgtcatggtcgttttacagagcagggatagcagagtttgtggccacttttctgtttctctacatcactgtcttaaccgttatgggagtcgccggggctaagtctaagtgtagtaccgttgggattcaaggaatcgcttgggccttcggtggcatgatcttcgccctcgtttactgcaccgctggcatctcagggggacaca

SEQ ID NO: 37801 - DNA, 403 bp, Glycine max
  Clone ID: LIB3056-014-Q1-N1-F2
ctcgagccgctcgagccgtgcaattccaaatctctcttctttctcagccaagcatttccccctttttcgtttcgaatctccccttagacaacaccgatttcgccttcttctttctctttaaactttaggctcgctagggttagggttagggttagggttaggttttcggtgaggcgagagagtatgaggttgagggaggacttgccgtgtaaaaacgatgacgtttgtgagaaagaggaagtgatgatagagaatgatgtaaccgtggcccaaaatcattggtgtcccgtcgtgaatgcgggcttttcttcgcccaagagagtcgttgtggttggttacgctcttaccactaaaaagattaagagctttttgcagcctaagcttggagggttagctaggaaca

SEQ ID NO: 37802 - DNA, 358 bp, Glycine max
  Clone ID: LIB3056-014-Q1-N1-F3
ctcgagccgctcgagccgctcgagccgctcgagccgctcgagccgctcttcttcatattcttcttcttcttcttgttcttgttctatctgtgacgagcatcatggcctcgagagcagtgctattgttggctatgtgtgtgcttccggccatggttgtggccattcgcccagcaaagaaccctttttgcgtgaagggtcgcgtctactgtgacccttgccgtgctggttttgagacctcagcaaccacctacattgccggtgctgagattatgttgcaatgcaagagcagggttagcaacgaggttgtgtacaccaagaaagggtacactgactcaactggagcatacacaatgtacgt

SEQ ID NO: 37803 - DNA, 406 bp, Glycine max
  Clone ID: LIB3056-014-Q1-N1-F4
aaccaagcacctacataactaaataatcttgtgcctaacaatttcacacgtgtaattgtgttcatcaatattgatgcgtgtattttctaaagttatgaggatgaacacagagtttgagcgtgttcttaagtattttgatgaggatggggatggtaagatatgttcatgtgagcttaggaaccggctaggcatgattggtggtgagttgttggacagagatgctgataagtcgattgatgagtgggattctgatggtgatggctttctgagttaggaagattgcgtgaaacttatggaggcagctgatgaagacgagaagttgaaggatttggaagatgctcttgagatgtacaatgacactgaaatgtatgggatgatgactcataaaagcttgcataggatgctg

SEQ ID NO: 37804 - DNA, 334 bp, Glycine max
  unsure (1)..(334): unsure at all n locations
  Clone ID: LIB3056-014-Q1-N1-F5
ggcaagcaatctggtttctctctcctctctctctctctgctctgagtcacaggttgtgaaccgttgttggcacttggcagataattattgcatctaatgagtcatctgcaaaaattgtgtctctgaatgaccatcaagtgatccagtgcgattggaaagaaccttcccaattacaaagattgactacttgttattctcattgatttttcttggcggagtgaatacttcttttctagatgcaaacgtctcagaagcaccctagttcagctggtgcccatttctatcaccagcctgtgcaagggcatttaccanatgttgcaaagcaatctatgcc

SEQ ID NO: 37805 - DNA, 386 bp, Glycine max
  unsure (1)..(386): unsure at all n locations
  Clone ID: LIB3056-014-Q1-N1-F6
ctctctctcaactcccaattactttgttgcatttcacacaccaacttcccatagaagagagaagagagaagagactcttccttccatcctgcaactcaaatcatcatgcaagactccagctcaatgaagatctcccctctggatctcatgtccgccatcttcaagggcaagctcgacccctccaacgtctcctcctccaccaacgccgccgccgccgccttcctcctcgagaaccgcgacttcctcatgctcctcaccacctccgtcgccgtcctcatcggctgcgtcgtcgtcttcatctggcgcagatcatcctcccccaaggccaagcctctcgagcctnctaaacgcgtcgtcgagaagcttcccgaaatcgaagtcgacga

SEQ ID NO: 37806 - DNA, 415 bp, Glycine max
  unsure (1)..(415): unsure at all n locations
  Clone ID: LIB3056-014-Q1-N1-F7
gccaccattcttttttatgtggtgcttctgattccccttcacgcccattggctcttccaaaacacacttatccctttccatccaccaaaccaatactcccaaatctcacaaacaccacctccattggccctatcacgctacgccgtcgtttagcacctccttctccacccttcgtctctcaatccacacaccctcttatcgtttttgtccttctctccctctcgtttttcgccaaatttgtcttctttttgcaccttctccctgatttttcctcgcctcaaataatattctgcggctccttccccccccccccctttaacttttctgaggagctgaacagattttgggggttcctttcttcttctttcattattattattcataccctnctagttatgtttttttcacagtcttt

SEQ ID NO: 37807 - DNA, 396 bp, Glycine max
  unsure (1)..(396): unsure at all n locations
  Clone ID: LIB3056-014-Q1-N1-F8
gagagatctatctatctatcaagatggcgttgttggttgagaaaacaagcagtggaagggagtacaaggtgaaggacatgacgcaagccgatttcggaagattggaaatcgagctggcggaggttgaaatgcccggcctcatgtcctcccgcaccgagttcggcccctctcaacccttcaagggcgctaggatcaccggctccctccacatgaccattcaaaccgccgtcctcatcgagaccctcaccgncctcggcgccgaagtccgctggtgcttctgcaacatcttcttcaaccaagaccatgccggcggcggcatcngccgcgacagcggcttcgtcttcgcctggaagggtgagacccttcaggaatacttgtggtgcaccgagcgcgccc

SEQ ID NO: 37808 - DNA, 381 bp, Glycine max
  Clone ID: LIB3056-014-Q1-N1-F9
gcgactgcgcttcacgatgggtgcttacaagtatgtttcggagctatggcgcaagaagcagtctgatgttatgagattcttgcagcgggtgaggtgctgggagtaccgccagcaaccttctattgtccgtttgacaaggtctactcgcccagacaaggctcgccgcttgggtttcaaggctaagcagggttatgtgatttaccgtgttcgtgtacgaaggggtggccggaagagaccagttccaaaaggtattgtttatggtaagcccaccaaccaaggtgttactcaactgaaatttcagcgcagcaagaggtctgttgccgaagaacgagctggaaggaagttgggtggcctcagggttctcaattcatactgggtgaa

SEQ ID NO: 37809 - DNA, 294 bp, Glycine max
  Clone ID: LIB3056-014-Q1-N1-G10
cggatgaaaacatgcagccggattcgttcggtcgtatagtgtgggctttcaggtggtgaatggattccattggtacgagaacggacttgacacttgtgacatttggggtagcactttgcatgatgtgaaccatgcattgcttgctgggtcgtatggagtctaaaatggcgtgccatattgtgtgataacttgttcatggagagatagatgatgtgagaatggctactatagagtggacttgacgaagaacatgagtgatgtagcatcttgtgcgtcttatgcagttgtgagcat

SEQ ID NO: 37810 - DNA, 405 bp, Glycine max
  unsure (1)..(405): unsure at all n locations
  Clone ID: LIB3056-014-Q1-N1-G12
gataaacagggtattgatgcccagagagctcttcaaggccagcgacgcggcggatgcacctgcccagtcgccaaagcccgccaagaagaagaacaagaacaagaacaacagccatgcggcggatgcaccggcggacggaccatccgacgacgacgctgattcggaagatcagaaggctgcggatgaagacagcaatggagtaagcggattgcacgtgagattcttcatggtcttcttcagtttaattatggcttttttggctctatgaaacacccacatggattatggagtgtcgctactatacacttgtttcaattaagattcttttctttctttaatatatgtcaaggaaataaaacgctgccaccgacatgtangaggccatgtgtactttnttttattata

SEQ ID NO: 37811 - DNA, 425 bp, Glycine max
  Clone ID: LIB3056-014-Q1-N1-G2
ctcgagccgtcctgagcttccattgtgctcactcatctcttacaacgaaaccctcttcatcttgttctatctgtgacgagcatcatggcctcaagagcagtgttattgttggctatgtgtgtgcttccggcgatggttgtggccattcgcccagcaaagaaccctttttgcgtgaagggtcgtgtctactgtgacccttgccgtgctggttttgagacctcagctaccacctacattgctggtgctgagattatgttgcaatgcaagagcagggttagcaacgaggttgtgtacacgaagaaggggtacaccgactcaaccggagcatacacaatgtacgtggatgaggatcacgcagatcagatctgcagtgccaagcttgtaagcagccctcaccctcaatgcaaggaagtcaccccaggccg

SEQ ID NO: 37812 - DNA, 365 bp, Glycine max
  Clone ID: LIB3056-014-Q1-N1-G4
cgaaaactggtgttaccatgcactcctggccagactcgatgaagtcggctactgacattaacatatctcttcctgatagttgatgatcaacctgcagtctccctgtcaacattcatgatggacctcttggttaaagggttccagtgtggtcctatatggcgtagtttcacactctttttcaaacctattatgatcttttttggcctatcactgtagggcgaagtctctgactagtggtgtaagtcgcatctaggtttatataattctctgtgcctaccagagcatctgatccctcggctgattaggtagatgctgcaatgcgcagtgttattatgagtcggctaatggggatgtaatcacatctg

SEQ ID NO: 37813 - DNA, 323 bp, Glycine max
  Clone ID: LIB3056-014-Q1-N1-G5
gaagcatctctcacctttcccttggcgacgccgtgagaaacgaaaagcgaacaaaaaaaaaacagagtggggtgggaggcacacgcacaaacgcagagtcagaatctccaatcttcaatcggagacaaagctagctcgaacgaacgaagtagagtagtgtgctacgaaaaatgtggcggtgcatcgcacgtggtctccgtggacctgcttccaccagatccacctccaatcactcacttggatctcaactttctagattcttctctagtggggcgaactcctcgtacaccgtggtggatcatacttatgatgctgttgtcgta

SEQ ID NO: 37814 - DNA, 335 bp, Glycine max
  Clone ID: LIB3056-014-Q1-N1-G9
gggacgagaattttcaaaacgagttgcaaccgagttgcgactcgtcctcctcgtttcggtcgccgatgagtcgcatgctgtcgtttacgaggatgctcggcagggaaaagaaggggaacgtgtcgccgtcgtcgtgcggcggcggcgattgtagctccgccgcggagcgaggtgagcgagaggagactcagtgagtcggtgactcgggtgctgacgtggcacttgttggaagcggaaaaacttgggttgttggcgcgtggcggtgtgtaatagtgacgtttctggattttaatgtaggcggtgagcggcgcgtgagttaggtggcgcgagatact

SEQ ID NO: 37815 - DNA, 326 bp, Glycine max
  Clone ID: LIB3056-014-Q1-N1-H1
gcgaagagaagagaaaaattaagatggaggggaaggagcaggatgtgtcgctgggagcgaacaagttcccggagagacagccgattgggacggcggcgcagagccaagacgacggcaaggactaccaggagccggcgccggcgccactggttgacccgacggagtttacgtcatggtccttttacagagcagggatagcagagtttgtggccacttttctgtttctatacatcactgtcttaaccgtcatgggagtcgccggggctaagtctaagtgcagtaccgttgggattcaaggaatcgcttgggccttcggtggcatgatc

SEQ ID NO: 37816 - DNA, 268 bp, Glycine max
  Clone ID: LIB3056-014-Q1-N1-H10
caatttctctctttttgctcagtttctgttgtatttggtcaattacaacatcgtattctgcaaattcaaaccgggtcttggttttctgaaagatgggaggtggcaaggacaagcatcatgatgaatctgacaaaggaattttttcacaccttgctcatggggtagctggtgcagcacatggtggacatgggtacccacctggggcttacccaccaccacctggggcataccctccacaacagggatatcctccagctgggtatcctcc

SEQ ID NO: 37817 - DNA, 369 bp, Glycine max
  Clone ID: LIB3056-014-Q1-N1-H11
gaaacggccagtaggagcatagaggctgggggccgatctgatctaacacatgaccctacgacatgggagaccatctaatgcatccttaaattaaaagttaaatcaggctgacccaaatctcaaatgggaaccaacaactaatcccacatctacacataatcgtaggctaactgaccgtttattgactatcctactatgatattactattataggacatgctgctgctgccaaaacgcatatctgatagagggctgatctagatcatcccgacaacaccccagataaacatgtcatctaaaaccgcactcgcactgcgctgagtcacttcaccacagaatacatgctgcgcagaatgcattcacgagctg

SEQ ID NO: 37818 - DNA, 195 bp, Glycine max
  Clone ID: LIB3056-014-Q1-N1-H12
tgcgtttcaaaaaaacgtgtctctctattttgaatctggatccagcgccttctattcagcattcacccaaaccctatttctctctctctttcttccctgtttggtatcagcgagcacaatgaggagaggagctaagagaaagacgaagcatgaccaagaagccaaacacgtcgcaaccgaagataacaagaccga

SEQ ID NO: 37819 - DNA, 421 bp, Glycine max
  Clone ID: LIB3056-014-Q1-N1-H2
ctcatttcaatttgcatttgcatttgcgtttcatttggcgttttgtttctttctggaagcttcgttcgggcatcaatggcgtccttcgatgaagctcctcccggaaactccaagaacggcgagaagatcttcaaaaccaagtgcgctcagtgccacaccgtcgacaaaggtgccggccacaaacaaggacccaatctgaatggtttgtttggaagacaatctggtacaactcctggatattcctattctactgctaacaaaaacatggccgtgatttgggaggaaaagaccctctatgattacttgctcaaccccaaaaagtatattccaggaacgaagatggtatttcctggtcttaagaaacctcaggaacgtgcagatcttattgcatatcttaaagaatctactgcttaatgattaa

SEQ ID NO: 37820 - DNA, 363 bp, Glycine max
  Clone ID: LIB3056-014-Q1-N1-H3
ggccaggcaagccccactcaaccaccacacctctcctcgttcacgctacccctttctgctcttcttctacctttcaagttttaaaagtataaagatggcagagacattcctatttacctcagagtcggtgaacgagggacaccctgacaagctctgcgaccaaatctccgatgctgtcctcgacgcttgcctcgagcaggacccagacagcaaagttgcctgcgaaacatgcaccaaaaccaacttggtcatggtcttcggagaaatcacgaccaaggccaacgttgactacgaagagatagtgcgtgacacctgcaggaacatcggcttcgtctcaaatgatgtgggactggatgccgacaa

SEQ ID NO: 37821 - DNA, 419 bp, Glycine max
  unsure (1)..(419): unsure at all n locations
  Clone ID: LIB3056-014-Q1-N1-H4
acgaaaccctcttcatcttgttctatctgtgacgagcatcatggcctcaagagcagtgttattgttggctatgtgtgtgcttccggcgatggttgtggccattcgcccagcaaagaaccctttttgcgtgaagggtcgtgtctactgtgacccttgccgtgctggttttgagacctcagctaccacctacattgctggtgctgagattatgttgcaatgcangagcagggttagcaacgaggttgtgtacacgaagaaggggtacaccgactcaaccggagcatacacaatgtacgtggatgaggatcacgcagatcagatctgcagtgccaagcttgtaagcagccctcaccctcaatgcaaggaagtcaccccaggccgcgacgaagccgtcgtgattctcacccgctacaacggca

SEQ ID NO: 37822 - DNA, 349 bp, Glycine max
  Clone ID: LIB3056-014-Q1-N1-H5
ggtgatttggcattatctggtttgtgttcggtgcttgctggtattggttggttcgttggttccatatgatgtttacatagaggagctagcttagccactttcggcaaaagaactcacagagatacatttacacatagaaagaacgcgtttactgtttagagaccaaaccccatcttttgtaccactcaatgaatcattagtccatactcaaactctgaaagcgagtgttcctttagagctgagacatatagtatatatttgagtttgactgattggagaacaaactgaagaagagagatcgcaaaatgagagtgtgctgtcttgcttggttgagcattcttgtcatatg

SEQ ID NO: 37823 - DNA, 432 bp, Glycine max
  unsure (1)..(432): unsure at all n locations
  Clone ID: LIB3056-014-Q1-N1-H6
aaaaccttttctctctcttacatcactctctctctctctctgtctctctctctagatctgttcaaatccgaaaccatttccgctccaatttccaagagcaaatcctaaccccttctctctgtatgatactagatttcccctcctcaaaggcgtagtttttgtgtcgatttgtaaattcattcggtagcttaggttagaatttttgtgtcaagtttttaggggtttgaatcggtgagatgaatcacaaccaccgcaacaaccatagaaccaggtacccttctgggatgggacttgggcgccggggtttcaatcccaacctgagccaggacccgaaccagaaccagaatcatcacgcgttccaggctcggccgncgtaccaccaacagcaacaggcgcaatatgtgcagaggcatttgttgcaacagcagcagc

SEQ ID NO: 37824 - DNA, 339 bp, Glycine max
  unsure (1)..(339): unsure at all n locations
  Clone ID: LIB3056-014-Q1-N1-H7
ctcgagccgattcggctcgagctggaaagaaggcttaaacatatgcattggactggccggctcggaatttggcagatgaatccttaaaaaagtccaaatggtggatgggggataatagaacttgataaaggattggagggtttgtgcaatgagtgccgatctaacagttgtatagagcatgcattggggatcatggangagaagaagactcaagaaaatctatctgaaagggtctccaatatatcattgactggaactgatcgggtggagaagttncttcttgagaaactagatgtttatgagtctgctgtgggtggatcaaatgtgaagtgtacacca

SEQ ID NO: 37825 - DNA, 253 bp, Glycine max
  Clone ID: LIB3056-014-Q1-N1-H8
acgaaaccctcttcatcttgttctatctgtgacgagcatcatggcctcaagagcagtgttattgttggctatgtgtgtgcttccggcgatggttgtggccattcgcccagcaaagaaccctttttgcgtgaagggtcgtgtctactgtgacccttgccgtgctggttttgagacctcagctaccaactacattgctggtgctgagattatgttgcaatgcaagaaccgggttagcaaccaaggtgtgtacacg

SEQ ID NO: 37826 - DNA, 304 bp, Glycine max
  Clone ID: LIB3056-014-Q1-N1-H9
ctttgagagagagagagggaggagggagagtgttgacgctccatcaagatgggtatttctagggattccatgcacaagaggcgtgccactggtggcaagaagaaggcatggagaaagaagagaaagtatgagcttgggcgtcaggccgcaaacaccaagttatcaagcaacaaaactatccggaggattcgtgttcgaggtggcaatgttaaatggagggcattgaggttggataccggcaattactcatggggtagtgaagcagttactcgcaagactcgtattctagatgttgtttacaatg

SEQ ID NO: 37827 - DNA, 424 bp, Glycine max
  unsure (1)..(424): unsure at all n locations
  Clone ID: LIB3056-013-Q1-N1-H4
gaagaagatggctttaggtgttcctgctcttccgttgacgtacgtggctcacgttctggcagttgttgccagcgtcttggtcgtggtctgggtcgtcaatttcaggggtggcttggcttgggattctgataacaagtccctcatcttcaacattcatccagttcttattggtattggcttactagttcatgggggtgaagctattataagttacaaagcttttcccctaaagaaggaagtgaagaaattgatacaccttgttttccatgccatcgcattaatacttggaatagttggaatttatactgcctttaagtttcacaatgaaagggggattgccaatctctacagcttgcattcatggcttggaannngggtatggtcccttatggcattcagtggatatatgggtttgtgatctttt

SEQ ID NO: 37828 - DNA, 368 bp, Glycine max
  Clone ID: LIB3056-012-Q1-N1-A1
ggacaaaagaagtgttgatgatgttgttcttgttggtggttctaccagaattcccaaggttcaacaactgctgcaggacttctttaatggaaaggagctgtgcaagagcatcaatcctgatgaagctgttgcatatggtgctgctgttcaggctgcaattttaagtggtgagggcaatgagaaggttcaggatcttctcctccttgatgtcacccctctatctcttggtttggagactgctggcggtgtgatgactgtcttgatccctatgaacactacaattccaaccaagaaggaacaggttttctcaacatactctgacaaccagcctggtgtgttgatccaggtctttgaaggtgaaagagcaa

SEQ ID NO: 37829 - DNA, 299 bp, Glycine max
  Clone ID: LIB3056-012-Q1-N1-A10
ctacgtcaatttcatacgaaatctatcccatgcgcactgtatacccggcgctgactcgcgtgcacatcaagctaattctgtcgtacacactcgtagtactcgtcgccttgtgctcaatcaccactatagctcaatcaccagctgcagccctcaaagccctatgcaaagcctgcaccttctaaacctgctcctcgacacaccggctcgagcgcccgcaaatccattactcccttcattaccccactcacgctcttcagcgtgtcgattcatgtggcgctcaagacattgcgaagatccta

SEQ ID NO: 37830 - DNA, 381 bp, Glycine max
  Clone ID: LIB3056-012-Q1-N1-A11
ctcactcaatccgagaccaaaacggcgccatgcctaccgtcagtgtggggcgggatcgcctgtttgcggctctaggaaagacttacacgcaagaggaattcgaagacttgtgcttcagtttcgggatcgagcttgacgacgtcacgacggagaaggcaattgtgagaaaagagaagcatttggaggaagaagaagctgatgaggacgaagaagttatctacaaaatcgaagttcctgccaacagatatgacctcctgtgccttgaagggcttgctcaagccctccgagttttctgtgagttccaggagattcccacttacaaactgtccaagatcagtaaggatgcaatgctgaaaatgcacgtgaagccggagacttctc

SEQ ID NO: 37831 - DNA, 322 bp, Glycine max
  Clone ID: LIB3056-012-Q1-N1-A12
gagggatctctctctctcactccttcttctctctcctctggcacccctaaagcttcttctgttctgtgcaggcagtttttctttggtttggttgcatcctttgatctgatcagcaaatttgagaattcagtttgggaagggccattcctctttagtgcaaaacagatcgcaagtgcctttgtgctgatggccactaatgaaaatcttccaccaaatgtaattaagcaacttgccaaggagttgaaaaatcttgatgaatctcctaccgagggcattaaagttgtggtaaatgatgatgatttttcgacaatatttgctgaca

SEQ ID NO: 37832 - DNA, 381 bp, Glycine max
  Clone ID: LIB3056-012-Q1-N1-A2
gtgcgtagaggactggtgaacactcactcgccactgctcacgaaccgtataaaccctaaaaccttgatttttcccaatccattccacgcacaatatggcttcagatgctgacatggaggactacggtttcgagtactccgatgaggaggaagtggagcaagacgttgatatcgagaatcaatattacaattcaaaaggtatggtagaaagtgatccagaaggtgcgcttgctggttttgctcaggtagtgcaaatggaacaagaaaaagcagaatggggatttaaagctctaaaacagactgtcaagctatattatcgactgggaaggtataaagagatgatggaagcctatagggagatgttgacatatattaagtcagc

SEQ ID NO: 37833 - DNA, 386 bp, Glycine max
  Clone ID: LIB3056-012-Q1-N1-A3
ctaggtcaaacttattaagatgatcctaattttgatttctggttaaacaagttcgatcgatcgaggttgggcaaacaactggaattgcagagaaaatgaacagcgccatcttcaaagcttcaaacagcaacaatctccattcctctctcagggccgcactcttccattccacctctcccttgcaacgtatacgccgcaatcattgggactccagagggagcaaccatacctcgagaaggtttagaagggtgcaagcgaaacacagagtaatgaacagtatcaatgattatgcagaatccctgtttcagagctggaagcaaggtattgatagggatgacccatcatcaagtctaggcacctcatgggttaaaaaacaatattctgat

SEQ ID NO: 37834 - DNA, 379 bp, Glycine max
  unsure (1)..(379): unsure at all n locations
  Clone ID: LIB3056-012-Q1-N1-A4
ctcaaagaagatggctagtggtagtttgaagaacatgttgagtgtagcaatgaatcaaggagtggtggaagcacgagccaggatcttcggccaccaattgaaccccactggcatgaaaactccacacaagcttctccgcatgaagctcttcggtgaaaaagtcgctcagtggtaccctcacgacatcaagaaagacgaccctcttgtcatggcccgtcaagaacaagaacgcttatcaaagcttgaaatgttgaagcggcgaggaaaaggaccacccaagaagggccaaggaaggcgtgctgccaaacgcaacaaataaattatactttcacctntctctctctcctctctctcatctctctctctctggaattatttt

SEQ ID NO: 37835 - DNA, 376 bp, Glycine max
  Clone ID: LIB3056-012-Q1-N1-A5
tgagatctcagattgcaattgcctcttctcttctcccagaatcggtgtaggttacaggtttaagggttttgttttcatttaggtcactaatccgatatcatgaagctcgatacgactagtctcgaatcgtttcccacactgattgcacctcaaaacgacgtcgccggagaactctccgccgctccgtcctttgaccttccgaattccaatgacttcgatgggttcttgaaagacgctattcagatggtgaagcccgcgaagggtactacaactcttgcttttatatttaaagagggtgttatggtagctgctgattctcgagctagcatgggaggatatatatcgtcgcagtctgtgaagaaaattatcgaaatca

SEQ ID NO: 37836 - DNA, 362 bp, Glycine max
  Clone ID: LIB3056-012-Q1-N1-A6
ttaataacatgaagaaagggcttagacatggagaagcatgtccacttcttgataaaattgtgtttgacaaggtaaagcaaggtttagggggtagagtacgtcttattttgtctggagcagcacctttatctgcacatgtggaaggttacttacgggtggtgacttgtgctcatgtcctacagggatatggtctgactgaaacctgtgcgggaacctttgtctcattaccaaatgaaatagaaatgcttggaacagtgggccctcctgtaccaaatgtggatgtttgcctggaatctgttcctgaaatgggatacgatgccctagcaagtacaccaagaagagaaatttgtgtaaagggaaaa

SEQ ID NO: 37837 - DNA, 382 bp, Glycine max
  Clone ID: LIB3056-012-Q1-N1-A7
cttcctcaaagctcttcaccacttttcttttctcactaaacttagctctccttctccaaacatcttttggagccgaccctctcttccatttctgttcaaattctgagaacttcacagccaacagtccctatgaatcaaacttgaaaacactcatcaactcactcatctacaagaccccttcaactggttttggtgttggctctgtgggccaataccaaaaccaaaaggcatatgcgcttgccctttgccgcggcgacgtgtcggcctcagagtgcaaaacttgtgtctctgaggcacccaaagaaatcctcagtcgctgtccatacaacaaaggtgccatcatttggtacgactattgcatgttcaagtacttggacactga

SEQ ID NO: 37838 - DNA, 376 bp, Glycine max
  Clone ID: LIB3056-012-Q1-N1-A8
ttgagtatcgacactgattttgatggttgcatgcagttgatcagagaggtcactgctgagttgcctatttatttggctaactctctcaacagtttgaggttggaagggcagaagactgctgctattgagattctgcagcagtttgattggcaggttcctgattgggtcattgtgcctggaggcaaccttggcaacatttatgccttttacaaagggtttaagatgtgtcaagagcttgggcttgtggataagattccaaggcttgtttgtgctcaggctgccaatgctgatcctttgtatttgtactttaaatccgggtggaaggagtttaagcctgtgaagtcgagcactacatttgcctctgccattcaaattg

SEQ ID NO: 37839 - DNA, 379 bp, Glycine max
  Clone ID: LIB3056-012-Q1-N1-A9
attcattcaagattcagcaagtgcgtttcggaagcagagaccgaaatacttcgagatggcccgtacaaagcaaactgctcgtaagtcaactggaggaaaagctcccaggaagcagcttgcaaccaaggctgcacgtaagtctgctccaacaactggtggtgtgaagaagcctcatcgttatcgccctggaactgttgctcttcgtgagattaggaaataccagaagagcactgagctcctaatcaggaagcttcctttccagaggttggttcgtgaaattgcccaggatttcaagactgatctgcgtttccagagccatgctgtgcttgcattgcaagaggctgctgaggcataccttgttgggctctttgaggacact

SEQ ID NO: 37840 - DNA, 396 bp, Glycine max
  Clone ID: LIB3056-012-Q1-N1-B1
gagagagagaacaaactcacacacacacaaagtgactcttccgatgaagttaatcggcgacggtgccggtggccggaaagttctcgtcggcgttaaattagatcctcgcagccgcgaattgctgacgtgggctctcgtcaaggtcgccgagcccggcgacctcgtcattgctcttcacgtccttgacaccatcactgagggaacggcgtcgctgttatctcttgtgaagacattcgattccgttctcgccgtctacgaaggtttctgcaacctgaaacaggttggtctaaggcttaaagtttgtcgcggtgactcggttcggaaggccttggtgcaagaggcgaaggcgtttggcgtttccaccgtgattttgggaacttcgaaatctcatcacac

SEQ ID NO: 37841 - DNA, 353 bp, Glycine max
  Clone ID: LIB3056-012-Q1-N1-B10
cagaaaacagcatcgaacccgtcgtagcagaaaaacttgtcaccatggtttcttgcgacaaggatccacgagaggatgtccttcaagcctggtacatggatgatagtgatgaagatcaaagactcctgcaccacaaagaacccaaggagtttgtctcgttggaccaacttgctgaacttggagtccttagctggaaactagatgctgataaccatgaaaatgatccagagctgaagaagattcgtgaagagcgtggttacacctacatggatgtttgtgaagtctggccaaaaaaagttgccatattatgaacagaatatcaaaaagctttttgaaaagcatctttacactga

SEQ ID NO: 37842 - DNA, 404 bp, Glycine max
  Clone ID: LIB3056-012-Q1-N1-B11
atccacacccaacattctcacaagtcacagccaaacaccatttcattaattcttgcagaatattgcttagttttgttttatctgaatttggaaacagcttttgaatggctttttcaagagttgcactgctaatatgcacggtcgggtattttgtgattgcctctgccggcaatttccaccaagattttgatatcacatggggagatggtcgggctaagatactcaacaatggagagcttctcactctgtcacttgacaaagcctctggctcgggtttccaatccaagaacgaatacctttttggcaaaattgacatgcaactcaaactagtccctggcaactctgctggcaccgtcactgcctactatttgtcttcaaaaggagcgacatgggatgagattgac

SEQ ID NO: 37843 - DNA, 408 bp, Glycine max
  Clone ID: LIB3056-012-Q1-N1-B12
gatggtttcagttatgcaagctttgagactgttgggtatgacttcaaagtggtgaatctgaacgaaatggttaagagggtattggcatgttttctcccaactgagttctctgttgcagttcatgtggatggtgcaagcaagttgtttgatcagacgtgttttctggatgttaagggatactgtcgcgaagagaggagccacgaagggcttggaatgggttgctctcttgtctaccaaaaatttgccaagacttgtgactgtggttcacctagatcaactctgaagtgctggaaagaggaagatgaagaagagtagttctcttaagtgtctttattatgtccttgcgaaaataagtccggttttccagacagtgattgtttttctttggtgttttttcccttttatgtt

SEQ ID NO: 37844 - DNA, 371 bp, Glycine max
  Clone ID: LIB3056-012-Q1-N1-B3
tatctctctgttctcttctacctctcaagtttttgaagtatagagatggcagagacattcctatttacctcagagtcagtgaacgagggacaccctgacaagctctgtgaccaaatctctgatgctgtcctcgacgcttgcctcgaacaggacccagacagcaaggttgcctgcgaaacatgcaccaaaaccaacttggtcatggtcttcggagaaatcacgaccaaggccaatgttgactacgagaagatagtgcgtgacacctgcaggaacatcggctttgtctcaaacgatgtgggactggatgccgacaactgcaaggtcctcgtcaacattgagcagcagagccctgatattgctcaaggtgtaca

SEQ ID NO: 37845 - DNA, 383 bp, Glycine max
  Clone ID: LIB3056-012-Q1-N1-B4
caaccccactaatgctcccacaccgtgccaatgccaatgtcaaagttggaggctatgacattcccaaagggtccaatgtgcatgtgaatgtgtgggcggtggcccgcgacccggccgtgtggaaggatccattggagttccgacccgaaaggttccttgaggaggatgtagacatgaatggccatgactttaggctacttccattcgggtcgggtcgacgagtatgcccgggtgcccaacttggtatcaacttggcagcatccatgttgggccacctcttgcaccatttctgttggaccccacctgaaggaatgaagcctgaggaaattgacatgggagagaatccagggctagtcacatacatgaggactccaatacaagct

SEQ ID NO: 37846 - DNA, 359 bp, Glycine max
  Clone ID: LIB3056-012-Q1-N1-B5
gcgcggctcacacagactcacacatttcgtcggaatgggaagggtgattcgcgcacagcgtaagggtgcggggtcggtgttcaagtcccacacccaccaccgcaagggtccggcgaggttccgcagcctcgacttcggcgagcgcaacggctacctcaaaggggtcgtcaccgatatcatccacgaccctggtcgcggtgctcctctagccaaggtggcgttccgccaccccttccgctacaagaagcagatggagctcttcgtcgccgccgagggcctctacaccggccagttcatctactgcggcaagaaggccaccctcgtcgtcggcaacgtcttgccccttcgatccattcccg

SEQ ID NO: 37847 - DNA, 377 bp, Glycine max
  Clone ID: LIB3056-012-Q1-N1-B6
tctaccttccctctttttccgaatctgaatagaaatggcttcggagactgagacgttcgcttttcaggccgagatcaaccagctcctcagtctaataatcaacaccttctacagcaacaaggagatctttcttcgtgagctcatcagcaatgcctctgacgctttggacaagattcgatttgagagtcttacagacaagagcaagcttgatgctcagccagagttgttcattcacattattcctgacaagaccaacaacacattgtctatcattgacagtggtattggcatgactaaggctgatttggtgaataacctcggtactattgcaaggtctgggaccaaggaattcatggaagccctggctggtggtgctg

SEQ ID NO: 37848 - DNA, 379 bp, Glycine max
  Clone ID: LIB3056-012-Q1-N1-B7
gaacaaaaagcacattacatgagttgacatttttccatgtactcatgttaggtatctgcagctgaactcaagtttcaatctttcacctatccatggcttcctctctctttctttgcagtaactacgtcttccccacttcccaaaaccccttcagaagcaaccatttagctcaattcagaccaaatgggccctccaattttcactcaaagcttcggtttcagagaccccacttggtcagagccatggtttctgattccaacacttccaggagacaaatagagattgtgtatgaccccgaaggaaggattaacaagttggctgatgaagtggacagggaaactcccctttcaaggcttactttgttctctccttgcaagat

SEQ ID NO: 37849 - DNA, 385 bp, Glycine max
  Clone ID: LIB3056-012-Q1-N1-B8
ccgtcacaatcctccgcattgcgaagatgaacctcaccacttccgtcgactccccttcccacctcaccacgctcttcaacctcactctcatcgcgaagaaccctaacaaccacctcgtcttcttctacgacccgttctccatgacggtgttctcgaactccgtccccgtcgggaacggttccgttacggcgtttacttcggacaagaacaaccagacgagcctccgagcggtgctgtcggggtcgcaagatctggacacggactcgttgactagcctgagatcggggctgaagatgaagagaggtttccccgtggagattcagatggacaccaaggtgaagatgaagatggattggctcatgagcaagaaggtcggaattcgagt

SEQ ID NO: 37850 - DNA, 347 bp, Glycine max
  Clone ID: LIB3056-012-Q1-N1-C1
gccgagttccttcaaacgcttcatttcaactctctccgactcgatgatgggtcggtcgtgaacatgtcagtgcccatcgtgctggctattgatgatgcccagaagcataagatcggggataacaaaagggttgctcttttcgattccaagggagaccctgttgcaattctcaatgatgttgagatttataagcattctaaagaagaaagaattgcccgaacttggggaaccactggccctggcctaccctatgttgaacaaactattaccaatgctggaaattggttgattgggggtgacctataggtcattgaaccaatccaggtcaatgatggacttgatcattt

SEQ ID NO: 37851 - DNA, 386 bp, Glycine max
  Clone ID: LIB3056-012-Q1-N1-C10
agaaaatggcggtgcctctgctctcaaagaagatcgtgaagaagagggtaaagaagttcaagaggcctcagagtgacaggaaaatttccgtcaagactaactggcgcagaccaaagggtatcgattctcgtgttaggagaaagttcaagggatgcactttgatgccaaacattggttatggttcagacaagaagaccctccactatctccctaatggtttcaagaaatttgttgttcacaatgtgaaggatttggaactgctcatgatgcacaacaggacttactgtgctgagattgcccacaatatatgcacaagaaagagaaaagatatagtcgagagagccgcgcagcttgatgttgttgtgacaaacaaaacggccagatta

SEQ ID NO: 37852 - DNA, 336 bp, Glycine max
  Clone ID: LIB3056-012-Q1-N1-C11
ctcgagccgaatcggctcgaggtgatttcagtgagtgatcggtgttcacttgatctcatcataatcgtcagcgtcaattgaagaagatgccgatcagaaacatcgccgtcggaaggcctgaagaggcgactcaccccgacacgttgaaggcggctttggctgagttcatctcaaccttcatcttcgtgttcgccggctcaggctccggcatcgcctacaacaagctcaccgacaacggcgctgccacccctgccggcctcatctccgcctccatcgcccatgcattcgccctcttcgtcgccgtctccgtcggcgccaacatctccggcggcacgt

SEQ ID NO: 37853 - DNA, 260 bp, Glycine max
  Clone ID: LIB3056-012-Q1-N1-C12
ggaactccaaccatttgttgggaatccaacttcatgcgttgtactttgaaatgtaaatttatagatagatagatactaatcatagtcaatacattctttctttgtctatgatgttaattagttattcttataatgcgttgttttagattgatggcaaaagattgaaaaggttgaaatgaaatgagatgacaaggaagaaaaaaaaaactaaaaatgaatgaaaactatagaataacaaaaatttaacaagactagtgact

SEQ ID NO: 37854 - DNA, 394 bp, Glycine max
  Clone ID: LIB3056-012-Q1-N1-C2
cttttggcaccttatttgcctttcaggaccctttgactgttgcagccaacaggtcctccaaactagttgggattgcagaagggactacagtcacatctagtctcgacgggcttcggagcatttcgatcgccaagctaaccctgcgtttgaagcaccacaagggctccctttccattgttggtgtcacaaacaatgtcaaaccctctgatcttccagtggtaggaggcactgaagatttcatgtttgtgcaaggctatattagtacttctccagttgatctcaagggtcttactgttgtctacaagattgagtttcatctttactggcccccatatgcaactcaagcctcatgaactatgttgcatgggtagaatttatgtatgttgtgaatttt

SEQ ID NO: 37855 - DNA, 388 bp, Glycine max
  Clone ID: LIB3056-012-Q1-N1-C4
gttctgcaaaagcaaaaatggaagcagagcatcatcaccagacctcaaacgctggtggtattattggaggcctttacgtcaaagttatgaccgacgatcaaatggaactgctcaggcaacagatttctgtctatgccaccatctgtcaacagctcgttgagatgcacaaggccgtaactatccaacaggacctcgcagggctgaggctgggtaatttgtactgtgatccgttgatggcgtgctctggacacaagataactgcgaggcagcgctggactccaacacctttgcagcttcaagtacttgagcgtatttttgacgagggaaatggtactccgagcaagcagaagatcaaggacataaccattgaacttggccaacatggcca

SEQ ID NO: 37856 - DNA, 449 bp, Glycine max
  Clone ID: LIB3056-012-Q1-N1-C5
cactcctacatcagctggtaattctcctcgagcttcagttttatcaacatcggcagcgaagcactatcgggggccgttaaacgctattacaagtagcctaatccatcttgaccacatatcgaccgactatctgactgtactgctcaaacggacaattacattgtactccatcatgaagacactattcgtaacactacacaagatcgcaagtaccctacaacacccacacttatcatggctagttcaacagtcacacgctttgatgactttctcatctgcccatactactaattgtactgctgcatcgtctctgacagcaccacactcttactatgtagaagctaagagggactatatggcaaagacagctatttagattgaaggattgaacgctaatcgctttaatggtattcccattcactttaacctacattgtagtttaaaattac

SEQ ID NO: 37857 - DNA, 335 bp, Glycine max
  Clone ID: LIB3056-012-Q1-N1-C6
ctctattctcgttatggcatatgcagatttgtcccaagttgcaagtctgaccacccaatggaaatggtctcttacaatatcacctcatcaccttcagctgatgcctgaagcaggcatttgttaggatcttcatctggaactgctgcattgaatttatgttccgaaggacttgttgagtcaagctcatcatagcccaggccgctctcattatcagagactagactgattccttctggtgatgataacattgatgatgatgtagcttgaaaatggcttatgcggcttagacaattctagttcttgtgaggggtgaaatcattgatctggaaactgat

SEQ ID NO: 37858 - DNA, 387 bp, Glycine max
  Clone ID: LIB3056-012-Q1-N1-C7
ctcgagccgatttattatctttctctaagaactcttccaattttttctctctcttcctctttagcttcatcgccatggcatcaccagcaagaaccttctttgccttcattctcgccgtcgtcgctctcttcttcgccgccgccaatgctcaagacctctccccggctccgagtcccgatgccggagcggcgggatccgtttcgagctccgtcgccatgatcggagcttcggttgtgctgtcattgatggctatcttgaagcattgaattcgttaatttcgttgggtttgtacaaaattgattcgttttatatacagagtggtgattatgagctttggtatctatacttataggtataccggagagagattatacagtatttaatata

SEQ ID NO: 37859 - DNA, 373 bp, Glycine max
  Clone ID: LIB3056-012-Q1-N1-C8
agaacacttaccttaatttcgccaaatcaaccaaagacaaaaaaaaagaatccaaaggaacagaagagaaagcttgaagctatggggaacaccatgggaaggagtaaaaaggccaaggtgatgaaggtggatggagagacgttgaagctgaaaacaccagcgagagcaaacgacgtcgtaaaggactacccgggccacgtgcttctggactccgaagcggtgaaacatttcgggcttcgggccaaacctcttgagccgtaccaggaactgaagcccacaaagatttactttctcgttgagttacccaagattcagcccgaagaggaaaaaacggcgctaccgaggagggtgcgatccagtgggatacgcggca

SEQ ID NO: 37860 - DNA, 401 bp, Glycine max
  Clone ID: LIB3056-012-Q1-N1-D1
agagagcgttttcgtcttcgctatgtcgcgacagagatccagaagagccgaactacctcccgctcaggagaatattgaaaaattggagaaagttgtaaacgatggaaattattatggagctcagcaaatgtacaaatccgttagtgccagatatgtttctgctcagaggtactctgaagcattagatatcctacattcaggagcgtgcattcagttgtctcatgggcaggttacctgtggagcagagttagctttattgtttgtggagacattagggaaagggaaaattccttacgatgaggaaattcttgaacgtctcaagaaaatctacaaatcatttcctcgggtttcattaccacaaaacctatgggatgtcgattacattcagcagctttctgaaa

SEQ ID NO: 37861 - DNA, 315 bp, Glycine max
  Clone ID: LIB3056-012-Q1-N1-D10
atcaatttctaaaagaacacataaagataaaaaaagggtggactttatatcaaattataattaacctacttaaacactatcacaacatttaatatccattcacttacactttatattattcctcgacaatccttgcgccatatagcaatccctcacttacatcagtcctactatactcactcctttactagaaacataagtaatcaacttatgcataaatgcccatattagaacaacatataaacagcctactcacttctcattatcattaccaaatcctttactgatacctcatcaaacagttacagatccaat

SEQ ID NO: 37862 - DNA, 314 bp, Glycine max
  Clone ID: LIB3056-012-Q1-N1-D12
cccaatttatctatggacactgcctatcagactaacgttgttgtttaattagtccatgcatctgcatcttgggcaccataagattgtatataaaataaattatggtgtgttgtgtatgttgtgcaagacctggaacttcacctttctacgtacgtgtgctgttaggatgcagtgtgctttgatgatgctttgatgaatatgcagtgtgcttttttaagtctattattttcttttattctcttttcataaggactttagttcttccaccgtgcttgattggtgtctcgattataactaaatttccgttatttaag

SEQ ID NO: 37863 - DNA, 365 bp, Glycine max
  Clone ID: LIB3056-012-Q1-N1-D2
ctcttgcgtgtttgggctttagcgcagcttctcctagactcaaggaagatcggttcggaaaaggttcacatcactattgtggttattggccatgtcgactctgtgaagtccactaccactgtccacctgatctacaagcttgtaggcattgactagcgtgtgatcgagagatatgagaaggatgctcctgagatgaacaagaggtcttccaagtatgcctgggtgctagatatgcttaaggctcatcgtgaaagatgaatcacacttgatatcgccttgcaggaagtttgaaaccaccatgtactattgcacagtcattgatgcccctggtcacaaggatctcatcaagtacatgatcactggga

SEQ ID NO: 37864 - DNA, 396 bp, Glycine max
  Clone ID: LIB3056-012-Q1-N1-D3
cggctcgagggtcagagtgagaaagagaaagagagaattcgtaaaccctaatttcggaaagatcggcgatgactgcctccaaggatcgcgagaacttcgtctacatcgccaaactcgccgagcaggccgagcgttacgaagagatggtggaatcaatgaagaacgttgcgaatctcgacgttgaactgacggtggaggagcggaatttgctttctgttgggtacaagaatgtgattggtgctcgcagagcgtcctggaggatcctgtcttccattgagcagaaggaagaaacaaaagggaacgagttgaatgcgaagcggattaaagagtacagacagaaggttgaattggagctatcgaacatctgtaatgatgttatgagagtgattgatgagc

SEQ ID NO: 37865 - DNA, 369 bp, Glycine max
  Clone ID: LIB3056-012-Q1-N1-D5
cttttcttctcttcttcttcttcttctacccttcaatattaatattccgtgcaaaaaccaccaacatcaacatcaccaccaacaagaagaacaagattggcgttatgggtctcttcctttctaggaatttggcttgcaaattcatatacccttttcttttctccaagaaggtttccaaggatttgtttcccaagcagttggagaacatgatgtctctgatctctcctcgtactggcaggcatttgcagcgctatgacaatggctgtcgccaagttgtgggatgcattccttatagatacaagaacaatggtacacaggataaggaattggaggttcttgtgattagtgctcagaagggtcatggaatgc

SEQ ID NO: 37866 - DNA, 293 bp, Glycine max
  Clone ID: LIB3056-012-Q1-N1-D6
ctttgtaatatttcttcttcttcttctacccttcaataggaatattccgtgcaaataccaccaacagcatcatgaccaccaacaagaagaacatgattggcgtcatgggtctattgctttataggaatttggcttgcaaattcatatacccttcatttttatccaagaaggtctccatggatgcgctatcgaagcagttggagaacatgatgtctgtgatctatcctgatactgtcagacatatacagcactataacaatggcatgtaacaagtatgtgggacgcattgctta

SEQ ID NO: 37867 - DNA, 345 bp, Glycine max
  Clone ID: LIB3056-012-Q1-N1-D7
gctttttagtctattattgattagaattgcccccttggtgttacgttcaatgattattgaaaaaaaaaacatcaatagatagggaaaatttggcatatggatcatggtttgatttatttacagggtggaatgaagttgcattgtcaagttataatgttgttgtattatctttcttgatgaatgttgacttagatgtttgctctttaatgatacaggagtcaagtcaagtatcgggcatgtcaagagtgcgctgcattttacgcggcgtggatgtaaaaacctgcatatttctttttgctgttgtgccaatgtgcatctttggaatatacttgcatggacagaaaa

SEQ ID NO: 37868 - DNA, 364 bp, Glycine max
  Clone ID: LIB3056-012-Q1-N1-D8
gttcctctttccttctctagcacaatttacaatctcaatggctggaatttgctgtggtgttgttggagaaggtgacactccggctccactcgagcccactcctcgcccctccaggcgccggagtttggacatcttacctttaaaatatatcgccgacatgcccatgccgccgccggagggtttacggaagcgtcccaagctcaacctcagggactgcgataacgcaattgaaaattgcgacgaatccactggacacaaggtgacgaagaaggaatccaaagtagactacgacgacgacgtcgtttcggaaactaagaacgtaactgtttcggaagttgaagaagaatctcccaagttcggcgtg

SEQ ID NO: 37869 - DNA, 334 bp, Glycine max
  Clone ID: LIB3056-012-Q1-N1-D9
ctcaattctaaagaggggtgagaaagacaaagagaggttgggctatgctttacaatatcaactaacctactgaataacctagcacaacatctggactacatctcacttacttacttacactcatcctcgcattggcgtgcgcctaatgcaaatgctgcgatgacatctcgtgactacaagactgaactctcttaccacagacctaagtggggatcctatgcctaaatgcccatacttgacgaacagtaaagagcctactaacttctcatcctcctcacctactgatttacgtcatgccagatctcggagctagaggctcaagctgtgaacatag

SEQ ID NO: 37870 - DNA, 402 bp, Glycine max
  unsure (1)..(402): unsure at all n locations
  Clone ID: LIB3056-012-Q1-N1-E1
agaaaatcctcaattttctgagcagccaaacactctctctctgtctctcgaaaattctcagtttgcagagaaaatctgaatcatgtcgtggcaagcgtatgtcgacgatcaccttctgtgtgacatcgaaggtaaccacctcactcacgctgctatcatcggccaagacggcagcgtttgggctcagagtaccgacttccctcagttcaaacctgaggagataactgccatcatgaatgactttaatgagcctggatcacttgctccaactggattgtatctcggtggcaccaaatatatggtcatccagggtgaacccggtgctgtcattcgagggaagaagggtcctggtggtgttactgtgaagaagaccggtgcggncttgatcattggcatttatga

SEQ ID NO: 37871 - DNA, 351 bp, Glycine max
  Clone ID: LIB3056-012-Q1-N1-E11
acctgctctgaatccaattcattcttcttcttgttcgttgttaggcaatacaacatttattacgcatactcaaagtagcttcgaagatcgtatttatatcggcatatcatggagaataataatcagtcgttctggcaattcagtgaccagctgaggttacaggcatgtaatttggcgaacctttctctaaacgatacgattgggagcaacagttacatctccaagaggcgtgatgaaaggattaattttgacatccaagttgatggtgagatcaactctttcatgtcaaaggagccagctagtgattacaatgataacatgaatggatctctaattgccacgccttacaac

SEQ ID NO: 37872 - DNA, 412 bp, Glycine max
  unsure (1)..(412): unsure at all n locations
  Clone ID: LIB3056-012-Q1-N1-E12
caaaaagttagcagcatcagcagagtggaatcaacgaaagcaagaagagttcaaccaaattcttaaaaaaatggtcgaaagcaaacctgttttatttgggaagtccaagcccagcagaaaccagaatatttcatttgagcagagaggagggtcttatgataattataaggaaaaacgtgatgcaaaacttcgaggagcaaaggctggaaaacaagtagaaaaagaagcacaatttcaacaaatgcagcaactactcgataagaggaaagttgaaatgcccaaaagtgtgagtgcaagtaaaaaaagttctccaaggatgccccaaaattctcttagaaaatcaactccaccggcaaattccacaaaggaaacctctaaacctttaactacgaanaaaacatcatctagaaca

SEQ ID NO: 37873 - DNA, 384 bp, Glycine max
  Clone ID: LIB3056-012-Q1-N1-E2
cttcagatcaaacgcacacagttacgctcttcaaatcaatctcttctcagaaatgggtgtggctcaaaacattcccgatgcggaggagggaaccttggagattggaatggaatacagaactgtgtctggagttgctgggccattggtcattcttgataaagttaagggacctaagtttcaagagattgttaatattcgcttgggagatggaactactcggcgtggacaagtgctagaagttgatggtgaaaaggctgttgttcaggtctttgagggtacatctgggattgacaataaatttacaactgtgcaatttaccggagaggtgttaaaaactccagtatcattggacatgcttggccgcatattcaatggttctggaaa

SEQ ID NO: 37874 - DNA, 418 bp, Glycine max
  Clone ID: LIB3056-012-Q1-N1-E4
cggctcgagcatcaacaccgtcttcgatgccaagaggttgattggtcgtagattcagtgattcctctgttcagagtgatatcaaattgtggcctttcaaggtcattcctggtgctgctgacaagccaatgatcgtggttaactacaagggtgaagagaagcaatttgccgcagaagaaatctcttccatggtgctcatcaagatgcgtgagattgctgaggcttacctaggctccacagtgaagaatgctgttgtcaccgtccctgcttacttcaatgattctcagcgtcaagctaccaaagacgctggtgtcattgctggtctaaatgtgatgcgaattatcaatgagcctactgcagctgccattgcatatggtcttgataagaaggccacgagtgttggtgagaaaaatgtgttg

SEQ ID NO: 37875 - DNA, 386 bp, Glycine max
  Clone ID: LIB3056-012-Q1-N1-E5
catggagtatctggatgtgatattggaaacaccactgagatagagggtgagattgatcaaaacccgtcaaattcgaaggtgaactcacagattgagccttggagtaatcctgatgagcatgtcaatgggactcctggaatcctgaactacaatatttctgtcggggatgactcctgtatgtccttcgaatgtgatgccaatatgcatgtgtcttgccattctcatggtttacgaggtgctagttccgctttgcaagctaggggatataattgtaatcagagtccacatacgcaaggaaaacttgatttgtccagcaatgagatggatcatgtttatttgatggagccctgtgtttctaaagattggtatcctgggtactcaacatg

SEQ ID NO: 37876 - DNA, 228 bp, Glycine max
  Clone ID: LIB3056-012-Q1-N1-E6
atctcaccctatttttttccctcaaaacgacactgtttattcactacttcttagggttagggttaggtttccgcattatgatgtgaaaccctagcacgcctagagcctctttgtataaaacctctcctccgccgcgatctcctctcccatgggcaactgctgtagatccccggccgccgtggcccgcgaggacgtgaaatcgagcttctccaacgccgaccacggaaa

SEQ ID NO: 37877 - DNA, 298 bp, Glycine max
  Clone ID: LIB3056-012-Q1-N1-E7
cgaacgtgttacaaacgactctgcggggcgaattatggcatcgggcaggggcatgggcaaccttacctactccgagccgtatatcaattacagtcactttcgctcaccacttaaaatttccaacatcccctctctgcagaacgcttcgcataaagtacttatgcgcgataagactgtacaggtaaccgtcagagccggcaacatcgacagccacacggtccttgagctctagctcggaggtttcagagccgtcgacctcgacaacctggagaaatcctccgaggttgccatccacaga

SEQ ID NO: 37878 - DNA, 349 bp, Glycine max
  Clone ID: LIB3056-012-Q1-N1-E8
ctcgagccgaatcggctcgagctaatttcctcgttatttggatactctctccctttggaaaaaatcaaaggtgctcgcagtcgcagcgattagttcaaagattgtaagcgatcgtgaatcgtcgacaaaggttcgtgtctgaattgaagtagtgtcatcaccatgagattgagaaagggaaataaggtggagatccgtggcaatgctgatggacttagtgtggaatggtgttgtgctcgtataattgctggtgatggacacacctacagtgtccagtatgactgttctagcacaacaagcgaggccagcatagagagagtttcaaggaaggccatcagaccatgccccc

SEQ ID NO: 37879 - DNA, 345 bp, Glycine max
  Clone ID: LIB3056-012-Q1-N1-E9
ggaaatttctgttgtatgctgctattaaacatgcagggactccaacaactgcgttcaacaggctagttcagtgacattagcatttacattgagggtcaaggtctcattgctcgggctcataaagtcattctcgggatatatagcgtcctattaacaaagatgttcacaaatggaatgtgtgagagcaactcacctgaggtttgtttaaaggatgtgtcttcagcagcattgaatgctatgcttgaattcatgtactgtatggatctcaagtattgagcataatgatgacttgggaccattgtactccaacttcctctgttatctgacatattcttaatctttttt

SEQ ID NO: 37880 - DNA, 421 bp, Glycine max
  unsure (1)..(421): unsure at all n locations
  Clone ID: LIB3056-012-Q1-N1-F1
aaactttcttccaaacgaacgtgtcacaaaattctcgccttctccgaatatggcatcgcgcgtcagcattggcaaccttacctcctccgcgccgtatattaattcccctcactttcgctcaccacttaaaatttccaacaacccctctctgcaaaacgcttcgcataaggtacttatgcgcgataagactgtactggtaaccggcggagccggttacatcggcagccacaccgttcttcagctcttgctcggaggtttcagagccgtcgtcctcgacaacctcgaaaattcctccgaggttgccatccacagagtcagggagctcgccggcgaatttgggaacaacctctnctttcacaaggtggacctacgggacagagctgctctagaccaaatattttctttcacacaattcgatgct

SEQ ID NO: 37881 - DNA, 255 bp, Glycine max
  Clone ID: LIB3056-012-Q1-N1-F10
cgcatacaaaagccggcaatacttctccacaacctttcttaatcaacccctcaatcacccaaacacggaggcttcttaaaaacacccgggcctcctacaaatcccccccacctaatctactacctcctcgcacactacaaccaccccgaacccctacatacacaattcctaatactcaaacactcctcacaaacacactctgaacctacatccattcactaattactcccccatatcacactacactccatcata

SEQ ID NO: 37882 - DNA, 383 bp, Glycine max
  Clone ID: LIB3056-012-Q1-N1-F11
ctggtattttggcagatatgagaaagcttttcccatttgagctatttcacttgggtggtgatgaagttaatacagattgctggagtagtacttctcatgtaaaggaatggcttcagagtcacaacatgaccactagagatgcttatcaatattttgtactgaaggcccaagagatggctgtttcgaaaaattggagtccagtgaactgggaggaaaccttcaatacgtttccatcaaagctccatccaaaaaccatagtgcacaactggttgggccctggtgtttgtccaaaggttgtcgcaaaaggtttcaggtgcatttacagtaaccagggtgtctggtatcttgaccatctggatgtaccttgggatgaagtatataca

SEQ ID NO: 37883 - DNA, 351 bp, Glycine max
  Clone ID: LIB3056-012-Q1-N1-F12
gccaagtctgcatttgcaacaaaggccaaagttcgccgagctattgaggctgaaggaattcccttcacttatgtgtcaagcaacttctttgctggttacttcctgcccaacttgtcacagcctggagccacagctgcccccagagacagagttattatcctaggagatggaaaccccaaagctgtttttaacaaggaagaggatattggaacttatacaatcaattctgtggatgatccaagaaccttgaacaaaattctctacattagaccaccagctaataccttgtcgtttaatgagcttgttactctctgggagggaaagattggtaaaactcttgaaagaatctat

SEQ ID NO: 37884 - DNA, 308 bp, Glycine max
  Clone ID: LIB3056-012-Q1-N1-F2
atcctcacttccttgccctcattctcatacacctattcggaacccagacgcaatgcccatgttcactccatcactcttcacacccttcttccatcacattgaacccagtgccacactgtgattatatatcaccaccaccaagctcaatctcaagcaacagcattacaccataccaatgccaatacccgtgtgccacggaattcaagcccaaaccctaacccaagcccaacctgggttttagctcgtcggtttcaaaaacttcggccgtaccaatcctaagtcggaccggtttcaagtcaaccgctttc

SEQ ID NO: 37885 - DNA, 101 bp, Glycine max
  Clone ID: LIB3056-012-Q1-N1-F4
agcaaacactctgttccttccttctctcgttcgttcatggaacttcagaggcgccaagatcagagcctctcccagcggaagggccagaaacggaagctcga

SEQ ID NO: 37886 - DNA, 366 bp, Glycine max
  Clone ID: LIB3056-012-Q1-N1-F5
caccgctccacccgcaaacaaacaaaacaaacattactctatctccaatctcccttctccgccgcgccactcatcggaaaattcaaaccaccgccggaggttatggacgctccggcaatcgctgctgatcttgatttcccaagcaacaaccatcgcttgtttaagagcaccaatcttcttatctggtagaaaccaaagcctaagcaaaagcgattttacttagcagagtttacaagttattctatgtttatcgctgcataaataatctgaaaataaaataaaaaaagaccagaaaagcatttatttattactatatagtagtattatttatcgttcttgtatctttttcatttagctaaaattagc

SEQ ID NO: 37887 - DNA, 385 bp, Glycine max
  Clone ID: LIB3056-012-Q1-N1-F6
cctgtttgtctttattccagccctgtgtatgtccgttgtgccactggatatatttagatgggtggttgcaggtgtggcagggttcatgtcagcaacatttgtggcactgaacctccgggcacatatcaaatcagcaggtgaaaggtggttcttgattgttgctggcatttttctgttgcagctggctctagctgtggtactaaagctttacctcttcactgtatcagtttaagaggaaactggacagtatggatgaaatatacagaatgaaggtatagctttttggcattgtaggttttcatggatacaatttgtagctgaagcatgattcacagattaaaccatcgtgtattcattcttttgttgcaatatagaggcgaattac

SEQ ID NO: 37888 - DNA, 389 bp, Glycine max
  Clone ID: LIB3056-012-Q1-N1-F8
ctttaactccattactggttttgtgtctctgaatagtgttgtgttttccttttaataatatcaaattggtagagcttctaaggcttctctatttcatccctgcagactgcagctctacattaattctttgtgattataactatcactttgtaccactaataatcccaaatcacaatgttgccatcaaatgtgtttgcgaaggattgtgattggagcttcatgagctaacatattcattgctttgctgaatctctctttgctattcctacttcataaacaccctcaaatcaagtatttataatatgaaattcatgatagcaatctgtttaattttcgtgtaccttctgccgattattttgtttactcatttccagcaccctgcaaacaga

SEQ ID NO: 37889 - DNA, 397 bp, Glycine max
  Clone ID: LIB3056-012-Q1-N1-F9
attttcctttcgtttcctttcattttccctcactttctcgctccccaaacgcccctctctctcctccaatggccgaccagctcaccgacgaccagatcgccgagttcaaggaggccttcagcctcttcgacaaggacggcgatggttgcattactaccaaggaacttgggactgttatgaggtcacttggtcaaaacccaactgaggcagaactgcaggatatgataaacgaggttgatgctgatgggcacggaaccatcgatttcccagaattcctcaacctgatggctcgcaggatgaaagacaccgactcagaggaggagcttaaggaggctttccgtgtgtttgacaaggatcagaatggtttcatctctgcagctgagcttcgccatgtcat

SEQ ID NO: 37890 - DNA, 375 bp, Glycine max
  Clone ID: LIB3056-012-Q1-N1-G1
gtgactgctgcaaccatacagttcaaggaaatgggtggaagcaggtggcctgctgaagcagtgaaaccaaatgaacagcctacagaaagaaagaaaggttttggtgattggatgaatcttattaaacctgccaatgaagagaaggatcattgggtaccagatgaagccgtctcaaaatgtacagcatgtggtactgattttggggcttttgttcgcaggcatcactgtaggaactgtggtgatattttctgtgacaaatgtacatatggtagaattgctctgactgctgatgagaatgctcagcctgtacgagtttgtgaccggtgcatggcggaagtgtctcagcggctgactagtgcaaaagagtcatcaagt

SEQ ID NO: 37891 - DNA, 417 bp, Glycine max
  Clone ID: LIB3056-012-Q1-N1-G10
ctcgagccgtttccatgctaatgaggataagccagtggtatttcatcagtcctttgttcaaccgaacactgcaacacagtatgcaagtttggttgcaccttcatttgatctaactggtcttggagttgctgaggatggacagaacatgattagtgaccttatgacaatctatgatacgaatgttgtaagaaacatgaacttaagttcctccaactgtgtagctgtagaaactgataacctgtctcatgccagcttacatcaacaagaaagctatttgcctaggtcaggaatggtgttggaagggaacttatttgcacgagaggaagggtcatttgaccggttcaaggacaccatgaacatgaacactcataccccttttgataccaaccatagcaacaattataatatgcatttgat

SEQ ID NO: 37892 - DNA, 415 bp, Glycine max
  Clone ID: LIB3056-012-Q1-N1-G12
cggctcgagccatccaccactttcataatggcactgttgaatcccctccagaagaacccttttaccctatggcctcacttgtgtatttccaattcacttttgctgctattacccttattttgttggctggctctgtcctcggccgaatgaacatcaaggcttggatggcttttgtgcctctttggttgatcttttcctacactgttggggcttttagtctttggggtggtggctttctctaccaatggggggttattgactattctggcggctatgtcatccacctttcttctggaatcgctggtttaactgctgcttactgggttggaccaaggttgaagagtgacagggagaggtttccaccaaacaacgtgctacttatgcttgctggtgctgggttgttgtggatggggtg

SEQ ID NO: 37893 - DNA, 58 bp, Glycine max
  Clone ID: LIB3056-012-Q1-N1-G2
actcgatctcactagtcgctttctctgctctcgtcccgcaggtattcctccaatctcc

SEQ ID NO: 37894 - DNA, 354 bp, Glycine max
  Clone ID: LIB3056-012-Q1-N1-G3
tgaacctgtgcttgtgctgacactatttttgagtccctctttcgctattttcgagcccgctccgttctgagctgtgttacggcaacaaaagtttgaagttttaattggcttaattgttagtattagcaaatgaggataaggatttatgcttggtaacttcactgggcaaaagatatacttattcacctttatttgtcttttaaacaattatcaaatactaatagctaatgaactcggaaataatccaaaagtccatattaccgatgggcaagaaccaaacgcacaaatgcggcatctagattgcgccgattcatttgttgtgacaacatattcacctaacatgataagtgaagc

SEQ ID NO: 37895 - DNA, 381 bp, Glycine max
  Clone ID: LIB3056-012-Q1-N1-G4
cttgggttatctctaaggtcctaaacaatcctctttcaaaaacataccgagaaaagtgtggaaatgacgacaccatcattggtagagtctctagttcttcaactccatgagatctcagctgtcaaatttggcaacttcaagctcaaatctggcatcttctcaccaatctacatagacctccgcctcatcatatcttacccttctctcctccaacagatctctcaaacccttatttcttcagtctcttccacttcctttgacctcgtatgcggtgtcccttacactgccttacccattgctacatgtgtctctcttgctcagaacattcccatggtcatgcgccgcaaagaaatcaaagattatggcactgctaaagctatt

SEQ ID NO: 37896 - DNA, 347 bp, Glycine max
  Clone ID: LIB3056-012-Q1-N1-G5
ctttctcttaagctctcgtagttaaatctgcgagccattagttgaagaaaaaaaaaaaaatacataacataacaaaaacactagggtttaagatgggttccaaaactcgctcttcccttgctcttttcctaacagtcaacattctcttctttgcccttgtctctgcctgcgggacatgccctagcccaacgccaaggcataagcacaagcctgttaagccaagcccttcaggtggctcaagtggctcaggtggttcaggaggttcaggtggttcaggaggttctggtggctcaagtggttcaggaggttctggtggctcaagtggttcatgaggttctggtggttct

SEQ ID NO: 37897 - DNA, 368 bp, Glycine max
  Clone ID: LIB3056-012-Q1-N1-G6
aacacgtttagtgcactgcgagctgcggtcggcgaggcccgcggttcgggcgagggaaccggccggtccggttcaggttacgatcccgaaacccaaagcggcggaggcggaaggcgcgaacatcgttttgcagccgcggttgtgcactctgagatcctacggttcggatcgagcgggggttctgatcaagacccgcaaggagggtgacgatgatgacgtgtcccccttcttcgccgctctttccgactatattgagagctctaagaaaagtcatgattttgagatcatctctggtcgtctagctatgatggtgtttgcagcgacggtgacaatggaaatggtgacaggaaactctatgttcagaaaga

SEQ ID NO: 37898 - DNA, 377 bp, Glycine max
  Clone ID: LIB3056-012-Q1-N1-G7
cacatactcaccatggaggctaagttggccaccaccataatacttattttctccgtaatttggcttatgagggtgaatggcatagacccttgtgcctctcaagcggataattccgacctgaacgtgattcccatctacagcaaatgctcaccgttcaaaccaccaaagtcagactcatcgtgggacaacagaattataaacatggcctcaaaagacccactccgattcaaatacttgtccaccttagtgggccaaaagaccgtgtccacggccccaatcgcttcgggccagaccttcaacatcggcaactacgtcgtcagggtcaaattgggaacccctggtcaacttttgttcatggtcctcgacaccagcaccga

SEQ ID NO: 37899 - DNA, 376 bp, Glycine max
  Clone ID: LIB3056-012-Q1-N1-G8
cgggccatcaagggctatgtggatatgttaaacaggggatctcagaatgtgaaagaaaatttgaatcatgtcatgatgaagcttccggaaatctacttgttggactgtacattgaatgactgtgatttgatactgaagtctgtagatcagagggaagtttatcctgctctgatattatttccagcagaaaagaagcagcctcttctttatgaaggagatatggctgtaattgacgttatgaagtttgtggctgagcacggaagtaacttgcatcaacttataagagacaaagtggcagttttgtgggtatctgaaggagcattcaagaatcagaacttacatgatactttgcaaactaatatccacccggaatcac

SEQ ID NO: 37900 - DNA, 415 bp, Glycine max
  Clone ID: LIB3056-012-Q1-N1-G9
ggagataaaaaagtggaggaattgttgttgctggatgtgatgccacttagtcttggatttgagggtgctggtggtgttatgtcagtgttgatccccaagaacaccatgatccccaccaagaaggagaggatttgttctaccttctatgacaatcagaaatcttttaatgtcaaagtgttcgagggagaacgagttaagacaaaggataacttctttctcggcaagtttgtcctcaaagggttcgatccattaccaaagggagtgccacaaatcaacgttatctttgatgtggatgctgatggcattgtggaagtcaccgcagaagataaagccacaagaatagaaaagaagatcacaatcaacaacaagcacggaaggctgaacccggaagagataagaagaatggtgagagact

SEQ ID NO: 37901 - DNA, 218 bp, Glycine max
  Clone ID: LIB3056-012-Q1-N1-H1
gggcaacgttggagacagttacccctattccctatgatgtcgtcaatgacctcaagggaggttattagtttcattctcgttgttggtctgcgtagttttttgtttggggattattagtccttttttgtgttggaagagaaacaattcagactattaaaatatttttgttgttttatttgatgttctaaatacatggatatgtttttgtttcgctcgtc

SEQ ID NO: 37902 - DNA, 389 bp, Glycine max
  unsure (1)..(389): unsure at all n locations
  Clone ID: LIB3056-012-Q1-N1-H10
ttttgtgttagtgagagaaagttctctctgcttctgtctgttagactcaaaaccctattgcgtgctttgcaatcgaccccgattatggccaacagtaacctgcctcgaagaatcatcaaggaaacgcagcgtttgctcagtgagccagcacctggaattagtgcgtacccatcggaagacaatatgcggcatttcaatgtgatgatccttggcccaactcagtcgccttatgaaaggggagatttcaaggntggaattatttttgccagaagaatatccaatggctgctgcaaaggttaggtttctgacaaaaatatatcatccaaacattgataagcttggcaggatatgtcttgacattctgaaagataagtggagtcctgcccttc

SEQ ID NO: 37903 - DNA, 238 bp, Glycine max
  Clone ID: LIB3056-012-Q1-N1-H11
ctcgacgccatttctggtttgcaggggtttagtgagttatatgagtgggtgcttcatcttcaatcttactgacacatagattgggaagaaggtggttggttggtgtggcaaagaagacagcgccatcaattgcaaggcaatcaagttgcttcaatttttagatcatacttagttaattttttaattttgcatttatctctgtctgaagaattgaaatatgttatttttagaggtatta

SEQ ID NO: 37904 - DNA, 407 bp, Glycine max
  Clone ID: LIB3056-012-Q1-N1-H12
acttcatgtgcttttttgtttttgttttattaactaacttgggtctttttggaagagacggtttgaatttctgtggggagagatattcatatttagcatctgatcgagtcttgaacaatatgattgtcttggatttgtcttccaaggaagatacttgtgggaaataaaaataactaaccaactacaaattatatatgtgttctcacatttttttttcgtagagattggatcgatctggaactgggagtcgccagaaaagaactccgtctatttctcagggggctaggatcactgaacaccatgttggccctttggattctcttagcaatgtcagtctcatggagattgaaactagatcccgagcacagacccctgcttcatctgctgttgcagttaaagcacgttta

SEQ ID NO: 37905 - DNA, 401 bp, Glycine max
  Clone ID: LIB3056-012-Q1-N1-H2
tgaatttgtaaacgcatccaggaacggcgtcgtattggtgctacagctgcacccgtttcgtgcacctctctgtccaaagcaccatcgcctgcccccactgtcaaagcggtttcgtcgaagagatccgtgccggctccggagccgaagcctcgcctcgccatcgactaagtcctttccccgatgatcctatattgctccggcgacagggcttccgtcgccgtaggagagaagcttccggcaaccgctccccgttcaaccccgttatcgtcctccgcggccccggcgactacttcgtcgtctccgaccactactgcgtcagcacgttcgagctcttctacgacgactgcgactgcaccgggcttcgacctattgcttccaccatgtccgaattgctcctcggg

SEQ ID NO: 37906 - DNA, 378 bp, Glycine max
  Clone ID: LIB3056-012-Q1-N1-H3
ttcttcttcttcttcttcttcgtcggtgggggttgggtttcaagatccaaacctcttcccaatgaagaacctctctttcttcctcatcaccaccctattcgccgccttctccgccgtcagatctgatccctcagatcaccgctacaaagaaggcgactccgtccctctctacgccaacaaagttggccccttccacaaccctagcgaaacctaccgttacttcgaccttcccttctgtgaaccaggtgatttgaaagagaagaaggaggcgctcggggaggtgctgaatggggaccgtttggttagcgcgccatacaagctggagttccagcgcgacaaggagtcgatttccgtgtgcaataggaagctcttcaaaca

SEQ ID NO: 37907 - DNA, 321 bp, Glycine max
  unsure (1)..(321): unsure at all n locations
  Clone ID: LIB3056-012-Q1-N1-H4
gcacctctcacttctcgtgggtctcagcaatatgtctcccttactgtcccagagctgactcagcanatgtgggatgccaaaaatatgatgtgtgctgctgatccccgacacggccgatacttgactgcatctgctatgttcaggggaaagatgagcaccaaagaggttgatgaacaaatgatcaatgtgcagaacaaaaactcgtcatactttgttgaatggattcccaacaatgtgaagtccagcgtttgtgatattccacccaggaatttgaagatgtcatccacatttattggcaactcaacatcgattcaagagatg

SEQ ID NO: 37908 - DNA, 363 bp, Glycine max
  Clone ID: LIB3056-012-Q1-N1-H5
ggaatattttgcaatcttgattgaatatgagagtggtgatggtgacctagacaaagttgaactcagggaagcacatgcttgcgtccaatggtactgcatgcagcgatcatggggtgcagtttggaaacttgacaaagggtcagcacttgtggcaccattctccatcaagctaaccactctcaaatctggcaagaccattgtggctaacaatgtgatccctgctgggtggattattgatcagacttatagatcaattgtcaatttttaattccaataatcgaagttgtccatttgtttggatctatcatcagcttgtggttgtcctacttaatataatatatgaataagaagataattaatctt

SEQ ID NO: 37909 - DNA, 364 bp, Glycine max
  Clone ID: LIB3056-012-Q1-N1-H6
ggcgagtacattgaggaagtttatgcagcatatgaacaacacaagttggagacaatggtgattatgttaatgaccaatgtgcatgatatatattacaacttaacagcataattgtttttgtcttgtataatattcatccatcaattgtttattgggtgattagttttataagaatccatgaattttttgggagcatggcctgtgtggtttgaccgagccagtctgggctcccatataatttgttgagggacccattaaaatggtattctgtaggaaaaagcactggaaaggccctaatgggctgataacctgaccatggtcccctcttctgttttcattaagtgttttaaatatatgatgtctg

SEQ ID NO: 37910 - DNA, 362 bp, Glycine max
  Clone ID: LIB3056-012-Q1-N1-H9
ggtactgatagaggcagccaatacggaccgctgctcaggctgcagactacagagagccaccgacggcgcctctcttcgaaccgggagagttgtcatcggggtccttgtatagggctggcatagcagaggccgtggccactttcttgctcctctacatcacacagctgactgagatgggtgtgctcaaatctacgagcacgtgtagcactgtgggtatccaaggcatagggtggggattttggaggaatgatctttgctctcggatattccactgctggcatctaatggtgacatattaacccagctacgacgcttgggctgatcatggcacgctagctctctctgacgagggcgattcttta

SEQ ID NO: 37911 - DNA, 438 bp, Glycine max
  unsure (1)..(438): unsure at all n locations
  Clone ID: LIB3056-013-Q1-N1-A1
aaaaaaccaattcaagatgaagataaagtctcatttttccgtctccctaatgtttcttataggcatagccattagccacacacatgtttctttagcagaatgtgacaatgtgaaggactattgccctacaattcctccccaaaagcaaaccatattcctcaatggcttcccctgcgagaacccaaataacacaattgcacaatgatttcaagagcatggaactaagcaagccaggttcaagaaacaagttaaggtcattagttaaaattggtacagcttccaagtttccggggctcaacgcactcggccttgcgattggtagaagtgacattgaagtggatggccttgtgaacctncacaatcatccaagagccactgagatgatctatgtcagccaaggtgatgtagtcgctgcgtttcttgacactcggaaccagc

SEQ ID NO: 37912 - DNA, 422 bp, Glycine max
  unsure (1)..(422): unsure at all n locations
  Clone ID: LIB3056-013-Q1-N1-A10
cttcgaaccgcttttacgttggtttattcggtttgtgttgctctgctatgctgctcctccctgtttgatttcaagggtaaaggataaagggatgatctacacagcaattgacacgttctacctcacagatgagcagctagcaaactcaccttctagaaaagatggcatagatgaagccactgagaccacccttagaatctatggttgtgatctcatccaagaaagtggcattttgctcagattgccacaagcagtcatggctactgggcaggttctatttcatcgattctattgtacgaagtcatttgcacggttcaatgtcaagaaagttgctgccagctgtgtatggtcggcttcaaaactggaggaaaaccctagaanagccagacaagtaatcattgtgtgtcacaggatggaatgca

SEQ ID NO: 37913 - DNA, 402 bp, Glycine max
  Clone ID: LIB3056-013-Q1-N1-A11
ttcaagaacaactacctcatcgtctattccctcatgatggctggagattggctacaaggtccatatgtctactacctttacagtacatatggatatgggaagggagacataggacaactcttcattgctggttttgggtcttccatgctctttggaacaattgtcggatctctagctgacaaacaaggccggaagagggcttgtgtgacttactgcataacctacattttgagttgcatcaccaagcattctcctcattacaaagtcctgatgttgggccgtattttgggaggtattgccacttcacttctgttttcagcatttgaatcgtggcttgttgccgagcacttcaagaggggctttgatcaacaatggctatcattaacattctcaaaagctata

SEQ ID NO: 37914 - DNA, 385 bp, Glycine max
  unsure (1)..(385): unsure at all n locations
  Clone ID: LIB3056-013-Q1-N1-A12
cttaatttgttctcttcagccatggcgatggtgcaagatgaacgatgcgttcagaaaagctactggattgaacatacgacggacttgtccgtagagtcaatgatgctcgattccaacgcctctgatctcgacaaggaggagagacccgaagttttgtccctactaccaccatatgaaggaaaatcagttgtagaacttggagcaggtattggaagattcacagttgaattggccaagaaagctggccagttacttgctgtggatttcattgagagtgctataaaagaggaatgaaagcattaatggacaccacaagaatgtcaagttcaatggtgctgatgtcacttctccaaacttggatatttctgaaagatcggntgatctg

SEQ ID NO: 37915 - DNA, 254 bp, Glycine max
  Clone ID: LIB3056-013-Q1-N1-A2
ccgggttggattgggatctaaaaccgtggttttggcttaatggaacctactaaatggttgccggccaaaaactacgactacttggtcaagctggtcctcatgggagactccggcgtcggcaggtccaaccttttgtcccgattcacccgaaacgagttcagcttggagaccaattccaccatcggcgtcgaattcgccactctgagtgtcccggttgatagcaagctcgtcaaggcacaaatctgggacactgc

SEQ ID NO: 37916 - DNA, 442 bp, Glycine max
  Clone ID: LIB3056-013-Q1-N1-A3
atttcatcgtgcattcaatggccaccacagcagctctatccggaaccatggtgagcacctccttcatgaggaggcaacctatgaccaccacaagcctaaagacattccccaacgttggtgaagctctttttggtctgaaaagtggacgaggtggtcgtgtcacttgcatggcctcgtacaaggtgaagctcataaccccagaaggagaagtggagtttgaatgcccagatgatgttttcattgttgacaaggcagaggacgaaggcattgaacttccctactcgtgcaaggccggttcttgcgtttcctgtgttggcaaaattgtggaaagtaacgtggaccagtcagatggtagcttccttgatgatgagcaaatagatagtggctgggttctcacctgtgttgctcaacctaggtcagacgttgtcattgagacacacaa

SEQ ID NO: 37917 - DNA, 388 bp, Glycine max
  Clone ID: LIB3056-013-Q1-N1-A5
attctctctgtgtatttccctaactctcccttcaagatgcagatcttcgtcaagaccctcaacggccagaccatcacccttgaggtggaaagctctgacaccatcgacaacgtcaaggccaagatccaggacaaggaaggaatccccccggaccagcaacgtctcattttcgccggaaagcaacttgaggacggccgtacccttgctgactaccacattcaaaaggagaggactctttaacttgtgcttcggtctccgtggtgcatgcagatcttcgttaagacactcaccggcaagaccataaccctagaagttgaaagctccgacaccatcgataacgtcaaggccaagatccaggacaaggagggtatccccccggaccagcaac

SEQ ID NO: 37918 - DNA, 412 bp, Glycine max
  Clone ID: LIB3056-013-Q1-N1-A6
attccataccttaataacctttcttttaactttttgcttaccgtttcgagggaaaaatatggcggaggacacagatgccaggcaccgcgcttctgcgccaacaattgccggttctttggcagccctgccacgcagaatatgtgctccaagtgctaccgcgatttccagctcaaggagcagcaatcttccaacgccaagatgtttctcaatcaatcgctggttccttcaccgccaccggcggtgatttctcagccgtcgtcttcttcttcggccgcggtagatccgtcatcggcggtggttgatgacgcgccaagccagtccgaagaagttaaagcgccggaacagaaccggtgtatgacgttcaagcggcgcgttgggctcacagggttcaagtgtcggtgcgggatgatgc

SEQ ID NO: 37919 - DNA, 245 bp, Glycine max
  Clone ID: LIB3056-013-Q1-N1-A7
ctagggttcccatgcctaaagccttctctgcttctcctgcgacgaccgtctccaccgccacttctgacaacgcttctcctgctcctcaaagcgcattgtctgatgctgctgttgcccctgacgcttctcagaatgacccagatgccgtactccctgcacggtataatgcatcgattcatgaagctctatcagcactgcacgatagtgatggatccgacatgaatgccatcattaaattcatggag

SEQ ID NO: 37920 - DNA, 390 bp, Glycine max
  Clone ID: LIB3056-013-Q1-N1-A9
cagcacaaagcgggttactgtctgttcaagctaccatctctctctctctttcttagtgcctccttgccagaagttaaaatggcccaagaaactttcctattcacatctgaatcagtgaacgaggggcaccctgacaagctctgtgaccagatctccgatgctgtgctcgatgcatgcttggagcaggaccctgacagcaaggttgcctgtgaaacctgcaccaagaccaacatggtgatggttttcggagagatcacaaccaaggccaacgtggactatgagaagattgtgcgtgacacatgcaggaacattggttttgtctctgatgatgttgtcttgatgctgacaactgcaaggtcctcgtcaacattgagcaacagagtcctgata

SEQ ID NO: 37921 - DNA, 440 bp, Glycine max
  Clone ID: LIB3056-013-Q1-N1-B1
atgaactccacttacaatgtgacatcaagtacattgcgtgtgatgtcagatgagtttcgaaggggaagtgaaatatgtgaggctatggaggctagcaaggctgattgggatactctttttgagccttatccctttttttgaatcatacaagaattatctacagatagatataacagcagagaatgcagatgaccttagacaatggaaaggttgggttgagtctcgtctccgccagttgacattgaagattgagaggcacacttatggtatgcttcaatgtcatccacatcctggtgaattctcagacaattctagaccctttcaccactgttactttatgggtctgcagcgtaagcaaggagttccagtgaatgaaggtgaacagtttgatataaggctaactgttgaagaatttaaacattctgtcaatgcttacactc

SEQ ID NO: 37922 - DNA, 387 bp, Glycine max
  Clone ID: LIB3056-013-Q1-N1-B10
atgattttggttatttgcatagttgttccctccctcagaatttgcgtagcaaatgattctataaacgtgctccagtctatgagtgatggggagagattggtgtcaaaaggtggaaattttgaacttgggtttttcagcccaggtagttcccagaaacgttatgtgggaatttggtacaagaatatcccaactcagacagtgggttgggttgctaatggggcaaaccccatcaatggttccctaagcatcttaacaactaacaccacaagcaatcttgttctcacacaaaatggttctattgggtggtacaccaacaactctcacaaacaagcacagaatccggtggtggagctcttggacagtggcaatcttgtcataagaaatgat

SEQ ID NO: 37923 - DNA, 422 bp, Glycine max
  Clone ID: LIB3056-013-Q1-N1-B11
gagacattctcggtggatggaaaggttttggttttggacgaatccaacttcgattccgccatagcctccttcgatcacatcttggttgacttttacgctccctggtgtggccactgcaagcgtctctctcccgagttagatgcagccgcccctgtacttgcaaccttgaaggaacccataatcatagcaaaagtagatgcagacaagcatacccgccttgcgaaaaaatatgatgttgatgcatatccgaccattttgctgtttaatcatggcgtccccacagaataccgtggaccaaggaaggcagatttacttgttcgttatctgaagaaattttctgcttctgatgtttccattctggattcagattctgctgtgaatatgttcgttgaagaagcaggcacttttttcccgatttatat

SEQ ID NO: 37924 - DNA, 396 bp, Glycine max
  Clone ID: LIB3056-013-Q1-N1-B12
tgatgacaatgctgaatgatcggtaatctgccatcttttagtccactataaagtatagctattgtaatgtcaatcacccaaaattgctgaagcgtaagtggtcacgagcgtttcgcttcatataccagaagaaattgactaaataatgtgtatgcccatgtggatattgataatagtcacttattctctgcctactatgtctatccttatttcgcccatttcttaggcacaaattaggcctcatatctgctttccattttttcggtcttggtaagggttggaataagtgggggtaccgctgtaaaattctgctgataaacctatgtacaaatagaaattctgaaaccggctcatcaaggaagtattcttaacggattgattaaccctatgggaaaa

SEQ ID NO: 37925 - DNA, 436 bp, Glycine max
  Clone ID: LIB3056-013-Q1-N1-B2
caagtctttccttttctatttaattcctaaaatcccattcttcttcgctcattcctctgcactgccatcatccccaacttcctcacaaggttacaaggactaaagagttgtgccaccatgtcggacgatgaaagggaggagaaagagttggatctctcttctgccgaagttgtcaccaaatacaaaaccgctgctgagatcgttaacaaggccttgaagctagttatttcagaatgtaaaccaaaggcgaagattgtggatatttgtgagaaaggggattcatacattagagagcaaactggaaatgtgtacaagaatgtgaagaggaagattgagagaggtgttgctttcccaacatgtttatcaatcaacaacgttgtctgccatttctctccactagccagtgatgaggccgtgttggaagaaggtgatatat

SEQ ID NO: 37926 - DNA, 365 bp, Glycine max
  unsure (1)..(365): unsure at all n locations
  Clone ID: LIB3056-013-Q1-N1-B4
ggcatggtcaacgtccaagttgaaaccggtcaatcatgggtggcacttgaccaaccttaaatcctggatccatttagtggcagtggttgccgctggggttactcccgcataactcacttgttactggaacctncaacagcgccatggcttctgatgaccgtagcggagcttcttctctcggtgctctggttcttcaaccaagccttccggtggcggccggtgtcgcggagcgtcatgacggagaagctgccgagggatgagaagctgcnncgggcttgacatcttcgtgtgcacgctggattccgagaaggaagcccaccgtggaggtcatggacaccatcatcttcgcggtggccatggattac

SEQ ID NO: 37927 - DNA, 383 bp, Glycine max
  Clone ID: LIB3056-013-Q1-N1-B5
gttctgcaaagggaagatgacctgaatgaaattgttcagcttgtgggcaaggatgctttagctgaaggagataagatcaccttagaaactgcaaagcttttgagagaggattatcttgctcaaaatgcctttacaccatatgacaaattctgccccttctacaagtctgtttggatgatgcgcaacattatccatttctacaatttggcaaatcaagcagtagagaggggagctggttcaaatggtcagaagatatcttacacccttatcaagcatcgtatgggagatctgttctaccgattagtgtctcagaaatttgaggatccagcagaaagggaagctgctttggttgcgaaatttcagaagttacatgaggacctgac

SEQ ID NO: 37928 - DNA, 260 bp, Glycine max
  Clone ID: LIB3056-013-Q1-N1-B6
gtgagatttgcgaatctgagaaatggcggattcttctcgggaggagaacgtttacatggcgaaattggcggagcaggccgagcgttacgaggagatggttgagttcatggagaaggttgcaaagactgtggaggttgaggagttgactgtggaggagaggaatctcctctctgtggcttacaagaacgtgattggtgcgaggagggcttcgtggaggatcatatcctgcattgagcataaggaggagagcaggggcaatg

SEQ ID NO: 37929 - DNA, 379 bp, Glycine max
  Clone ID: LIB3056-013-Q1-N1-B7
ttgaatctcacaattctctaaaagagatctttttctgctctttgaagaaagaagggtctttgcttgattttggagatgtctctgctctcagatctcatcaaccttaacctctccgataccaccgagaaggtgaacccagagtacatatggatcggtggatcaggaatggacctgaggagcaaagcacggactctcccaggaccagttagcgacccttcagagcttcccaagtggaactatgatggttccagcacaggtcaagctcctggtgaagacagtgaagtgattctatacccacaagccattttcagggatccattcagaaggggtaacaatatcttggttatctgtgatgcctacactcctgctggagaaccta

SEQ ID NO: 37930 - DNA, 400 bp, Glycine max
  unsure (1)..(400): unsure at all n locations
  Clone ID: LIB3056-013-Q1-N1-C1
aatcaattaaagtgagggttttagctttgagcctaaagcctctgcttctcctccttctccttttccttcttctccttttccttgtatagtaccgatgttgacactcacttctccttccatggccttatccatggattctcttcccaaattgcgccacccttccccatttcccactcccttatcctcttccatctccttccgatctttgccgccacctcactttccctcttcctcctcctcctcgtttaggttacactccatcagaccctncttnccaaaaccacccctcgtttcgcaccccctccntccccctctccttcaaccctaacctncttcctctcccccgtcgtcgaaaccacctgcatcgtcatcgccgccgctgccttattcttcatgcgct

SEQ ID NO: 37931 - DNA, 341 bp, Glycine max
  Clone ID: LIB3056-013-Q1-N1-C10
catttccaaaccattctttgagactctgtcctcactactcccttagttcagctacaatggaagtaagtctttttctcatgtcttcaacattcattaactcatcttcttaattgatatatccttgatccttatcagtcttggttgttagtattatgttacaatgttaacagggttggggctttgaatcacgacttcttctctcttcgcccatagagagcttctaaaattttcaaatcaatttaattgtccataatcttaagtcacatagtcttcctaatgctagaactgacttatgtaatggtgaaactaataatcaattaattcgatgaagctattatcaa

SEQ ID NO: 37932 - DNA, 411 bp, Glycine max
  unsure (1)..(411): unsure at all n locations
  Clone ID: LIB3056-013-Q1-N1-C11
ttttcgttcaggtgggtgatccaatctctgaccacaattgttgggaaaggcctgaggacatggacacaagcaggacagtgtatgctgttgatgcaccaaacccagcttcagatgtagctggtgaaactgctgcggcactagctgctgcatcaatggcttttcgttcatcggatcctggttattcagacactttgcttcgaaatgctgctaaggcctntcaatntgcagatacctataggggtgcctacagtgacaatgctgatgttaggaatggtgtttgcccatattattgtgacttcgatggttatcaagacgaattgttatggggagccgcatggctaaggaaggccactcaggatgaaaatttcctcaactacattcaaagcaatggtaaaacccttggtgctgaag

SEQ ID NO: 37933 - DNA, 363 bp, Glycine max
  unsure (1)..(363): unsure at all n locations
  Clone ID: LIB3056-013-Q1-N1-C12
aaaaaataaaaaatggggataggggtactatttgttgggtttttcttgctatcttgtgttgtgtgtgtgaagggtgtggagccaaaagcctcacccacttgtacatttccggcagtttacaactttggggactcaaactcagacactggaggcatatcagcttcatttgtgccaattcctgcaccttatggcgagggcttctttcacaagccttctggaagggactgtgatggccgtctcattgtagatttcatagctgagaagctaaacttgccatacttaagtgcttatctgaattcccttggaaccaattaccggcatggggcaaattttgccactgngggatccaccattaggaagcag

SEQ ID NO: 37934 - DNA, 411 bp, Glycine max
  Clone ID: LIB3056-013-Q1-N1-C2
gcctatcctctgaaccttctctctcttacatacttttcttcgtagtgctaaattttctattcatcttacattcttacttttctcaattctttttcttttctcttctctcttcttcaacttcattcaaaactttcacctttctctctcttcacaaacggtgccggaaaagtccattccttttctcaattccccggcaaaacaaatgcgacccactttctagaacctcgccgtgtgccggaaagttcactcctttctcacttttccgcagcaatgtcaatcttcgacggagctttcatgaacacgcaactctacaagcacacttcgatcttccgcctacgtctctgggtcgtgatcggaattctcatcggagtcttcatcgtcttcacgctcttcctcctctccctctgcctt

SEQ ID NO: 37935 - DNA, 211 bp, Glycine max
  unsure (1)..(211): unsure at all n locations
  Clone ID: LIB3056-013-Q1-N1-C3
ccaaacacattacaacacagcataccgtgtttcattttctctcacacacaaacctncttcgttttcatttacttctcaggaggtataactactatttttcgctttttttttaaaaaaaaaattgattaaatcttttgccatgggaacccaaattttgcgacctcaggactgcttggtagaacgaatcagggctccttcggctgacttttcc

SEQ ID NO: 37936 - DNA, 122 bp, Glycine max
  Clone ID: LIB3056-013-Q1-N1-C4
gctgtccattctttgccaccctcaatctctgtcctttggcgaacttcattcattcattaaccttttcgacaaccctctttgaaatttgaattaccttattaggatggcccaccaaacccaaa

SEQ ID NO: 37937 - DNA, 412 bp, Glycine max
  unsure (1)..(412): unsure at all n locations
  Clone ID: LIB3056-013-Q1-N1-C5
cggctcgaggcctcatctaaatctagagcccccaaaaacggaactacattgcactttcagatattttggtcggtactctcttttttttttgcgacaccccaatttcaaaaacacaaaccagtggccttaatctggactctgaaactcaaccttcnttcttctcttctctctcgtgtttaactgttcanggcatcctagtttctctcagttagccaaaatggtagctgcaaatgagaaggtcgtcgctgtgatcatggttggaggacccactaaaggtactagattccgaccattgtcattcaacgtacccaagccactttttccattagcaggacaacccatggttcatcatccaattttctgcttgtaaaaggattcctaatttggctcagatttatctgcttggtttcta

SEQ ID NO: 37938 - DNA, 302 bp, Glycine max
  Clone ID: LIB3056-013-Q1-N1-C6
gggttcattgcactttcagatattttgatcgttactctctgtctctctgcgacaccccaatttccaaaaacacaaacaagtggactcattctgaactctgaaactcaaccttctttcttctcttctctctcgtgtttaactgttcagggcatcctagtttctctcagttagccaaaatggtagctgcaaatgagagggtcgtcgctgtgatcatggttggaggacccactaaaggtacttgattccgaccattgtcattcaacggacccaaagcacttttttcaattgccaggacaaccaag

SEQ ID NO: 37939 - DNA, 386 bp, Glycine max
  unsure (1)..(386): unsure at all n locations
  Clone ID: LIB3056-013-Q1-N1-C7
cattctcctcggagctttgctcgttattcttctttttctggtctttttttcgtttcgttcggaaaacgcgtaggctgtgccgtcgcttttagtgggtggatgggaacgacgtcgtgtgagtacgtgagctgggaagaggtggtttatgtccaacgacaaggagaggagggaggttcattacttgcttaaacgacgaggcggtggctcggatctggccgttttgggaaaagagaagagcctcaaacacatgtcgtatcgcttngccattcgaaacacgtcgtcgtttcggccttactttaagctcaggtcgcgcagagaggttggtaattggttggattcaagtgtttcagattcgtcttctggggatgcggatatggtgggaaaac

SEQ ID NO: 37940 - DNA, 394 bp, Glycine max
  Clone ID: LIB3056-013-Q1-N1-C8
gccaaatattaatgcagctagctagcatagtaattcacgagcatgaagaaggtaagtaatttgttgcatacgttgaaaccagacatcttaatggtgtttgtgcagattgcatttgctgctgtgaatgtgatgtacaagctggccataaatgatggaatgagcatgagggtagcttctgcatatcgccttgcttttgcttcggctttcactgtccctgtggctctcgtctttgataggaagaagagaccaaagattacttggagggtgcttttattggcatttctgtgtggattggtttggggaagtttatttagtaacctttacctcgaagccatggcttttacgtcagcaacgtttatgttggccatggtcaaccttatccctggcattacct

SEQ ID NO: 37941 - DNA, 405 bp, Glycine max
  Clone ID: LIB3056-013-Q1-N1-C9
tcggaagaaaccctagccactctcccggcgtcacgatgcagatcttcgtgaaaaccctaacgggtaaaacgatcacgttggaggtggagtcttcggacaccatcgacaacgtgaaggccaagatccaggacaaggaaggcatccctccggaccagcagcgcctcatcttcgccgggaagcagctggaggacggccgcaccctcgccgactacaacatccagaaggagtccacgcttcacctcgtcctccgcctccgtggcggcgccaagaagcgcaagaagaagacctacaccaagcccaagaagatcaagcacaagcacaagaaggtcaagctcggcattcttcagttctacaaggtcgacgattctggaaaagtccagaggctccgccaggagtgccccaacg

SEQ ID NO: 37942 - DNA, 367 bp, Glycine max
  Clone ID: LIB3056-013-Q1-N1-D10
tctgaaccaacttcactgcacaacacaactacacaagagggtttcaactatctactcctcttcttcacactctctgtgtgggataaagcaatctcaatctcttcttcataatggaaataagtattgcaaggtctcatctcgaaacacagggaatattcttttcaaatatttcaagaacaataggatgggaaagcattaggaaacttccatgtaatgtggctgcccagggttcaagacgggattttcacagattggcctcttcctgtcaagcttttactgcagtgtatcctagaaggtcttttatctgtagagcaaattctatgccaattagtttacaggaatctgcatcatatggagataattctat

SEQ ID NO: 37943 - DNA, 417 bp, Glycine max
  unsure (1)..(417): unsure at all n locations
  Clone ID: LIB3056-013-Q1-N1-D12
acggccgctacctcactgcctcagccatgtttagaggaaagatgagcaccaaggaggtcgatgaacaaatgatcaatgtgcagaacaagaactcctcatactttgtggaatggattccccacaatgtgaaatccacagtctgtgacattcccccaaccggcttgaagatggcttcaacattcattggcaactctacctccattcaggagatgttccgtagagtgagtgagcaattcactgctatgttcaggaggaaggccttcttgcattggtataccggggaaggcatggacgagatggagttcactgaggctgagagcaacatgaacgatcttgtgtcagagtatcaacagtaccaggatgccactgctgatgaggatgagtatgangaggaaagagaagaagaggagtatggcc

SEQ ID NO: 37944 - DNA, 415 bp, Glycine max
  Clone ID: LIB3056-013-Q1-N1-D2
ctcgagccgaatcggctcgaggttctccgtcaggtcagctacgtctccggctatgggacccacacgcggtcccgcggcctggctcctcgttttggggtgaggatggggatgggttctggtttctgtgacgaggggcatttgcggtattaccaggacaccaaaaaggttctcaccccaaagaagaagttgaagctgctcaagggtttctccaaattagggcttgcatcggatcccgagaaactcgccatgttctatgatcttcaacaaaacctcacctcggatgctggagatgtattactgagagagttagaagcagcaagagccaaagagaaaggagtggaaaaggaaagggaacaagagaggaagccaaactcaaagctgccaagatgaattgtgaatcttcttcatcttcatc

SEQ ID NO: 37945 - DNA, 417 bp, Glycine max
  Clone ID: LIB3056-013-Q1-N1-D3
ggaaaatggcattgttccgtgtgaatgtcaagcgttggattgtaacctatgctatcctttacgtttgtgtattcgggaaaaactttggaaatgctgatgaggatgagtcagaggcacagacaggtggtggtggattcggggttgtggggggtggttttggcggtggctggggccggagttggcagtggtggtgggttcggagccggtggtggtactggtggtttttgagcccgtggtggtgggtatgggtgtggtgacccagctcaaattgtctccaaagccttgctctgtttcaatgataaagatatttatcgaagctgtgaaaagacgtgtggattgaacgagaatggaaacctgaacgtgcccgcagagtaaactgttacattctgcgaaggaccatgtctctaggagacaaac

SEQ ID NO: 37946 - DNA, 390 bp, Glycine max
  unsure (1)..(390): unsure at all n locations
  Clone ID: LIB3056-013-Q1-N1-D4
gatcatcttgtttgtggtgctcttcactgtgaagccgtgggaaaatagcagtagtggcggcaatgggggtggtcagcctgcaccagctcaaacacctncatcaccttcacctcctgttaatgcttaaccttgggggactatgagtctatatttcacgaagcatattggtttcatttattttgatttgaagattgagcttttatattttgggatgcagcacgggtgattggcttatgatttggtaggaaatctgttgggttgaccagcagtgtcatttcaatccatggaaaggttggatgattaatctgagtttgtaatctgaaggaagtgaatggctgattgntctggtgaagtaagttcttggagatcattattttgagcatcatattc

SEQ ID NO: 37947 - DNA, 402 bp, Glycine max
  Clone ID: LIB3056-013-Q1-N1-D5
tttgaagttgcttcatgcatgagatactgtagccggttattgcggaatatgcctatgacacctgactctgcattgctttatctggagcttccttctagtgtcttaatggctgatgcaatccaaccattaactgatgctgcgaaaccagtatcttgctggtcgatacaaggatataaccaagttccaagaagaagttattgcctttgcccctagctggagtagaggcaatactgtctagtgatgatctccaggtcgcatcagaagatgctgtatatgattttgtgttgaaatggtctcgacagcagtacactaaactggaagacaggcgagaagtcctgggtacccggcttgcacaattaattcgctttccttacatgacctgccgaaagcttaagaaggtct

SEQ ID NO: 37948 - DNA, 462 bp, Glycine max
  Clone ID: LIB3056-013-Q1-N1-D6
agagctatgacgtcgcatggccgccttccttaacctcggatttcggttcgggctggaggacctttttaccgaaggtccaaacctggtccagggtggaacccgcttcttcctcctcttccgccgccgccaacgccatggggtgacgttcaaatccacaggaccaaactctgcatcatcggaagcggtccccttcgcccacacagccgccgtctacgccgctcgagccgagctgaagccgatcctcttcgagggctggatggccaacgacatcgtccccggcggccagcttaccaacaacaccgacgtccagaactttcccgggttccccgacggcattcttggccgcgagctcatggaacgcttcccgaaccagtcgcttcgcttcggcaccgagatccacaccgagaccgtctccaaggtcgatttctcgaaccgtcctttcagggttttcaccgattcccg

SEQ ID NO: 37949 - DNA, 419 bp, Glycine max
  Clone ID: LIB3056-013-Q1-N1-D7
cagagagaaagtggaatccccaatcttgtaacggaactttgtttcttatcagttccatagctagctgtgtggagacgacaactgccacccattccaacatacagagaggctatttactaattactgttcctcgtgtgaacaaacatataaaccacctcggattttgcttcctctgctgtgttttaacgacaacgcgtttctttgcttatacactaagatttcaaacggcgattcgatttgcgactgtgtggtcgcgatctggttttggtttgattcatttgtacgttggactgtgaaacacacgccgaaatgtggtggatgatgggcgagactggaggcaattactgttgtaagaagagcgatgatttgtgcaccaatgtttgtggtcaggaatcaagtcaagtatcaagtatgtcacc

SEQ ID NO: 37950 - DNA, 415 bp, Glycine max
  Clone ID: LIB3056-013-Q1-N1-D8
tgggtcattagtttctgagcctctcttgtttttacaacctgttactccattcctcataccaacagagaaaaagggttggttccttttttattcttgtctccttattttgtttcttctgccactcattgcttgctgagagagccttttgttctgagtttttggtttcttggtgagtgcttctgacaatatattggaacttggttttggggattggtgcttttttagggtaccccaattgagcatttttttttcttcttaaacccataaagtcaaagctctcatctttcttatgttgtaaacaaggtctatgagttgttccttgtagtgcagacaagggcatggtctttttgcagagtttgagtgattctgctacttactatactagttagtttgacatcttgagcgggtgtagaat

SEQ ID NO: 37951 - DNA, 194 bp, Glycine max
  Clone ID: LIB3056-013-Q1-N1-E1
aaacattgctttgttaacagtagctgtataataaacctttggtggttgcactcattgggatcttacgcttgaatcttggcattgatatataaatattatccaaaacatgtgagcgactaacaacccttttggaaaatcatggcatctgcttctgggccatatactttgccttaggttattaccctgacacactt

SEQ ID NO: 37952 - DNA, 396 bp, Glycine max
  unsure (1)..(396): unsure at all n locations
  Clone ID: LIB3056-013-Q1-N1-E10
aacccatttccataatcactttttcctactttcttctccatccatcccttgactaattaattatccctcacaactaccaatggccgaagagaaacaccacaagcaccgnctcttccaccaccacaaggacgaggataataagccagtagaaaccgatactggttacgacaacacatcatattccaagccttctgatgactatgactctggtttcaacaagccatcgtatgagtcttctggcggtggctatgaaggtggttacaacaaaacatcttattctagtgatgagccagcttctggtggtggctatgaaggtgggtacaagaaaacaggttattctggtggcattgatgagacttctggtggctatggcgctggtggtggtggatactctga

SEQ ID NO: 37953 - DNA, 272 bp, Glycine max
  Clone ID: LIB3056-013-Q1-N1-E11
ggcagatttcggtctttctagactagggatgaccgaaatatgccacatttcgacaaccccacaaggaacccccggctacgttgatccacagtaccatcaagactttcacctctctgacaagagtgatgtatatagcttgggtgttgttcttgttgagatcataacaggattgaaagtggtggacttttcacgtccgcataatgaagtgaatctagcttctcttgctgcggacaagatcgggaaagggcttttaaatgaaattatagacccat

SEQ ID NO: 37954 - DNA, 405 bp, Glycine max
  unsure (1)..(405): unsure at all n locations
  Clone ID: LIB3056-013-Q1-N1-E12
gtcttgaggcatctgggttaaatgacctctctagagttacaagtgttgcctctttcttcgtcagtagaatggacaccctcattgacaaggcccttgagaaaattggcaccccaatggcccttaatctacgtgggaaggcaacggtagcccaagcagcattggcttaacagctctaccaaagaaattttctggtccaaagtgggaagctctagttaaaaagggggccaagaagcaaaggctcctctgggccttaaccagtgtaaagaatcctgcctattctgacaccttatatgttgctcctcttattggacccgacactgtatcaacaatgccagaccaagcccttcaagcatttatcgatcatggtaccgtatccaggacaatagactcanatgcatctgaagc

SEQ ID NO: 37955 - DNA, 394 bp, Glycine max
  Clone ID: LIB3056-013-Q1-N1-E2
ggcggagaacggtgaaagccgcgaggagtacctgttcaagagtagtcctgatgggggactccgcggtggggaaagttcaacctcctctcgcggttcgcgcggaacgagttcgatagcaactccaaggccaccattggggtcgagttccagacgcagctcgtcgagatcgacggcaaagagatcaaggcgcagatctgggacactgcgggacaagagaggtttcgagctgtcacctctgcttactacagaggcgctgttggtgcgctcgttgtttacgatatcagcaggaagggcaccttcgacagcatcaagcgatggctccaagaactcactactcaaaatgatagcaccgtagcaagaatgttggtgggaaataaatgtgactgggagaata

SEQ ID NO: 37956 - DNA, 301 bp, Glycine max
  unsure (1)..(301): unsure at all n locations
  Clone ID: LIB3056-013-Q1-N1-E3
gcgaaatcattcaaacacattccatctattaagaatttagagagtgaaaatggattggcaaaacatgatgggcaacctggacccattcccaagaacaatcttaatccctcgtccactaacactactcctgctgctgntactatctcgtacccgtccaaagaccgcctatccaccaggccctaagggcttnccaatcataggaaacatgtttatgatggaccagctaacccaccgnggtctcgccaacctggccaaacactacggcggaatcttccaccttcgcatgggcttcctccacatg

SEQ ID NO: 37957 - DNA, 428 bp, Glycine max
  Clone ID: LIB3056-013-Q1-N1-E4
ctttgcacattcttcttcttcttcttgttctctttctctctgtgaagcaagtgcagagcaattaataactcaagtttgggtcactccgtgaccgtgatgatcgtaaagttattgtcttttgagtgatgggtttgtgctcttcggtccccagaaacgctaacgaagacatgaagctcaaactctcgttcggttcaaaatctgagaagcttgtgattcctccaacatccatcaagggacaacaacaacaacaaccccaaaatgggtggtcaacggctcggtcaacgaccaccttcactgaccatggtagcaaaaaagaagccttttttgattccaaggcctggttagactcagattgtgaagatgatttctatagtgtcaatggtgactttacaccatctagagggaccacaccagttcaccacactttt

SEQ ID NO: 37958 - DNA, 346 bp, Glycine max
  Clone ID: LIB3056-013-Q1-N1-E7
cccaaatggatatctggaagtacatatttgggtttgtggaactggcagtgataaaatgtgcgattgagcttggcatagctgaagccatagagaagcatggaagtcccatgacactatcggagatatcatcaagtttagggtgtgatacttcacatctgaagcgcatcatgaggttcctggtgcaaagaaagatattcaaaggcgacgggtgcagcaggggctattctcaatcagctctgtctcgtcgattgatgagaaacggcgaacacagcatggctagttttctcttgctggagagtagtcctgtaatgctggcaccttggcacagtctgagtgctcgcgtcat

SEQ ID NO: 37959 - DNA, 396 bp, Glycine max
  Clone ID: LIB3056-013-Q1-N1-E8
ctccatttaccgtttctccttcctgcagtactcgcagttcgcttctcctcgactcggatcggagcaaagctctcctctgtccacaatcctccgtttcactctctctaaaatcctaacactccgaaatgcccgaaccggaatcgcaaaacggacacgagcaagacccggagccgcagccagaaacagaaccagtgccaacagagcaaacacaaccacaattggagccgaaatcgaaatccacgcccgaaccagaaccaaatccgcagccagaatcggagccagtgcccacaggaccaacgcaagcccaattggagccgaaatcgggatcagaagctgatccagcggttaacgacgcagatctcagggaaacgacgattcattccaatgaaacgtatg

SEQ ID NO: 37960 - DNA, 387 bp, Glycine max
  Clone ID: LIB3056-013-Q1-N1-F1
tattattctcctcattccttcatttttaaacctagctccatgtccctccaatcaccataacatggcatcagaagcaaatgctggcaacaccaacttttgtgtaaaaggtagcaacaatggctacattagtgctaatgaccccttgaactggggtgcggcggcggaagctatggctgggagccacctcgacgaggtcaagcgcatgctagaggagtaccggaggcccgtcgtcaagctcggtggagagaccctgaccatctcgcaggtcgcggcgatcgcggcccacgaccagggggtgaaggtggagctggcggagtcctccagggccggtgttaaggccagcagtgactgggtgatggagagcatgaacaagggcactgacagcta

SEQ ID NO: 37961 - DNA, 413 bp, Glycine max
  Clone ID: LIB3056-013-Q1-N1-F10
ggtgtacagagtcaacttgtctgttctgggtgtagaaaccttctagtgtttccagttggagccacctccgtgtgctgtgctgtttgcaatgctgtcacagcagtgccacctcctggcacagaaatggcccagttagtatgtggaggttgccatactttactcatgtacatccggggcgcgacaagtgtgcaatgttcatgttgtcacactgtcaatctagctttggaagcaaatcaggtggcacatgtcaactgtgggaactgcaggatgctactggcgtaccaatatggagcaagatccgtgaaatgtgcagtttgcaattttgtaacatcagttggggccacagcaagcaccactgagcagaagttcagcacctaaaacatacaaaatagcaaggtcattatagactctac

SEQ ID NO: 37962 - DNA, 54 bp, Glycine max
  Clone ID: LIB3056-013-Q1-N1-F11
gcggtcctgttgggcctgcgccgacttatgtttctcatcgaccatggcgcatac

SEQ ID NO: 37963 - DNA, 395 bp, Glycine max
  Clone ID: LIB3056-013-Q1-N1-F2
tgaatctcaagattctaagagagattttgctgctctttgaagaacggtgtttgcttgattttggtgatgtcgctgctctcagatctcatcaaccttaacctctcagacactactgagaaggtgatcgcagagtacatatggatcggtggatcatgaatggacctgaagagcaaagcaaggactctcccaggaccagttagcgacccttcaaagcttcccaagtggaactatgatggttccagcacaggccaagctcctggagaagacagtgaagtgattatatacccacaagccattttcagggatccattcagaaggagcaacaatatcttggttatctgtgatgcttacactccagctggagaacccattcccactaacaagaggcacgatgc

SEQ ID NO: 37964 - DNA, 429 bp, Glycine max
  Clone ID: LIB3056-013-Q1-N1-F4
gggttctatgaatgtgaaaaggatctcttagaaaaggcagcagtagagtcaccattctctgagattctggaaatcaaggttccttttctgaacattgatgagaacacaattcaagaaaacaagccatttactgacatgcaattagcaaagagtgtcagctcaggaagtttgagctcaatggactggatgcgtggagctgcaatgaagcctgctttcattgatatctctgcaatagatttcaatgcagattatggcatgcggagatcatttagtgaaggagatataaagactcttggtaatggtaacatgaacatcgtccaatcaccccttgagaggccccttcttatcagcaactgcaccagtgaggaacgcttccaaaagctctccagatacaggaataagaagacaaagaggaattttgggaggaaa

SEQ ID NO: 37965 - DNA, 233 bp, Glycine max
  Clone ID: LIB3056-013-Q1-N1-F5
gtacagtgcttgcatattgggtgcatttggccttgaagatgagcttcaacaaggcgtgctagaatgcattgaatgtctaaggattgcaggccttaaagtatgggatctgacttgcgacgaccatgatactgccatcatcatggacttctcctcagatctgctaaccagcaacatgactcacattattatctatagctcgagcagagaatcatgcaaagaaagcttgcaggatg

SEQ ID NO: 37966 - DNA, 183 bp, Glycine max
  Clone ID: LIB3056-013-Q1-N1-F7
cgcaatttgacatgctcacatacgaatgagccaacataggccatgtatgagagtgtgtagtgcatggcttcctataatggatctatcatagatgcatagtgtaactagagagcgtaattcctaaggagaattccgactgcacatttttaagaaatctcgatgcacagataattatatacgaat

SEQ ID NO: 37967 - DNA, 417 bp, Glycine max
  Clone ID: LIB3056-013-Q1-N1-F8
ggcagatgatcttggtgacttcactgctgacctcaacctgtcgattttccaagctggggatccatccctcaaataatcaatcgcgtccattattgtgcaggtactctgtcaaggtggtcccttctctagtaaaacttacggaaagaaggtctggatgggcatgagaagattaagagttatatatggtggatgtcatttggctttgcaattttggaagctttaatagtggcttggtactcacttccatattcaatttatgccgccacttatagggtcaagcatgtaatggtgacatctgttttattggtttgtggtgcaatgactattacatggatatgtgataccatatcagaatctggatttggtcaaggttcatctctaataatatgcgtgggaatacttacgggatatatggag

SEQ ID NO: 37968 - DNA, 351 bp, Glycine max
  unsure (1)..(351): unsure at all n locations
  Clone ID: LIB3056-013-Q1-N1-F9
aaaaatagttgtggccggnggcttcactagctgcagaaagtcaatatctcaagcagaaatgtatgaccctgagaaagatgtttggattccaatgcctgatcttcatcgcacccataattcagcctgttcaggagtggtgattggaggaaaggtgcatgtactgcacaaggatatgtcaacggtgcaagttttagacaatgcaggtcagtggacggttgaggaatatgggtggctccatggtcaaatggcagttatcagggatgccctttatgtaataagctatggattaatcatcaagcaagacaaaaaaatgaggaaggttgtaggttcagcttccgagtttcgaaggag

SEQ ID NO: 37969 - DNA, 390 bp, Glycine max
  Clone ID: LIB3056-013-Q1-N1-G10
cggctcgagggcgaggtagtagtagtaacttgctgaagggacaaagcagatatataaaatatttctggtaaataaaaattgatagacagttttggttccgcatataaagcttctctggcgcttgggcttagcataacccttacctttggtatagagaagaagaatagagagtgatggagtgcgtattcggattggtgggtaatggattcgcgatcgtggtggctgattcatcggcggtgcacagcatcctcgtccacaagtccaacgaggacaagatcatgcttctcgattcccacaaactcatcgccgctagcggcgagcccggagacagggttcaattcactgagtacattcagaaaaacgtcgccttgtatcagttccgtaacggca

SEQ ID NO: 37970 - DNA, 319 bp, Glycine max
  Clone ID: LIB3056-013-Q1-N1-G11
ggggaaccaaagtgctacagttcacaattttcaataccaagaaaacgatgataaaagatcccgggtggatgctgcttgattcttttccttacgttagaagctgttcatcccaacaaggagaaaactaatgcgccatctcccgttttgtttgtaataaatttgtatttatattttatactcctataggctgctacaaacttgagttctttgccccatcggggtggtttatgcatctttatattttatggttgtagccacccttatacaagccattggaataggtgaatctatacagttttacatgaatggttatctgttg

SEQ ID NO: 37971 - DNA, 385 bp, Glycine max
  unsure (1)..(385): unsure at all n locations
  Clone ID: LIB3056-013-Q1-N1-G12
gtttgttgtatgaagaggaatcttgagaaatggcaggggacagcaagagcaagattctgttcatcggagggactggttacatcggaaaattcatcgtggaagccagcgccaaagctggccacccaactttccttttggtgagggagtccactctctccaaccccgcaaaatcacccctcatcgacaatttcaaaggcctcggtgtcaatcttgttttaggagatctatacgatcaccaaagtttggtgagtgctataaagcangtcgatgtggtaatttctactgtaagacacctgcagctagctgatcaagataagatcatttctgcaattaaagaagcaggaaatgttaagaagttctatccatctgagttttgaaatgatgt

SEQ ID NO: 37972 - DNA, 414 bp, Glycine max
  Clone ID: LIB3056-013-Q1-N1-G2
gaaacatttcactaatagagagacataagcataatattgagaaataatggagggttgtacttattgtgtgaagttgctatgccttgttgggtttgtggtgcttgtgagtactattgcaggggtggagagtgctggtgaatgtgggaaatctaccaccccagataatgaggcttataagcttgcaccatgtgcctcagcagcacaagatgagaatgctagtgtttctaaaagtgctgtgctcaggtgaagaaaattgggcagaacccaagctgcctttgtgcagttctgctctccaacacagccaaaatggctggtgtcaaccctcaagttgctgtcaccattcccaagcgttgcaacctggctaatcgccctgttggttacaagtgtggaccttacactctgccttgaaagagt

SEQ ID NO: 37973 - DNA, 406 bp, Glycine max
  Clone ID: LIB3056-013-Q1-N1-G3
actcaaatgaggaaggaaaggaagaagctaagaaagaatgccgctaaacctgtagtaagcacttctaggaactttattagagctaagaaggatgaaaattcttttgagaaaaatggggcttttggcagaggaaatgagtctgagggaaagttgaagaaaagggggaattttaaaggaatgcgatcgggtgaagaagttttggagaggggaaagttgaggactttggattctggtgggaagaagaagaggatatatgctaagaaaggaggggataaaaatgtgaagttagagaatggtatggaagtatctaagaagagaactttgattaggaacggtgagaagcgagtgaaagatgtacccgttgaaggaaatgatggccaccatacaatgtgggatcatgataaga

SEQ ID NO: 37974 - DNA, 238 bp, Glycine max
  Clone ID: LIB3056-013-Q1-N1-G4
cggcgccactggttgacccgacggagtttacgtcatggtccttttacagagcagggatagcagagtttgtggccacttttctgtttctatacatcactgtcttaaccgtcatgggagtcgccggggctaagtctaagtgcagtaccgttgggattcaaggaatcgcttgggccttcggtggcatgatcttcgccctcgtttactgcaccgttgccttttaaggggaccccttaacccc

SEQ ID NO: 37975 - DNA, 379 bp, Glycine max
  unsure (1)..(379): unsure at all n locations
  Clone ID: LIB3056-013-Q1-N1-G5
caggtcgcatagacatccagagaaaattattttgtagcatacaattgactggcggggtggctttgacaagtggcttaattgcagcagtagaagaaagagttttacatgccattcctccaaatgaagcaattgatacagtggagattcttggtgtccttgatttaggcagggatgcatggataagtcgggaggactggattcacaatggggtccacgttggaagtaacagaaaatacaaggattcatattatcttcaggctcaagctatgtgttatatgaattcttgaaaggctgatgagacactacaatggaatcaggggaaaaaaagatgtaaagaaatgttgaaagctatntgagtgctaattacatggattacaat

SEQ ID NO: 37976 - DNA, 383 bp, Glycine max
  Clone ID: LIB3056-013-Q1-N1-G6
ctcaagccgtttccatgctacttaagataggccaatggggttcaatggttggtagccacactgctgattgccctgttgggtggtgcacaagctggtgtggtatggtacatcgacttaaggcaacctaacttgggtcgtgcttcaagtacctggtcaaacccttcaacaaccgattgaaaaattgtgtgcaatttattcgccaagccaatttcccttgcctctgcagatacaggtctattcttcctttaattggaatataacccgaaaaggctttggccttgcctggtaaatgtggtctccaatcccctgctaaatgttgaggtaatcatctttagttgtaatacagcttcaacatacaggctctttttggatataagcttctc

SEQ ID NO: 37977 - DNA, 312 bp, Glycine max
  Clone ID: LIB3056-013-Q1-N1-G7
gaaggtattatggccgcagcagcagcagcaaccactctcgcctcttccctttccaaaccctcctctcttacatttcaaacccactctttccccataaccctacccactccccctcgcgccgccgccaaaccccctcttctcgtcttctccaaaaacccaatttccgacatcgtctcctccaccttctcacgcgccgaagaaggcgcgtgggacgacgagaagccgcgcgaggagtgcggcgtggtcggcatatacggcgaccctgaggcctcgcgcctctgctaccttgccctgcacgcgctccagcatcgc

SEQ ID NO: 37978 - DNA, 373 bp, Glycine max
  unsure (1)..(373): unsure at all n locations
  Clone ID: LIB3056-013-Q1-N1-G8
cggctctagtccatacgccaaggtgataatgctttcggggaggctggttaaaactggcctggtctttcctggattggccagttgtggaatacaaggatctttgacatctncttactacatttttgcaacacctacctctttctctctctctctttcactcgtcctaggtttgattatttcttccctcaattcccaacctcgcatctaccattattttattctcaaaccacgacaacaaatacacaacacaccccaacacacacacacaaacacaacacaaacttagtttctcaatttcttgctctcgagccaacccaagttaaattgaaaacaagagcaaaaacttaacaaaggtttggtcttttgatgtgag

SEQ ID NO: 37979 - DNA, 397 bp, Glycine max
  Clone ID: LIB3056-013-Q1-N1-G9
atcgaaggaggatttgaaggaagtgacccacaaggtttactttgatgttgagattaatggaaaagaagcaggtcgtattgtgatgggtctttttggaaaggctgttccaaaaactgcagaaaactttcgagctctttgcactggggaaaagggaactggtaaaagtggcaagcctctccattacaaaggtagctcattccatagaattattcctagctttatgctccaaggaggtgattttacacatggcaatggtatgggtggagaatcaatttatggagagaagtttgctgatgagaacttcaagttaaagcatactggaccaggacttctatcaatggcaaatgctggtcctgacaccaatggctcacaatttttcatacaaccgtgacaacta

SEQ ID NO: 37980 - DNA, 145 bp, Glycine max
  Clone ID: LIB3056-013-Q1-N1-H1
gaagagctttgtagacctttcttaatattattggtgggacgggggttatatcaaatgttgggagcctgcgccatttcttggccttggttcaccttggccttggtttggctccttccggttccggcattcaataacaggtttaagg

SEQ ID NO: 37981 - DNA, 197 bp, Glycine max
  Clone ID: LIB3056-013-Q1-N1-H12
tacaaggaaagaaatggatggatagaatcacgtttaaaaggaatgaaaagatcatcaccaactgcattgaaaatagcattaagatcggttcgtgaaggaaggaatcaaacactacctgaatgcttaaaaaaggaattcagattaacaatgaatatactgcgaactacaatatctaaggatatgtatgagggtattag

SEQ ID NO: 37982 - DNA, 366 bp, Glycine max
  unsure (1)..(366): unsure at all n locations
  Clone ID: LIB3056-013-Q1-N1-H3
aaaccaagcatcttcaataattcatcgcctctntattaataataagtatagtaaatacgctagtctatggggaacactacttcttgttcttgtatttgtatctctaatggtgttattagtattgggaatattttgaagaagagaagaaaagctaagaaaacagcgatgctgttggacagtgatggaaacactcgggagatcaagctacccataaaatcaggggagctcatgatcgaagaattcggccacgtcgtcactccggtcgacgaaattcgtagaacgggacgggtttcggctttattggccgacgaggagcttgtggccggtaaggtttacctgctattgccagtgaataggatcaattcg

SEQ ID NO: 37983 - DNA, 289 bp, Glycine max
  Clone ID: LIB3056-011-Q1-N1-H9
gatccattttcaaattccatcacagacaagtgggtatctgacttgtacatttgtaatacgccgagtgatcgattattcagagtcacaggtgttagttatggcgaccaggtactgcatggcgtctctgactgtgacaaaattccgatacactctctggaacactactgcaggaacagatgtgcaaacactacttcgacactgctgtctacagattcaacatccccaatctccgcgtcggaaccctagactgcctactctgcctcagcgacgataccgtcaagtcgaacag

SEQ ID NO: 37984 - DNA, 209 bp, Glycine max
  Clone ID: LIB3056-010-Q1-N1-B10
caatttggaaacttggcataagcttgacaaaatattggatgctaccctaactaatgaaatgggtccaaaggcattaatcttgcaaggatctgcattaatgaaggtggcttcagctggggtttccgagggtcccttccttaaaaccattagagacccttctttgggtttaaaaactggatcttttcattatgcttctggatttggactta

SEQ ID NO: 37985 - DNA, 439 bp, Glycine max
  unsure (1)..(439): unsure at all n locations
  Clone ID: LIB3056-010-Q1-N1-B11
atgggagaaaggttgcagtagattcattaactttgtcagttcaggaaggagaatgttttggctttttaggaacaaatggagctggaaagaccacaactatttctatgctatgtggggaagaatgtccttctgatgggactgcttttatttttggcaaagatatatgttcccatccgaaggctgctcgccgatatattggatattgtccacaatttgatgctctattggaattcttaactgtccgagaacatcttgagctttatgctagaataaaaggtgttccagattttgcaatagacaatgttgttatggaaaagttaacagaatttgacttattgaagcatgctaataaaccatcattntcacttagtggagggaataaacgaaaactgtctgttgcaattgcaatgattggagatcctcctattgtcattcttga

SEQ ID NO: 37986 - DNA, 166 bp, Glycine max
  Clone ID: LIB3056-010-Q1-N1-B12
gtgatttcaatttctgcaactgctaagagtgcaaaaatgcggcacgaattggacttcgaattggaggaagctatgcacctccacagcatcggcaaaagacctcgaactctctctatactctccttcgaaactcgcatactcgaaaaggtatcgtcatcagatgagc

SEQ ID NO: 37987 - DNA, 400 bp, Glycine max
  Clone ID: LIB3056-010-Q1-N1-B2
ctggagtcaaaacctgccatgacagtaataacaatgcctactttcttatcttactctctcctttacctcgcgttcttattcactctcaaataccttttccaaagaagcagagaagttcgaaacctgacacctggtccgactcctcttcctataatcggcaaccttaacctagttgaacaacctatacaccgtttcttccaccgcatgtaccaaaaatatggaaacatcatatccctttggttagggtcacgtcttgttgtggttgtttcatcacccacagcgtaccaagaatgtttcactaaacatgatgttaccttggccaacagggtacgctacctctcgggaaaatacatattctacgacaacaccaccgtaaggtcttgctaccacggcgagcact

SEQ ID NO: 37988 - DNA, 324 bp, Glycine max
  unsure (1)..(324): unsure at all n locations
  Clone ID: LIB3056-010-Q1-N1-B3
cggccgtttgctccccaaaaagggaagaagccgattctggcctttgaaatcaaccagaaaagatgtcaagtgaaaaagtaactggtgcaagtgaaggtcctgctacttcaatccaggtgagccaatggacatcatgactgctctacagcttgtgctgagaaaatctctggcctatggtggtcttgcacgaggtcttcatgaangtgccaaggtgatcgagaagcatgctgcacagctctgtgttctagcagaagattgtgaccaacctgattatgtgaaactggtgaaggctctttgtgcaaagcacaatgttagtcttttgac

SEQ ID NO: 37989 - DNA, 325 bp, Glycine max
  unsure (1)..(325): unsure at all n locations
  Clone ID: LIB3056-010-Q1-N1-B4
cctcgaaccgtccgttcggaatctgcgggttacaagcccggttagggccaacttaacggtattaagtaccggggtaatgtgaacacattaacccgtgccggttatggcaccatggatgggggtatattccccggttaacctttttgcggttaatagggtggtaaaggggcttcttccttctaagttggtggctactaccaaaaagccattcgttcccgaacccgttttaaagccggncccggtaacctccgcaaatgatttgccgaaggcccctaaacctgaaaaggagaagccgtcgcctaaaccggaacaatcctcggagtcc

SEQ ID NO: 37990 - DNA, 369 bp, Glycine max
  unsure (1)..(369): unsure at all n locations
  Clone ID: LIB3056-010-Q1-N1-B5
cgcggcataacctaaacctatctttcttctctctctgtgtgtgcgcttcaacggcaaccagaagcagccatggccactgcaaggactgtgaaggatgtttcacctcatgagttcgttaaggcgtactcctctcacctcaagcgatccggcaagatggagctgccagagtggactgatattgtgaaaactgcaagatttaaggagttggctccttatgatcctgactggtactatgtcagagctgcttccatggcaagaaagatctacttgagaggaggacttggtgttggtgcctttcagaggatttatggtgggagcaagaggaatggtagtcgccctcctcattnttgcaagagcagtggtgccatt

SEQ ID NO: 37991 - DNA, 399 bp, Glycine max
  Clone ID: LIB3056-010-Q1-N1-B6
gatgaatccatctcttccatgaaggaggtcatttctttggggataagtgtaaatgccactctcatattctgcctccctaaatatgaagcagtgattgatgcttacttggatggccttgagtcttgtggcatgactgatctctctaaggtttcaagtgcagcagcattctacatcagtagagtggatgttacacttgacaagaaacttgagcaaattggtactactgaggctcttgatctcaaaggaaagggtgcggttgctcaagcagtcttagcataccaactttaccagaaaaaattttctggtccaagatgggaacgcttggagaatagaagtgccaagaagcagaggttgatgtgggcttcaacaaatgtgaaaaatccatcttaccctgacaca

SEQ ID NO: 37992 - DNA, 360 bp, Glycine max
  Clone ID: LIB3056-010-Q1-N1-B7
gaacaagaccatagatgtgctgctttacgtggatcgcttggatgtgtacagagtggacaacttggataagttagtcgccaaagctataacagataggtttggcaaaggaatatggaacaaggccattgtaacactcacacatgcccagttctctgcaccagatggattgccctatgatgaattcttttcacaaagatctgagtctctcttgaaggttcttaggtcaggtgccaggataaagaaagaagcctttcaggctgcttcaattcctgatgctttggtcgagaacagtgggagatgcaacaaaaatgacagtgatgaaaaggttctttcaaatgggactgcttggattcctaatct

SEQ ID NO: 37993 - DNA, 407 bp, Glycine max
  Clone ID: LIB3056-010-Q1-N1-B8
ctttgagagaggaccaaggtaccacgcatacgctgcgttgagggaaacaaagcttcgcatgaggcaacaagaagaagaagagggtgttgttgaagcaaaggtttcaaccccaccaagaaaaaaacaagtcaagtttcaaggtgctgaggtttcagggagaaaagggtcatcatctcttgtggctcagtctgcgccggatttttctaatgtgttgaggaaggagaataggaagccggtgaatggtaacatgatgttacctcctttgatggagttgacgccacctccttcttcttccaagagtggctgtggtgttttttcgagtgcgagagggagtaagtcagcgaatgcaggtgagaagagaacgggtggtggtctcatgcccaggaagagctatgccagcattgatg

SEQ ID NO: 37994 - DNA, 437 bp, Glycine max
  Clone ID: LIB3056-010-Q1-N1-B9
gtcccattcctatctctgtcagctgtttttgctgccgtcttttctcaaacttctctctctcaatagcagcaaggatcaagtgaaaactgattattttccattgagtttgatttagttcttagcttctgcttcgatgccttcaatcatgtcacctcagtggcaagacaaggctgctggtttcttttcttcctctggggtcaagcttaaagaagcgaaggagtcagcaggaacattcgttggtgaggtcacaaaggatacaaagagtaatgtggctgaagtggcaggacgagttggatcgatggtgaagagtcggtgggcacttcttcaacagccatccacaagacatgctgtgcaggatcgtttcatatcagctgctgctacaactggtacactcctgaggagaggcttctcagggacaaaggaataaggtggttgtg

SEQ ID NO: 37995 - DNA, 372 bp, Glycine max
  Clone ID: LIB3056-010-Q1-N1-C1
cgcccttctctcttccaatttctcttctctgtccaacgcaatcgattagtttagcttccgcggacagttcagggatcatggctagggttttagttcagtctactggtatgcctggcctactgagtgggcaaaggcacgggaagcataagggatcaggaaaatcgaaaagatctgtcaaaatgatgagcaccttacgaatgcctgctttaagaatgtcgagtttctccggattacgtactcttaatcctatggattctctgtcgagaccacgccacacttttccgttgaatacaacttctaagcgcgagagggctaaaagatgtgtacctaaagctatggttgagcgtttcacagagaaagcaatcaaagtca

SEQ ID NO: 37996 - DNA, 313 bp, Glycine max
  unsure (1)..(313): unsure at all n locations
  Clone ID: LIB3056-010-Q1-N1-C10
gaagaatcagagagagaaaatagagagagaaacgaaaaccccttttgaccattgcgcctcgattccatttgccccattgattattctcccaccaaaacctcttctgtattttttttccttcttcttgtgatcattcctctcatttgggggcacggttctgtttgtgatcaacctcaaaattctgatctttttcccttcctgattcggattcggatacccttgtgcgtttttctttctgggtgtgttttatttcggccaaagtttcttgtttgcatagtgngaaagttaaaaaggggataattctatgtgggca

SEQ ID NO: 37997 - DNA, 428 bp, Glycine max
  Clone ID: LIB3056-010-Q1-N1-C11
aaacccgcacacagcagaacacaaattccttactctcgatgcgacgcttctctccttccttcaacggcactttccactctggccaccgatatacttggtagctgataacagaatattggtgattagttatggaaacattggaacttctgagcctgaagcagaagttttcttcggtccgggaccaggtcatgtggcagaggctgaaattattgggctctcagtgagcacattaggctcaactatttatatcaatgtcaagaacagaggactctttgcatatcagtcacgtggacatttgcttaggagtgtggaacctgtgctttaccaattcggctaccgtcaaggatgcaggaaaaatcttacaaattgttactttgcttcagatcctttgcttgatcattgtgagggtagtatatatatctcaaaca

SEQ ID NO: 37998 - DNA, 370 bp, Glycine max
  unsure (1)..(370): unsure at all n locations
  Clone ID: LIB3056-010-Q1-N1-C12
gggagtgtattaattgaaactttatcttcttcagtagcctgtcaacattcaaaattttctttggctttgctggatcaagggtgatataggggtaattgggccaggtctgggcaggcatctgtgatccaaaccaacttttaccctccaagtgaatgttttggacagactaatatacctnctacagataacatggcttctgtacccttgcaagttgggaatctaagtggtgcgtccatcacttcactgtccaggcaaatctatgattcaatggcagatatgcactctgaaggagtgacttttaccaaccgacctgggcatattagccggtattgtgccatatcaagggtggcatgacaatnatcaggatgct

SEQ ID NO: 37999 - DNA, 298 bp, Glycine max
  Clone ID: LIB3056-010-Q1-N1-C2
cgcaaggggagcactgagggctgcaatatgattcatcagtcttgtggagaaggaagtgtggataacttgtgtatggatcaatgttgtatattagaagccacacacagaaattgtgaacaaaaatatttcactgagcatgatttttgtttacagctgttatttgtttatttatttttctgtttagcatgctacctattaatgtggtttgttagtgtatatcgaaagctgagagcttggacatactagtggctggtagaaacatgctataatttatggaaattaatcctctatatagttt

SEQ ID NO: 38000 - DNA, 410 bp, Glycine max
  Clone ID: LIB3056-010-Q1-N1-C3
tcggctttggcttcagagtttgtgtaaccaacttcacctttccttccttccttccttcttccgatttcgaagatggctgaagcagaggatgccgtacgacgccgtaatgcggtcgccgagtatcgaaagaaacttctccagcacaaggaattggaatccagagtccgatccgtcagggagaatttgcgagcttcaaagaaagagttcaataaaacagaagatgatttgaagtctcttcaaagtgttgggcagatcattggcgaagttctcaggcctcttgacaacgaacgccttattgttaaagcaagcagcggtcccaggtatgtggttggttgccgcagtaaagtggataaagaaaaattgacttccgggacaagggtggttctcgatatgacaacactcaccataat

SEQ ID NO: 38001 - DNA, 394 bp, Glycine max
  unsure (1)..(394): unsure at all n locations
  Clone ID: LIB3056-010-Q1-N1-C4
caatcatcaaagaaacacttccattgaaccttaaccaaaccacctncttttttctttaaaccgtttctccatctttctcagtgcaaaacttttttcttattttccctctttattccctcatctcactctctcttttccccagtcaacactttcctactggtttcatctgattcctcaaccagtttacacccaaaagagtacagtgaacaagaaaaaaagaaaaaagaagaaaggaaaaaaagaagaaccatctttattccctcctatacatatacatattcatatatttcccttttggaggttaaatatggggttctctgagaagccacaagtggaagagtcagatagtactagaaaatgggtcattgctggaatcccttcacgagttccattg

SEQ ID NO: 38002 - DNA, 396 bp, Glycine max
  Clone ID: LIB3056-010-Q1-N1-C6
caaatacctggcaaaggaagaggtcttgttgcatcacagcctctaaaagcaggtcaaatagtcctcactgaatcccctctcattctctactcagcttctcctctcctcacaccctcttcttcaccttacacttactgtgaccattgtttcagaatcttacctctcactcacaatagtactactgtcacgtgcccttcttgctcaaaccacagtttttgttcccagaagtgcttctcccttgcactcaaatcctcacactccacttgggtatgcaaagcactcatgtctcttcaacaacaccccaattcaacacttcttcaacaacacccccaagaacgccaagtccaagcccgtttaattgttgcttctcacaagctcttccttcacaatcacacc

SEQ ID NO: 38003 - DNA, 357 bp, Glycine max
  unsure (1)..(357): unsure at all n locations
  Clone ID: LIB3056-010-Q1-N1-C7
ttttgggaaaagagtgagagagagagaggagtgggaaatcgagaaaccctagtggagccggaagtggaagtgaagagagtaaatgacgatccattcggtggtgatacagaagctgcttagcaccaatgctcaggtgggtcgacgtgttgccgctcaccatttgaaggagttcacctatggcttccgcaacaaaatggccatcatcgactccgacaagaccctcatttgcatgcgcagtgcctgcaacttcatggcctncctcgcccgccacaacggccgcttcatgttcatcaacaccaaccctctcttcgacgaaatcttcgacctcatgaccaagaaggtgggctcctacagccc

SEQ ID NO: 38004 - DNA, 392 bp, Glycine max
  Clone ID: LIB3056-010-Q1-N1-C8
ctcgagccgctcgagccgattcggctcgagctttgcgagcaattcaaaaccctattggaattctccattcacacgttgaagcttttgacgtcatggctacaccattggtggcagggattgcagtggcggctgcagcttatgctggtagatatggtatccaggcttggcaagcattcaaagctagaccaccgagtatgcgtaaattttatgaaggtggtttccaggctaccatgactagaagggaagcagctcttatactgggtgttagagaacgcactccaacagataagattaaagaagcacataggagggtgatggttgcaaaccatccagatgcaggtggcatccattaccttgcatccaaaattaatgaagcaaaagatatgttactt

SEQ ID NO: 38005 - DNA, 425 bp, Glycine max
  Clone ID: LIB3056-010-Q1-N1-C9
ggcaagaatatcaaattggtctcttgtcttcctcctcatcgctacactactccacatagagcccagcctctcaagcccaagcccaagcccaagcccaagcccgttcataaaatcctcctgcagcagcacccagtacccagccctctgcgtctcatccctctccgtctacgcctccagcatccaacaggaccctcaccaactggttcagacagcactctccctctccctgaaccgcacccaagccaccaaaaccttcgtggctaactgcaacaaattcagaggcctgaaacccagagagcacgctgcactcaaggactgcgccgaggaaatcagcgacagcgttgaccgcctcagccggtcgctgaaggagctcaagctatgtaaggttaagggtgaggacttcacgtggcacattagcaacgtgg

SEQ ID NO: 38006 - DNA, 399 bp, Glycine max
  unsure (1)..(399): unsure at all n locations
  Clone ID: LIB3056-010-Q1-N1-D1
aaaggcccacggttcctcactcctcttccatagcctgcggccttcactctcatctcctggtctccagtgagatgaaccctagctccaattggtccctttaatcaattacctcttaattagtaattacttaatctcaattagcctttcactctcccacacaacaacatcatgggcgtcaaaggttttgtcgaaggaggcatcgcttccatcattgcaggatgttccacacacccacttgatctcatcaaggtccgcatgcagcttcagggcgaaaacaatttgcccaaaccggttcaaaatctccgacccgcactcgccttccaaaccggttcgaccgtccacgtggcagcggctattccgcagacccgcgtgggtcccatcgcgggtgnggttcgcctc

SEQ ID NO: 38007 - DNA, 376 bp, Glycine max
  Clone ID: LIB3056-010-Q1-N1-D10
gggaaaaaaaaaagagtagagtggataatggcttcgttatcgctttgcatagccatgagagcacccactccctcagcttctctcattctcactaccccaaaaccatcttcactctctttgaaccttacccgcacttgctccagcgctcgctctccgctcctccattgctccttcctctcttctccttcccatctctcttccccttcctccgtttcaggcttgtcacttggattggatttgacatctaatgttgggaccagaagaggaaaaggttctggcctagttgtgagggcaggcaaggctgctctttgtctgactaagagaagcagatcaagaaaatcattggcacgcactcatggtttccgcaaaagaatga

SEQ ID NO: 38008 - DNA, 400 bp, Glycine max
  unsure (1)..(400): unsure at all n locations
  Clone ID: LIB3056-010-Q1-N1-D11
caaggatgaagttttgctaagaattgactggagagaggcaggacctgaacctgacaacagggttgagtattaactttggaccaaccgccatgattaatgttgaacttggttccaataaccgaataatttcggggaaaaatttaaggggtaatctcaaaatcttgaaaggggcgggtataccttgttcaattcaaaactacataactngggtttggcccacaccctttcattctagcagtcagtgcaagtctcaatgtataaaccatgggagatattgtgctccagatccggagaaggattttggagagggatatgaagggaaggatgtggtgtatgaaaatttgaggcagctttgtgttcatagagttgccaatgagagcaaccgttcttgggtttggtg

SEQ ID NO: 38009 - DNA, 435 bp, Glycine max
  Clone ID: LIB3056-010-Q1-N1-D12
gaagagttaaaggtttgatctttgaggtgaaggtccagtggtttgagtagccaaaccttagttatggatgttgaggcagagattgatcgcttgccaattgacctgttggctcatatttttgttctgttcacttccttcactgatttggcacaggcaagtggtgtttgcaagaaatggaaacaaggggtgaaggagtctcttgctcggagacacaatctcagctttgccggttggaagatggatgatgactccactgctcgcctttgttttcatgcctacaacctgactaaactagaaataccgaggagctgctggggttgccaaataactgatgctggacttctcagaatatcttttgctaagtgtatcagcaatctcacatctatatcattgtggggtttgactggcattacaagatgaaggtgttgttcaatt

SEQ ID NO: 38010 - DNA, 342 bp, Glycine max
  Clone ID: LIB3056-010-Q1-N1-D2
atagatgatgattccaaatatgatcctgtagagatgcatcactctaggtgttcccctcctctaattcaatcccaggatcagcctgtttggcaggattcatgtgatgaaaaagttaaagatgattcatgcacatcatcagacataggagttgtctcacaggagactaaagttaccgagaatggtgatcattggtgtggtaactataatggggtaaccaatggttatagccaaggatatgttttagagcattgtgatgcaaaagtgtgggattctggatttgtatcatgctctaaaaataagattgacttcttacctacatgcaacatgatagaagaagttttt

SEQ ID NO: 38011 - DNA, 400 bp, Glycine max
  Clone ID: LIB3056-010-Q1-N1-D3
attgtcctctccatcttcctctctatcacactcacctatggctgccatctcaaaactcattcctttcctattcttaacaacccttttagtgtctctccaagttaatgccagagacagccaattcttcagcaaagtcacccctctcaacaacaacattaaagagactgaggttcccaaaaatgaaggccaagtaaacaagccatatcaacaaccagttttcaccccagaaacagaaaacagctatggtctatatggtcatgagactggtctgcacgcttccaccactacaattactaatgctgctccctacaccaccgccaccacctacaagccatacagaactaccacagctgaagaggacactgccaagtactccaacaacaactacttctacaacttc

SEQ ID NO: 38012 - DNA, 375 bp, Glycine max
  Clone ID: LIB3056-010-Q1-N1-D4
tattaaagcaatttgcaaggactttacccaacgggggcaggactttactgattctaattcactgcgtgcaagtatccgtttgcagttgtgggcagcactaggattgacaccagatatgcagcaacaacacctgaacattgatataaatgctttggtaacaaagttggaaaagctggagaaggaagtgatcttccagaaggggaacaaatttgatccatccaagaaattgaatgtgatgaagatagaaatggccaaacttgagtggtacaagaagtattccaaaaataataagattggctactatgacagcttcaagaggggtatctcaacaagcgacctagatgttgttcagtgccagaaaaccctcagaaatta

SEQ ID NO: 38013 - DNA, 405 bp, Glycine max
  Clone ID: LIB3056-010-Q1-N1-D5
ttcgtcaacatcagttggagtgggagcattgtcaagtggaaacaacaacaacaataacttgagtaatgctactaattcttcaacggaatgggcccagagaacgggcaccattaccaacaatgattgcgatcacggaggaggaggagctctcagtggcactatcaactacagtgacactaatggcaaagtacactactcagcttcttcatcggattttcatggagagaaggggccagacttcactgtaactgcaaccagaactcaaggaatggtggagtcctggattaattgttcttctgattaaagcatgggcgaccaaacagaataagaagaaaaaaaaaggattgatgtttgtgatttcataaagtttaaagcaactaatggtactatatgctagtataattc

SEQ ID NO: 38014 - DNA, 365 bp, Glycine max
  Clone ID: LIB3056-010-Q1-N1-D6
tggcggtacctctgctctcgaagaagatcgtgaagaagagggtgaagaagttcaagaggcctcagagtgacaggaaaatttccgtcaagacaaactggcgtagaccaaagggtatagattcccgtgttaggagaaagttcaagggatgcactttgatgccaaacatcggttatggttcagacaagaagacccgccactatctccctaatggttttaagaaatttgttgttcacaatgtgaaggacttggaactgctcatgatgcacaacaggacttactgtgctgagattgctcacaatatatccacaagaaagagaaaagatatagttgagagagctgcgcaacttgatgttgttgtgacaaac

SEQ ID NO: 38015 - DNA, 406 bp, Glycine max
  Clone ID: LIB3056-010-Q1-N1-D7
caaacttttaagaacttcagctgtgagaagaggtttatatgctggtgtgggcctcttaatcttccagcagtttgtgggaatcaacactgtgatgtattatagtcccaccattgttcagttggctggttttgcatctaacaggacagcattgcttctgtcactcatcacagctggcctcaatgcatttggttcaattctgagcatttacttcattgacaagactgggaggaaaaagcttgctctaatcagtttgtgtggtgttgtgttctcccttgctctcctaaccgtcgcttttcgcgaaagcgaaatccactcaccaatggttagtgccattcaatcctctcaattcaacaacaacaacacctgccctgattacaaaacagctttgaactctgctgaatggact

SEQ ID NO: 38016 - DNA, 398 bp, Glycine max
  Clone ID: LIB3056-010-Q1-N1-D8
ggaaaaagggagggtcaaaattccgccggagaaaatctttgctcggtatttgcaatcgggagaggcgagcgagcgagcgggcgagagacataaggtcccttctcaggcatggcgatgacagtacacgtccttgctgggttggcttttatgttttcagctagcattttgcttcagattctggcatgtgcaatatataacaattggtggccaatgttatcagctctgatgtatgtgcttgttcctatgccttgcttattctttggaggtggatccactcaatttctaatgacccgtgatggtggtgggtggatagatgctgcaaaatttttgactggagcatcagctgttgggagcttagccattcctatcattctcaagcacgctcatatgattgagac

SEQ ID NO: 38017 - DNA, 216 bp, Glycine max
  Clone ID: LIB3056-010-Q1-N1-D9
cggctcgagggccgggctacccgctgagtttaagcatattaataagctgaggaaaagcaacactataggcgaaggactttaagttgggatttgggaattagggttgttcgcgtggcgaagatgattgaagtggttttgaacgatcgattggggaagaaagtgcccgtgaaatgcaacgaccatgataccattggcgaccttaagaagcttgtggcg

SEQ ID NO: 38018 - DNA, 405 bp, Glycine max
  Clone ID: LIB3056-010-Q1-N1-E1
aaacttgctatagcagtaagctataactcatttgaggctctgtgagaattgagaaatggctaaagatgttgaggttcaagagcaaggaggagagtactctgccaaagactaccatgaccctcctccagcacctttgttcgacccagaggagctcacacagtggtccttctatagagccctcatcgctgagttcatagcaacccttctcttcctttatgtcactgtgctcaccattattggctacaaaaggcagactgatacaacggtaggtggcaccgactgtgatggggttggcattttgggcatcgcttgggcctttggtggcatgatcttcatccttgtttactgcaccgccggtatttcaggaggacacataaacccggcggtgacattcgggttgttcct

SEQ ID NO: 38019 - DNA, 429 bp, Glycine max
  Clone ID: LIB3056-010-Q1-N1-E10
atgcccctcttctctttcccacactacaaatccttttggagatcttcaattgcatttgcatttttcttaacatttctcactctccaaacccaatccactccaatcccatgcaacaaggacccctacaaggagctcaaccttatccctaacaaaaacggcaccgtcacgcgccccaacaaaccccccgagagcccgcccgcaccggatcccaacctcaacaccctcgtactctccaaagacatctccatcaaccaatcaaaaggcacatgggcgagagtctacctaccccgcgtggcactggatcacagctccaagctccccttattggttttctaccatgggggagggttcattttcctcggtgcggcctcaacaatcttccacaatttttgcttcaacatggcaaacgacgtcgttgcggtcattgct

SEQ ID NO: 38020 - DNA, 437 bp, Glycine max
  Clone ID: LIB3056-010-Q1-N1-E11
aaagaaaaccaggtttattggcctagtctacaatactattatcttggctactatattcactcttgcagcaaggtgagataccaagctgcataatcgccttcagagcttttatgccctcttcgctatcagtgggttccatttgacattgcaaggcctctgcttgacagaaaaccttatgttgtcttatcagattcttccattttacaaaatggagagtcatccctacctcaaactacggaagatgtaatgagaaggggttttgatgatgttggccaagaagatgcaaatgatgttccaatgcttgatgatgaagaaatggttgagtctgaatcagaatgctctgatgatgaacctgacctagaaaccacttcagatgatgatccagaaattgctgatgtcagcaaggttttgctagggataaagggatctcatgtgaa

SEQ ID NO: 38021 - DNA, 406 bp, Glycine max
  Clone ID: LIB3056-010-Q1-N1-E12
ctctcttttgcgtttcgatgggacccttcagtttctgcacacaccatcataccttttaaaatcttcacgaatcagcaaaatcccctcacacactctcttcctcccaaagatcttttctctttcgatattttatctctctctcttttcctcatggctgagaacttggacgacggcgagttctggctcccgccgcagttcctcgccgacgacgacgttttgccgacaccctttgaagcaaagttcccatctttgcccgacgacactgttttgttcccctccgagtggccgtacggttccccagttgattctaccgttggtggctccagtgagaccgagagcgacgaggaggagcaactcgtcgctgagttaactcgccgcttaactcgctcctctcttcaatctgata

SEQ ID NO: 38022 - DNA, 352 bp, Glycine max
  Clone ID: LIB3056-010-Q1-N1-E2
gatctatccactcacctgcctcttcctcacccctttctgcatctaacgagtaaagaaaaatggcgcgtaagaagatcagagagtatgactcaaagaagttgttgaaggagcactttaagagactttctggcaaggagttgccgatcaagtctgcacaaattactgcatcaactgatttcactgagctacaagagaaagaaccctggctttcatcttctaaattggttgtgaaacctgacatgttatttggaaagcgtggcaaaagtggtttggttgcctttaatttggattttgcacaagttgtttcgtttgtgaaagagcgtcttggaaaagaagttgagatgagtggatg

SEQ ID NO: 38023 - DNA, 402 bp, Glycine max
  Clone ID: LIB3056-010-Q1-N1-E4
atgtaattcctccacccttgcttagagagtttaatgatgtctacatagccactgaactcatggatactgatcttcaccatatcattcgctccaatcaaaatctgtcagaggagcactctcaatacttcttgtaccagattcttcgtgggcttaagtatatacattctgcaaacgtaatccatagagatttaaaaccaagcaacctgctgctaaactcaaattgtgacttgaagattattgattttggtcttgcgagaccaactttggaaagtgacttcatgacagaatatgtagtcacaagatggtacagagctcccgaattgttgttgaattcctctgattacacctctgctatagatgtgtggtctgttggttgcatctttatggagccttatgaataaa

SEQ ID NO: 38024 - DNA, 371 bp, Glycine max
  Clone ID: LIB3056-010-Q1-N1-E5
gaacaattaaaaagattgtcatgctatcatgtaatcgaatacaattaggcttcatcttcatgctcatattcttgtaccttgaatatgagcaggaagatgaagcctaaatgttaatattcttatgtgaatttcaatattgattgcatatttgcttgaaccttgaatattgtttcaaagtaatgaactttatcaccctcttactaaaggttcagaagggttatcaaaagatttagaagtttctgagcatttggaagacaatcttgaccaagagtggtcacagatttcacagatgcacaagagtatagcttctttcagagacaagtcaatcaacaaatggcagcggatgacacacgtgactactggtgctgctg

SEQ ID NO: 38025 - DNA, 367 bp, Glycine max
  Clone ID: LIB3056-010-Q1-N1-E6
gcaacggcggcggcaaccaccgttcaacgccggagataccatctatttctactgtattcttctcactctgatttattctcttcagtgaacactgtagctatgggaatcagtaaaacagaagtgaacttaaggaggttgcttggagctgctcctcagcagcaaaaccaggcaaaacttgtgcattatgttgcgtgaacaattggaacaattggctgaagaaaggacactggaaggcttaccaaggatttcaaaggctatgttgaatgattattcagagaagattgaagccattgcttccaaattggttaatcatgtgattgacgcacgagtacctgagagggacttctaaaggaattttgttaaggaa

SEQ ID NO: 38026 - DNA, 404 bp, Glycine max
  Clone ID: LIB3056-010-Q1-N1-E7
cacgtgcctctacgaagtctcctacggcgacggatcctacaccgtcggagagttcgcgactgagactgtgacgctgggctccgcggcggtggagaacgtcgccatcggatgcggccacaacaacgaaggactgttcgtcggcgccgccggtttgctcggccttggcggcggaaagctctcttttccagcacaagtcaatgcgacgtcgttttcttattgcctcgtgaaccgcgactccgacgccgtttcaactctggagttcaattcaccgttgccgcgaaatgctgctactgcaccgttaatgcggaatcccgagctcgacactttctactatctaggattgaaaggaatcagcgttggcggtgaagctcttccgattcctgaatcgagttttgaagttgatg

SEQ ID NO: 38027 - DNA, 369 bp, Glycine max
  Clone ID: LIB3056-010-Q1-N1-E8
attgcggctagggtttaggtccttctttcaccgtctgcgttccttcaatcttcttattctctttcatctgtgatggagacgttgcgggtttagttctaaggggtggttctggccttgggtttttggaacgtacggcgtcgttctggggttgggaaaacaaattctgagagatggcaaccacgaacccttttgattcgttgggtgacgacgctgaggacccttctgagctcatcgtcgccgagcaactcaaggcggcggctgcggcctcggcggccgccgtggctcccaagaaggcgccggctcagcagaacaagccggctcagatacctaccaagccgtctgctacggctcacgctgtgagggatgcca

SEQ ID NO: 38028 - DNA, 352 bp, Glycine max
  unsure (1)..(352): unsure at all n locations
  Clone ID: LIB3056-010-Q1-N1-E9
atcatctncctcatgtgaacgttacattacaccttaatttggttttgtagcattattatccccaacccatcaaaagcaacaatcattgaattaattgcaccaaatattgttttgctgtaatcaatactccaatggggaatgccttggggggaaagaaaaccacaaaggtgatgaagattgatggggaaaccttcaagcttaaaaccccaataaaagtttgtgatgtgctaaaagaccaccctggccttgttctgttagaatccgaggctgtgaagcattatggtataagagcaaagcctttggaagcccacaaggaattgatgccgaagaggctttactttctcgtggaact

SEQ ID NO: 38029 - DNA, 406 bp, Glycine max
  Clone ID: LIB3056-010-Q1-N1-F1
cggctcgagttgcaacactcacacaccaatggcactcagacccatcgacaacgctcttccgacaacaaccccagagagacccaaaaaacaacctaaaatcgctgttgcaacccaaaaacaacaagatcgtgcttccgtcaacggcgaaaacgtagttccattgccatcatctgaggatgccactgttgactatgtctcctccgacaaccttaaacccttggcggaccccgaagttaagattcagagtttggtggaagatttggattcgaaaaattggatcaaggtttgtgaatcgttgaatgatgttaggcgcttctcgttactccactcctctcttctattcccaatcttgggtaaaattgggttggtggtggcgaagacaatgaggaaccctcgtagtgctctt

SEQ ID NO: 38030 - DNA, 439 bp, Glycine max
  Clone ID: LIB3056-010-Q1-N1-F10
gtcgtcgtggtcgtgtcgcagcaaaaccaagccacccactaacttgtttggtccaagacatggctctgatcctgcatgctaccaaaacaaacaagaatgccttcaagactctgattgcggcagagtacagtggcgtccaagtggaattggcccctaatttcgagatgggtgtctctaacaaaactcctgaatttctcaagatgaatcctattggaaaggttcctgttttggaaacgcccgatggtccagtctttgagagcaatgcaatcgctcgttacgttgctcgactaaagggtgacaacgctttgttctcatcttctgccattgataatgcccacattgaccagtggattgatttttcatccttggagatcgatgctaatctcatgaaattgctcctaccaagacttggatttgccccataccttcctccagttga

SEQ ID NO: 38031 - DNA, 268 bp, Glycine max
  Clone ID: LIB3056-010-Q1-N1-F11
ccgcaaaagttgaaatttctaactgcatacaccagatcccggaaacgccatatttaagcgatggataaactaattatctctatgagcatattccacctatgtctcctatgtcaaacttcatgctaaagtacaataacttacctaagttgcactaaattgacaagatttttctgcaagctacttcctttttaaagaaaaagatattattagaaatatgcagaagacaagttgaatcattgcattgtatataaacattgtacttcgctag

SEQ ID NO: 38032 - DNA, 440 bp, Glycine max
  Clone ID: LIB3056-010-Q1-N1-F12
atacaaaaatacatagaaatggcctcttctcttgcatcctcatcaactgttctctggatcctttttctaaccattgcaactcttcatttgagttcagccaggaagttgtccgggtcagacccgcagttgcagtttcaataccacagaggccctctcctcaaaggcaaaatctcagtaaacctcatttggtacggtaaattcaaaccttctcaaaaagccatcgttgctgatttcatcacctcgctctcctctcccaaacccgtcaacggccaaccatccgttgccacgtggtggaaagccaccgataaatactacaaaaactcgtcccccaaactcgctctttccctcggcaccacccaaatcctggacgagaattactccttaggcaaatcgcttacgaataaccaaatcttaaaacttgcatccaagggtccacagag

SEQ ID NO: 38033 - DNA, 370 bp, Glycine max
  unsure (1)..(370): unsure at all n locations
  Clone ID: LIB3056-010-Q1-N1-F2
gagatatttcgaatttcgatactttgatcaaaaccacagcactccctcaatcctgaccgctggctcttcaggatccagtgtcgtggttcccaaggacttcagaatgctgggaggagctngaaaaaggagaaaaaagaatcggagatggacagtagctatggatggatgatggtgacgacatttacatgcgctcttgactgaaccattatggcccctatatactgtccatgaaggaggaattaatcaattgaagttgttttgtgataaagactacccagaaagcccccagtgttcggtttcattcacgaatcaatatgacttgtgttaatcatgaaactggagtgggttgaatcaaagaaatttggtcttc

SEQ ID NO: 38034 - DNA, 411 bp, Glycine max
  Clone ID: LIB3056-010-Q1-N1-F3
ctccattaacctcatttggtacggccacttcaaaccttgccagagggcaatagtgtccgatttcatcacctgagtgtcaccctcatcccctcacagcacccaaccatccgtcgacacgtggtggaaaaccacaggaaaatactaccaccacctcagtaatactaaagaaacctgccctctttcaattccactcaataaacagattctcgacgaaaactactcgctcggcaaatccctcacgagcaagcacctcattcagctagcttcaaagggtgaccacaaaaacgccatcaacgttgtgttaacttccgctgacgtggcaattgaaggtttctgcacgagccgatgtgggacccacggttcttcctcagcgggccatgcaaagaacaagaactacaagttcgcatacat

SEQ ID NO: 38035 - DNA, 372 bp, Glycine max
  Clone ID: LIB3056-010-Q1-N1-F5
tggctccactgaatttggaagaaattggcagcaggttaccaccaaaatgcagtggtagtgaaactgtgcgtatggctcggtcactcattgctgctcgtcatgctggtgagaggctattgagatgctggggtggagggactggttgggctgtggaggatgccaaggacaaaatcatgaagctcttagaagagtacgaaagtggcggggttgtgagtgaagcttgccaatgcatccgtgatctgggaatgcctttctttaaccatgaggtagtgaagaaagctttgattatggcgatggagaaaaagaatgatcatatgctagatctactgcaggagtgcttcagtgagggcctgatcaccattaatcagatga

SEQ ID NO: 38036 - DNA, 409 bp, Glycine max
  Clone ID: LIB3056-010-Q1-N1-F6
atagcagagagatcacatcgcggctctctcatgtctcaacccaaccacccgctgaatctaaatgatgataacagagagagatgtaagaatacaatcaaacagcatgaagataatcttaagtttcttaattctcaatcaaatcaattagctgaatcaatatttgacttgcaagtgagtcttgcaaggtaccattcaactaatgtaattacgttagagaatggaaatggtgcctttcatactgaagaggaaacaatggaacaggtaatgaagaaagagaactctgctgctagtatatttagttggctaaaagttaatgcacagacatcaaatttgacattaacaaaggatgttgtgggagttgttgcaacccttgccaaagttgagagcgatgatcttagcaggattcttt

SEQ ID NO: 38037 - DNA, 403 bp, Glycine max
  Clone ID: LIB3056-010-Q1-N1-F7
atcaaaacctcagaacgcactttgatcttcccttcccaccctccttttctccaacaccaccccttccctctctcccacctcgacactgatcccaacctccacctcaccttccgctacctccgcgcgtacacctcaacaacaacaacaacctccctcgaccccttccacgtcatctcctcctccctctcccacgcccttccccacttctaccccctcaccgccaccctccgccgccaacaaacctccccccaccgcctccaactctggtgcgtcgccggccagggcatccccctcatccgcgccaccgcggacttcaccctcgagtccgtgaacttcctcgacaacccggcctcgagcttcttggagcagttagtgcccgacccgggacccgaggaggggatgg

SEQ ID NO: 38038 - DNA, 392 bp, Glycine max
  Clone ID: LIB3056-010-Q1-N1-F8
ataccacacaacacaaaacgcaagtcaattggcgtcggcacgattcagagatttggttcgctgcctgaaacctaatggctccgaaggccaaaccggcgccatcgcagcctgctcctcctcctgccctcgaagatctcttcaccacgctcaaccgccacatccaggcttccgcatacgacaatgccgtcaagctcacagatcagattctcgccattgctcccggcgacgaggacgcgctccgatgcaaggtcgtcgcgctgataaaaaatgaccgcgtcgaggacgcgctctccgccattcattcctctaagaagcagcttgatgattttcatttcctcaaggcatactgcttatacagaccaaacaagttggatgaagccttggagtctttg

SEQ ID NO: 38039 - DNA, 405 bp, Glycine max
  unsure (1)..(405): unsure at all n locations
  Clone ID: LIB3056-010-Q1-N1-G1
cttgccatggcctcaaactccatggctggcttgatcaccggttcgaattctcacttctcgcgtgactccgatgagcatcagactcctcctacccgacaggcttcatcgaaaactacttgtcgagtttgtggcgatgagattggatacaaggaaaatggggagctgtttgtggcttgtcatgtgtgtggatttcctgtttgccgaccgtgttatgagtatgagaggagtgaagggaaccagagctgtcctcaatgcaacactcgctataagcgccacanaggttgtcctagagtagctggagatgaagaggacaactntgatgcagatgattttgatgatgaatttccgggtaaaaatcatcgtgaagatctagatcggaaccatgatgttaatcatgtggaaaat

SEQ ID NO: 38040 - DNA, 446 bp, Glycine max
  Clone ID: LIB3056-010-Q1-N1-G10
aaactcatttctcatctcaatcaatccaatggactctcccaacgctttgtctaccgctccggcagcgggtagtaggaagaacgcgacgctaatttgcgtcccaataatgggagaatcagttgaaaagatggagattgacgtggacaaagcgaaagccggaggcgcggaccttgttgaaattcgattggattctttgaaaacctttgacccctatcgagatctcaacgctttcattcaacaccgttctttacccttgttgttcacttacaggcccaaatgggagggtggtatgtatgatggtgatgaaaataaacggctggatgcacttcggttagccatggagttgggagctgattacattgacattgaacttcaggtagcacatgagttctatgactctatacgtgggaagacattcaataaaaccaaggtcattggttcatctc

SEQ ID NO: 38041 - DNA, 299 bp, Glycine max
  Clone ID: LIB3056-010-Q1-N1-G11
cagaattctctaaaagagatctttttctgctctttgaagaaagaagggtctttgcttgattttggagatgtctctgctctcagatctcatcaaccttaacctttccgataccaccgagaaggtgatcgcagagtacatatggatcggtggatcaagaatggacctgaagagcaaagcaaggactcttccaggaccagttagcgaccctttaaagctttccaagtggaactatgatggttccagcacaagtcaagctcctggtgaaaacagtgaaatgattttatacccacaagccattt

SEQ ID NO: 38042 - DNA, 447 bp, Glycine max
  unsure (1)..(447): unsure at all n locations
  Clone ID: LIB3056-010-Q1-N1-G12
gctgtctgctgttagatctgtacccgcctagccattgatttggaaaagtccaacttcaaggatgagtaagcttcagagtgatgctctaagagaagctatctcaggaatcatggctgattccaaggaaaagaacaggaaatttgtggagaccattgaactccaaattgggttgaaaaattatgatccccagaaggacaagcgtttcagtggctctgttaagaagcctcagtctcaacacagaagcagaaggaggagaagcagaaagaagagacgaagcaatggcgccgaagaagcccaaaaccacgtcgaggaaaccctgatttggtcaagggaattggcaanatattcgaggtcgcagatgtaccacangaggggcatctgggccatcaaggccaaaaccggcgggttttgcccctccacgatcccaagcccaaacccgaggccccg

SEQ ID NO: 38043 - DNA, 191 bp, Glycine max
  unsure (1)..(191): unsure at all n locations
  Clone ID: LIB3056-010-Q1-N1-G2
tcctggctggcttgntctccggttgcgcttctctcttctcgcgtggctctcgtgggcctcngtctcctccttccctgcgggcttcttcgtngtctgcttgtcgngtttgtggcggtgtgtttggttccttggtgtttggggtgctgtttgtggcttgtcntgtgtgtggntttcctgtttgccgtccgtgt

SEQ ID NO: 38044 - DNA, 172 bp, Glycine max
  Clone ID: LIB3056-010-Q1-N1-G3
gattgaagattcacatgcacgtgatatctgactggctgggattttcatggaggcagggtgatacatagatgataactcaatgggaacctcatgctattcaacgcttcaaagagttcaacagcacttgacccagcgagtattaaggaattcccttgaagtccatttggcttgg

SEQ ID NO: 38045 - DNA, 406 bp, Glycine max
  Clone ID: LIB3056-010-Q1-N1-G4
gaaccgtgtagttgcatcaatgttcaacacagtctcaagccaaaagaattccttatctgggattggccttcaagaaagacactggtgacactagggagacccctgccattgatgtatgccaggggctacttggtgataaggccaacctgagcatatacgatccacaagtaactgaggaccaaattcagagggatctatcaatgaacaagtttgattgggatcatcctatccacttgcagcccacaagtcctactactgtgaagaaggtcagtgttgtttgggatgcctatgaagcaacaaaggatgcacatggcctttgcattctaaccgagtgggatgagttcaagactctcgactaccagaggatatttgacaacatgcaaaaacccagcatttgtttttgatg

SEQ ID NO: 38046 - DNA, 406 bp, Glycine max
  Clone ID: LIB3056-010-Q1-N1-G5
gtaaaaacctgccatgacagtaataacaatgcctcctgtcttatcttactctcttctttccctcgcgttcttcttcactctcaagtaccttttccaaagaagcagaaaagtacgaaacctgccacctggtccgactcctcttcctataatcggcaaccttaacctcgttgaacaacctatacaccgtttcttccaccgcatgtcccaaaaatatggaaacatcatatccctttggtttgggtcacgtcttgttgtggttgtttcatcacccacagcgtaccaagaatgtttcactaaacatgatgttaccttggccaacagggtacgctccctctcgggaaaatacatattctacgacaacaccaccgtagggtcttgctcccacggcgagcactggcgcaacctc

SEQ ID NO: 38047 - DNA, 390 bp, Glycine max
  Clone ID: LIB3056-010-Q1-N1-G6
atccttttataattctgatcgaaacaaatcggtgcgagaacatcaccagagcagagcatctttggaagtttgatttcattgttgtttggcaacttgtgtttttcccaccgaacccaatccaagagttatgggattggcctctgttgttcacattcacgctcctcctttcagatgctctgtacttcaccaccccatctcttccttttgctcaatgtaccattatcgtcctcctcgccgtttcccacttctgtgctccagacgaattggccatgacaattatgcctcagaagtaaagaggatcagtgctcaacaaaatgatgacataggcaaagttgagaaatctcccactcaggaatctctgggaaatgagggttacaattctttcggcag

SEQ ID NO: 38048 - DNA, 208 bp, Glycine max
  Clone ID: LIB3056-010-Q1-N1-G7
ctctccttctcgatcccaattccactagggattcaatgcccatgcgattcccagctcgttagatccacgacaacgtcacggttcccagattctttgggaaaaaaaaataatcctcctttgcccaacaggtaagttggaaaaaaatggaccatgacacgactgtgtgccaagctcctcctgacggtactatattgtgcatcaacaactg

SEQ ID NO: 38049 - DNA, 273 bp, Glycine max
  unsure (1)..(273): unsure at all n locations
  Clone ID: LIB3056-010-Q1-N1-G9
aaacaatggcgttgttctcttctgccgcaaccggtcttcctcggaacctggcattcaacaaactctccctctctcactctcacactcttctaccgcgcttnctttctttcccaactcccaagtcatcaaaccctcgcaaccgcgtcgcagtctctctccaaaccccacgcgctcaatccgccgggtccggtttttccttccgcttcttccacggcctctgcttcgtcgtcggcgacaatatcgacaccgaccagatcattcccgccgagtacc

SEQ ID NO: 38050 - DNA, 266 bp, Glycine max
  Clone ID: LIB3056-010-Q1-N1-H1
cgacgagcatgcgcatcacatgtatacagcacagccctcccaaccaatgcagccaaaggaccagccacagcgtgaacgatacctaacaaggcgtcgaaagactaagcgcagtgaaacaaagaggatactaagtctcccaaaccttgtacagacccaaaatacgagcccagacaatcagaatctagatggcctgcaaaactcgggggatactcgaacggcagcatccgatcaaaaacgaacctcatcaatcacaggcagaagaaaaa

SEQ ID NO: 38051 - DNA, 329 bp, Glycine max
  Clone ID: LIB3056-010-Q1-N1-H10
tctcggtgaattccaattctacattttcaagaaataaggaggcagaaatgtgcatatatgaattggaattatttgttttcttattaggcctatcctgaagccaaaggaaatgagatcggaattcctcggggaattccaattccacattttcaagaaataaggaggcaaaaatgttcatatatgaattggaattatttgttttcttattaagcctatcctgaagccaaaggaaatgagatcggaattcctcggggaattccaattccacattttcaagaaataaagaggcaaaaatgttcatatatgaattggaattatttggtttctta

SEQ ID NO: 38052 - DNA, 379 bp, Glycine max
  Clone ID: LIB3056-010-Q1-N1-H2
agaagagaagacgatggagaaagaggagagcacggaacagcgaaagcaagcgaggcttgccattatggagctcgccaacatgataagcgttcccatggcgctaaacgccgtcgttcgcctcaacgtcgccgacgccatctggcaaggcggcgccaacaaccccctctccgccgctgagatcctcccccgcctccttcccgccggcggcggcgacgccgagaacctccagcggctcctccggatgctggccagttacggcgtcttctacgagcacctttccgtcggcgagcggaagtactccctcaccgacgtcggcaaaacgcttggcaccgatgaacaaggcctgtcgtacgcgcattacgtgcttcaacaacaccag

SEQ ID NO: 38053 - DNA, 242 bp, Glycine max
  Clone ID: LIB3056-010-Q1-N1-H3
catgaatatctttttctaccatgccctagccaatcttagttgggacatgaatatctttcaaatgggcccatctccacatatagaagttcaatttatgcattgtcgttgttatttcagttcattttccccaacattatttagtagtatgttgtgttagttaaaaaaaaaaaaaaaatataaacacaaaaataacaaagaaaaataaaagaagcaaaatataaagcttaatgaaaaaatgggcg

SEQ ID NO: 38054 - DNA, 402 bp, Glycine max
  Clone ID: LIB3056-010-Q1-N1-H5
gtgactcgttcttcttcgtcgttatcttcttcttttggtgtttgtgtgtttgttttttctctcacctgaaaatgtcttgctgcggtggtaactgtggttgcggaagcgcctgcaagtgcggcaacggctgcggaggctgcaagatgtacccagacttgagctacaccgagtcaaccaccaccgagaccttggtcatgggagtggcaccagttaaggctcaattcgagagtgctgaaatgggtgttcccgctgagaacgatggctgcaaatgtggagctaactgcacctgcaacccctgcacttgcaagtgaggtgttggagagctaaagcttcaagcagagatggcccttagaaataatgataaaaactatatgtagtttcaaaacttcaaaattatgtagt

SEQ ID NO: 38055 - DNA, 373 bp, Glycine max
  Clone ID: LIB3056-010-Q1-N1-H6
ggcgggagcgccgttttcaccctgacctccggtccagcgaccgtgaccctgaacgaaacaggggagcaatactacatttgctccgttggatcacactgttccgctggccagaaactggcaattaacgttaacagagcttcttctaccggtccttcccctgcacctcaacccagaggaagtggttctccaccaagggctagccctgtccccacacaagcaccacaagccagtagccccactcctccaccaaggtctgcaccagcacctgcttttggtccatcctctgaaccagctactttcattgttggagaaaccgctggctggattgttcctggcaacgcttccttttacacagcttgggccctctgcaaaa

SEQ ID NO: 38056 - DNA, 398 bp, Glycine max
  Clone ID: LIB3056-010-Q1-N1-H7
cacacacctcacctattagaagtaacaaaagaccctgggtctcaaaagaataaacaagtataaaaaagaaggcacttccctcaaacagaaactaccctctatctctctcttttcaagccttaaatgagtaaaaaagagtgaagaaaggaaagaaaggagcaccatttttggtttgagaaacataattagcaagagagttcaaaatggggaagagagagtttaatggggtggtgttgatgatgctgtgtttgtgggtttgtggtgtcacagcctctgtgacttatgaccacaaagccattgtggttgatggcaagagaagaattttgatctctggctccattcattatcctaagaacacacctcatatgtggccagaccttattcaaaaggccaaagat

SEQ ID NO: 38057 - DNA, 412 bp, Glycine max
  Clone ID: LIB3056-010-Q1-N1-H8
ccacaactccttttcccaatttctctctcctgtctctctctctctctctctgagttctcctttctctctcttgagttaccatttctcattcattcataatgcactaatcataacaacaccgttcagctcaacaacaaataataaaataaatcataacaccgttcgttcatcaatggcggttccgctgcattcctagattgctctctttttcaccaattttcattcgttgcgtgtgtttgttcgctgagtgcgttagttattacagcaatggagttcgagcaccccaccgcgacgcctctcaactccgccatgacctacgacgaagcctccatggagcgcagcaagagcttcgtcaacgccttgcaggaacttaaggaccttgaggcctaaactttattctgctgcagaatac

SEQ ID NO: 38058 - DNA, 328 bp, Glycine max
  Clone ID: LIB3056-011-Q1-N1-A1
cttcgggctgggatggatttggaatgtggttcttatttgacgtatcacgctaaatcagcagtgttgcagaaaaagttaggcatgtctgaaatagaccgtgcccttcagaatctgttctctattagaatgaggctaggcctatttgatggaaatccaacaaggctctcattcggcttgattggctccaatcatgtatgttccaaagagcaccaatatctggctcttgaagctgcaagaaatggcatagtcctcttaaaaaactctcccacacttctcccacttccaaaaacaagccccagcatttccttagcagtgataggtccccatg

SEQ ID NO: 38059 - DNA, 369 bp, Glycine max
  Clone ID: LIB3056-011-Q1-N1-A10
atttacttctcttgcctctcttgctccttttcgtcatcggcatcaaccaatttgaaaagaaaaaaaagaaaaaagagcatggtgttcccaatggagctcctgaggcttgcagattggatcttgtaccagctgcttgctaactcatgttatagagcagcaaggaaaatgaagagttatggattccatttggggtatttgtcatctaaaccatcccttcaaccttcctctttccctagtgttaccgaatgtgattgggagggtagaggctcacaaacacttgttgcttgtggcattcatagagtccttttgaggtctcactccttctttccatatttcatgctcgttgccttttgaagtggcagcatttta

SEQ ID NO: 38060 - DNA, 393 bp, Glycine max
  Clone ID: LIB3056-011-Q1-N1-A11
aacaagagaactggtggtgcaactgcaatgcaaggcatcggcggttgaattaatgaatcagatccatttgaatacgtaactagccagatattcccctgtataatcctctaattactaactaccaccaccaccaccactctcccacttcaaaattcatgtctccctcttccctccacgcgctcctcatcattctcttcctaggttccgcacacgcgctcaaggtccccttccgagtcaacgatgttctccccgttctcccccacggaatctcctggccgctcctcaacaacctccacagcgccgtcgacttgctcccttccttcgtcgccgtcgtccctcccgataacgattccgttcagtggagagccgcatgcttttacgataatcaagcct

SEQ ID NO: 38061 - DNA, 390 bp, Glycine max
  Clone ID: LIB3056-011-Q1-N1-A12
attttctttacttttatatgattgcttcacactttacaattctttattatattcatgaaaattaaaatcataatattgttccaaattccagtatccagttccttgcttcttcttttggaaaaccagaatggaaattattaaaagtaaaaacatttatattacacttaaaatgtaatttcaagcattaccaagcctttaaatcaattagtgtgtaattgtttcaacttattcattagttttcagtttgagttctattgtccatgatagtcttattcaaattgagcaggattatccctaattgaagaccactatagtctttgtcaaaaaaaaaaaaaagatttcaagtctatttctttaatcagcattctcaataaaagaggctttttggga

SEQ ID NO: 38062 - DNA, 409 bp, Glycine max
  Clone ID: LIB3056-011-Q1-N1-A3
ggagattggtaatgttgggaatttgtatatggatcaacgtgcgccatggtctctctttaagcaagggggtactgctgctgaagcagctgctaaggaccttgtaattatattagagacagtgaggattattgcaattgcactatttcctgttacaccaagcttgagttggagaatatatgcccaacttggctattccagggaccaatttgatgcagcaacctggagagacaccgagtggggtgggcttaagggtggccaagtcatggctcaacctaaaccagtctttgccaggattgaaaaccaaactgaagtggaagacaaaggagtcgcagttggaaagactaagaaaagcaaagcgaagccgaaacagcctcaagaagtcgtcggagcctagatacccatttttgac

SEQ ID NO: 38063 - DNA, 374 bp, Glycine max
  unsure (1)..(374): unsure at all n locations
  Clone ID: LIB3056-011-Q1-N1-A4
caggctctggttttgcggttagggtagctctttctactcaaagcaaagcaaaacatcaatttctgtttcagttcgcggagatcaatatttgtcgctgaggtcgatcgtcgataaaaggcaatgtttttgtgggattggttttatgggattctagcgtcgcttggcctgtggcagaaggaggccaagatcttattcttgggcctcgataacgctggcaaaaccaccttgcttcacatgctcaaagatgagagattagtccagcatcagcctacccaatatcctacatcagaggagttgagtattgggaagatcaagtttaaagcttttgatctcggnggtcatcagattgctcgaagagtttggaaagattacta

SEQ ID NO: 38064 - DNA, 406 bp, Glycine max
  Clone ID: LIB3056-011-Q1-N1-A5
tgagaattcaattattggaaatggattacgtaaccagtttaattggatgggtcgaatggtttcaaaaaatggagttctaacttccatttcttaattattattgaattaaccgatcaacttgctttgttatcgaacatttctttttgatttcaaaaattttccggaaaaaatttgaatctatttttatatgcgaatcaatcctactacttctggtcctgaggtttctgcgcttgaaaaaaaaaaatctgggacgtatcgcccaaataattggtccggtactagatgtagcttttcccccaggtaagatgcctaatatttacaacgctctgatagttaagggtcgagatactgttggtcaacaaattaatgtgacttgtgaagtacagcaattattatgaaataatcg

SEQ ID NO: 38065 - DNA, 367 bp, Glycine max
  unsure (1)..(367): unsure at all n locations
  Clone ID: LIB3056-011-Q1-N1-A6
gggaattccagtgttatgaccaaaacatgctcagctttctcaagcaacatgctgaagcatctggaaatcctctgtgggggcttggtggtcctcatgatgcacctacctatgaccagcccccatacaatggcttcttcaatgatggggcttcttgggagtccacatatggggacttcttcctctcttggtattccaatcagctcatagctcatggagattgcctcctttcattggcatcttcaacttttggtgactctggggtgacaatctatggaaaacttccacttatgcactctnggtatgggactcgattccatccttcagagctaactgcagggttctataacccagttaacaaggatggctt

SEQ ID NO: 38066 - DNA, 380 bp, Glycine max
  Clone ID: LIB3056-011-Q1-N1-A7
cgtagccgtcgcactttgcgttttctgcgtcatctccgattgcccgacaatggccacccaaatgagcaagaagagaaagttcgtagctgatggagtgttcttcgctgaactgaacgaggttctgacaagggagttagccgaggacggatactccggcgtggaagttagggttacgccgatgcgcaccgaaatcatcatcagagccaccagaacccaagccgttctcggtgagaagggaaggagaatcagggaacttacctcggtggttcagaagaggttcaagtttcccgagaacagtgttgaactttatgctgaaaaggtcaacaataggggtctttgcgctatagcacaggctgagtctcttcgctcaagctccttgg

SEQ ID NO: 38067 - DNA, 373 bp, Glycine max
  Clone ID: LIB3056-011-Q1-N1-A8
cggatcttcacgattaggagatggctaagtcgaagaaccacgccgctcacaaccagtcctacaaggcccacaagaatggcatcaaaaagccaaagaggcaccgccacacttccaccaaagggatggatccaaagtttctgaggaaccaaaggtacgcgaggaagcataacaagaagagcggtgaaacagccacggaagaagagtaaagtgtcactctcaaatggggctattaggatttgatttgctattcaagtcccatatgttttgtgtcaaatctatatttagtagtatagtcattttgatgagttaatttaatccagagagaatgcagtacttactcttatagcatcgttgctggtttttggttggtaaa

SEQ ID NO: 38068 - DNA, 393 bp, Glycine max
  Clone ID: LIB3056-011-Q1-N1-A9
cttcaatatcttataacttagcattgtattgtgttcaaactttgtttcttccataccctcttcttctttggccttaaccgtcatatttggctttgaaatggagttcgaggaccgcttcagacaccaggttcatagaccaaaatatgattgccttctgcttgatttatatgacactttgtatcctctcaaatctgttctggcaaaatcatgtctccaaaatattaaacactacatggttgagaagcttgtcatagaccctagcataattgatgacctgtccaacctcctttacatgaattatggaactactatggctgttctaagggcagttggatatgactttgactatgatgaatatcatagctatggtcatgggagattaccttatgagaa

SEQ ID NO: 38069 - DNA, 378 bp, Glycine max
  Clone ID: LIB3056-011-Q1-N1-B1
gcaaaatcttatcttagctaccccatcacaacaaccacgatgctatttctcatactctattaggcaaaaacaccaccaaatgggagaggaaaaggagcagcctaagaatgacaccgagaaaaagcccgaggaggtagcccccaagaaagacgacggacccatccctgtcgtttacaaactcgacttgcattgcgagggatgcgtcaagaagatcaaacgcacctgtcgccacttcgaaggtgtggaaaccgttaaggcggatctatcgtcgaacaaggtgactgttaccggtaaaatggacgccgagaagctgcgagataagattgccgagagaacaaagaagaaggttgatatcatatcagctccgccgaaaaaaga

SEQ ID NO: 38070 - DNA, 323 bp, Glycine max
  Clone ID: LIB3056-011-Q1-N1-B10
gtgcctcaattgcgctgactaacacactcacagatacgaaaccagatagagagagtgaaaacaaaactacacaattacacatagcagagcatagcgtaccgtgtcagatggtagacataggaacagacgttgtagaatccgcgccaaatgcataacagagcatctctgacgaacatattcgtacaagatatctgtatgcactgtgatcggaacatatcttctactaatgtaccaatgagcgcaattttgagtttcgtgctttccatgcatcattcgtctgcctatttccagtctattgaatttggctcatagatcagaacatg

SEQ ID NO: 38071 - DNA, 395 bp, Glycine max
  unsure (1)..(395): unsure at all n locations
  Clone ID: LIB3056-011-Q1-N1-B11
ggcgcgttttgcatgctcagtttgggactctgcaatctgtacacacccctcaaaacggggtgcgttcaatctctcttacgatccaagttgggtattcgaacccagtcctgcatcagaatggaagggagtaacaccaccgtgcccagcattgttgtctatgtcactgttcccaacaaagatgcaggtaagaagttggctgaaagcatcgtcaaagagaagcttgctgcttgtgtcaacagggtaccgggtattgaatcggtgtaccagtgggagggaaagatccaaactgattctgaggaactcttataatcaagactaggcnatcccttctggaggcactgacagagcattgtcaggctaatcatgaatatgatgtgcccagagtgatctcctta

SEQ ID NO: 38072 - DNA, 393 bp, Glycine max
  Clone ID: LIB3056-011-Q1-N1-B12
aaagaataatttatggaggacggcgcaggaagaggtttggaatgccagaagactatggatgggaaggtgagtaacagtaatgggccagagaaggaaattccttcttgttgtctgaaggccaaggcttcaatccccgagtcagaggcaaaattccattccactgttgtttctgggtggttctcagcttctcaaacttgctctgggaaatctgggaaagctgtttatttcaacaacccaatgtggccaggagaagcccattcaatcaaagtagaaaagatcttatacaaggaaaagtcggagtaccaggaggtcttggtttttgagtcatcaacttatgggaaagtgcttgtacttgatggaatagttcatttgactgagaaggatgaatgtgct

SEQ ID NO: 38073 - DNA, 406 bp, Glycine max
  unsure (1)..(406): unsure at all n locations
  Clone ID: LIB3056-011-Q1-N1-B2
atcaaaacaaccttctttctttcaggttcttgatcagtgtcaaaaccaaaagggtggttgcaaattgcaatggctaagcatgatgttgagggtggttccttcgctgcaaaggactaccatgatcctnctncagcaccattgattgatgctgaggaactcacacagtggtccttctacagggctttgattgctgagttcattgccacaatgctcttcctttacatcacagtgctcactgtgattggttacaagagccagagtgatgtaaaggctgggggtgatgtgtgtggtggagttggcattcttggcattgcttgggcctttggtggcatgatcttcattctggtgtactgcactgctggaatctcagggggtcacataaacccagcaatgacatttgggctct

SEQ ID NO: 38074 - DNA, 294 bp, Glycine max
  Clone ID: LIB3056-011-Q1-N1-B3
ggcaagttttggaattttctgggggcttcgtctggattattcttcaatttgaaaacccaccaagggataagcaagcgtttcctcgttgcaacttgcaacttgcaatgcctacttctgttgctgacctggttttgaaggatcgtcttctgtaaattcttcacccctgcagttcttctccatgatgtcactttcacctagcttaggttctcccaacaatctcttgtttagggaaatgaaatccgaggaaaggggtttgtacttgatccatttgttgctcacttgtgcaaaccatgt

SEQ ID NO: 38075 - DNA, 434 bp, Glycine max
  Clone ID: LIB3056-011-Q1-N1-B5
gggctattctgtaccttttgatgacaacatcaactttcataagacaattgctggggccatcgttattggtattatacttcatgccggggatcaccttgcttgcgattttccaagacttgtaagtacgtctgaagaaagttatgaaaagtatttgaaaggcgtatttggtgatcgtaaacccagttatgtagacctagttaaaggcgtcgagggtgtgactggagttttgatggtggttcttatgataatagcatttacacttgctaccaaatggttccggagaaatctcattaagctgcctaaaccatttagtaggctcactggcttcaatgccttctggtattcacaccatttgtttgtcattgtctatgtcctcctaatcatccacggaataaagctttacctcgtgcataaatggtacctcaaaacgacat

SEQ ID NO: 38076 - DNA, 353 bp, Glycine max
  Clone ID: LIB3056-011-Q1-N1-B6
ccaaaggcttcggcgaccgcccgtgatggataaagtcttcagcaagctccgcaatttggacgcttacccaaaagtcaatgaagatttttacaaccgcacgctcgccggcggcgttgtcaccgtcgtttccgccgccgtcatgctctttctcttcttttccgagctaagttaatacctttacacagttacggaaagtaagctttgggtggatacttcaaggggagataccttgcacatcaattttgatgtcacttttcctgctgttcgatgttcaatactcagcttaaatgcaatggatattagtggcgagcagcatcttgacatacgacataatatagggaagaaaagaattg

SEQ ID NO: 38077 - DNA, 417 bp, Glycine max
  Clone ID: LIB3056-011-Q1-N1-B7
agcatccccgcagtttgtttcctcaagaaggatgagtgtgtacgatccgatccaccagattagtatgtggggagaaggcttcaaaagtaatggaaatttaagtgcagccatgcctctaattgatgagacagacatgaagtttgatagtcagtcagaggatgcttctcatggtatactgggagagcctaataagtatgaccaagaagctaacaaacctactgataagatacaaagacgtcttgcacaaaatcgagaggctgctcgtaagagtcggttgaggaaaaaggcctatgtgcagcagttagaatcaagtcgtttgaagttgatgcagttggagcaagagcttgaacgtgcaagacagcagggaatttatataggcggtgggttggattctaatcatctgggttttgctggatc

SEQ ID NO: 38078 - DNA, 410 bp, Glycine max
  Clone ID: LIB3056-011-Q1-N1-B8
ggaaaatggaagatcaacttcttatctacccaaaagtgggaaaatccactgatgggctggacatccactggggacccctactctcatgttggtgattctgccttgacttttgatagtgaagaagcagcaaaagcatttgcagagaaacatggttgggagtattcggtgaagaagccccacacaccattgctgaaggttaaatcatatgcggacaacttcaaatggaagggaccacccaaatctggtgaagagtgatttgttggtttgtattcatgttaatgcattccgtcttctggagtttaacgtgcagcagttttctctgcatcttttcttggaaaaaagaaagttttaatgtgaattactgattggaaataaaagggactgatctgccatttatttaagtttcttct

SEQ ID NO: 38079 - DNA, 381 bp, Glycine max
  Clone ID: LIB3056-011-Q1-N1-C1
caaacacagataaagagagtgaataaatccagcattgttctggtctctgcaacattctccactctcaaccatggcttcaaagcttttactcatcactgtcttcgtttttgatttgattgcttttggacttgccgtggctgctgagcagagaagaagcaccgctagtgttgtgacggacaatgaaaagaattataattactgtgtctataactctgatatagcaactggctatggtgttggagcatttttgtttctcttggttagtcaagtcctgataatggtggcaagtcgatgcttctgttgcgggaagcctcttaaccctggaggctcaaaggcctgtgcagttgttcttttcataatctgctgggtgtttttcatcat

SEQ ID NO: 38080 - DNA, 373 bp, Glycine max
  Clone ID: LIB3056-011-Q1-N1-C10
agggtttgtagtgtagcaggaacaagcagcaatggcgccgaaggtaacacgcaaggttagcagaaaccccgaattgataaggggaattggaaagtactcgaggtcgcagatgtaccacaagaggggcatttgggctatcaaggccaaaaatggtggcgttttacctcgccacgaccctaaacccaaacctgaaacacccgctgaaaaaccacccaaattttaccctgctgatgatatcaagaagccccttgtcaacaagcacaaacccaaacccgctaagctcagggctagcattactccgggaacagtgttgattcttcttgctggtagatttaagggaaagagggtagtctttttgaagcagctttcttct

SEQ ID NO: 38081 - DNA, 308 bp, Glycine max
  Clone ID: LIB3056-011-Q1-N1-C11
actgtggcttgttagactgccggagcatgcatcatggtggctgacaacaacttgaaatataacttcaatgtaaaaggaactaaaccggacactgaactaagcgtaatggacactgaacgtgctgcatacattatttctatgtacgataacaacggacctgaatcacctactgtggaatttgcagctggcaatgcagatagggatgctcaggtgactattgttgaacatgagcctaagttcaaccgattttaagcaactgacagaatctaggatggaatacctacgaatcatcatgatattccagtatc

SEQ ID NO: 38082 - DNA, 341 bp, Glycine max
  Clone ID: LIB3056-011-Q1-N1-C12
cgcaagcaaaaagaaagaatcccaggcgaggagaaagatggaggggaaggagcaggatgtgtcgttgggagcgaacaagttccccgagagacagccaattgggacggcggcgcatagccaagacgacggcaaggactaccaggagccggcgccggcgccgctggttgacccgacggagtttacgtcatggtcgttttacagagcagggatagcagagtttgtggccacttttctgtttctctacatcactgtcttaaccgttatgggagtcgccggggctaagtctaagtgtagtaccgttgggattcaaggaatcgcttgggccttcggtggcatgatct

SEQ ID NO: 38083 - DNA, 365 bp, Glycine max
  Clone ID: LIB3056-011-Q1-N1-C2
ttagcctttcactctcccacacaacaacatcatgggcgtcaaaggttttgtcgaaggaggcatcgcttccatcattgcaggatgttccacacacccacttgatctcatcaaggtccgcatgcagcttcagggcgaaaacaatttgcccaaaccggttcaaaatctccgacccgcactcgccttccaaaccggttcgaccgtccacgtggcagcggctattccgcagacccgcgtgggtcccatcgcggttggggttcgcctcgtccagcaagaaggccttgcggccttgttctccggcgtctccgccactgtcctccgccagacgctctactccaccacccgtatgggcctctacgacgtcctca

SEQ ID NO: 38084 - DNA, 371 bp, Glycine max
  Clone ID: LIB3056-011-Q1-N1-C3
ctggagaggcatgaactggaatagcagaactaatagctcttgagatgtcaaagcagacaaagacacctatagaggagactcgcaagaagatatggcttgtagactcaaagggtttgattgttggttcaagaaaggcttcacttcaacacttcaagcagccttgggctcatgagcatgagcctgtaggcagtctcttagaagctgttaaggtaatcaagcctacagttttgattgggtcatcaggagtgggaaaaacatttacaaaggaagtaattgaggctgtgacttctataaatgaaaaacctcttgtcctggctctctccaatccaacttcacagtctgagtgtacagctgaagaggcttatcaatgg

SEQ ID NO: 38085 - DNA, 372 bp, Glycine max
  unsure (1)..(372): unsure at all n locations
  Clone ID: LIB3056-011-Q1-N1-C4
cccagctttgcttacagttcctataattttttttctccattagattaccaagctctgcaactttgcttctcaacatggagtatcgtctcctacccattgttactttactcaatattgcactggtggcaacccatgctgctttaccccctgaagtttactggaagtcggtgcttcctactacgccaatgccaaaagccatcactgatatcctttactctgattgggtggaagagaaaagcagctcagtgcatgttggaggtggaggcgtgaacgtgcatacaggaaaaggaggtggcagtggcaccactgtcaacgttggtggaaaaggaggcggangcgtaaacgtgcatgcaggccacaagggaaaagcca

SEQ ID NO: 38086 - DNA, 428 bp, Glycine max
  Clone ID: LIB3056-011-Q1-N1-C5
ccttgctcttgtttgttccttttattgtttctttcttgatcatgtcgcttgttggtaaaattagtactgaaattggggttcatgcaactgctgcaaagtggttcaacctctttgcaacgcagctccatcatgttcaaaaccttactgatagagtgcatgaaaccaagctgcatcatggtgatgactggcatcacaacgagtcgatcaaacactggacttgtacaatagatggtaagattacaacatgtctggagagtattgaatccgttgatgaaccgaacaaaacaatcacctacaagctcttcggaggagatattggtcataagtataaagtctttaagctcatttttcaagctattgacaccgatcatgggggtgttattatcaaatggaccgttgaatatgagaagattgatgagaatgttgat

SEQ ID NO: 38087 - DNA, 382 bp, Glycine max
  Clone ID: LIB3056-011-Q1-N1-C6
cttgtccctatttaaatagctatctagaaagtcctctctatgttccatttcatctcccatactcaaactcactctttctaagttttttctatctctttctctctctctgtctgccatggttctctccaaaaccacctccgaatccgacgtctctgtccactcaaccttcgcttctcgatatgtcagaacttcgcttcccaggtttaagatgccggaggagtcgataccaaaggaggcagcgtatcaaataataaacgatgagttgatgttggatgggaacccaaggttgaacttggcatcatttgtgacaacctggatggagccagagtgtgataaactcatcatggctgccattaataagaactatgttgacatggacgag

SEQ ID NO: 38088 - DNA, 298 bp, Glycine max
  Clone ID: LIB3056-011-Q1-N1-C7
ctccccttctttccctttcttgtcttttctgccctttcacctgtcttctcttctagtcctttccagcatacaaatttaactgaattttcatcccattctctttttctcacacattctcattctcatggatgacctttccactcccaaacaccgtcttctaactctcctcaactccctcaaagaagcttccaaaaggccttaaaccaacaacaaaccccttttccttcacattagaaaccctttacacgccccgatatagactctcttctagacctcaacgcaaaagcccacgccaccc

SEQ ID NO: 38089 - DNA, 383 bp, Glycine max
  Clone ID: LIB3056-011-Q1-N1-C8
gccttttccagtttgctcgaaagattgaggacttgatattgaataatgttgcacctgaagagattcctttccaagttgggctgtcaaaagcagatctacggaagacgttaaaatccagtttatccggggtggacaagtccattgctgcgatgtataagaagttgcataaaaacttgacttcggaggaactcttaccttccttgtggaataaatgcaagaatgattttcttgataagtacgaaacctttgtccaacttgtcgcgaggatttaccctgctgaatcagtcccttctgtagcagagttgcgagaccttttagcttccatgtaaaggtttatacacatgccttctttccatttttttggcctgtaatcattcttttta

SEQ ID NO: 38090 - DNA, 385 bp, Glycine max
  Clone ID: LIB3056-011-Q1-N1-C9
aacacattataactcctgtttctttattaattgtctctttcaaatatatggcagaagatgcttcaattattccaacacacacaaaagcttggtactactctgaacatggtagtccaggtgatgttctcaaattagatcctaattggcccttaccccaacaactcaaagatgaccaagtgctcatcaaggtcatcgctgcatccattaatcccgttgattacaagaggatgcacggcgagttcaaggacactgaccctcatctgcctattgtgccgggttaatgatgttgctggcatagtagtgaaagtgggaggaggaagtaaaaaaatttaaaggttggagatgaagtatatggtgatatcaacgagcaaggcttgtcgaacct

SEQ ID NO: 38091 - DNA, 132 bp, Glycine max
  Clone ID: LIB3056-011-Q1-N1-D10
gttttgttaagttggctttaattctggattttctttagttacttatagaaaatactgtgtcctggtttatcaatgtagaatttgatatattttcttgtaacatcctatgaatccgtatttttaagatttaac

SEQ ID NO: 38092 - DNA, 377 bp, Glycine max
  Clone ID: LIB3056-011-Q1-N1-D11
gtcgttgtgcaggtaccttcatgctccaactagttccccttgcttcctcgtcattatcatcatctgtaatttcgtattagcgtacactacacacactcctcttcctagctgccttcacagcaaaatactggttgaaacctcttttgccttgtctagaggaggaagtggttagagttgggaacgctactacttctgagatgcgtgttggatcaacggctaattgttgttacctgcagctggaagctcctcaacagaataatgtaaccgagtcatcatcagatatgtcagatcgggatgatcagaatccagatcgcaaatcacccttttaatccagatttactctctgcatatttggaatgccaaaaggttggagcacc

SEQ ID NO: 38093 - DNA, 348 bp, Glycine max
  Clone ID: LIB3056-011-Q1-N1-D12
aaaagccaaagttgtgaccacttccttagagtacaatgggataaactgcagagctcacagtgcttcattgacagattttggtggtgttggagatggaaaagcatccaacacaaaggcatttcagtctgcaataagtcaccttagtcagtatgcttctgaaggtggctctcagctctatgttcctgcaggaaaatggctcactggtagcttcagcctcactagtcacttcacactttatcttgacaaagatgctgttctccttgcttctcaggatataactgagtggcctgtgctcgaacccctcccatcatacggtagaggaagagacgcaccggcaggaagattcac

SEQ ID NO: 38094 - DNA, 429 bp, Glycine max
  Clone ID: LIB3056-011-Q1-N1-D2
tgatctcccaacacagcctgagaactatctccatcgtattggtcgtagtggaaggtttggtaggaaaggtgttgccattaactttgtcacaagggatgatgaaaaaatgctgtttgacatccagaagttttacaatgtgattattgaggagctgccttcaaatgttgctgaactcctttgatgagtttttttgttccatcatattagaggaaagttggtttctgaggtaagtgttatgtaatgtttcttgttcctttttgccccttttgttgtatttctgctcttaaaccttgtttgaccttcttaataggtgtagttatttaatttacatatcagtcgtctgaatgtcccaagtgatgagtacttgcaatgtggagtcacattattttctgaattgatgtattggtagttgttgcacctttctaacac

SEQ ID NO: 38095 - DNA, 394 bp, Glycine max
  Clone ID: LIB3056-011-Q1-N1-D3
caactttcttctgtcaaaacagatatgaggtacccaaggagagcttcacttctaaaatttcttgagaaaagaaaagaaaggtaagcttctgttttctacttgctacacttttatttatggaaaatgctgatctgtgccttatggaggaggataccggataaagaagtgaaattagaaagcttttattgcaaaatattaatgtattttcaacattgttttgaataaaactttttattaccaacttatggtagatctaagtggatccgaacacaaattctttaagtaagatattgagttcgagtctttttgaatgaaaaaaaaaatatttggaaagagaaacctcacttaacttgatcggttagttttttcgataaagattagttccagacaaaac

SEQ ID NO: 38096 - DNA, 381 bp, Glycine max
  Clone ID: LIB3056-011-Q1-N1-D4
aaaagaattaatttgttttcgctcttttggtgacatgtcaaagtagagaaataataagtgagatgagtctggcccattttcaaaattttcatcattatagttattattatgattatgatactgagaaagttgggggacctgaaatttggcgtctacagctatcacattgctatatatcttgttttgtttggcaaaagactgcagcatttcactacaaattttgctgtttgtaagatgattgaattgaaattttttcctgttttctgcttatcttttcaactttcctttgctaagtgtatttgagaactgagcttcaggaatgttaattgcatagtcgaattttgtaagccatttatttacactgatgcaaggtctacacac

SEQ ID NO: 38097 - DNA, 139 bp, Glycine max
  Clone ID: LIB3056-011-Q1-N1-D6
ctctatccgaatttcacaagtcgtagtctaaggtaagtagcctgatgacaacagactgtcactaactgaacttgacgacgctcctgcgggaactgcccaactaccatggtcgttgaacacggattgggcaatcaagtct

SEQ ID NO: 38098 - DNA, 437 bp, Glycine max
  unsure (1)..(437): unsure at all n locations
  Clone ID: LIB3056-011-Q1-N1-D7
gtgagaataggctgactaatgacttcataattctcgataatcatgtggaaacaaatgatgcattcccaaagaaggccaaattgttctttgctcatgctgcagacaaatgggatgctgagttttatgcgaaagtcaatgatgatgtctatgtaaatattgatgccttgggagctacactagctactcatttggacaaacctcgtgtttacatgggatgcatgaaatcaggggaagttttctctgagctgaaccataaatggtatgaaccagagtggtggaaatttggtgacaaaaaatcatactttcgtcatgcatcaggagagatgtatgttatatcacaagctttggctaaatttatatcaataaacagatctattctncgtacctatgcccacgatgatgtgagtgctggatcctgggttatcgggcttgatgtg

SEQ ID NO: 38099 - DNA, 354 bp, Glycine max
  Clone ID: LIB3056-011-Q1-N1-D8
gcaaaatcaatagccctcacaagaagaccctatcttcctcttcctctcagggaatgggtggaagatggagaaccctctctttgatctataaccgcataaacacttcttcttcttccaaaccccactttccctccttctaccgctccctctctctcgccgccgcaacttctgaaatacccgacccggatccaatcgggttcggagccccggaactcgacccctgcgtcaaaatccccgtcaaagcttatttcctctccaccagtataaatttgaagggcattcaggctgataatcacagaaatgttgttcctccatcttcccgctcgtcttcaaactatgttgctcctccgttct

SEQ ID NO: 38100 - DNA, 395 bp, Glycine max
  unsure (1)..(395): unsure at all n locations
  Clone ID: LIB3056-011-Q1-N1-D9
ccaacatctatctcacttcttagttctttgtggctctttgcatgatggcctctcctacatctccaagagttctcttcttgagtctctttgtaactctttccatgattttacatttgagttcagccaggaagttgtctgagtcagacccccaattgcagttccaataccacagaggccctctcctcacaggcaaaatctccgtaaacctaatttggtacggtaagttcaaaccttctcagaaagccattgttgctgatttcatcacctctctctcctcttccaaacccctcaccgcccaaccatccgttgccacgtggtggaaagccaccgacaaatactacanaaactgntncccaaacctggaactttccttagggtcccaaatcgttgatgaa

SEQ ID NO: 38101 - DNA, 376 bp, Glycine max
  Clone ID: LIB3056-011-Q1-N1-E1
tcaaaaactaagttcatttcttgtgctttgctttattcctcggaaccaaacatgtcgaacacatgcggcaactgtgactgcgctgacaagactaactgcaccaagggaaacagctatggtgttatagtagagactgagaagagctacatcgagactgttgacatggatgttccagcagctgagcatgatgggaagtgcaagtgtggcactaactgcacttgcacggactgcacttgtggccattaaggaatatgtatgaaaatgtaattgccatgtgtttggcaatacaaatctccaaataatgtaatcttcgtatgaataaatgtgtgctgttatcctacttcaaggtctgtgtagtcatgcagtctgaatcatg

SEQ ID NO: 38102 - DNA, 348 bp, Glycine max
  Clone ID: LIB3056-011-Q1-N1-E10
attgaaacaaaaacaagtggcattgagaagaacagaaacatcatcaacacaaacacaacaaaaaacagccaaagaggaatacctcaacggaacttcctcgtttggctttcagtgtctgtctctcactccttaccacaaaaccctacgcctttaccccttgcttttatttatccttcaacaacgcccgttccttgttgcttctcgccagaagaggatttggatcggagcgagtgtttttcactatcgatctggtttccttggatttggatttggattgaactctaataatgtggtgtgcggtgagagattccggtggccattacttgcctaagaagaccgatgatttat

SEQ ID NO: 38103 - DNA, 368 bp, Glycine max
  Clone ID: LIB3056-011-Q1-N1-E12
gcacattgctgcttatggagaaggcaacgaacgtcgtttgacaggacgccacgaaaccgctgacatcaacaccttcttatggggagttgcaaaccgtggagcttctgttagggttgggagagacacagagaaagcagggaagggatattttgaggacagaaggccagcttccaacatggacccatacgtggttacttccatgattgcagacacaaccattctgtggaagccatgagcaaaacctgcatgttttctccctttggatggaaaggaacagttatgcttttcttagtaggatttggtctctctctctttttaccttttgattggtactatggttggtgccttgttggttggtgcaactaact

SEQ ID NO: 38104 - DNA, 378 bp, Glycine max
  Clone ID: LIB3056-011-Q1-N1-E3
aagacattgctagttaccaggtggttttctctagcgagggaaagatagttggtttccaacctttgagtcgtgtggctgtcaatcattggtctgttaatcctttagcaagggagctatatggagggaaaaagctttctccaagtatcattgaaccaggtctcaaggtgtcccttcctgaaaaagttatcgttgtagagttattaatgtcaataaatccagatgcatattttgctctagccaggccattccggtgacccttttcttggggtaattgtaagactagaagctagttagtctcctactctactggttgattaaccaatcagaatattgtagatttaaggttatattccccctaagtgaaaattttctggcacc

SEQ ID NO: 38105 - DNA, 421 bp, Glycine max
  Clone ID: LIB3056-011-Q1-N1-E4
cataatcagagttcaggccactatttcacaatcgcaagtgataagagtaatagaacaaccactcaccccctctccgatctaatggccaccgtaatcgacggcaaagccgttgcgcaaatcatccgatctgaaatcgccgacgaggtgcgcctgctctctcaaaaatacggcaaggttccgggactagcagttgtgatagtagggaacagaaaggattcacaaagctacgtgggaatgaagagaaaggcatgcgccgaattgggaatcaaatccttcgatgtggaccttcccgaacaagtctcccaagctgaactaataaaacaagttcacgagttgaatgttaaccctgatgtacatggtatattggttcagcttccgttgcctaagcacataaatgaagagaaagttctgactgaaatca

SEQ ID NO: 38106 - DNA, 389 bp, Glycine max
  Clone ID: LIB3056-011-Q1-N1-E5
tcttcatcttgttctatctgtgacgagcatcatggcctcaagagcagtgttattgttggctatgtgtgtgcttccggcgatggttgtggccattcgcccagcaaagaaccctttttgcgtgaagggtcgtgtctactgtgacccttgccgtgctggttttgagacctcagctaccacctacattgctggtgctgagattatgttgcaatgcaagagcagggttagcaacgaggttgtgtacacgaagaaggggtacaccgactcaaccggagcatacacaatgtacgtggatgaggatcacgcagatcagatctgcagtgccaagcttgtaagcagccctcaccctcaatgcaaggaagtcaccccaggccgcgacgaaaccgtcgtga

SEQ ID NO: 38107 - DNA, 171 bp, Glycine max
  Clone ID: LIB3056-011-Q1-N1-E6
ctcgagccgctcgagccgctcgagcggctcgagctcgagccgctcgagccgattcggctcgagggccaatgttgttgatgtggttcttatcttgctttggggatatttgatagatcttacggttggggatgttcaaatatgggtttcctagtatcatttttttacgtactt

SEQ ID NO: 38108 - DNA, 379 bp, Glycine max
  Clone ID: LIB3056-011-Q1-N1-E7
cacaaacacacaaaaaatttctagagcgagaaagtgagaggagagagaaagtagctgatcctccatggcctccaccaaggaacgcgaaaactttgtctacaccgccaagctcgccgaacaagccgaacgctatgaagaaatggtggaagcaatgaagaatgtggcgaagctgaacgtggaattgacggtcgaggagcggaaccttctgtcggtagggtacaagaacgtggtgggtgctcgtagggcttcgtggaggattctatcgtcgattgaacagaaagaagaagctaaagggaacgatgtgagtgtgaagaggataaaggagtataggcagaaggtggagtctgagttgtccaatatctgcagtgatatcatgact

SEQ ID NO: 38109 - DNA, 373 bp, Glycine max
  Clone ID: LIB3056-011-Q1-N1-E8
ctcacctatggctccaatctcaaaactcattcctttcctattcttaacaacccttttagtttccctccaagttaatgccagagacagccaattcttcagcaaagtcacccctctcaacaacaacatcaaagagactgagactcccaaaaatgaaggccaagtaaacaagccagaacaacaaccaacattcattcctgaaactgaaaacagttatggcctatatggtcatgagactggtctgcaccctcccaccactacaacaactaatgctgcaccctacaccaccacttacaagccatacaaaactaccacagctgaagaggacactgccaagtactccaacatcaacaacttctacagcttcaagaaagat

SEQ ID NO: 38110 - DNA, 373 bp, Glycine max
  Clone ID: LIB3056-011-Q1-N1-E9
caaaggtggaaattaaggaaaagtttcaaagaatggattataggctcaaccaaagaagagtgtccttttctgatccaaattcacgacaacacataccagatgatgagcgtgtaactgcagttgcagctgctgcattttccattcattcacttagaagaagcagggttacttaatttgcagaaaatgaaagaatctgccaaatttccaaggaccaaaactgtgagagaaaaagaggggaaagtatctaggcaaccaagtcatggggaaattttaacaagaaggtcattgtgacaagaactcgctagagcaacagaaagtgctattcctgctagacgcccaagtggtgtatccccggcagcagggtatcaaaatc

SEQ ID NO: 38111 - DNA, 378 bp, Glycine max
  Clone ID: LIB3056-011-Q1-N1-F1
ctcgagccgattcggctcgagagctgtaaagaaacgatgaatgcttcagactcagagaaagaagacgcagaaattgaagcaacagaaactgcacccgatgaagagaatgcgaaattgaagaagaaagagaagaaaaagaagaagaaagcttcgtcgaaggatgcagagaagaagcgcggcgtgtgctatatgagtcgaatcccccctcacatggaccacgtcaagcttcgccacattctctctcagttcggcgatattcaacgaatttttctcgctcctcaagattcttctgtccaagtgtctgccaagaggtcacgtggatcccgagaccaagcatattcagaaggatgggttgaattcggtaataaaagtgttgct

SEQ ID NO: 38112 - DNA, 405 bp, Glycine max
  Clone ID: LIB3056-011-Q1-N1-F10
ggcaggtctattgacataacacccgaatccaagtgaaacgaaaaacactcatcatcatggattcagttgcattaaatggcaaaagcaatgataagcctcttcacgttgccatgctcccatggctggccatgggtcacatatacccttacttcgaagtcgccaagattcttgctcaaaagggtcactttgttaccttcataaacagccccaaaaacattgaccgcatgcccaaaaccccgaaacacttagaaccattcatcaaactcgtgaagctacccttgccaaaaatagagcatctcccagaaggcgcagagagcacaatggacattccgtccaaaaaaaactgtttcctcaagaaagcttacgagggcctacaatacgccgtttccagttgctgaaaacgtc

SEQ ID NO: 38113 - DNA, 383 bp, Glycine max
  Clone ID: LIB3056-011-Q1-N1-F11
gaaattatcatgaatccaattatttctgctgcttctgttattgctgctgggttggccgtagggcttgcttctattggacctggggttggtcaaggcactgctgcagggcaagctgtagaagggattgcacgacaaccggaggcagagggaaaaatacgaggtactttattgcttagtttggcttttatggaagctttaacaatttatggactggttgtagcattagcacttttatttgctaatccttttgtttaatcctaaaaaaatagaaattcatatccttttttccgtggacttgctttaccggtcttgctttttcgaattctatttatattaatatttcactcctataattctttatccgttcggacaagaacacaggg

SEQ ID NO: 38114 - DNA, 297 bp, Glycine max
  Clone ID: LIB3056-011-Q1-N1-F12
cgcacaacctctaactgggcccatagaattgttaatttctctgatcccattgtgaatttgtggggatctgaattgcggaggaagatgattcagcttctgttcacggtgatattttcggaggcttcgatgatagcgttgctgctgttcaagacccctttgaggaagctcgtgataatgggcttggatcggttgaagcgaggtcgtggacccttgatggtgaagaccgttgcagggaccgttctcgtggtgttgttgtcgagtgtgtatagcatgttgaagattcagaagcgtgggatc

SEQ ID NO: 38115 - DNA, 380 bp, Glycine max
  unsure (1)..(380): unsure at all n locations
  Clone ID: LIB3056-011-Q1-N1-F2
ctcgagccgcttaccactttgcttcagctatggagtttcgttgccttccattggttttctctctcaatctgatcctgatgacagctcatgctgccatacctncagaagtttactgggaaaggatgcttccaaataccccaatgcccaaagcaatcatagactctctaaaccttgatcaacttcctctttggtatggtgctaaggaaacccaatctacagatcaaatattcctgtatgatgcctagaaaacccaatcaacagatcaagttcctcctatcttttatggtgataagaaaacccaatcaacagatgaagttcctcctatcttttatggtgctaagaaaactcaatcaatagatggagttcctnctatcttttat

SEQ ID NO: 38116 - DNA, 356 bp, Glycine max
  Clone ID: LIB3056-011-Q1-N1-F3
cgattcttcggaggggggaatcgctcgattcgaagctgaaaacagaggctttgaagaaggaaggtgataatttggtcgtggttgggacccagaggctcggacccgacccggatatggtcccgaagcagatccggatcgtggatttcaggtccgggcgcgagatttacgccggatccgcgttcgcggtgtcgccgtcgccgagcgcgctgcccttgccgtctttttcgaagaggcagccggcggtggcggttgccgactctgcgacccgtgatcttaggcgtcttctccggcttgaatgagccgaatcggtgccgtttccggatttcgggtcgggtctgacccgactataacctatc

SEQ ID NO: 38117 - DNA, 385 bp, Glycine max
  unsure (1)..(385): unsure at all n locations
  Clone ID: LIB3056-011-Q1-N1-F4
gtccccttcagctactaaattggagcagaggagtggcggaggacgaagtctacggcgacaatggttaacgaaacggtgcggtggtgtgctttgttgtagtcgtctccgatcatcatcgagaatgcgcaatctggctgcacctcattccttgggggttttcatctttcgccccaataagcctgcttttctcactctaccctcactctctcgaagatctctgccttgcatccagtgcggtgcagttcaattccgaccctgcatcgatatccacacagggaaagtgaagcatattgtaaggtccacccttcaagactcganaggctccgatcccgtcaccaattatgagtctgataagtcagctgctgaatacgccacgctttacaag

SEQ ID NO: 38118 - DNA, 334 bp, Glycine max
  Clone ID: LIB3056-011-Q1-N1-F5
gggagatgtgctcaagaacaatttattgcacaaatatcgacaagaagcttactcaagcagatgtcaaacacttctttgaatctatttgcggagaggttcatcgcttgaggcttcttggggattaccatcattcaactcgaattgcatttgttgagtttgcactggctgagagtgcaattgcagctctgagctgtagcggtgtgatcttgggttcactgcctataagggttagtccatcaaagacaccagtgcgccctcgtgctcctcgtccccccatgcactgaaccatcctttcacatgtttctggggatgctgcttcttggagatatatcta

SEQ ID NO: 38119 - DNA, 365 bp, Glycine max
  Clone ID: LIB3056-011-Q1-N1-F6
cagaagcagactctgcatttttcaaggagattgaactattagctagacttcaccattgtcatttggttcctttgcttggatactgctccgagttaaaaggaaaacatgttcagagattactagtatttgactacatggccaatggaaatttgagggactgtttagatggagtttctggaaaacatatcgattgggccactcgtgttatgattgcaataggagctgcaaggggcttggagtatctccatgaagcagctgctccaagaattcttcatagagatgtcaaatcaactaacattcttctggatgaaaattggcaagcaaaaataactgatcttggcatggctaaaaacttgagatctgat

SEQ ID NO: 38120 - DNA, 397 bp, Glycine max
  Clone ID: LIB3056-011-Q1-N1-F7
gtttcatctagttttccctctgttcttcttccgccacagttgatctgtctcgaacctttgtgaccaaggttgagaaacgctcactggtgggctatgagtttgagatatggcagtgtggtcttggttgctttagtgcttctgccacacatggcttctgctgcttcaattgtgaagaacctaccgggttacaagggtgatcttccattcaaacttgaaactgggtacataggagtgggagaagaagaagaggtgcaaatatttcacttatttgtggagtctcagagaaatccattcattgatccactgttaatttggtttgttggaggtcctggttgctctgccctatctgcgttcttttttgaaaatgggcctttagtaatgaatgagaattaccatg

SEQ ID NO: 38121 - DNA, 403 bp, Glycine max
  unsure (1)..(403): unsure at all n locations
  Clone ID: LIB3056-011-Q1-N1-F9
gccacacgcctcagtagaccatggcctcattgggtgggttacaaaatctaagcggcatcaattttcttatcaaaaaagagggtccaaaagtcaatgcgaagttcgagctgaagccgccaccatatccactgaatggtttggagccggtgatgagccagcagacacttgagtttcattgggggaaacaccacaagacatatgtggaaaatctgaaaaaacaaattgttgggacagagcttgatgggaaatcactagaagagattatagtgacatcatataataagggtgacattcttncagctttcaacaatgcaacacaggtatggaacccatgacttcttctgggagtgcatgaaaccaggtggaggtggaaaagccatccgggagcttctagaactgattg

SEQ ID NO: 38122 - DNA, 395 bp, Glycine max
  Clone ID: LIB3056-011-Q1-N1-G1
acgcagccaatacaactactaacgacaaagattcttccccaagacaagggaaaaccggagcaacaaaaaaagtaacacacacgcacacactcatcatcgtataacatttgttttattttttttaaagagcgagtgttgtaacaaatggtgaagtcgaagagcgtggagaaacctgcggaggaacaacaacgaggtggtgtttcagcgtacagaggagtacggaagaggaagtgggggaagtacgtgtcggaaattaggctgcccaacagccgtcaaaggatttggttgggttcctactacagcgccgaaaaggctgcgcgtgcattctacgcggccatgttctgcttacatggcagccgttccaactttaattttccgagcgaacgggccaacat

SEQ ID NO: 38123 - DNA, 399 bp, Glycine max
  Clone ID: LIB3056-011-Q1-N1-G10
atctgtatgcctatgcttgtttatcattttcttactttcctctcacgctctgccacaaaactccgtctccgcaataacggaataaaaaaacaagtttaattactattatggcgccgagggatcataagacaagcaacgcttaggctaacggtaaccgtaacagccgggttaaagaagtgcattttcgcggaatgaggaagaaggccttggggaaaatcccccgcggaattcagagatcccggcgagaaaagccgcgtctggttcggaaccttagacacggcggaggaggcagcgcgtgcatacgacgccgaagcacgagagtttcgcggccctaaggccaagacaaacttccctctccctttggaaaatgtaaagaactcgagccccagccagagcagc

SEQ ID NO: 38124 - DNA, 399 bp, Glycine max
  Clone ID: LIB3056-011-Q1-N1-G11
aaagatcaaagtaaaagccaccgtcataagtggcagaagcataaagtaaaagagaaacagcatgatgagaggagcagcagccctgtgcagctttccaagtttttagggcgtgacaaagatgatggtgtccgtcgcagtgctgtatctggcaagaagattcttctgaaacttgagaaaacaaaggaagataaggtagctgaaagcaagagaaatgaactgctgaactttttaaatgctagttttgattagatttgatagggtacaacaaaatctgcaaagaaccaaatttacttacgtgggtgcataaattatttttccattataagaaccgggcagcctgccaattccttgcggaaagaagaggggataccataatattatgcgtaccattgaaagaca

SEQ ID NO: 38125 - DNA, 361 bp, Glycine max
  Clone ID: LIB3056-011-Q1-N1-G12
atgaaggcggtggagataagatcaagctacctccttcttgcttcgcagaactgtctgagcagggtacttttgataagagacagggacccttatactttcagttgtcgttagttcatgaagaaagcacttcaagcatccaaactactgataaagtgaaacaggggaggaccacccattctggagttttagaattcactgctgatgaaggttcagtgggtcttcctcctcatgtatggaataatttgttttctgaaggcactccaaaacctcccttagttgaaatccgctatgtttggcttccaaaagggacatatgcaaaacttcaacctgaaaatgtaggattttccgacttgcccaatca

SEQ ID NO: 38126 - DNA, 312 bp, Glycine max
  Clone ID: LIB3056-011-Q1-N1-G2
gctttgacagcctcctggattctctgcaagagaaggcaaactctcttaagttggtcagccactgaagtttgaacgtcatggttagtaatgcagtgctgtgtatgatggcatctatggattaataaaaggcagcggctgtgcattttgtgctgctgcaaatgtgcttcatggagtcatttatttagacgatagtgatacaatgtaaatgggaaaaattgtccgcttcaagtcaagcgttttgttttttccccactatacaatggttgtgcgtttatgtttaaaagtcttacattttagttcgaatttttaatt

SEQ ID NO: 38127 - DNA, 385 bp, Glycine max
  Clone ID: LIB3056-011-Q1-N1-G3
gtttttctttttctctgttgaggttgtcattgggagcactcaacctaaactattcaagttgtgaaagcacatcacaagaaaattcgcaagcgatggatccgaagctaaaagaggtttctcagctcttcgatcgctttaaggcttcgtttatcaggaacgactttgatacctgttccaatctcctttctcagctaaaggtgttacttacaggtttcagaagccttccaccgttgtttgcagatacacctaatgcagttcatgaattaacaatagcaagggatatatacgagcatgctgttgtccttagtgtgaaaaatgaggatcaagatgcttttgaaagggatttcttccagttgaagccttattatacagatgcctgcaatcg

SEQ ID NO: 38128 - DNA, 419 bp, Glycine max
  Clone ID: LIB3056-011-Q1-N1-G5
cccaggttgtgatggccgcagcaccagcagctaccttcgctattggaaccaccggttccctcggccaaagaggaagctcgcttcctcaatcaaagtcctttgggttgaaattcaactctctgaatcatttgaagagcttctgtggcctcaaggccatgtcatccgtgagatgtgagtcggaatcctccttcttcggtaacaaaaccggtgctgctctacgggcgtcttttgcatccaaagctcaaaaggaaaacaaccacaactcgcagactcaggcttcgtacaaagttgcggttcttggtgctgctggagggataggtcagccgctctcgcttatcatcaagatgtcgcctttagtttccaacctgcatgtctatgatattgcgaatgtcacgggagtttctgctgatatcagtcac

SEQ ID NO: 38129 - DNA, 362 bp, Glycine max
  unsure (1)..(362): unsure at all n locations
  Clone ID: LIB3056-011-Q1-N1-G6
gaaaacagaacagggactcactctcttcgcagcggcactctcggtggctttcatcttcttggggtgagttgtcaagatgtacacatcgaggaagaaaattcacaaggataaggatgctgagccaactgaatttgaggaatcagttggacaggcattgtttgatctagaaaataccaacaatgagctgaaaagtgatctgaaagatttatacataaactcagctgtccaaattgatgtttctggcaaccgaaaggctgtggttatccatgtccnctacagactaaggaaaggattccggaagattcatgtcaggcttgtgagagaacttgagaaaaagtttagtggaaaagatgtaatcttga

SEQ ID NO: 38130 - DNA, 398 bp, Glycine max
  Clone ID: LIB3056-011-Q1-N1-G7
tttctctctgccttgctcatttacacacctctccaacctttgactttcagctttatttgaatccctctctctcctttccaaatggccagcgttgaggttgcacatcaaacaccaacaacagttccagaaaatgaaacaaccgaggtaatcaagacccaggaaacaaccccggaaccagtaccagccactgaggctcctgcaacagaacaagcagcagctgaggttcctgctcaagaagaacaacaagcaactgaggttcctgccccagaatcaaccaccgaagcaccaaaggaagaaaccaccgaagcaccaacatcagaaacagtataaacaacaactacagaagaagccaagccagaggagcctaaagaagtgcagttgagacccgagaggtggtg

SEQ ID NO: 38131 - DNA, 401 bp, Glycine max
  Clone ID: LIB3056-011-Q1-N1-G9
gtcctaatcccaaattcgtagctgagaaatccgtaaaaactaaaaagggttttcagttttgttttgtagcagagaagaacgtaatcataatccaaattccaattccaaaacgagccaccaacaacaacccaactggtgtcgctctgtcagttcactttcctcgtgtttggttcgtactatgaagaggactatgccatggagtgatgacgatgagtcatcgtcttcacattcagattctgaatgtgatagtgaaactggagggggaaattccaaaggtaaatctagaaagcagacaactaagaaaagtggtctaattgactttgaagctctgaagcgacacggttatagaggtggaccttcagtcctaaaagtacccgcacccaaagaggatgactcgaaga

SEQ ID NO: 38132 - DNA, 356 bp, Glycine max
  Clone ID: LIB3056-011-Q1-N1-H1
gtcacacttcatcaatggcgggtagaggcaaaaccctaggatgcagcgccgctaagaaggccacctcaaggagcagcaaagccggccttcaattccccgtcggtcgtatcgccaggttcctcaaggccggaaagtactccgagcgcgtcagcgccggagcccccgtctacctcgccgtcgctctcgaatatctggctgctgaggttatggaattggctggaaacgctgcaagagataacaagaagactcgaattgatccacgccacatccaattggcggtgaagaacgacgaagagttgagcaagcttctaggagatgttaccattgctaacggcggtgttatgcctaacattcac

SEQ ID NO: 38133 - DNA, 352 bp, Glycine max
  Clone ID: LIB3056-011-Q1-N1-H10
tctgactacggtaattaactggtaaatacttgcacaatggcctcagaaaatggagacaaactagaacttgctttcagtgttgttcctgatcccaagcccaagaaggattgggtcaatttgtcccttagggtggtcgcatttttggccacagcatctgctacgcttgttatggcattcaacaaacaaaccaaaagcatggtagttgccaccattggcactaacccagtaacaattactcttactgcaatgtttcagcacactccagcttttacattcttcgtgatagtcaatgcaattgccagtttctataacatggtggtgataggagtggagatattaggaccacaatatg

SEQ ID NO: 38134 - DNA, 413 bp, Glycine max
  Clone ID: LIB3056-010-Q1-N1-B1
cgttgctctgcttcaaccttgcggaagaagaagacgccgcagccatggtgaagtactccagagaacccgacaatcccaccaagtcctgcaaggccagaggcgctgacctcagagtgcatttcaagaacactatggagactgcctttgccatcaggaagttgccccttgttaaagctaaaagatacctggaagatgttttggcccacaaacaggccatccctttccgacgcttctgtggtggtgttgggaggacagcccaggctaagagcagacactccaatggtcaaagacgctggcccgtcaaatcagctaagttcatcctagatttgctgaagaacgccgagagtaatgctgaggtaaaaggtttggatgtcgatgctctgtacattttccatgttcaggttaatcaagca

SEQ ID NO: 38135 - DNA, 403 bp, Glycine max
  unsure (1)..(403): unsure at all n locations
  Clone ID: LIB3056-011-Q1-N1-H11
cgcacgaatatcttgttgtttggagcgatccgagaaaaactctgtaaacatgttggtttaccaggacctccttacaggtgatgagcttctctctgactccttccgttacaaggaaattgagaatggaatgctgtgggaagttgaggggaagtgggttgttaaaggagcagttgatgtagacattggtgcaaacccttctgctgagggtggaggagaagatgagggagttgatgatgcagctgttaaggttgttgacattgttgacacattcagacttcaggagcaacccgcattcgataagaagcagtttgttaccttcatgaagaggtttatcaagaatttgactcccaagctcgatgcanagcaacaggagttgtttaagaagcacatcgagggaacaact

SEQ ID NO: 38136 - DNA, 229 bp, Glycine max
  Clone ID: LIB3056-011-Q1-N1-H12
ccaatatatttcattctctctgtggactgccagacctctaccttcaacatgcacttctacgtcaagacccttaccggcaagaccatcacccttgaggtgcaaagctctgacaccatcgacagcttcaaggccaagatccatgacaaggaaggaatcccctcggaccagcaacgtctcatttacgccggcatgcaacttgcggacagacgtacccttgctgactacaaca

SEQ ID NO: 38137 - DNA, 255 bp, Glycine max
  Clone ID: LIB3056-011-Q1-N1-H2
ttgtatattagatcacttgcttggacttgtcatgttcttcactactagaattggggctatgaaggtttttttaacagtggaatcaaatagaagtaatggccagttaactgcctgtgaagtcttgctctttcatcatgaagaaatgggcattccatgggagattgcaaaacttggagtaaggaaaggaatgtggggaactgttcagaagattgaacccggtttgcgagcttatcaagaagcaagagcttctggtgc

SEQ ID NO: 38138 - DNA, 382 bp, Glycine max
  Clone ID: LIB3056-011-Q1-N1-H3
ggcgaagaacctattggttttgctggggctgggtttagctgggatagttctcatcaccagaaagctcaatacgtccgtcagagaggattctcggcgctttcattcataagcttcagctggttactcctccccagtcttctcctgccaaggctcctcatactctcacctcactcaccttcgcactttgcgacctatttcacatccatggacacgtgccctcgttcgggcatcctgactgggctaggactcacgaaccctcttcttccactgctcccgctgtttccgctctcgtcgagggcggtgcaacctgcgttgcaactactgttctcgacgacttagctctaggtattggcggcgaaaatcagcattttggaacgcctac

SEQ ID NO: 38139 - DNA, 200 bp, Glycine max
  Clone ID: LIB3056-011-Q1-N1-H4
agagaagataggtatcgtgtaggtcgaacaagatgctgtggagtgcacctcttccggtgcttcgagactgatgatctgctgcttgctcttcaggttgacctgagattcaatctaacggatcgtgatttacattttgagacatgtaaggtgtttgcctatggacaaagtgctaccagtatcggttaagtgccttgcaagaa

SEQ ID NO: 38140 - DNA, 366 bp, Glycine max
  unsure (1)..(366): unsure at all n locations
  Clone ID: LIB3056-011-Q1-N1-H5
caatttttctaataaaaacaagaaaaataataatagcaaaatagacaccattaggttttcattctctttctctctctctctgattcgatcgatttcgattgttgaattcatcccatcgtggagccttcaaatttgtagttgaacaacgatggtgctgccgctatttgctgctttcattctcttttttgcttttattccgaatggattgttagcagttccttccaccgtccccgcattcctttggtcatcacattatgaactggcctctgaaaatggattgaaggaatctgtaaattaccaagtcatttctccaaaagatctagcanaatctgttttttctgaagcangctggtcaaaatttctgtg

SEQ ID NO: 38141 - DNA, 321 bp, Glycine max
  unsure (1)..(321): unsure at all n locations
  Clone ID: LIB3056-011-Q1-N1-H6
tacaaaatcccctcatattatctctctctctcttaagccatgatgtcctccaccgcgcctcccgtcctccccatctccaactcccaaaccaccgcgggaaccaccggtgcaggcggcggcgccatcgaggctccggccaacaacccggccttccgcgctttcatcaacaacctctccaactccctccgccacggcctcgaccagcgccgtccctggtcggagctcgcggaccgctcagcgttctcgaaacccgagtccttctccgaagccacccttcgtgtccgcaaaaacttctnctacttncgcgtcaactactacgct

SEQ ID NO: 38142 - DNA, 378 bp, Glycine max
  Clone ID: LIB3056-011-Q1-N1-H7
agaagatggcattgggtgttcctgctcttcccctgacatacgtggctcacgttctggcaattgttgccagcatcttggtcgtgctctgggtcctcaattttaggggtggcttggcttgggattctgataacaaggccctcatcttcaatcttcatccagttcttattgtcattggcttactagtccttgggggtgaagctattataagctacaaagcattacccctgaagaaggaagtaaagaaattgatacaccttgttttccatgccatcgcattaatacttggaatagttggaatttatactgccttcaagtatcacaatgaaagtgggattgccaatctctacagcttgcattcatggcttggaatatggggta

SEQ ID NO: 38143 - DNA, 370 bp, Glycine max
  Clone ID: LIB3056-011-Q1-N1-H8
tgggatttgaatgattggagatgggatggtgatctgttcatcgctagccggctgaatccggtgccggccgatggtgttggagtgggacagcaatttttccctattgggtccgggatcccggtggccggaggcccctccaacagttcttccacctctgaggaagtagatcctagggatcccaaggcgaacaaggaaggggacaagaaaaggagagttattgtgctggaggatgatgggttgaatgaggaagggggtactcttagtttaaagcttggtggccatgcttctgcagtggtggataaggaagttgggagctgggacggtacgaatgggaagaaaagtagagtgtcgggaagtacttcaaatcgag

SEQ ID NO: 38144 - DNA, 402 bp, Glycine max
  Clone ID: LIB3056-008-Q1-N1-B5
cctctgtgcagacatgttgttcttctcgtacttcaaggatttggtggggagggaagtaatcgtggagctgaagaacgatttggccatcaaaggaacattgcattctgttgatcagtacctcaacatcaagctcgaaaacactagcgtcgtcaatcaagaaaagtaccctcacatgctttctgtaagaaactgcttcatcagaggttcggtagtgagatatgtgcaattgcctccagaaggggtggacattgaattattgcacgatgccacaagaagagaagcccggggcggttagtgtcttcattttgtgatgtatcttatttatgagaattcggtgggcttacataaggtggatgttaaccttcctacttcagaaggaaactcttttcagatgttaaaagg

SEQ ID NO: 38145 - DNA, 358 bp, Glycine max
  unsure (1)..(358): unsure at all n locations
  Clone ID: LIB3056-008-Q1-N1-B6
catgagaggactttggccacggatgtgctatttggccttctgaaggaagtgcttaaaaatcgacctgacatgaagttggttgttatgagtgcgactcttgaagctgaaaagtttcagggttattttttcggtgcccctctcatgaaagttcctggaaggctacatcctgttgaaattttctatacgcaggaacctgaaagggattacttggaggccggcattaggacagtggtacagatacacatgtgtgagcctncaggagatatacttgtatttctgactggagaggaagagatagaagatgcttgccgcaaaataacaaaagaaaattctaatctgggaaaatcaaggtgggcct

SEQ ID NO: 38146 - DNA, 393 bp, Glycine max
  Clone ID: LIB3056-008-Q1-N1-B7
ctcgagccgattcggctcgaggcacgaactgttggagtagccgtggacttttctcctaccagcaaattagcccttcgttgggccgttgataatctcatcaacaaaggtgatcaaatcatcttgatcactgttcagcctccccaagctcatcacacccgaaaggagctttttgaggacactggttcacctttggttcctctggaggaattgagggagttgaattttactaagcaatatgggattgctagggatcctgaggtcataggtatccttgacacagcctccaagactaaaggggcaaaagcagtggcaaaggtgtactggggagatccaagggagaagttgtgtaatgctgtggaagatcttcacctggactctttggttgttggaagc

SEQ ID NO: 38147 - DNA, 371 bp, Glycine max
  Clone ID: LIB3056-008-Q1-N1-B8
gttttaatgtctcttcgaggcgttggagtgccttcaagcttggttgcacctccatggaccctcaagtagaattctcatcatcacttcactctgcctctgagatcattaggaaaaagaaaattactgggcggcaaaagagagaggaacttgaaaaggaggtcgctatgcttcaaaagttgttggaccaagaagaaaagtttcatgagattttggagatggtgcatagtagaccaaatgggtcatcgatatcaattcccaattttcttccacccaagatgagagaactcttaagagaactagtcatgggttaaggttaaaatacttgacctggatcccaaattagcgaacttccagcctgatttgaaccatga

SEQ ID NO: 38148 - DNA, 409 bp, Glycine max
  Clone ID: LIB3056-008-Q1-N1-B9
gagagtggtttcagtgagtgatcggtgttcacttgatccttcataagtcgtcatcatcatcatcatcatcaccgttgattgaagaagatgccgatcagaaacatcgccatcggaaggcctgaagaggctactcaccccgacacgttgaaggcggggttggctgagttcatctccaccttgatcttcgtgttcgccggttcaggttccggcatcgcctacaacaagctcaccgacaacggcgccgccactcccgccggcctcatctccgcttccatcgcccatgctttcgccctcttcgtcgccgtctccgtcggcgccaacatctccggcggccacgtcaaccccgccgtcaccttcggcgccttcgtgggcggcaacatcaccttactccgcggcatcgtctacgtca

SEQ ID NO: 38149 - DNA, 389 bp, Glycine max
  Clone ID: LIB3056-008-Q1-N1-C1
ttccactgccaaaaggggtggtcattcagtgtccaaaaaaggggttttgccgggtttggttaaattcaaatttgctactggtggtccctttggtggggattcaaacatgggtggggaattatctaagtacccaaaagcagagcttcctggcccaatgcagcacgatcaaagtttgacaacctcagtcattagagaacgtccaaatcaatcgttaaatcgtctttctcagaaactggatcccatagactggcttacgtatgagccatatctctgggagaatgagagacagtcttacctacgacatgctgttctctttggttactttgtacaactcaaccgtatgtacacagatactgttcagaaactgcctactaattcagaatctaata

SEQ ID NO: 38150 - DNA, 331 bp, Glycine max
  Clone ID: LIB3056-008-Q1-N1-C10
attgttttgcctggatgaaggtacaattcaccaagcgtccctatgcacaaccttatggtgtatatacatggttaacggatattaaagacacctctaaagaaggatatagttttgaagagatatgcatcaagaaagaagcgtttgacggagaagagaagttttgtgcaaaatccttgggaacagtaattggttttgccatttcaaagctgggaaagaacattcaagtactttcaagttcctttgtcaataagcaagagcaatacactgtggaaggagtgcataatcttggagacatagcagtgatgtgtcatgggctaaatttcagaactgc

SEQ ID NO: 38151 - DNA, 364 bp, Glycine max
  Clone ID: LIB3056-008-Q1-N1-C11
gttgatagtagctctgctgtcggcttgggtttcgggaagaataaggttagggagatggttgtcggcagggatgatctttgggttgtccggatttccgggattggtggttccgggaaaaccactcttgctagagagctctgctgagatgaccaagttagatgttatttcatgcataggatcttgttcctgaccgtgtctcagtcacctaatgtggagcatctaaggactaatatgtgggagtatattatgggcaaccagaggtctgatgcaaattacctggttccccaatgcatgccacagtttgagtgcagactcgaatctcgaactctgattgttttcgatgatgtgtggacactctccgcgg

SEQ ID NO: 38152 - DNA, 329 bp, Glycine max
  Clone ID: LIB3056-008-Q1-N1-C12
tctgtccctcgttctgcttttttgcatctctctctctctctctggaatgttgaactgagccagccaagcttgttgctttgcaagtggaaacagagatagatacatacatacaagggcttcaaaatgaggggtcctttgggtgcagtcataggaaggtacccttcaagtgatggaaccactcatttgggtggcatcataaggcacaacaaaaaatgcagagacatagccgttcttgtcatctttgatgcattctggattgccttgattgtcaactccagctttgctttcaaccgaggaaacccattgaggcttacttatgggctggacta

SEQ ID NO: 38153 - DNA, 337 bp, Glycine max
  Clone ID: LIB3056-008-Q1-N1-C2
gatgaagcaatacttcggcgtctacctcaagcctttgaaattggaattccagaccaaagggagagggctgaaatattgaaggttgtcttaaagggtgagagggtcgaagacaacatagactttggtcatatagctggtttgtgtgacggttacactggttcagatctatttgatctttgcaagaaagctgcctattctcctattagagaactactggatgaagagaagaaacgaaaacaatctcatgcccctagaccttagtcccagttagattttgaagaagcccttgctacttcaaagaatacatatgttgctgctagtgaataccgaggattca

SEQ ID NO: 38154 - DNA, 386 bp, Glycine max
  unsure (1)..(386): unsure at all n locations
  Clone ID: LIB3056-008-Q1-N1-C3
gtgaaatggccggttcaattggaagcgcanggaacacaagcacgggtgtggagtggcacgtgcgacctccaaaccctaagaaccccatcgtcttcttcgatgtcaccatcggtaacattcccgccggtcgaatcaagatggaactcttcgccgatattgcccccaaaactgccgagaatttcaggcagttctgcactggggagtacaggaaagcaggactgcctgttggttacaagggttgtcaatttcatagagttattaaggatttcatgattcaggcgggtgattttgtaaagggagatggtagtggatgtgtttccatctatggactcaagtttgatgatgaaaactttacagccaaacacactggtcctgggcctctgtcg

SEQ ID NO: 38155 - DNA, 229 bp, Glycine max
  Clone ID: LIB3056-008-Q1-N1-C4
agaagccacacacacctctgtttctttctctgctccacactttctcttcctccattattgagcttccactagttttttttcccctttctttcttccaaggacttaattgcactgcttaaagtctcaagctttacaacttttggaagatacccattttttgcagccatcacttactttgccaagaagaaaagggctttcttttgggttcaaccattttctgcttttggct

SEQ ID NO: 38156 - DNA, 391 bp, Glycine max
  Clone ID: LIB3056-008-Q1-N1-C5
tagttctgtttctctttcttctctctgttctctgaaccaagttctcaattcaatcttcttcacccttttgatctgctaattctcaaggtattcaaaattgggaggttttcgtttgaattgtgatgtccaagccactgctaggcataggggaggaggaaggtcaaagcaatgtcactttgttggtttcttcctcagtcatcatggaaagtgtgtgcctgaatagctcaaaattgaaagagcgcaactacatggggttatctgattgttcatctgtggacagctccgcgccgtccttctcagatgagactaaaagcaatctgaaccttaaggctactgagctgagactggggcttccgggattgcagtctcccgaacgagattcaaatctttg

SEQ ID NO: 38157 - DNA, 378 bp, Glycine max
  Clone ID: LIB3056-008-Q1-N1-C6
ctcaagcgagactacgtcgtttcggaggagatcggccggggaagattcggcaccgttttccgctgctcctccgcagactccggtcactcctacgccgtcaaatccatcgacaaggtggcaataaccgccgccggagactccctcgacgcgcaatgcctattgacggagcccaagatcgttcagcttctctcccctcaccctcacatcgtaaacctccacgatctctacgaagacgaaaccaaccttcacatggttctcgacctctgttacgaatcgcagtttcaccaccgcgtcatgtccgaaccagaagccgcttcggtgatgtggcaactcatgcaagccgtggcgcactgccaccgccttcgcgtcgcgcaccga

SEQ ID NO: 38158 - DNA, 373 bp, Glycine max
  Clone ID: LIB3056-008-Q1-N1-C7
cgaaccccccacccacttcagaagcaagttcctccgccgtacagaaagtgaaaagcaatctcgtcttccgttcaacctgggccgaactcaacggcgccatgggtgacctaggtacatacatacccattgttctgtccctaaccctagccagtgacctcaacctcggcaccacattgatcttcaccggcatgtacaacatcatcaccggcgccatctacggcgttcccatgcccgtccagcccatgaagtccatcgcagctgtcgccctcgccgaccccaccttctccataccggagatcatggcctccggtatcctcaccggagcaaccatgttggtcctaggcgtcaccgggctcatgcagctagcttacaa

SEQ ID NO: 38159 - DNA, 363 bp, Glycine max
  Clone ID: LIB3056-008-Q1-N1-C8
ctcgagccgattcggctcgagggaacaagcaagtgcttgtaaaggactatgttaccggttttcccaaagaatccgacatgaatattgtcgaaagtaccataacatagaaacttacacacggatccaatgatgtgttgctcaaaaatttgaatgagccttgtgatccgtatatgaggaatctcatgaacaggtcccaaaggcatctcccaatagtattgcttacactcctggctctgcattaataatgatatggcagtgctaaagtcctgtaatctgagcacaccatattattacgaaagagaatgaccgtggggctttaccaaatggcaagagtgtagctcgtaaccgtcagctcacatactc

SEQ ID NO: 38160 - DNA, 413 bp, Glycine max
  Clone ID: LIB3056-008-Q1-N1-C9
gtcttggacatatttgagcagtgtagcagagatgatggcatgtgtgagcagtcatcatcacttgaggaattcatactgaaggatcttgagatggtaattggacaggtgaagtgactaagaactcaaatccctggcatctgattaactgcaataattttttttccttattctttttgtttcacatggcaagttcaccgagaggacccgtatttgcttccgagatgctctgtaccgtcttgctagaaacactgaagaacaacctgtaatgctggaccagaatgaagatcttaacatacagaaggcaataccacatacagatcacaatgaaacaatgaggtctcaggacaagaaaccaatggaatcagaaaccaacaatattgacagaataattgcaaatctcatgttcaagagca

SEQ ID NO: 38161 - DNA, 382 bp, Glycine max
  Clone ID: LIB3056-008-Q1-N1-D1
atttgcttttcccttttgagttacctgcgaggctgcttgcattggaacatgttaagcgggctcttctgggtcaataatttctgacaagttctattgttctttgttggggtggaaaaaccgtctacgcgaggcagctgtattggaagcattggccagcaaatttagccccggatcttggggcaattctaggtaggggtccttgagtaggaccttttcccggcatttaagccccaagccttcgttgaatctttgccgaacaaaccacggctttcagcttcggccgacagccctcgctcgatccgattcgccgcagaccctgctccggcaacgccgagctcaccgtgccggagaacctggactgcaccatgcagctcctcttcat

SEQ ID NO: 38162 - DNA, 404 bp, Glycine max
  Clone ID: LIB3056-008-Q1-N1-D10
ggaagagggagtgagagtgttcttcgtttgctaccttctctcagaaatggttacgttcaggtttcaccagtaccaggtggtcgggagggctctcccaacggaagcagatcagcatccgaagatctaccgaatgaagctctgggccaccaacgaggttcgcgccaagtctaagttctggtattttttgaggaagctgaacaaggttaagaagagcaatggtcaagttcttgctatcaacgagatttttgagaagaacccaaccaagattaagaactacgggatatggttgcggtatcagagtaggactggttaccacaacatgttcaaggagtaccgtgacaccactctaaacggttcagttgaggcaatgtacaatgagatggcttctcgccacagggtcagga

SEQ ID NO: 38163 - DNA, 400 bp, Glycine max
  Clone ID: LIB3056-008-Q1-N1-D11
gttagttagaacataaaaagaaaaaaagaaatagggaaaacttggcgtgtcctctgatacactgaacagaagagaagtgagtgagagaatgttcaagaaggcggtggaggcgaaatctcaccagaggttgtctggtgcggaccggaagaagctgaggcgaagcattaaggacaaattcccaagggtttctgattccgatttagatgccttgcttcctcccaaggtaaatcaaataattaactcctcatcgattcattcatgtttctttgtttcttttcatatatcacacacacacacacactgaagaattaaacaggcagagattacaatagccaagcttcaaaaccgtgtccatgtttatgctgtggaaggaggctttccaatgtttttcgatgttgat

SEQ ID NO: 38164 - DNA, 273 bp, Glycine max
  Clone ID: LIB3056-008-Q1-N1-D12
caaccttgtagttattctctttcttcttttttagccacccctctcttgaaaaatctagatctcgttcttccttgatctacgttacgcttttagtgaccggatctgtatggatctgaaccagatctacacgccgatggtggttttggcctggtctttcatagatctgatgcatggaggctcagatctactgtacagaggtgtgcgattcatgttcgtctctcttttggaatctgattcgcagaaagtcgtttgagtcttcatgtcgcatggctc

SEQ ID NO: 38165 - DNA, 345 bp, Glycine max
  Clone ID: LIB3056-008-Q1-N1-D2
cctataattctcttcttggaatcatcttggttaagctgcagatcagaatataataatgctacataaagataagatggagactcatttggttttcttgcttggttggatcttcactctagttgccgtcgatgcagcccaatcccaaggcccatccagctctcctgcgcctgcaacacgcgaagcatctccacctcctgtccagtcttgtacgtcacctgttccctcatgacctacaccctctcagtatccaccaccaagcttcactcgctttacattcggactcagctcttctcttgcttcctctcctcgacacctcctgctctgctacttcttatccacaccgtg

SEQ ID NO: 38166 - DNA, 375 bp, Glycine max
  Clone ID: LIB3056-008-Q1-N1-D3
gacctccgtgaatcgataagcaaccaaaccgacgtggccctgagcatctcaaagctcctgttgtcgaaagaagctcgggacaagaacctcgtgtattcgccgctgtcgttgcacgttgttctgagcatcatcgccgctggctccaagggccccacactcgatcagcttctctccttcctccgatccaaatccaccgatcatctcaactccttcgcctctcagctcttcgccgtcgtgctctccgacgcctctcccgccggcgggcctcgcctctccttcgccgacggcgtgtgggttgagcaatccctctcgcttctcccttccttcaaacaacttgtcagtgctgattacaaggccactttggcttcagttgat

SEQ ID NO: 38167 - DNA, 401 bp, Glycine max
  Clone ID: LIB3056-008-Q1-N1-D4
gaaacatgtcttccttaagctccttagtgctgctccttgcagctctaattctatcccctcaagttcttgcaaactatgagaatcccccagtgtacaagcctgccactgagaaaccaccagtttataagcccccagttgagaagcctcctgtttacaaacctgcagttgaaaaccctccaatgtataagcctccagtagagaagccaccagtgtacaagcccccagttgagaaaccctcagtttataagcccccagttgagaaaccaccagtgtacaagcccccagttgaaaaaccaccagtgtacaagcccccagttgaaaaaccctcagtgtacaagcccgcagttgaaaaaccaccaatgtacaagcctgcagttgagaagccctcagtttacaagccc

SEQ ID NO: 38168 - DNA, 360 bp, Glycine max
  Clone ID: LIB3056-008-Q1-N1-D6
gtggtccttctatagagccctcatcgctgagttcatagcaacccttctcttactttatgtcactgtgctcaccattattggctacaaaaggcagactgatacaacggtaggtggcaccgactgtgatggggttggcattatgggcatcgcttgggcctttggtggcatgatcttcatccttgtttactgcaccgtcggtatttcaggaggacacataaacccggcggtgacattcgggttgttcctaggacgcaaggtgtcgttgataagggcgttgctgtacatggtggcacagtgtgccggtgctatctgaggtactggattggccaaggggttccaaaaagcatactacaacacgta

SEQ ID NO: 38169 - DNA, 389 bp, Glycine max
  Clone ID: LIB3056-008-Q1-N1-D7
ttattccttaagtgcagtggttgcctctggggagaatgataccaccctctgtacttaccctttactcagcactattctccacggcctttgtgccattatcctgacttcctacctttcttggcttggtagtcggatcttgaaattagttattaacacgggtttgcagaagagggtttacacattgctatgctcagtttcatgtttacttccattcagggttctttctcttggtttatctgtgttgtctggacctgaacatgttatgtttgaagccttagtttacttggctgtacttgcactagtatctagcggtggctcgggcatgtgcacacttgttcaccaggcagctgcagattgcttagcgctgggaaatctacaagacttagaag

SEQ ID NO: 38170 - DNA, 369 bp, Glycine max
  Clone ID: LIB3056-008-Q1-N1-D8
caaaccgggtcttggttttctgaaagatgggaggtggcaaggacaagcatcatgatgaatctgacaaaggaattttttcacaccttgctcatggggtagctggtgcagcacatggtggacatgggtacccacctggggcttacccaccaccacctggggcataccctccacaacaaggatatcctccagctgggtatcctccacaacaagggtatcctccagctgggtaccctccacatcaaggctatcctcctgctggttaccccccagctggttatcctggttcatcacatgcaccaagttctcatgggcacggcggtatgggagcaatgctcgctgggggtgctgctgccgctgctgctgcttatg

SEQ ID NO: 38171 - DNA, 399 bp, Glycine max
  Clone ID: LIB3056-008-Q1-N1-D9
gcggaatcgtaaggctgtattagaagagcagcaaagacgagttcaggaagcaatggcatcaaagccagctccttctgaagataattttgagatgaaggccttaaaagctatgggggatatggaagatggagatgctgtgtttggatctggtgctgaagttaacctggattcccaggtttattggtggcatgacaaatacagacctaggaagccgaagtatttcaaccgtgttcacactggatatgagtggaacaaatataatcagactcactatgatcatgacaacccacctccaaagattgtccaaggttacaaatttaatattttctatcctgagcttgtagacacgacacaagctccaacctacaccattgagaaagatggcagcaacggggagac

SEQ ID NO: 38172 - DNA, 390 bp, Glycine max
  Clone ID: LIB3056-008-Q1-N1-E1
ttttggctttgtggtaaagtggcaacccttaaccattgggggtccttatggcctcaatcctggaatttcaggttctcgtctttggggcaccattcctcagtccatttaacagcatactgtttggaatcaaatggcaacagtgagaacaccattgaattttgattccagcaagcagagtttttgtcaattttctattgaccttctcggtggaggaattttagtggacaaaactggagattggatcacacttatacaaaattctccaattagtaacttgttgagagttgctgcttggaagaaaggctgtttaatggttaagattgtgatgtctgggaatgcagcagtcaaaaggagtgattgggcctcattggtacaagtatttttaaccaa

SEQ ID NO: 38173 - DNA, 355 bp, Glycine max
  Clone ID: LIB3056-008-Q1-N1-E10
ggctttcgttggtaattttctctccgtttcagggttttcagaaattttcgtgtgaccctgtgaccaagaagagagaagatggcacctcaattggcactaacccactcttctcttctctatgtttctccctcttctgcttctctcggtttcagaaggaataaagttttgattccacaaagatgcactataaccaacgagaaaaaaaatcatgccatcacagcgtttgcagccaactctctcggaaaatcatctatccaactcactcctgtttcaacttcactatttaccgataaagaaagctaacctctcactcagaacttctatttctcaaagattcaattctaggatctgtgga

SEQ ID NO: 38174 - DNA, 413 bp, Glycine max
  Clone ID: LIB3056-008-Q1-N1-E11
gttagattaggtcttcctacccaaaacaaaacttcaatttctgtttcagttcgcggagatcaatattttatctaggtccatcgtcgatagaagatacgagaaaccaaaggcaatgtttttgtgggattggttttatgggattctagcgtcgctcgggctgtggcagaaggaggccaagatcttattcttgggcctcgataacgctggcaaaactaccttgcttcacatgctcaaagatgagagattagtccagcatcagcctacccagtatcctacatcggaggagttgagtattgggaagatcaagtttaaagcttttgatctagggggtcatcagattgctcgaagagtttggaaagattactatgcccaggtggatgcaatggtgtacttggttgatgcttatgacaagg

SEQ ID NO: 38175 - DNA, 365 bp, Glycine max
  Clone ID: LIB3056-008-Q1-N1-E12
ggttcagcaaagaggtaaccaagcatgaggatgctccacagagtgagtggatggggtggaattggaggtcagagggtgacatgttcttgaatggagcatacttcaggcaatctggtgctggtgcctcttccagctatgctagggcttcaagtctcagtgcaagaccttcttctcttgttggctacatgaccaccactgctggtgcacttacctgtagaaagggcaaccgctgctgatgattgatgaataaatgatgatcactttaataattattagctaagaaatgaaatttatttccagctgcagggttgcaaaaggaaaaattaatatgaatgattaatatgaattaattaaccttatgctta

SEQ ID NO: 38176 - DNA, 384 bp, Glycine max
  Clone ID: LIB3056-008-Q1-N1-E2
cgcagtttcttgatctctcctctcaagatgcagatattcgtgaaaactttgaccggcaagaccatcacccttgaggtggaatcctgcgacaccattgacaacgtttaagctaagattcaagacaaggaagggatcccacctgaccagcagagacttatcttagcggataaacaacttgaggatggtcgcacccttgccgattacaacatgcagaaggaatcaaccctacatctcgtgcttcgactcacgtgtggcatgcatatctttgtcaagactttgaccgagaagaccgtcacccttgaggctgaatactgggacaccattgataatgttaaggcccagatccaggacagagagggcatgcctccatatcagcagaggctg

SEQ ID NO: 38177 - DNA, 398 bp, Glycine max
  Clone ID: LIB3056-008-Q1-N1-E3
cggctcgagtgagaatcaagaaaattattatacccattaggatgaaaccgtacctacgtgcaatattcctattattccttatccttccttcggcgagatggggcgaggctaaaattgataggaagacgataacaatgttttggggcaaggttaaagatgcgacgataaaaaatttcccgagtcgtgatgagcggaagaaactgagggagtattacgagaaattcagggaattcatggatcgtgtagaacaaaagacgacccctcccccaccgccaatgtaccgtttacaaccaaagtccactcgcccaccggcaaacgcaccaccgaagcaaatcaatattaaaggcctgtccgtcgtcaaagattacttatctgactacggctacattgaaatcctt

SEQ ID NO: 38178 - DNA, 397 bp, Glycine max
  Clone ID: LIB3056-008-Q1-N1-E4
cagagcttctgcctctgtctatttccctcgcagatctcaaccaattcttataaacccctttggagatctgcttcaagctctgtccccttcttccacatccacactcccctctcaagtttttgtggataagattgagctataatggctgccaggagaccgggtttgattgctttgtttgatgttgatggaactcttacagctcccacgaaggtggtcacaccggagatgttgacattcatgcaagaactgctgaaggttgtaacggttggagacgttggcggttctgaccttataaagatatcagagcaacttggcagcacagttaccaatgactatgattatgtattttctgagaatggtcttgtggctcacacggaaggaaagctcattggaactc

SEQ ID NO: 38179 - DNA, 393 bp, Glycine max
  Clone ID: LIB3056-008-Q1-N1-E5
ggcctttgctcgacctggctccctcactctctctgctccgccgccacggaggttgatttcggccaccataggccttgccttctgattttgcccaatccaagctgcgaccatcaaagctatttccgcccaccacgatacatttcatgaggtgagaaggagacgtgactgaaaggagtagctacataagttctagcttgtcaagaagctattggccaagccacactgtcttggctaagtaaaagtctcttaagtaataattttacattgcaagaaaggtattttctacatacttatgccaccagttcagaaatatgaagttgtatcactgttcaatccactagtacttttgcttttaggagtcatatgacaccataatgttggaaaagtatggag

SEQ ID NO: 38180 - DNA, 381 bp, Glycine max
  Clone ID: LIB3056-008-Q1-N1-E6
cgacaaatgggtgtatttctacgggagcacattttaatcctaataaattgacacatggtgctcctgaggatgaagtccgtcatgcgggtgacctgggaaacatagttgctaatgcagagggggttgcagaggctacaattgtggataatcagataccactctctggccccaattcagtagttggaagagccttggtggtccatgagcttgaggatgaccttggaaagggtgggcatgaactcagtttgacaactggaaatgctggtggaagattagcatgtggtgtggctggtttgactccagcataatcagtgcagcgaattttttgtagcagtcgtgttatgttatcagatattatgttctctgtgaagcatgatgact

SEQ ID NO: 38181 - DNA, 399 bp, Glycine max
  unsure (1)..(399): unsure at all n locations
  Clone ID: LIB3056-008-Q1-N1-E7
ctcttgcagattgtctcaaacaaatgacgagactctgatcctatatattgctgccatgactgataaaggtggaagcatcctgacctggaatacacaaacatgggaaaggatggcctcaaagcatattattcgcgatccaatctctgcatttaatgtctcagctgatggaaagtttcttgcgtgtggaacaccttcaggagacattgcagttgtaaattcaacaaatatgcagattcacacaatgataaaaaaggctcaccttggcatagtaactgctttagcattctcccctgattcaaagggcggtggctactgtatccatggattcaagtgcgagggtaacaataattgaagagaagaagactaatgggctaagctngaggattgcattatttatca

SEQ ID NO: 38182 - DNA, 387 bp, Glycine max
  Clone ID: LIB3056-008-Q1-N1-E8
gtcccaaccctaggcagagagaaaattccccaaatcacaaaccctagattgagagaaaccctaacacgccatgggaacacccgagacatctcgcgaaccctgccccgatcgcatcctcgacgacatatgcggcgccttcggcatgggagcggcgggtggctccgccttccattttctcaagggtctctacaattccccgaaaggcgatcgatgcgtaggcgccacccatgccgtgcgccttaacgcccgccgcgtcggcggcagcttcgccgactggtgcggactctgctacgcctgtgactgcaccatggtctacgctcgccagtaggaggacccctggaacttcatcgtcgacggcgccgccactggcggctacctgtctatgcg

SEQ ID NO: 38183 - DNA, 410 bp, Glycine max
  unsure (1)..(410): unsure at all n locations
  Clone ID: LIB3056-008-Q1-N1-E9
gccttttccttcagtggggtttggattttattgtttctgagctcggtttcagctttttctccaactgggtcgattcggcatcccgtcaagtttatcataggagaagaagaggagaatttgggttcatggaagagtgaattcacacaagtggctccagcaccagggcctaaaggtgacgatgttcttattctggcggcaaacaagaccaataggcctgacattctgcgaggattccgacgttatcgaggtggttgggatattgcagatcagcattattgggcttcagttggattcactggtgcagctggtttcattcttgcttgcctgtggtttatctcatttggcttggcgctcatgattcatctatgctntggatggggaattaacatcaagggcaaaggatcaaatca

SEQ ID NO: 38184 - DNA, 361 bp, Glycine max
  Clone ID: LIB3056-008-Q1-N1-F1
gttcgtcaccatgcactttcaagcgccaggaatggaaggtcggatcaaacaacggactggggccccgtcaaagctcatcgatgctccaactgcggcaaatgctgccctaagacaaggctatcaagaggtttctggtgaggaacattgttgaacaaggctgagtcagagatgtgcaagaggcttgcgtctacgaacaatacacgcttccgaagctgtatgggaagatgcaatattgtgtatcctgtgctatccactctcatgttgtgagggttcgatcccgcactgataggagaaagcgtgagcctgcacagcgattcatcaggcgcagggatgatgcaccaaggcctggtcagcctggtca

SEQ ID NO: 38185 - DNA, 242 bp, Glycine max
  Clone ID: LIB3056-008-Q1-N1-F12
ctttccaccaacaagaaagaaaacagagagaaactttcatttcatagattttcatcatctcagcaaaggaatcaatcaatcaagccatggcaggcttcagtggcgacgaaaccgctcctttcttcggcttcctcggtgccgctgcggccctcgtcttctcctgtatgggagcggcgtatggaacggcgaagagtggggtgggggtggcgtcgatgggagtgatgaggcccggactggtgatg

SEQ ID NO: 38186 - DNA, 381 bp, Glycine max
  Clone ID: LIB3056-008-Q1-N1-F2
gtggaggcagcggcggaattccttaacaaggcagtgaaaccagtgctggttggtggtcctaaactgagggtggcaacagcatctgatgcctttgtcgaactggctgatgcgtgtggttatgcgcttgctgtgatgccgtcagctaaagggcaggttccagagcaccatccccattttatcggaacttattggggtgctgtgagcactgccttctgtgctgagattgtggagtctgcggatgcatacttgtttgctggtccaatttttaatgactacagctctgtggggtattcacttcttctcaagaaggagaaggcgatcattgtgcagcctgatcgggttgtgatcgcgaacggacctgcttttgggtgtgtgctgatg

SEQ ID NO: 38187 - DNA, 399 bp, Glycine max
  Clone ID: LIB3056-008-Q1-N1-F3
gcgatgttagcttcaccatctgtgaaactctcgctcccattccctctttctgcttccaaacccaaccctcgcaggcccttcaccatccgagccaccgagcccgaaaccgcactctccggttcggacccatcccagcccgaaccggacccttccgacgacgccttcgacgaccgcatcaaccagctccgactccggtaccgcagcggcaccggtaagaaggcggagctccgaaagaacaaatgatcaaagaaaggaacctccggatccgggtcgggcatgtacctgccgccggtgccgctgaaggaaccggtttccggcggcgtgaaggtggagctcgggttcagccagtacagcgagcgattgaacggtcgcattgcgattctcggtctggcggcgctg

SEQ ID NO: 38188 - DNA, 398 bp, Glycine max
  Clone ID: LIB3056-008-Q1-N1-F4
cgaacggttaacgttcgcaagagacgcatcacaaagttgaacgaggaataggcgtgtagggaaaccgtttcattttcaagcgcgtgactttcaaatccaatcttccataccaatggccttcagcaacgctctcagatctgccgcgaagcttgtcgcttcttccgaatcctccctctctaactcagtgagcagaggttttcattcaactggcatgaagaggatgggaggtggacatggccatgatgagccctattatcttcatgcaaagcacatgtacaacttgtacaggatgaagcaccaggggttgaaaatgtcccttgctgtattcactgctttcagcattggggttgcagttccagtgtatgctgtcattttccagcataagaagacagcttcta

SEQ ID NO: 38189 - DNA, 301 bp, Glycine max
  Clone ID: LIB3056-008-Q1-N1-F5
gccttcttcctcttctcttcttcgctctttcttttggaccctttcttttccctccttctccttcacctaccatttttagggttctctctccgatttcactctctcaatctacctaccccgatcgcttctgtttttcttctccacatttaaatctatttcgctctggattattaatggttcctttcttgggaacctcttcatacctatccattttggattaacgcgtgcgcaaatatacatcgtgagagcgcatattccggtgggtatagttcggccacatgtcaatgagtgagcggaagac

SEQ ID NO: 38190 - DNA, 389 bp, Glycine max
  Clone ID: LIB3056-008-Q1-N1-F6
ctcgagccgttcgccgtaaacagaagagagagagagagagagagagagtcctgaaacttgggtgcgattccttcactcacaacaacaacacatcactatggctcttctgagtcgagcctcttcacgcttccctcagctggtttcccctcaaagggtagtttcactccacacaacgctcccatctctgaacgcatccccatccacagtcacgcctacaccatatgccccgccaccgtctccgtccgcttcctctcccgccggcgtttcgaaagcggcggagttcgtgatctcgaacgtggacgatctgatgaactgggcccgtcgcggctccatctggcccatgaccttcggcctagcctgctgcgccgtcgaaatgatgcacaccggcg

SEQ ID NO: 38191 - DNA, 397 bp, Glycine max
  Clone ID: LIB3056-008-Q1-N1-F7
cccctctctttctttttcttcccatttcacccctcgtctttccttgtttccggtgagggccaaccacaacatatgttaaacaaggaacaacctccaaaacataacatcctacgccaaacaaaactttgacctccttcagatctatacccttctctctctctctctctcttctattttcaaattctacatcatgggcacggaggttctacggccacaagattgtttcacccaacgcatcggtgttccaccgtctggcttttcccggcgaaggacctatggtacccaccacaacaacaaaaaccattaccttaaccaataatttaagggtaacccgaaagccgacaacccgacccgaacaatgaaaacgggttgtggacaaaaggcccagtttagatga

SEQ ID NO: 38192 - DNA, 377 bp, Glycine max
  unsure (1)..(377): unsure at all n locations
  Clone ID: LIB3056-008-Q1-N1-F8
gatccaccaaacccatcacagaaaatcacgtaagattgtaccttcaactcaaaagcttcaaactttttccagtttccaaattaagacacagagagaaaaagcaaaaagaagctgcaaaattttcttcttttgtcacttttatctgttttttcatcacaaaagtttgaaccttttctttccttccattgaatttggatggctggcggctgaggtggggaccggccgccgtggaaggaggcggcgccgacacgacccaccatcactctgacggcgcggtcgggttccatggagaccctntttcaatggacggttcagcncctggtcccatgactctgctttctggctttttgggtgatggggatgatggaaagtccttc

SEQ ID NO: 38193 - DNA, 378 bp, Glycine max
  Clone ID: LIB3056-008-Q1-N1-G1
atgccttgaaaaacttccccgaggatgcaatgaatccagatacattgttaccactggcttattctatcaagatatccaagcgtttagaagaattaaaacaagagtatgagaagaagaatggaaagataagacgatcaagagaactttctgaaaatccaatacttcctagtgtccagggcaactgaagcaggagcatatgcagacaacatttgctagacatgtaaaacttttggtaaagctgagaggacctccgagtaaaggtctatcttttctgctggaaagtaatccagtgtgaaaatcataccctcaaattctgttgttaccatatgttgcatactatgtacaattgtattagttgctcactcttggtcaaaattc

SEQ ID NO: 38194 - DNA, 413 bp, Glycine max
  unsure (1)..(413): unsure at all n locations
  Clone ID: LIB3056-008-Q1-N1-G10
gaaaatcacatgcactcgcccatcctctcattatccacacaaaaattcttgcatcaaacatatgtttctatctttcccacttttccctaatgaaaaacacccttccttaaaacactctccactatgatcactaaaaaaaaacaagaacaacttcttttgatcatcatcatctttgctttggggaaaataacatttttcattccaacaacgaatgcccaagtgaaccaccacgagtgccgncaaacatgcggttcctncaaacccgtcccttacccattcggattctcctncggctgcgcaatacgcctgaaatgcaccgncggcgtggccttcgtcggagaattcccggtcaaagtcaacacagacagcatgatcgtgagcattgaagctcaatgcaatcgcccattcgatag

SEQ ID NO: 38195 - DNA, 187 bp, Glycine max
  Clone ID: LIB3056-008-Q1-N1-G11
tacaagtatgtaggatgaagagctcatgaagaaggttgaggccaaaaacgctctggaaaactatgcatacatcatgaggaacaccgtgtaggatgacacgatcggtgataaactagtctcgactgtcatgactaagattgaggatgcacttgagcatgcgatcataatgatatacagcatccagctt

SEQ ID NO: 38196 - DNA, 412 bp, Glycine max
  unsure (1)..(412): unsure at all n locations
  Clone ID: LIB3056-008-Q1-N1-G12
gggtgtttgaatctggtgaaggatgtcaattgttccaatcaaccagggtgatgccaacggctccaaccccttcgcttcgtggggtcaattcgtggattttcctctccctccttccatctccggcttcttccccggcttggaattcggattcggattcggatcatccgtgaacacacgtgtggactggagggagactcccagagcgcacgtgtggaagctggtgcttcccggcttctccaacgaggacgtgctggttgagctccaagacgagagggtgctccaagtcagcgtggagagcggcaacttcgtcacgaggtttaaggtccccgacaacggtaacctagaacaactcaaagccaacatgcgtcacggngttctcgttgtcactgttcccaagtttcatcaacccact

SEQ ID NO: 38197 - DNA, 399 bp, Glycine max
  Clone ID: LIB3056-008-Q1-N1-G2
gtttgcgttctttgttccatcggagaagacccttttcccttggagcttcactctgttctctctctttatctgtcaacgatccaagtctacttctgaagcatctttttactgtcacttgacatggcatcaagacaccgtgttcacagagaacccttgaatgctcgaaggggttacccaccggaagggccatatgctcgggtggctcccatgcctcgaccactgcctcctattcctcctcatccgtctgcgttggaagaggaacttgaatttcagcatgccgagatgcgaaggctcgtggcagacaacaggacgttgattgatgaccgaatggcgttgcagcgagaccttggggccgctaaggacgagcttcatcgcatgaatcttgccattggtgacatt

SEQ ID NO: 38198 - DNA, 389 bp, Glycine max
  Clone ID: LIB3056-008-Q1-N1-G4
cagaaagcaaatattgcctattccgcaatatggcggaaaatgcttcgattgagctgaacaagtttgtgttcttttgtttgttggtgctaatacaagtggcagtttctgaaatcatttttgaagagcgttttgatgatggatggcgaggtaggtgggtgaagtcagactggaaaagcagtgaaggcaaagcaggttcattcaagcacacagctggaaaatgggccggtgatccagatgataaaggtattcaaacatccagtgatgccaaacactttgccatctctgcaaaaataccagaattcacaaacaagaacagaacattggtccttcagtattctgtaaaatttgagcaagagattgaatgtggtggaggttacatcaagcttctc

SEQ ID NO: 38199 - DNA, 356 bp, Glycine max
  Clone ID: LIB3056-008-Q1-N1-G5
ctgtgtgcactctctctctgtctacaacaagaatgcatctatccatttcagcccatcagcatggcgaacgagaagaaccacttggacaacacgaacatgatgccatgcaatgcagacgaggctcacttgcgaggagtccagaagcgcccctggggccgatatgccgacgagatccgtgaccctggaaagaagacccgcgtctggctcggcaccttcgacaccgacgaggatgccagaccgcgcctacgacgtcaccgtcagaaacttccgtggccccatgagtcaaaaccaacttccccttactgcccgacaacaacatcaacgttaacctcaacatgaagagcaacaacgtttac

SEQ ID NO: 38200 - DNA, 392 bp, Glycine max
  Clone ID: LIB3056-008-Q1-N1-G6
ttcaaccccttttctttctctctctgtctttcgcactttcattctctcttaaaaatctaaatcccttttggtcttcatctttgcctctgacccaggtatggcttcgaaacgcatcctgaaggagctcaaggatttgcagaaggatcctcctacgtcatgcagcgcaggtcctgtggctgaagacatgtttcactggcaagccacaatcatgggacctgctgatagcccatatgcaggtggtgttttcttagtttcaattcattttcctcctgactatcccttcaagccaccaaaggttgcttttcggactaaggtgttccacccaaacatcaacagcaatggcagtatatgtcttgacattctcaaggaacaatggagcccagctctaacca

SEQ ID NO: 38201 - DNA, 379 bp, Glycine max
  Clone ID: LIB3056-008-Q1-N1-G7
ttccaaacttttagaggaactctaatttcaggagcagtgtcctcagtacctacatttgaaaagaagaatggatatgattgtctagataagaaagatttggaaacttctgacctctttactgaacaacatccaatggctgagttgcaatatactgaggacaagacttcatatcctgaaaatattgagattcatgagaagaatgattttccattttctttagacagcaacagttcaaaccagttcaagcagtttgatgtaatagaaaattgccctgaccaccatttttttgttgagggaaaagggttgtcaacatctcaggtaaaaagaagttgggtgaaaaaggttcagcaagaatggagcatcctcgagacaaatcttc

SEQ ID NO: 38202 - DNA, 411 bp, Glycine max
  Clone ID: LIB3056-008-Q1-N1-G9
ctcactctgaatccgccattgggctgcgatggcgaagaagcgaaagtcggtggcaacgcgccttgacgaagtggatcgaacgatgtactccactttctgcagcaccgccaactccctctctcatctctacacccacgccatgaaccaacaaaaactctcatttcaggccggtgaacgacacgctcttgagaaattgtatcaatggattctcaggcaacagcaagaaggatctagggtggccaccattgatattgttacccatttgcagaatgagcttgaatatggaagaaaagaagcaccagtgtccccaaagcagcccatgcatcaacagaattcccaaaatggaatggcccaccacaaccttgggtgcgtccataccctctaatgcatttggagcaactgtggcaggac

SEQ ID NO: 38203 - DNA, 392 bp, Glycine max
  unsure (1)..(392): unsure at all n locations
  Clone ID: LIB3056-008-Q1-N1-H1
attctctgcgttttcttcgtcacaacaacccttctctgattcgtcttcaatttttgtttctcttcttacanaaccttangtcagatttctgggtttgtcttttctgataatctggagtggagctaagtcaagatgccgtgggtttccttgtttgtggatcacaaaagaaattgtgttcgcttggtggtgttttttcgtgtgattctgtaatttaattgctcaggtgtagtcccattaggttgcaaagcaactcttttcattagctgttctccttttcatttccaaagctgttagggggattgaggatgtactttgcaataacaataaagagataccgagctgtgaaggaagttggacaaattaagatgagtgttggagttaaccaattgatg

SEQ ID NO: 38204 - DNA, 408 bp, Glycine max
  Clone ID: LIB3056-008-Q1-N1-H10
agacattgaaagtgcatattgggaacttgtagtgaaggatatccaagatgcttgcaaattatttgaaccaatctatgatcaaacagatggtggtgatggctatgtttctgttgaagtatctcccaggctcgctgatgacactgagggaaccatagaagctgcaaaatggcttcataaagtggttgatcgccccaatgtgtatattaagattcctgctacagaggcatgtgtgccttcaattaaggaagttattgctaatgggataagtgtgaatgtgacgctgatattctctcttgcaagatatgaagctgtaatagatgcttacttggatggtcttgaggcatctgggttaaatgacctgtctagagttacaagtgttgcctctttctttgtcagtagagtggacac

SEQ ID NO: 38205 - DNA, 394 bp, Glycine max
  Clone ID: LIB3056-008-Q1-N1-H11
cggctcgagctgaatgttacccaggatatcaagaatataaccgtgagatagtggacagtgatgatgaagacgacttgtccaaaatggatatgggtggaagggcaaagggtcgtcttcatagatgggactttgaaactgaagaggaatgggcaacttacaatgagcagaaggaagcaatgccaaaagctgcattccagttcggtgtgaagatgcaagatggccggaagacccgaaagcaaaacaaggaccagaagctcaataatgatttgcacaagatcaataagatacttgccagaaagaagatggaaaaggacacgaatggtgaggggggtaaccattatgatgatgaaccaacacctggaaagaagcttacaaatatgaggtctagtaccac

SEQ ID NO: 38206 - DNA, 399 bp, Glycine max
  unsure (1)..(399): unsure at all n locations
  Clone ID: LIB3056-008-Q1-N1-H3
gctaaggcgggtcctactggcgatagaactcatgtgtccactcaagtaatgggtactcaaggatatgcagcacctgaatatgttgcaactggtcgtttgacggccaaaagtgatgtctacagctttggagttgtgttgcttgaacttctatccggaagacgcgctgttgataaaaccataaccggcatggagcagaatctggtggactgggcaaaaccatatttgagcgataaacgaagactgttccggattatggataccaagttggagggccagtacccacaaaagggggccttcacggctgccacacttgctctacaatgccttaacagtgaggccaaggcaaggcctccaatgacagaggttntagcaactctggaacagatagaggcccccaaa

SEQ ID NO: 38207 - DNA, 446 bp, Glycine max
  Clone ID: LIB3056-008-Q1-N1-H4
aagatctatgacggcacatgcaccgtaacctcggaattgggttcaaggcaatggccaaatggatctcattggctgctctttttgcaatactttaactactaatctctcctgagcttgcaagtgctgcccaacctaggcttattcttcaactcggccgaaaacttttccaatgcggcagcgccgccgtccctgttcgtggaaataccccatccaatggccgctcgtagaggatataccccaccaccaaaacacccactctatggctgaatatttgagatgttagcatgcttctttaattcagcgataaaaaaaatacttttaaagatgtatcactgcgggtcattactatccgatatgtgacgtatgcgcagttacactgaaccatgtagactgctgatagtaagcctacgctctgtatacattagcatgggataacaccacaggat

SEQ ID NO: 38208 - DNA, 377 bp, Glycine max
  Clone ID: LIB3056-008-Q1-N1-H5
tgattacttacaggaagggctcaaagtctggggcttcaatgacctgtgctggttgccagggtactggcatgaaggtgtctattaggcaccttggtccttctatgattcagcaaatgcagcatccttgcaatgagtgtaagggtactggagagacaatcaatgacagagacaggtgccaacagtgcaagggagagaaggttgttcaggagaagaaagtacttgaagttgttgtggagaagggaatgcagaatggacagaagattacattccctggtgaagctgatgaagcggtatgttgagctttgatgctgacactgtaccagattatggaaaactattttttgagctattttttgttttgcagcctgatacagtca

SEQ ID NO: 38209 - DNA, 383 bp, Glycine max
  Clone ID: LIB3056-008-Q1-N1-H7
gtcgtcgttccactcaactttcagtggctatggctccaccgcctccgcagtctcatcgatcgccctcaccgtcgcaaccgtcagggaagagtgaagtctccgatctgaaatcgcagctccggcagcttgctgggagccgagctccgggtgctgatgattctaagagggatctcttcaagaaggtgatttccaacatgactataggtattgatgtctcatctctatttggcgagatggtaatgtgctccgcaacgtcagacattgttctgaaaaaaatgtgctacctatatgttgggaactatgctaagggcaatcctgatcttgcgcttttgccgataaatttctacaaggagatggcaaggatgaggatccaatgattcggg

SEQ ID NO: 38210 - DNA, 222 bp, Glycine max
  Clone ID: LIB3056-008-Q1-N1-H8
ccagcgtccatgttcgtggaaataccccatccaatggccgctcgtagaggatataccccaccaccaaaacacccactctatggctgaatatttgagatgttagcatccttctttaattttgtgataaaaaaaatacttttaaagatgtataattgtgtgtcattactataatatatgtcatgtatgcttaatttcactgaaccatgtgtactactgcttatc

SEQ ID NO: 38211 - DNA, 414 bp, Glycine max
  Clone ID: LIB3056-008-Q1-N1-H9
ggttcacttacatttaaaactccagataatgtaaagtatccatccatgaatcttgcctatgctgctggccgtgctggaggcacaatgacaggagttcttagtgcagcaaatgagaaagctgtagagatgtttattgatgaaaagattagctatttggatatattcaaagttgtggagctaacatgtgagaagcatcaaaatgaattgttatcctctccttcccttgaggaaatcattcactatgacctgtgggcgcgagaatttgctgctagtttgcaagactcttccagcttcactcctattcttgcatgaggatatgattaaactagggatgtggctgctggtgcttcccaattgcctgctttcaccataatttcttcaggcaattgaacaatttagaatgatgcattccct

SEQ ID NO: 38212 - DNA, 388 bp, Glycine max
  Clone ID: LIB3056-009-Q1-N1-A11
cttcaataactaatgacatagctgttactgctgctcgaaggaagggtgaaggatgacccaaatatggtttcttgccattatctatatcatagcaggggttcctggagcatatgttctgtggtatcgcccattatatcgtgcttttaggaatgaaagtgctttgaaatttggatggtttttcctgttttatctgcttcacataggattctgcatcttagctgcagttgctcctcctatagttttcaaaggcaaatccctgacgggcattctggctgccatagatgtgctgggcgaccatgctttgatcgggattttctacttcgttggatttggattattctgcattgaaacgttgatcaacatttgggtcatttcacaagtatacatg

SEQ ID NO: 38213 - DNA, 413 bp, Glycine max
  Clone ID: LIB3056-009-Q1-N1-A12
ctcttttcttctcttcttcttcttcttctacccttcaatgttaatgttccgtgcaaaaaccaccaacaacaacatcaccaccaacaagaagaacaagattggcgttatgggtctcttcctttctaggaatttggcttgcaaattcatatacccttttcttttctccaagaaggtttccaaggatttgtttcccaagcagttggagaacatgatgtctctgatctctcctcgtactggcaggcatttgcagcgctatgacaatggctgtcgccaagttgtgggatgcattccttatagatacaagaacaatggtacacaggataaggaattggaggttcttgtgattagtgctcagaagggtcatggaatgcagttcccaaagggttggtgggaaactgatgaatccatggaac

SEQ ID NO: 38214 - DNA, 204 bp, Glycine max
  Clone ID: LIB3056-009-Q1-N1-A2
ggaatcttgagaaatggcaagggaccgcaagaaccagaatctggtcattggaaggaccggttaccttggaaaattcatcggggaaaccaacggccaagcttgccaaccaactttccttttggtgaaggaatccaatcttttcaaacccggaaaatcaacccttaatggccatttcaaaaggcctggtggcaaatctggtttaag

SEQ ID NO: 38215 - DNA, 262 bp, Glycine max
  Clone ID: LIB3056-009-Q1-N1-A3
aacaaaacaatttagaagaagaaaggaatatgggtggagggtcattccaaggaacccttggcacggtggcgaaagcttttcagcgaggaaagccgacctggggtggtgtcgcccgtcgcaaagataaaacagctgacggcggagctggatcccgtcaccgcatacgggtcgacgccgtttaacccggacgagaggatccgaaccgggttcgcccacttcaagaacgagaaataccagaagaacccggaattatatggcgaac

SEQ ID NO: 38216 - DNA, 94 bp, Glycine max
  Clone ID: LIB3056-009-Q1-N1-A4
ctcgaacccattccgctcgagtcaaaactcaagccacccatttcaaattccattattgggaggctaaacctttggggcttttttcttccgggtg

SEQ ID NO: 38217 - DNA, 179 bp, Glycine max
  Clone ID: LIB3056-009-Q1-N1-A5
gtggtttcagtgagtgatcggtgttcacttgatccgtcataagtcgtcatcatcatcatcatcatcaccgttgattgaagaagatgccgatcagaaacatcgccatcggaaggcctgaagaggctactcaccccgacacgttgaaggcggggttggctgagttcatctccacctgatcc

SEQ ID NO: 38218 - DNA, 330 bp, Glycine max
  Clone ID: LIB3056-009-Q1-N1-A6
acactttcgagttcgaactaagaaaaaaaaaaaggaaaacaaaatggtttcgtgggtgagaggcaagtgcgtcggtaacggcgcgtttggggttgtgaacgtggcgatttcgaaaagagataatcgcgttttcgcggtgaagtccgtggattgtggaagggggctttctggtcatcaggtggaggcgttggagaacgagattgggattctgaagcgggtggcttcgccgcacgtggtggcttatctcggagacgatgtcacgtgcgaaggaacggcgtcgttcaggaatcttcatctggagtacatgccaggtggcaccgtcgctgactt

SEQ ID NO: 38219 - DNA, 399 bp, Glycine max
  unsure (1)..(399): unsure at all n locations
  Clone ID: LIB3056-009-Q1-N1-A7
cttgtttcattgagtcaggttcaatcttttggaggctcttcaatggtttctcatagtgagtttgccaattccaactcatcttaccctcttgttttggataaccaagggataagcaacacgtctcacctggttcaatacatgtctgactcaaatcttgggggcatggtccccaaggttcactcctatgcaagtgggggattctcagaaatggttggtgctggctctntntgccaacataggtctgctgatatggctaacacagggtatccaatacattataatccgatcaaggaggctccaattaatggtgaacaatctcaggttgaggactcaattcctgaagaggaagcaccaggatctgcacctagtgggaatagaagaaagagagggcttgatcat

SEQ ID NO: 38220 - DNA, 395 bp, Glycine max
  Clone ID: LIB3056-009-Q1-N1-A8
ggcgtgtcgttttttcaggaggtttcggaggctgctgcggaggcgctggtgaacctgtcgcagaactcgagcctcgcggaggtgatggttcgaatgggactggtcaaaacggcgatggatgttctgtacaagcccgactgcggcattgctcgcttgcttgtcatgcttttggtcaacctcactcaactcgaagctggtgctgcttccttgcttcagactgaagatgagaaggtgcttggattatatgttattaagcttgtgagatcattttgtagaaccacccatgagaataatgatgatgcttttgaacatgttggttcaatacttgttaacatctcaaaacagcggaaagggagggagcttctacttgacccaaaacggggtctcttaaagca

SEQ ID NO: 38221 - DNA, 399 bp, Glycine max
  Clone ID: LIB3056-009-Q1-N1-A9
tggaaagaaagtattgagcatggcaccgggactagagcgtgtaaacattcttcctttcagggttgctgcatatgacaagactcagggtaaaatggcattctttgacccttcaaggcctcaggacttcctgttcatatcaggcacaaagatgcgcacactggcaaggaacaaagaaagtcctcctgatggatttatgtgccctggtggatggaaggtgctggttgattactatgatagcttagtactctcaagcaacggcaaagtgcaggaagctgttccagcttaatcttgtatcatatcataatgtatatatctcatgattgggagaaaccttaagcttatgtattctcctgctaagacatacttcacgaggatcctctggcccaatctaataataat

SEQ ID NO: 38222 - DNA, 299 bp, Glycine max
  Clone ID: LIB3056-009-Q1-N1-B1
gcaagctggttatgccgagggggcaattgatggaaggattgccttggtgataacctcagaattttgcagcaacaatgggatccccggtgactggggtggtgaccagccaaaaaggcatggtggggtaattcaaaacaattcccagagaggctttactgatgttaatatgggtcaagtatacaatgtagtcgatgattatgagcaacatagaatctgtagtgcagttgctagtggcaatactggaatcataaggaggcatcgtgaggtacgaaatgaacagcttagcataaactcatcac

SEQ ID NO: 38223 - DNA, 396 bp, Glycine max
  Clone ID: LIB3056-009-Q1-N1-B10
gtcaatttacattcgaaagggttaggctattgaattttaggtaattacagataaaataatcgatagctttgattttaaaaattaatcataatcatcggttaggttgcaacataatacttaattcgcttaattttttaactgcgcctcagagtattcataacatattctattaaattaataagctggtgatgtaattaatattaatatgtagttttggcaatcttattggcagaagatgctaggtggagttcatcaatattctggtaggtataatatcttcatgaatctaatataacgttattcatagtgaaaataaatcgagccaaggaatttattaataattgtcttcatttcatattagctgcctgctgcgacttccttatgcataattttact

SEQ ID NO: 38224 - DNA, 361 bp, Glycine max
  Clone ID: LIB3056-009-Q1-N1-B11
gaataatgatggatcactgaaaatctcaggagacagcttggagaatgtgtacaaatcatatgtgacagattatccaattgtgtccattgaggatccatttgatcaggatgactgggagcactatgcagaattaacagctgaagttggccagcaggtgcagattgttggtgatgatctccttgtcaccaacccaaagcgggtggagaaagcaatcaaggagaaggcttgcaatgcccttctgttgaaggtgaatcaaattggtagtgtaactgaaagtattgaagctgtgagaatgtctaaacaagctggttgaggtgtcatggctagccacaggagtggtgaaactgaggataccttgatt

SEQ ID NO: 38225 - DNA, 356 bp, Glycine max
  Clone ID: LIB3056-009-Q1-N1-B12
cacaactcggggagttgttgttgtggttcatcttcctcctctattcactggcacttgatagatccctctctcacagcttccattcgcaatccagtttctctttgatcgatgcctttgctggtttttctttttctctttgttttctttctcagctgagaaactgcagtgtggagctgtgattttgctttttctcgttttcactgagacttctgcttttcgtttctcttatcgctgaattgaaattcaagcttcggtgtggattttgtgctagttgctgttgtgtctgcatgtttgtgtgtttctggatttttattggccagagattgtgaaacaagttcatgcaagtgatttgaaaa

SEQ ID NO: 38226 - DNA, 393 bp, Glycine max
  Clone ID: LIB3056-009-Q1-N1-B3
ccttccttttccttccttaccacctcttttcaacctaacccttttcccgagcggcccttttttttccttaaggcgcccttggacaactggcggtcccttggcggtcaaggcctcttcagggaggcttcggctggtgggaaccccggaccgggtttcggagccgaagctgtggttggccaggaggttattcacggtgaactatctgattacattgggaagaaatatgttgtgctcttcttctacccgttggacttcacttttggttgtgccacagaaatcactgctttcagtgaccggcatgcagagttcgaggcactaaatactgagatattgggtgtttcagttgacagtgtgttctcgcaccttgcatggatccaaacagatagaaagtca

SEQ ID NO: 38227 - DNA, 279 bp, Glycine max
  Clone ID: LIB3056-009-Q1-N1-B4
ggcctcttttcatatccaaaaatcaatccctgggcctgggcctggttttgcggacaactttgttaaaccctcccatggcacacttttttcccaattttaatgataaagtttgccctaaggatttgccggtattaagtcactgggttcaacatgcattatacgtgagcgacgcatcggagcatctattctgcgcttgcatatccatgacagtgtcgtgaatgggtgtgatggatcaatatagctagatgacacccgtaacttcactggcgagaagactgc

SEQ ID NO: 38228 - DNA, 408 bp, Glycine max
  Clone ID: LIB3056-009-Q1-N1-B5
ttctttgcaggatattgtgagcatttctgttcgaagagggggtattgataatggtcaatcttacagccagtggctttcaaccatatcacagtctcctagtgtcatatcaatgtcttttgtgcctatcacttccctgctgaattcggttccaggcaatggatttctaagtcacgcagtgaatttgtatcttagatataaacctgcaatagaagagcttcatcaatttctagaatttcaattgccccggcaatgggccccaatgtatgatgatctgcctctcggattcggccataagtataagaagagcatgtccccatcacttcagttcactctcatgggacccaagctttatgttaacaccgtgaaggttgactctggaaaccgacctgtgactggaattcgcttata

SEQ ID NO: 38229 - DNA, 396 bp, Glycine max
  Clone ID: LIB3056-009-Q1-N1-B6
catcatccctcttgcatagcattgcactgtttcccttgtctgttctcacatcgtcattcacacaccctcttctcttcgatctcatcgccctcacaaacccttatatttacaccggcccactttcctatttgcaccatttcgttcagatcatagcgccgttcgagatcagaaaccggaaaaaataggtttttgattcgtggggttggttccaaatggcgtcattcacgatcccttgccccaagtgcgttgttgttccttttgctcatttgggactgaactctcagacccagcaacggaacgcgctggggttgaagaaatcgctctcatttggatctttgagtagtgattcggcgccaaatgggattcagtgccttaacaagaagcaatcttctgtct

SEQ ID NO: 38230 - DNA, 345 bp, Glycine max
  Clone ID: LIB3056-009-Q1-N1-B7
gtgatgcccaaaccgagaccacttcgaaagagcgaaacgcagtgttagcattgttcctcaacaaaaaaaaaaaaaaaaaagaagaaaaaagactcagttgtgtatcgttgcagctctactagctagggtttcgcaagtgcgatcgaagaagaacgatggcgatggctgctgctctgcgtcgcgaaggaaggcgtttgacccaaccaatcaacgccctccgttcctctctcatctctcaagaccaatcccctcatggcgcgcgcttcatttccactcaagtggtgagaaaccgaatgaagagtgtgaggaatatccagaagatcaccaaagccatgaagatggttg

SEQ ID NO: 38231 - DNA, 365 bp, Glycine max
  Clone ID: LIB3056-009-Q1-N1-B8
gcaggggctccaattcctactcttagccgcagatctctcagggcttgcatcttctcaggtaagttgtgaagatgtacacatcaaggaagaaaatccacaaggataaggatgctgaaccaactgagtttgaagagtcagttggacaggcattgcttgatctggaaaataccaaccaggagcttaaaagtgatctgaaggatttatacataaactcagctgtgcaagttgatgtttctgggaaccgcaaggctgttgttattcatgtaccttacagattaaggaaaggtttccgtaagattcatgtcaggcttgtcagggagcttgagaaaaagtttagtggcaaggatgtaatcttgggtgacacc

SEQ ID NO: 38232 - DNA, 371 bp, Glycine max
  Clone ID: LIB3056-009-Q1-N1-B9
aaacaattatcagcaatctcacaacagagaaagcgatcgagagagaaaaagagagagaaatggagcttcatgaccatgatttcttggaggaattaatgtctctaagaagagaaacatgggatacaaatccatgttcacaagaaaaccagcttttctctaatggctggagttttgattgttttgatcaaaactatcatcaagcttttcctccaaactctttctcttgccaacaagttcctcaaagttacaaccacgactacacctacaatgaaatctatagttccttacttcacgaattctctgcaccacaagttatagattcatcatcctataacacccttgatagtactccacataatacccctcctttt

SEQ ID NO: 38233 - DNA, 361 bp, Glycine max
  Clone ID: LIB3056-009-Q1-N1-C1
gacttggtggatttcattaagttgtgataaacatgggaaaagactcaaagccaaaggagtccggaggcaagggaaaggggaaacaggctgcaagtggaagtgatgagaatgcttctaagggaaaaggaaaaggtgggaaaggtggagatgggcttggtacttgcacctatgtcaaagctaggcatatcctatgtgagaaacaaggtaagatcaatgaagcctacaagaagctgcaggatggttggcttggcaatggagacaaggtcccaccagctgagtttgcaaaggtagcacaagagtattcagaatgtccatcaggaaagaagggtggagaccttggatggtttccccgaggaaagat

SEQ ID NO: 38234 - DNA, 410 bp, Glycine max
  unsure (1)..(410): unsure at all n locations
  Clone ID: LIB3056-009-Q1-N1-C10
aaaaaaccacagttttgaaacacacacagagaaacagagagattcttccattactacaaaatagaaaaataaaacttcaattgcaccttttggtgtctttttcaattctcatcccaattggtgttcatttccccaattttgaccctttgtgatccttttctcaaatctcacactttgtttggaatctgggaaaaatggggttgttttctgggatatttctggggatggtactgggcatagcattgatggctgcgtggcaacgcatgatgacgtaccgtagcgccaagagaattgcaaaggcagttgacattaaactccttgggtcccttaacagagatgatttaaagaaaatctgtggggataattntcctgaatggatatcttttgccatatatgagcaggtgaaatgg

SEQ ID NO: 38235 - DNA, 389 bp, Glycine max
  Clone ID: LIB3056-009-Q1-N1-C11
aactctctctcactttatcttccactcttcaatcgcaatggctccacactctcatacacagctacatcactttctattactcttttctaattcttatatgcttataatgtaatgtgaaccttaagttttcaaccatttcttatcaaagggtattgcgagcgagactctgcggttgctgatactttcatgatttgatcacaacgctatcctgcgtttttagtttggttactggaatttacagactactaagaacatggacttagaaggaagtgaaaagggttcagtggttactcagattagcattggtggatttggcagtgaggtcaaagcaagtgatctcctgaattacttggaggataaaattggacttgtgtacaggtgtaggttga

SEQ ID NO: 38236 - DNA, 341 bp, Glycine max
  Clone ID: LIB3056-009-Q1-N1-C12
cttccctcttctccaccctgggttcagaaaaaccccaaacgccaaaacgcgatttaatctttgaaccgccccatcaatacaaaaatagaaagaaagaaagtttttcaaaacgcaaaagatagccaagagaccaaaacaagaaaagaaaatgccagttttttccttctagcacccaacaacaacagcaccccttttgtttccttccaccaagaaccgattttgccaccgacccattcctccaaatgcttctcctccgtcaaagcgccgtcgtttcctccctcattctctgcttcttcttcccaccattgctctgcctcggaatccgctctttcccaaccacc

SEQ ID NO: 38237 - DNA, 398 bp, Glycine max
  unsure (1)..(398): unsure at all n locations
  Clone ID: LIB3056-009-Q1-N1-C4
ccgatgccaagttggttggtccgaggaaccaggccaagttgttaaggatccagtgggaaccttaggaaccagtggcttctttctgtcctgaaaacaaggttatgggaactatacaggaataaatgtgagggcccccatgaaatacaggaatactgcaagggttgatcagcggatcaggatttgggggttcatttttcttactgttttgtgtttatgcaaccagtttctacgcangagctagacttgtggatgctgtgaaggcaacattctcagatgttttccgggttttctttgcattaactatggcagctattggagtttcccaatcaagctcctttgctcctgactcaagcaaagccaagtcagctactgcttncatatntggaattattgataag

SEQ ID NO: 38238 - DNA, 374 bp, Glycine max
  Clone ID: LIB3056-009-Q1-N1-C5
ctcgagccgaatcggctcgaggtggagttggtctcaatggaggcttcaacaaaggaatttactccaagcctggttttgccaatcttaacaacaatattaacctgaatatcaatcctaagggacacaagttcaaggatgaagatgagctttttcacccatccaaaccttccaagaaaaacaacaacatcaacaaaaagcatgggggcaacaccaataacgatgataacagcaaggattccaaggctgctggcgacaagagattcaaaacgctgcccccagcagagtctcttcctaggaatgaaaccattggaggctacatctttgtttgcaacaatgataccatggctgagaatctcaagagacaactctttggt

SEQ ID NO: 38239 - DNA, 395 bp, Glycine max
  Clone ID: LIB3056-009-Q1-N1-C6
caaagaaggaagagatagctgctaggacatctttagtcatctcagcattgcaaggattggctggtctgaaaaaggattcattcaggaggtatattccacggttctttcacttactggtagatctcgtgaggagtgaacacacctctggagaagttcaacatgccctgagtaatatgttccgttcacctgttggccaaattataatggattgagttttagttttggcatactttggttttggacgttgctgaatatcaatcagcattttccttataagctaaagaacgagccattacatggtcatatcttgatttactcaccattgttgtgtagtgttactcttggttttttgtgattgtatgtgctattaatgtaaatgataaatttatttcaag

SEQ ID NO: 38240 - DNA, 398 bp, Glycine max
  Clone ID: LIB3056-009-Q1-N1-C7
ttattttcatgttagttcttccgtcttctcaccaccacctggcacttccactctcttctccatcgatcccatttccatggcttcctccctcggcgacaacttcaaccttctctcgcctcaacagcaagagctggtgaagatgctattggataacggccaagagcacctgtttcgcgattggcctgctcccggcgttgacgacgaccacaaaaatgcgttcttcgaccagctgactcgactagattcgagttaccctggcggtctggaagcatacatcacaaatgctaaacggctcttggctgattctaaggctggcagaaaccctttcgatggcttcacaccttccgttccaacgggtgagacttttggcgttggtgatgagaactacatcaaatttg

SEQ ID NO: 38241 - DNA, 399 bp, Glycine max
  Clone ID: LIB3056-009-Q1-N1-D1
aaaacctattcttcttactctcttacgtttattctttggtggctaggatggcattggatatgaatgatggtggtcccaagaccaggattggagaaggaaattttgccattccaggagcaactttcggttgggtaaagaaccttgagccttttaatcggcttccttcttcctccttctctttttaacaccaccgttattaatctcaatttcaacaacctcgactgttccgaaatcaccggcttcactgtctccaagttcaaacaagtcatcaaccttctcaaccgcaccggtcacgcccgcttccgccgctctccaccccaagcccaagcccaagcccaagcccaagcccaagcccaagcccaaactaatcctcaaccacaacctcagatccaacaacaa

SEQ ID NO: 38242 - DNA, 415 bp, Glycine max
  unsure (1)..(415): unsure at all n locations
  Clone ID: LIB3056-009-Q1-N1-D10
tctgtgtttgcggctgaggattccgaacgagtgaccttgttcgtttctcgcaaagtttaagtaatcatgggtaaggaaaaggttcacatcaacattgtcgtcattggacatgtcgactctgggaagtcaactaccactggtcacttgatctacaagcttggaggtattgacaagcgtgtgattgagaggttcgagaaggaggctgccgagatgaacaagaggtcattcaagtatgcctgggtgctcgacaagctcaaagctgagcgtgaaagaggaattaccattgatattgctttgtggaagtttgaaaccaccaagtactactgcacggtcattgatgctcctggacatcgtgactttatcaagaacatgattactggtacctnnccagccgactgtgctgtccttattattg

SEQ ID NO: 38243 - DNA, 303 bp, Glycine max
  Clone ID: LIB3056-009-Q1-N1-D11
gcggaactcgccggtggcgcacgccgtcggattttgggactaccagtcgttcatcgccgctgccgcgcttttcgagccgcaagggttcggcaccaccgggaacaagacgatgcagatgatggagattgcggcgttcctcggacacgtcggcagcaagacctcttgtggttatggagtggctaccggaggacctttggcctggggtctttgttacaaccatgaaatgagtcctatgcagtcatactgtgatgactacttcaaactcacatacccctgtacacctggtgctgagtactatggtcg

SEQ ID NO: 38244 - DNA, 415 bp, Glycine max
  Clone ID: LIB3056-009-Q1-N1-D12
gctgaaacttttggattaaacattcatggtcggccaaaaggcaccatgtcgagtccaaggccgacgccggagcctacaaaacctaccctcagcaagccggtaccatccgcaagaacggctacatcgtcatcaaaggccgtccctgcaaggttgtggaagtttcgacttccaaaactggaaagcacggtcacgctaagtgtcactttgttggaattgatattttcactgccaagaaacttgaggatattgtgccctcttctcacaactgcgatgttcctcatgtgaatcgtactgattaccagctcattgatattgctgaggatggatttttgagtctgcttactgaaaatggtaacactaaggatgacctcaagcttccactgatgagagtctgctcactcagataaaggatgga

SEQ ID NO: 38245 - DNA, 187 bp, Glycine max
  Clone ID: LIB3056-009-Q1-N1-D2
gggtcccagttttagatcagattccagaattgaacccattgcttaatttttttttttggcctaatttagttcaaaacctttccttcattcaagtggtaggggttaaccttaaccttaccaggaacttttggaaccaactcaagtttcaagcctctggtacctggctttaatggtccggttggtgggt

SEQ ID NO: 38246 - DNA, 205 bp, Glycine max
  Clone ID: LIB3056-009-Q1-N1-D4
gctcctttaactttccttttcctttggaattattaccttaggagaagcaaaacctccccttaaaacggataaggttttaagccaaccttcaaaagcatttggccattctcttcaatttattaacccaaaatgttgtgcattaaaacctaatctttggcataagttcttccacaacaacttggtccaaacttttcaaaaattcaca

SEQ ID NO: 38247 - DNA, 403 bp, Glycine max
  Clone ID: LIB3056-009-Q1-N1-D5
aaacaacacagtttttcttgtctctatattcttccggccacgcgcagatggcggcggagcacgacagctgctgctcgcgctgtgtcaccttcctaataaccataggcctcacagcgctcttcctatggctgagtctccgcgttgacgaaccaaaatgctacctcgactacatttacgttcctgccctcaacaaaaccctaaattccaattccactcacaacaaaaacaccacaatactcttcgctctcaagctcaccaacgggaacaaggacaaaggcatccaatacgacgacgttctcctctccttcagagtcttcgagagcgtcaacctcacgcgcccactcggcaacgccaccgtgcaaaggttctaccagggccaccagaagaaagccaccaagcacgg

SEQ ID NO: 38248 - DNA, 199 bp, Glycine max
  Clone ID: LIB3056-009-Q1-N1-D6
ggagctcggatacctgaatcagggtcagccttctagaggagcaacaccacttgtcactcttccattggtgctttcaacacttggggtcttctccactttcacacatgccttctcttcttctggggttccggaattgaatcctattaaacctaagcacttacgtcttctcaagaatgctgtgccacgagaaacttctaca

SEQ ID NO: 38249 - DNA, 407 bp, Glycine max
  Clone ID: LIB3056-009-Q1-N1-D7
attatactctgcgaaataatttttgcgtttcattgtcttatgaattagcatggcctttgccgcagttaaagtgttcatgatattggggcttttagccaccgcgtgtgtagcacaagcccctggacctgcacccacgcaaccaccatcaacatccccatcaccgtccacgtcagcacccgccccatcaccaaccgcatacacccctcctcctgcggctgcacctgcacccgcaacacccacacccacacccgctccttcatctccaactccaacaacagctccatcccaggccccaggcccaaccaccttcttccctgccgcgccaggcccatcaggcccagcaccaggcccatcaggcccggctccagaccaaccagtcttcgagccttccttcgcagcgttctcca

SEQ ID NO: 38250 - DNA, 393 bp, Glycine max
  Clone ID: LIB3056-009-Q1-N1-D8
aaataatttcattcttcagcttcttattactttgtatctgtgtgtatatttgaaaatgaagaatatgaatatgaaactaaacaccattgcattgataattgccattgcattttctgtgtggtcttcaagctgcacagcagcacgtgtcagccactggaggaaactgaaagctgctgcatctgctacttcttttaatgtgttagactatggtgctaaaggtgatggacatgcagatgatacaaaggcctttgaagatgcatgggcagctgcttgtaaggtggagggttcaacaatggttgttccatctggttctgtatttttggtgaaaccaatctctttctcaggccctaattgtgagccaaacatttgttttcagttggatggcaaaatcat

SEQ ID NO: 38251 - DNA, 344 bp, Glycine max
  unsure (1)..(344): unsure at all n locations
  Clone ID: LIB3056-009-Q1-N1-D9
gaagcgattgttgcaaatttcctcggattaagcgctttggattcgagcaaaccgataattggatcctccggtgcaataccgttcctagttagaaccctaacgaatttaaacgatagtaaaagcacgtctcaatcccaatcgcaagtgaagcaagatgctatgcgagctttgtacaatctctcgatctgtcagagcaacgtttcagtagttttggaaacagatttggtttggtttctagtgtccacaataggagacatggaagtgagcgagagaagtctcgcgattctgagcaatttagtgtcgactccgganggtagaaaagcgattagcagcgttcgcgacgc

SEQ ID NO: 38252 - DNA, 379 bp, Glycine max
  unsure (1)..(379): unsure at all n locations
  Clone ID: LIB3056-009-Q1-N1-E10
gtcgaaaccgtggctataccctgctccaacctatcgaacgatagagaccttctgggtcaccgatgaagacgcacccggccctcgctgtggccacaccctcaccgccgttgccgccaccaagactcaaggcccccgcttgatcctattcggcggcgcaaccgccattgaaggaggatcttcctctgcccccggcattcggttagcgggagtcactaataccgtccattcctatgacgttcaaagtagaaaatggactagtatcaaacccgccggagagccgccgtctnctcgggctgctcatgctgctgctgcagttggtaccatggttgtttttcagggtgggataggtcccagcgggcattctaccgatgatctctat

SEQ ID NO: 38253 - DNA, 344 bp, Glycine max
  unsure (1)..(344): unsure at all n locations
  Clone ID: LIB3056-009-Q1-N1-E11
gcatgcacgcctactttagatgataatttggctgaatgtcaatactttatcntttaacgaaatataggacgctataaatgtggtatatacgatattggaatcaacgagttaatactataaagggctattctgtaaccacaggaaatgagatcggaattcctaggcgaattccaagtccacattttcaagtaataaggaggccaacatgtacatatatgaaatggaattatgtgttctgttattaggcctatcctgtaactaatggaaatgatatctgtaatcctcagagaattccaattactcattttcaagacataaggaagccaaaatgttcatatattaat

SEQ ID NO: 38254 - DNA, 337 bp, Glycine max
  Clone ID: LIB3056-009-Q1-N1-E12
tttcttggcaaccaatatttaattcctttttcttcaagcggttcaattgcaatttgcaaaccttaaaccaaaacccacataagaaaatataaaaaagagcattacttttttaatttctccttcttttatgcaaccagaagtgtagtgtgttgtgtatgactaggtttctgccagccctggggataatgggtaattatctagattcttcagctaaagtagaagcagctcacagttccagaaccccttctggaatttcaaaaactagaccttcatctgttcctcccaacttatctattctgtcatatagtgaagcaagtgatttctcaaatcttcccac

SEQ ID NO: 38255 - DNA, 193 bp, Glycine max
  Clone ID: LIB3056-009-Q1-N1-E2
ggtgaagatagctcttggtaccttggatgactcttttaacggtggctctcttaagggttatttcgcaaaggtccacgccactctgaatttcgtggtcgctggtgttggatcaaccatcggttaccacgagcctaccaaagatgccgccttggatccaacggggctggtggcaatagctgtggcacattccttt

SEQ ID NO: 38256 - DNA, 386 bp, Glycine max
  unsure (1)..(386): unsure at all n locations
  Clone ID: LIB3056-009-Q1-N1-E3
ctcgcaagccaaaaggaaggatcccaagccaaggaaaagaaggaagggaaaggaccaggtttgtccgttggaaccgaccaattcccccagaggacagccatttggaacggcggtccaaagccaaaacaacggcaaggactaccagaacccggtcccggtcccgttggttgacccgacggagttaacttaatggtcgtttaacaaaacagggttagcaaagtttgtggccacttttctgtttctctacatcactgtcttaaccgttatgggagtcgccggtgctaagtctaagtgtagtaccgttgggattcaaggaatcgcttgngccttcggtggcatgatcttcgccctcgtttactgcaccgctggcatctcanggggacaca

SEQ ID NO: 38257 - DNA, 66 bp, Glycine max
  Clone ID: LIB3056-009-Q1-N1-E4
ccgtggtggttgaccattaaattgaaatgggcatttgatggggcccttcggcctcggttttggggg

SEQ ID NO: 38258 - DNA, 396 bp, Glycine max
  Clone ID: LIB3056-009-Q1-N1-E5
gaactaggatgacaaggtggtggtgctcgtgccagggccagtgtattacggtggataaactgaataccacaggggcatcatacttcctaacgccgcgtttgcagatccagacggcatccacattcatcaatccatttactgggactcttctgctcgtttcaactgcccttactgcgcttataccgttctcactaccgctagatctgtgccaagtctggcagcattcgttggatgctagatgccaatgacgcttgcagatcgctttctttgcccttcaatggattgcctttgtcatctatatcactactgtgctaaatgtctagacaaggctgctgatactgagaaatctgatccctgtgtcgtgatggatccagctcactggactgatgtgagctc

SEQ ID NO: 38259 - DNA, 359 bp, Glycine max
  Clone ID: LIB3056-009-Q1-N1-E6
aaactgcagagacaacatgttggtgctgaaagaaggactagagaaaacagggagattttcaattgtgtccaaagacaatggagtgcctttggtggcattcacactgaaagaccacacccactttgatgaattccaaatctctgacttcttaaggcgctttgggtggatagtgccagcatacaccatgcccccagatgctcaacatgtcacagtgcttcgtgttgtcatcagggaggacttctcgaggactctcgcagagcgcctcgtggccgatgttgagaaggttctgcatgagcttgattcacttcctgctagggtcataagcagcactagtgtgacagtcactgctgaagaaaatg

SEQ ID NO: 38260 - DNA, 406 bp, Glycine max
  Clone ID: LIB3056-009-Q1-N1-E7
aacacattgaacagtacttcagtcaagttgttgccacacatggctctgctaggaatttgcctcaatcgtgcacttcaagacttagcccaaggctgtgctttttcccacaatatttggtgtcacgtatcactacaccaatcttctttgtaaacgcggcttacgactcatggcagattaagaacattttggcaccgggtgttgctgatcctgaaggccattggcatagctgcaagcttgatataaacaactgctcacctgatcaacttgatctaatgcaaggcttcaggacagaatttttaagggctataactgtgctaggcaactcttcatctaaaggaatgttcatagactcttgctatgcccactgccaaactgaaatgcaagagacatggttgagaaatgactc

SEQ ID NO: 38261 - DNA, 376 bp, Glycine max
  Clone ID: LIB3056-009-Q1-N1-E8
ctctttttgtttctagaattctcagatttgcggcgcgagaggattcagctgccaatacccggcatggcaccattcaccatgggccagcatcgcgtcgatcagtaccagcatcctacgtcgcagcaacaactaccctacgtcatgatgccgacgcaggcccaggcccatcaggccatgtgagccctctccgaccagccttcgcctcagcagcaggccgacagcgccgactaggtccgaaccctctggatcggcgatctgcagcactggatggactagaactatctctatacctgctttgctcacaccgtcgaggttacatcggttaaagtaattcgaagcatgcaaactagccaatccgaaagttattggtttattg

SEQ ID NO: 38262 - DNA, 278 bp, Glycine max
  Clone ID: LIB3056-009-Q1-N1-E9
cgtaaaggttatggaagtgcagctggattgctggacattcggaatttgcttgcatgagctattatatggtaaaaccccattcaaagggtcagggaaccgtgctacgcttttcaatgtacttggtcagcaactcacgtttcccgaatcaccggcaaccagttatgccagcagggatctgatccgtggcttgcttgtgaaggagccacagcatcgtcttggggttaaaaggggagcaaccgagatcaagcagcatccgttctttgaaggtgtgaactggg

SEQ ID NO: 38263 - DNA, 369 bp, Glycine max
  Clone ID: LIB3056-009-Q1-N1-F1
gtggtttcagtgagtgatcggtgttcacttgatccttcatgagtcgtcatcatcatcatcatcatcaccgttgattgaagaagatgccgatcagaaacatcgccatcggaaggcctgaagaggctactcaccccgacacgttgaaggcggggttggctgagttcatctccaccttgatcttcgtgttcgccggttcaggttccggcatcgcctacaacaagctcaccgacaacggcgccgtcactcccgccggcctcatctccgcttccatcgcccatgctttcgccctcttcgtcgccgtctccgtcggcgccaacatctccggcggccacgtcaaccccgtcgtcaccttcggcgccttcgtgggcg

SEQ ID NO: 38264 - DNA, 308 bp, Glycine max
  Clone ID: LIB3056-009-Q1-N1-F10
gttgctatcagcgagtgagagtgagtgagtggttctcttgcagcaacaaggtttagtgacaccaaacagactggaaatgggtcgtggggtcagtgctggtggtggacagagttccttggattatctctttggcagtggggtacctgccagcagtgcaaatggtgctcgcactcaaaatgcaagtgctccttcaccaccggttgataagcaaagtccagcaccagcagcagcagcagcacctgcacctgcagcagcagcagcaccagcacctgcaccagcaccagcaccagcaccagctgataagcaaa

SEQ ID NO: 38265 - DNA, 313 bp, Glycine max
  Clone ID: LIB3056-009-Q1-N1-F11
caaggagcttggaactgttatgcgttcattggggcaagagccaactgaggcagagctccaggacatgatcaatgaagtggatgctgatgggaatggtaccattgacttccctgagttcctaaatctcatggccaggaagatgaaggacactgattctgaggaggagctgaaagaggcattccgggttttcgacaaggaccagaatgggttcatctctgctgctgagctccgccatgtgatgaccaacctcggggagaagctcaccgatgaagaggttgatgagatgattcgcgaggccgatgttgatggcgat

SEQ ID NO: 38266 - DNA, 270 bp, Glycine max
  Clone ID: LIB3056-009-Q1-N1-F12
ttagcgatcaatttgtaattgatacagagctgagagcatgaaggaatcgaagaatagaagattcatttttttttctttttgatatggaagctgatgtttctattatttttgttgcgttttcaaaaccctaaattggagaaatcccaatttctccttctgtctttctgctttggatgtttttcaaccaaaaaattgtgcttttcaaatcttttgctctgatgggtacttcaaatcttctcttggttttctctctgatgagcctgtgtgcta

SEQ ID NO: 38267 - DNA, 218 bp, Glycine max
  Clone ID: LIB3056-009-Q1-N1-F2
gaaaaatggatggaaaagaagaagatggttccttgggaacctaccaattcttaaaaaagccacccgattggaactgcggttaaaagccaagacgatggaaaggactacccaaagccacccccggttccacttttcgagccctccgaactcacttcttggtccttataccgagccggaataaccgaatttgtagccacttttctctttctctacataac

SEQ ID NO: 38268 - DNA, 409 bp, Glycine max
  unsure (1)..(409): unsure at all n locations
  Clone ID: LIB3056-009-Q1-N1-F3
gcaacaaggaactcgttcagaatttgggttttgctttcctagtcggtctttcctcttcacttcaatatggccgtggtaccctacaacaacgggtttggaacttcttcttcttcttcctctaactttaagggttgcaccaaacctttaattccgattggaaccttaaacctggaattccttccgaacttgcaaaccctacctaacccctgaagtttaatggaaaggtcaccaccactttcaactgtcggtatgctaaccccatttcatcatgggcacgtattcaaatgatgccaatagggactcctaaagtcccctataggacacctggtgaaggaactngtcaatgggttgatgtatggaacgcccctttatcgagaacgtgttatcttcattggacaagagttagatg

SEQ ID NO: 38269 - DNA, 360 bp, Glycine max
  Clone ID: LIB3056-009-Q1-N1-F5
agtctatctcacagtgggagaagctgtggctgacatgccatcaatctggaaagctcagccttgatctcccatcaaggactggaaagagaagttaaaggaaccataaaacttagggggataaactataacctcttgtttctgcctgcgatgaatactggtttaaattacagagagtctaatacctgctagtagaaaccttcagaacaatattaccctgtataaagaaaaaaggagtgccttgaaaatcacggaccttgttcttttactagagtgtctcttatctgacgttgatcagctgatgcctgccgatgttactgcttataatttctgctactctagcaatggtgctaaaacaaaagc

SEQ ID NO: 38270 - DNA, 425 bp, Glycine max
  unsure (1)..(425): unsure at all n locations
  Clone ID: LIB3056-009-Q1-N1-F6
aaaatgatggagaaggcttcagaaatttggagcatgatatcacaaggagcttacatttatgtgtgtggtgatgccaagggcatggccagggatgtacaccgcgccctgcacacaattttgcaagagcagggttctctcgatagttccaaggctgagagcatggtaaagaatctacaaactactggcagatatttgcgcgatgtatggtgatgatatctgaatgcaagccgtgggggtgacgaagatattaataaaacatagagttgtggctagaggattttgaaagggccttatttgtgccacctttcattagtgccctcaaaattganggggggcgcttgttgccatcacgacgacatttcctacgattctttttcactatattttctaaaggattctttttgggtcgcgtaatttattatata

SEQ ID NO: 38271 - DNA, 382 bp, Glycine max
  unsure (1)..(382): unsure at all n locations
  Clone ID: LIB3056-009-Q1-N1-F7
ttttctctctctctctacaatgctaaatattattattattcctctaatctctctctcttatacttttctcgttctctaaaatcttcacttcccagctttttcaatctgctttctttgactggacaacaagaggggttttcttcgacgaatcaaaaccacaaaaagtttcaatttttacccattttgcttcccctggatcgcctcacttcgagttgcatgagctgccatttctcgccgagacataaagagttctctacaccaaccaagttctgtacaaaggaaggatggggtgcttcactgtattgaagagcataaagaanaagtccgatccaattacatacataaaacatgtaagccattatgagaacgtacctacagtact

SEQ ID NO: 38272 - DNA, 375 bp, Glycine max
  Clone ID: LIB3056-009-Q1-N1-F8
caaagatttatccgcaactatctgagttctgaaggcaatagaccaagcaatgctaaagtgaaccagttagcgaaagctgcagaaaaatacactcttgcaaaccatctattttgggggttgtggggacttatttcgagttatgtgaacaaaattgattttgactataaggagtatgcaaggcagaggtttcagcaatactggataaggaagcctactttattggactcaccaagcatcgtttccctagatgaaactgtgaatggattgatgccatccttcacgtgattttgcttcagatttcttataacctttttggagatgtaaggtgcgataccaaacatgcatttactggaagttaatcttagtatatatatt

SEQ ID NO: 38273 - DNA, 353 bp, Glycine max
  Clone ID: LIB3056-009-Q1-N1-G1
gagaaacatttcactaatagagagacataagcataatattgagaaataatggagggttgtacttattgtgtgaagttgctatgccttgttgggtttgtggtgcttgtgagtactattgcaggggtggagagtgctggtgaatgtgggaaatctaccaccccagataatgaggcttataagcttgcaccatgtgcctcagcagcacaagatgagaatgctagtgtttctcagagttgctgtgctcaggtgaagaaaattgggcagaacccaagctgcctctgtgcagttctgctctccaacacagccaaaatggctggtgtcaaccctcaagttgctgtcaccattcccaagcg

SEQ ID NO: 38274 - DNA, 346 bp, Glycine max
  Clone ID: LIB3056-009-Q1-N1-G10
ggccagaatttttaggccagttggctggggcaacttccttcggtcaggggtggaagaagaacctatggaggcaacacatccccgacactctccgaaccccggtgctgttgctcatcctcgccacagtcataaggagctgccaagagcctcgtttaacaacacaggcacacaaaacattagaggtcttataaacaacaccggttgtaccaagggtaatggtaatggatccatcgtctatggtggctttgactcatccaacaggtcttgttactaattaatctcttgcgcaacgcaatgatatatatattatcttctatataataaataccttgtaccatcactgaaa

SEQ ID NO: 38275 - DNA, 384 bp, Glycine max
  Clone ID: LIB3056-009-Q1-N1-G11
gttacgctcttcaaatcaatctcttctcagaaatgggtgtggctcaaaacattcccgatgcggaggagggaaccttggagattggaatggaatacagaactgtgtctggagttgctgggccattggtcattcttgataaagttaagggacctaagtttcaagagattgttaatattcgcttgggagatggaactactcggcgtggacaagtgctagaagttgatggtgaaaaggctgttgttcaggtctttgagggtacatctgggattgacaataaatttacaactgtgcaatttaccggagaggtgttaaaaactccagtatcattggacatgcttggccgcatattcaatggttctggaaaaccaattgataatggtccac

SEQ ID NO: 38276 - DNA, 349 bp, Glycine max
  unsure (1)..(349): unsure at all n locations
  Clone ID: LIB3056-009-Q1-N1-G12
gtacttgctcacagatatattnntttttttggcttcatcgttttcttgagagctttcagtttctgggggtcaactttcttcttcttaatcttttcccccctttttgtaacatcccgcttctctgaatccctttctggctatcatctggctttcaagctaaaaatttctgggttggcttttaattcaccaaaaagcaaacttagaaagatttttcgaaagccaggtgttttcagaaacgagatccaagttttattgtcgaatttcgctagtcatattaatatttcatcatttttttttcctttgaaaccagcccaaaaggttatttttgatccctcaaagctaatttctc

SEQ ID NO: 38277 - DNA, 215 bp, Glycine max
  Clone ID: LIB3056-009-Q1-N1-G2
ctcgagccgattcggctcgagcttctggaaccgttcacaaaggagcaacttcaatctctcgtcaagcaagccctggatatgtttcccgaattcgtcgatagcgtgcgccggcttgctgacgtggaccctgggcacaggaaaatcttcgtccatggccttggctgggacgccactgccgatactctaaccgccgtgttcgggaaatacggcgagat

SEQ ID NO: 38278 - DNA, 297 bp, Glycine max
  unsure (1)..(297): unsure at all n locations
  Clone ID: LIB3056-009-Q1-N1-G3
cggctcgagctcgagccgtggcttttggagaatgacaggtatgtgctggctatagcgattntgtctagtttgtacactggagcccaagcgttccgtcaaattcaggaactctccactgcaaaacaattgcttcagccaagaatggcagctatgattgacttttttggagatcagatcattgcatatcttttgatatcatcagcatcttcagcaattccaatgacaaatagaatgagagaaggggcagacaatatattcacagactcttcagctgcagccattagcatgtcaattttt

SEQ ID NO: 38279 - DNA, 372 bp, Glycine max
  unsure (1)..(372): unsure at all n locations
  Clone ID: LIB3056-009-Q1-N1-G4
gcatactctaaatggtggtttccttcctggaaattccactggtaagtggcttgaaattccctgggttggaatggccttctttggggtattggccagtttaattggtcatttttagtgggactattcatgctttcatctggaattggtgggccatacccattccttgatgtgtcattgcccttctctncattatgggtacttgtggttgcattggtacatatttcatgttatggcctgtttaaactgattgcggatgtgaaatagtatttcttgtcgaaatggttcccttactcttgtcagtcctaaagatcgagtggtatcagagttggaccgcataagagccagaaacagtttagccaccatcggcgaaac

SEQ ID NO: 38280 - DNA, 361 bp, Glycine max
  Clone ID: LIB3056-009-Q1-N1-G5
gcgaaatcatccaaacacattccatctattaagattttagagagtgaaaatggattggcaaagcatgatgggcaacctggacccattccaaagaacaatcttaatcctcgtcccactaacactactcctgctgctgttactatctcgtacccgtccaagaccgccctatccaccaggccctaagggcttcccaatcataggaaacatgtttatgatggaccagctaacccaccgcggtctcgccaacctggccaaacactacggcggaatcttccaccttcgcatgggcttcctccacatggtcgccatctccgaccccgatgccgcgcgacaggttctccaagtccaagacaacatcttt

SEQ ID NO: 38281 - DNA, 344 bp, Glycine max
  Clone ID: LIB3056-009-Q1-N1-G6
atggaatcaaaccacaccacacctcctcaacaacaagctcttaactctctagggtctttgaagaacttgaaggtgtttgtatatgatcttcctcagaagtacaacacggattggttatcgaacgagaggtgcagcaaacatttgttcgcgtcggaggttgcaattcacagggctttgttgaccagcgaggttcgcacgtttgacccatacgacgctgactttttcttcgtccccgtttatgtgtcttgcaatttcagcaccgtcaacggcttcccggcgattggccacgcgcgctcccttatcgcgtccgctgtcagcctcgtctcctcggagtaccccttctg

SEQ ID NO: 38282 - DNA, 409 bp, Glycine max
  Clone ID: LIB3056-009-Q1-N1-G7
ctccacctaatgagcatgtacacccttcctactactaccacgcaccaccaccaccatccccatctccaccacctccttattattataaatcccctccaccaccatccccttctcctactcccccctactactatcactctccaccaccaccatctccttctcctcctactccctactactaccactctccaccaccaccatccacatcaccgacgtctccatattattacaaatcccctacacctccatctccacctcctgctcccaagtacatttacaaatcacctccacctccggtttacatctatgcttccccacctccacctatctacaagtaagctcaaattatgaaagcaccattcatgatgaatcatgttctagttttcatcgaggaataaaggcaagctct

SEQ ID NO: 38283 - DNA, 347 bp, Glycine max
  Clone ID: LIB3056-009-Q1-N1-G8
ctcgtcttcaattcatatcatatcaattagatttagagctgaacataaaattgttttcacataccatggacaacaacaatgacttttggaaattcagtgaccagttgaggcttgaatctggtttggccaatctgtctctgaatgattattccatttggagcaacagctacagctccaagaggcctgatcagaggaggaactttgatgtcaagggcagtgatttcaacaacaacaacaactcatcaaaggcttttgatgatgatttcaatgatgggtggaagatcaccaattccaatggaccccttttctctatgcctcacaacaacaacaacaacactcttgaagtt

SEQ ID NO: 38284 - DNA, 354 bp, Glycine max
  Clone ID: LIB3056-009-Q1-N1-G9
cttggagaaaaccctggactgggatatcaacaatcctgaggggtggggggaaggtaagggggccttggtttcttaatccaaggatcctgttgatccctggtggaatggaaaagccatttgaatggatctgatgaaaaaaaaacctgcatcatatgtctcaactaatactcgaatggtgggttccaacatccaagaatgttaaactcctctcagaaacctgctctcaagttcttgatctatggcagaacaggttggaattgggggttttgctggggaagttgtgtgaaaagcaaggaattccctatgaatatggaaaaagacgcctggaggaccgatcatcacttgtggctgata

SEQ ID NO: 38285 - DNA, 420 bp, Glycine max
  unsure (1)..(420): unsure at all n locations
  Clone ID: LIB3056-009-Q1-N1-H10
ggcctatgaaatcagattcttcgccaccgccacagtcataataaagttttatttttccaaataaagggaatggcgactcctgttgagcctcctaacgggatcagaactgaagggaagcattattattccatgtggcaaaccctgtttgagtttgattcaaaatacgtgcccatcaagccaattggccgcggagcatatgggattgtgtgctcttctgtgaatagagagacaaatgagaaggttgccatcaagaagatacagaatgcctttgaaaaccgggttgatgcactgaggactntgcgcgaactcaagcttcttcgccaccttcaccatgagaatgtgattgctntgaaagatatcatgatgcctgttcataagaatagtttcaaggatgtctatctagtttatgaactcatggac

SEQ ID NO: 38286 - DNA, 373 bp, Glycine max
  Clone ID: LIB3056-009-Q1-N1-H11
cttcttccttgccacaatgaccaaaattcaagccattcagacctcaatatcaaaactcctaatccaccctttgctgtggagactaacaggctttgtctcaagcatagttggattcagctgttatgccctcagtccctctttccacaacatgttcggacactggaacgcgctgaagatcttcgtgtacactgtcgtaagctcacttttatctatcttcatgttcttcattaaaagatgtagctggggacatgggaggagtttcttggtgaaagcacaagtgggttttgtggtcttaacgctcacctctctgtggtctgttttcgaagaccgtagtgaagaagggaaagtggaaaatgcgcacggcaaaatgatg

SEQ ID NO: 38287 - DNA, 279 bp, Glycine max
  Clone ID: LIB3056-009-Q1-N1-H3
aagacattttcctgatcttctggtgggccaagaaagccgtaatctccatgagcctctattggattgattccttggtcaagatggatgggaaaaactctcttcaaattacttgaaatggtattggtgcttatgatgattattgacattccaaaaggacctggaatttgcagaatggcggatcttatattattaccggtggtaatgggtccggtggtccttctcttggcttgaacaatttccaatttggattgaatggaaggccatttttcctggcttggt

SEQ ID NO: 38288 - DNA, 366 bp, Glycine max
  Clone ID: LIB3056-009-Q1-N1-H5
aaagcctgcaacttttgcaccacaaccttcgtatcctcaccgtacctcgccaccgatttcatgtaatcggatggagaatcgggtaactgattagaaaggggaacatcattttctatgctccgaaggttgcgttgggtttgatcaataattgagtctaaggtgttcgacgaaatgtcaaaccgagtttgcataaaaaaggggttgttgacactaatgggtgcgaagtttgtgggcaaacaagggcacccaactcgtttttccatgtgtcttcgatccaaaactacgtctgcgcagtatgtagcaacaagatttcgagaccccacgtttgagaaactcatggacaactacaagaaccttgtcaaagtc

SEQ ID NO: 38289 - DNA, 341 bp, Glycine max
  Clone ID: LIB3056-009-Q1-N1-H6
tctgcactcaccactgccacacttcaatcgcactaatggctgtcaccttctcagatctacacaccgaagagggcatcaaatccctcgatcaattcctttctgggaaaacctatatttctggggatcagttgacaaaggatgatattaaagtgtatgcagctgttgttgaaaagccaggggacacttttcctaatgctgccaagtggtacgatgctgtctcttctcaacttgctccaagctttcctggccacgctcaaggggtaagattcagtggcgctgctgctccagctgaagctgcacctgccaaagcggctgccactgctgaagaagatgatgatgat

SEQ ID NO: 38290 - DNA, 339 bp, Glycine max
  Clone ID: LIB3056-009-Q1-N1-H7
gtgggcaaccctaacaatgaggtcactgttaggcagcttgctgaaataatgattcaggtttactcaaaggtaagtggagaacaaactgctgaaacacctaccattgatgtgagctcaaaagaattttatggtgagggatatgatgacagtgacaagagaatccctgacatgaccataataaacaagcagcttggatggaatcctaagacttcactttgggacctgcttgaatccactctgacatatcagcacaggacatatgctgaagccgttaagaaagtcattgcaaaacccctcgcaagttaagcttttacagtgatggtgatgtgctacctttga

SEQ ID NO: 38291 - DNA, 384 bp, Glycine max
  unsure (1)..(384): unsure at all n locations
  Clone ID: LIB3056-009-Q1-N1-H9
cgcgtcgctccgcaccagtttcaccgcacgaatatcttgttgtttggagcgatccgagaaaaactctgtaaacatgttggtttaccaggacctccttacaggtgatgagcttctctctgactccttccgttacaaggaaattgagaatggaatgctgtgggaagttgaggggaagtgggttgttaaaggagcagttgatgtagacattggtgcaaacccttctgctgagggtggaggagaagatgagggagttgatgatgcagctgttaaggttgttgacattgttgacacattcagacttcaggagcaacccgcattcgataagaagcagtttgttaccttcatgaagaggtttatcaagaatntgactcccaagctcgatgc

SEQ ID NO: 38292 - DNA, 372 bp, Glycine max
  Clone ID: LIB3056-010-Q1-N1-A1
gttatgtgatatttagtcttaattttattttttttcagcaagcaaaaattatataaacaacggcgagagataatggattttcattgagctttctttctttttgtgttagtgagagaaagttctctctctttgactcacaaccctattgcgtgctttgcaatcgaccccgcttatggccaacaataaccttcctcgaagaatcatcaaggaaacgcagcgtttgctcagtgagccagcgcctggaattagtgcgtccccttcggaggacaatatgcggtatttcaatgtgatgatccttggcccgactcagtcgccatatgaagggggagttttcaagttggaattatttttgccagaagaatatccaatggc

SEQ ID NO: 38293 - DNA, 209 bp, Glycine max
  Clone ID: LIB3056-010-Q1-N1-A10
caagcacatgcaatggttccatagctgaatgcaatcaagaagatgagctggtgatggagtctgaaataagccgaaagtttctggagcagaagagatcatacatttccaatggagctttacagagagacaaaccagtttgtaatggtggtggctctggtgaagcttatagtaaaactggagggtgtcttccttcccccttaaattcttaa

SEQ ID NO: 38294 - DNA, 439 bp, Glycine max
  Clone ID: LIB3056-010-Q1-N1-A11
caacgtgatcggactcctgaacttcctgaccttcctcctcggcatcccgatcctggtggccggagtgtggctgagcaagcagggcgccaccgagtgcgagcggtggctggagaagccggtgatcgcactcggcgtcttcctcatgctcgtctcactcgccggcctcgtcggcgcgtgctgtcgcgtgtcgtggctcctctggctctacctcctcgtcatgttcgtcctcatcgttcttctcttcgccttcaccatcttcgccttcgttgtcaccaacaagggcgctggcgaagttgtgtctaatagagggtataaggagtataggcttggggattactcgaactggttgcagaagagggttaacaacactaagacgtggaacaggatcaggagttgcttgcaatctgggaaagtctgcactgagtttcaatccaagttt

SEQ ID NO: 38295 - DNA, 386 bp, Glycine max
  Clone ID: LIB3056-010-Q1-N1-A12
aggaaaactatagatcttcagacttgacttgagtgctatgagttcatggatccaatccaacacaaggtcgtcaacgttggtgctctcaagctccacgttgcctaaaccggtaccggtccaaacgccgtcggattcctgcacggcttcccggatatatggtactcgtggcggaaccagatgatagctctcgccggtgccggattcagagcggtttccttacattacagacgttacagtctttacgacccgctacgcgaacacgataagacctcttggtccgatcttctcagtgatctacttcatattcttgatgctctagctctctctaaagtgtctcttgttgggaaagactctggagctagtcctgcatatctatcttcaattct

SEQ ID NO: 38296 - DNA, 409 bp, Glycine max
  Clone ID: LIB3056-010-Q1-N1-A2
cgatgacttccctttttcctctgtttcacagcatgataggcaatatcaagatcccccctttgtttctcagacaattggtgatagcgtgtcttccgaaatacattcaatgacattcatttctcaccctcaagaaaatgaagatctttcctggggaccagatccatgtcaggatattcttggctttcctgaaaatgtttctgtccagcatgatcaggtggaaaacaatggttgttacataaatgatgataatgtcaaaagatctgattttggggagtgggttgatcagttaatgtcaattgatgattctcttcacccgagctggagtcagcttcttgctgatgacaatgtagcagaaccaaaaccaaaggcatctcaggttcctccgcagcagcatataccatctggagaa

SEQ ID NO: 38297 - DNA, 388 bp, Glycine max
  Clone ID: LIB3056-010-Q1-N1-A3
gtttactgaagtcgaaaattacgggtgagcaagagccttgtcttggttccgttccgcgaccatgtctcaatggacatgcccttccgtaaagaacgtgcttcttttggattctgatgggaaacgtgtcgcagtcaaatactcttctgaagactgggcaacgaatagtgccaggaaaatcttgagaaagttgccttcaacagagactcagtaagaccgatgcccgcacagaagcggaaatagcaatgtttgagaataacattgttgattacaagtttgtccaagatcttcacttgtttgctaccggtggtgattatgaaaatgagcttatcttatccacagttctgcaggcattttttgattctgggggccttctgctcagaagccatgt

SEQ ID NO: 38298 - DNA, 407 bp, Glycine max
  Clone ID: LIB3056-010-Q1-N1-A4
attcgattgagtgcgtgttttttgtgtgtggagaatggatatacagagttcaatttgagaaagaggattcgccatttcaattctctctctctctctttcaattcgcagagaggttcagtttgtgtcatgtgcatacagcaatcggattgtttggatcagaagtcaattcgaggtgtagatggaacttgaagcaagtaatcaacccaagcaagagcgttcaaggacaagatggacagcatcccttgacaagatatttgcagacttggttgtcaagcagattcaactggggaacagaccaaacaatggttttgacaagaaaacatggaatcacattcctgatgaagttaataagcaaacaaaccttaatttcaacaataatcaattgaggaagcatctagatgttcttc

SEQ ID NO: 38299 - DNA, 239 bp, Glycine max
  Clone ID: LIB3056-010-Q1-N1-A6
ctcgagccgtttccgttagggaaattaacttaaagtggcagggttttctggtgcatttgagcaaatagaaaattcaggacttggtgagatgtgaggaaggatgtgtactggctgcttcatggatgaatttctattacttctcaaaatgttgaatttggaaggatttttgtaagttattttaattcttagattggtatggttattacatgaatgataatccttattaattgtgtgcaagt

SEQ ID NO: 38300 - DNA, 353 bp, Glycine max
  Clone ID: LIB3056-010-Q1-N1-A7
tatcactcactctctcttctcctaccattatttctctgtaccttgaacttccacaatacaactctctgcctataaacgctcttgtttaacgtgagaacttgggtgatcttttggagttgtaggagcccttacaccttgcagagtcatctcaacattcccaagggctcctactacgcaataacgccaagctcgatctcaaattaatatatcatttattcctcttaatcaaatattaaataagaaaagatgggagagatgtcaaacttccaattgggtgtgattggtgcactatttctctcggtggcttcttctgtctccattgtcatctgcaacaaagccttgatgagcaatct

SEQ ID NO: 38301 - DNA, 403 bp, Glycine max
  Clone ID: LIB3056-010-Q1-N1-A8
gccaaatgtattttgtagggagctgcacacaaggagcggtctggatttgagggtccctggacctctaatcctcttattttcgacaactcatacttcacggagttgttgagtggtgagaaggaaggtcttcttcagctaccttctgacaaggctcttttgtctgaccctgtattccgccctctcgttgataaatatgcagcggacgaagatgccttctttgctgattacgctgaggctcaccaaaagctttccgagcttgggtttgctgatgcctaagcaacgtttaagggattgttgaagaggcatggtgcccataatatttctctaaaaaattgtatggtcatggtttttaatgccaatgtgggttccccagattttagatagctttagaatgtattttgct

SEQ ID NO: 38302 - DNA, 283 bp, Glycine max
  Clone ID: LIB3056-010-Q1-N1-A9
tgtggttatcatcttcttcttcctctttcttagatctcttgtttctctacgccgcacgccgaaaccatggccggaaaaggagagggtcctgctatcggaatcgatctcggaaccacctactcttgcgtcggtgtgtggcaacatgaccgcgttgaaatcatcgccaacgaccaggggaacagaaccacgccgtcttacgtcggattcactgacaccgagcgtctcatcggtgatgcggccaagaatcaagtcgccatgaaccccatcaacaccgtcttcgatg

SEQ ID NO: 38303 - DNA, 322 bp, Glycine max
  Clone ID: LIB3056-006-Q1-N1-C11
cgaaaagcccaaacccttggcgggtgggagacccggtggggtctttgttctctctcttttttttctttttccctctcttcttcggcggtctttttaagggtttcttaactcttcgatttggggcttaaaccctcgcttccgattcaggttcggatttagggcttccgtttctcgattctgccttcccaagaaaaccagatctcgtgattgattattcatcatggccaccgttgctagtcccgcggatcaagcaacttgattgctgcagaagctatcgttggaaactcagcccaagcccttggagattcctgagccaaccaag

SEQ ID NO: 38304 - DNA, 397 bp, Glycine max
  Clone ID: LIB3056-006-Q1-N1-C12
caagaagtacgacaaattaagacagggcctaagagaaggtgttgtagagaggatacagcgagagcaaaatgtattctcattgggttcgattgatgcttctcattgcttgcattcttccagctttggttgaatgcagagtgaggcactacaaatttcatgtggtgtctaaacaaactaatagattgtgttcaagcaaatctattgtcaccattaatggcaagttcccgggacccactctttacgccagggaagacgatacagtgttggtcaaagtcatcaaccaagtcaatcacaaccgttaccatccattggcatggtgtgaggcaattgagaactggttgggctgatggacctgcatatgtcacacagtgcccaattcaaccagggcaaacctatg

SEQ ID NO: 38305 - DNA, 416 bp, Glycine max
  unsure (1)..(416): unsure at all n locations
  Clone ID: LIB3056-006-Q1-N1-C3
acttccaattgctctcactagtcactactactactggggatggcttcaactgcctcttgcacttctatttccccttctagtgatggttgcctttgctggtgacttaaacaaagactttgacatcacttggggagatggccgcgccaagatactaaacaatggagagttactcactctttcattggacaaagcatctggttcaagttttcaatcaaagaatgagtatctctttgggaagattgacatgcagctcaagctcgtccctggaaactctgctggtaccgtcactgcctattatttatcttcaaaaggatctacttgggatgagatagactatgagtttcttggaaacttgagtggtgatccatacatncttcacacaaacgttttcagcccaggcanangggacagggaac

SEQ ID NO: 38306 - DNA, 120 bp, Glycine max
  Clone ID: LIB3056-006-Q1-N1-C4
gagaatcgaaacagctctacgcagctcagcacaatcgcaacgcatgccattaataataatcgattggcatcgatcaatcgttggttagggtttttggttatctggtattggcgaatttac

SEQ ID NO: 38307 - DNA, 411 bp, Glycine max
  Clone ID: LIB3056-006-Q1-N1-C5
cccagaatctacttatatggttaactacatattataagaagaagggcaacgtatactactcagatgaggtggtatcaaagttcaatggctgataagaaggaaatgattccgcaacaatttgacatcgatgccaaatggtacgcctgcattgatctcaccgtacgtagattagactactgcgcaaccgccggtgcattacagctggctcctatttttcatgagtcctgtgactcgatagtcatctatagcttctggtgctggagttgcaattggatctgcatatgctgacagtactcgtctgttctatggacctctaactaattaacgctcacctaaggtctacgaaactgctactcaggactctgattaggagccataagggatcctggatcctggactgaggtcaatcat

SEQ ID NO: 38308 - DNA, 390 bp, Glycine max
  Clone ID: LIB3056-006-Q1-N1-C6
aaaatctcacaaagcttagtgtcttcaaatccagatgtcttccacaattccacagttccatggttatgctagaattttctagagggtctcatccacaattccacctcgagccacgagaaaaaccccaaaaagcaaacgtctccctagcctctcacatcaatgtcagagcagttggaaaggaaaatgaacttagtgggaaaagcaaacgtctcccttgcctcttttccatagttctcttatacactgtctctctttcttcgcttaaacgttgccctttctcactatctcactttgcttcttctccttcgccacatagatcttctccttcttcttcgacgtgaatgtctgctacctcgcgagcgtgttcgtggctgaacaacatcgattctg

SEQ ID NO: 38309 - DNA, 413 bp, Glycine max
  unsure (1)..(413): unsure at all n locations
  Clone ID: LIB3056-006-Q1-N1-C7
atagcttccatttcttctctcctattccctcctagttccaattcttcaccctagtctaaaaataatgtcattcacttccaaggtcattgctctgtggtgcaagaaacatgggaatgatgatggtgtcgatgtgtatgatgctcctgctgccactgcttgcattgaaggaaatgtttgcaattggcatggacattttgtaagttttgtcccagttgcattggtggagggtgacgatgacgacgatgactgaggttatgactacggctccgcagcataaactataaatgtttggttacctcgtatactatccaactngtagtgacccacatatgagaatgtctgcttgtattcttaattttcagtttggcgccaattgaaagcgaataagctacaaaattatgtgcgaggtgact

SEQ ID NO: 38310 - DNA, 394 bp, Glycine max
  Clone ID: LIB3056-006-Q1-N1-C8
ctcagatccaggcccaaatccagatccagaatcacagcagcacgctgagcttcctagggccgaagcccatccctatgaagcacgtgggcatgcctccgaagcccacgaagctatacagaggggttcgacagaggcactgggggaagtgggtggctgagattagactcccgaagaaccggaccaggctatggctgggaaccttcgacaccgccgaggaagccgctctggcgtacgacaaggccgcgtacaagctccgaggtgacttcgccaggctcaacttccccaaccttcgacaccagggttcctccgtcggtggtgacttcggggagtataagcctcttcattccgccgttgacgccaagcttcaggccatttgcgagggcctggctgagct

SEQ ID NO: 38311 - DNA, 363 bp, Glycine max
  Clone ID: LIB3056-006-Q1-N1-C9
gcaatcgacttctgcttcaaggaacgagagctagttattgtgtatcaacaaggacaatgtcaagcgaagaggctggtggtgcagctgaaacagctgctgacatcccaggcgagcctatggatatcatgactgccttgcaaattgtgctcacaaaatctctggcttatggtggtcttgcacgaggcctatactatagggcaaaagtggattgagaagcatgctgcacaactctgtgtactagcagaagactgtgaccagcctgactatgttaaactgtgtaacgccctttgtgcatagcacaatgttagcctgctgacagtttcgagtgcaaagaccctcggagaatgggctggtttgtgcaag

SEQ ID NO: 38312 - DNA, 389 bp, Glycine max
  Clone ID: LIB3056-006-Q1-N1-D1
cgcttcctttaattttgtttacttcttctgccccctgttgcactggaattatgtatatcgccgattcgattaccaatttgcttaaactcaatcgagctttgcagcgttaatcattctattagagtatcggattgctatatttaagtagttgaagagtagtttgattggtaaatggcatgctccgctggtagagttacgtattcatcactatctaagctagaatacgagaatacccattttggctacgatgatatgcatcatcatggtgaatctgtgtagtctgagcctatgcctggcacccactgtggcaaattatgcccaacgttctttaacaaatagtcattgtatcagtttccctactaggatgattacttgttagatggaggttt

SEQ ID NO: 38313 - DNA, 397 bp, Glycine max
  Clone ID: LIB3056-006-Q1-N1-D10
ctccacccaaaccctaactcccgaccctgttcccctctcgtatccgtcatgaaaggaggaaagtccaagaccgaatctaagagagccgatcccaaacttgctgtgaataagaagggagccgccaccaaggctaggaaacccgccggcaaggggaaggcagcgaaagaccctaacaagccaaagaggcctccaagtgctttcttcgttttcatggaggagttcaggaaggtattcaacaaagaacatcctgaaaacaaagcagtgtctgctgtgggcaaagctgctggagcaaaatggaagaccatgtctgatgctgaaaaagcaccttatgtggcaaagtctgagaaaaggaaagtggagtacgagaagaacatgagagcctataacaagaaacagg

SEQ ID NO: 38314 - DNA, 426 bp, Glycine max
  unsure (1)..(426): unsure at all n locations
  Clone ID: LIB3056-006-Q1-N1-D11
gctacatggtttagcagcaaaaggagcgaccccaacctgctcactggtgctcttgttggtggacctgatgcatatgatgactttgctgatgaaagagataactatgagcagacagagccagcaacatataacaatgctcctcttattggtattctggcaagactaggtggaggtcatggtggctataaccagcttcttccagttgttgttccagctcctaagcctgctgttaccaagcctcaaccaacccccagtcccaagacaactccttctccagcttcatggtcaggcccaatttccattgaacanganaggaccacctcatgggttgccaatggaaaaacttattacagatactcaacagtcgtgactaacaaatctaacaagagtctcaattctctcaatctttcaatatccaagctttat

SEQ ID NO: 38315 - DNA, 361 bp, Glycine max
  Clone ID: LIB3056-006-Q1-N1-D12
gagaaattttgtatgcgttggatttcgtagatctgattcatggtcagcacatagattgtggtggcagcacaatggatcctggcagtggaggaaacagtcttggcaacaactctaatctcgcttcaaaacaacgtttacggtggacacatgaattacatgagcgctttgttgatgctgtggctcaacttggtgggccagatcgtgccacacccaaaggtgtcctcaaagttatgggtgtacaaagcttgaccatttaccatgtcaaaagccatttacagaaataccgacttgcaaaatatttacctgactcctcatctgatgaaaggaaaaaggcttgacagaaagaaacaggggatatgct

SEQ ID NO: 38316 - DNA, 258 bp, Glycine max
  Clone ID: LIB3056-006-Q1-N1-D2
cgcttcctctaaatctcttttcttattctgcccccttttgggcttgaattaggtatatcgccgattcgattacccatttgcttaaactcaatcaagcttcgcaacgttaatcattctattagaggttcggaatgctatatttaagtacctgtagtgtagtttgattggttaatggcatgcttcgatgggacaggtacgtattcctcaatatctaagcttgaaaacgaggatacccaatttggcttccatgatatgaat

SEQ ID NO: 38317 - DNA, 421 bp, Glycine max
  Clone ID: LIB3056-006-Q1-N1-D4
tttttactctctctctgtctctctctacgctttcttgttcgagatccctcaagggatccactaactgaaggagaaatggggttgacattcaccaagcttttcaaccggcttttcggcaagaaggaaatgcgaattctgatggtgggtctcgatgcaacttgtaagaacaccattctgtacaagctcaaaccttgaaagatcggtaccacaattcccaacattgggttccatggggaaactgggggattcaagaaccatagtttcacttgtctggaatgttggtgggccagaacaagattcgtcccttgtggaagcactacttacaagacacacagggtctcattttttgtggttgacagcaacgacagggacagagttgttgaggccagagatgagtagcacaggatgttgaatgaggatg

SEQ ID NO: 38318 - DNA, 413 bp, Glycine max
  Clone ID: LIB3056-006-Q1-N1-D5
gagaaagggagaaagggtgtgagaatggagagcaaagaggaagatgtaagggttggagcaactaagttctcagaaaggcaaccaattggtacagcagctcagggtgacaaggactacaaagaaccacccccagcacctttgtttgagcctggtgagctaaagtcatggtccttctacagagctggaattgctgagtttgtggccactttcttgttcctctacattaccatcttaactgtcatgggtgtcaacaggtcaccctccaagtgtgcctctgttggcattcaaggcattgcttgggcctttggtggcatgatctttgcccttgtctactgcactgctggaatttcagggggacacatcaacccagctgtgacctttggtctctttttggcaaggaagctgtccctcac

SEQ ID NO: 38319 - DNA, 391 bp, Glycine max
  Clone ID: LIB3056-006-Q1-N1-D6
gttgaggatagcacaaagaaaagtaaacactgccacagcaagagtgttcaaatgggagagggaaaaggaagaatttgtgtcactggaggcacaggattccttggttcatggataatcaagagcctccttgaacatggatatgctgttaataccactataagatctgacccaggacgcaagagagatgttagcttcctcacaaacctacctggtgcatcagaaaagcttaaaattttcaacgctgatctcagcgacccagagagttttggtccagcagttgagggttgtgttggaattttccacactggcaccccaattgattttgcggtgaacgaaccagaggaagtggtgaccaaaagagccattgatggagcactaggcatattgaaag

SEQ ID NO: 38320 - DNA, 342 bp, Glycine max
  Clone ID: LIB3056-006-Q1-N1-D7
tctctctctgcgatggagtttcgcgtttccgtcatttggagccttctcctcattgtctctttcttctctcctcaaatcaagggtgaggcttctggttccgtcttcttcgtcgatagctccagtaatcaattcattcgcgccagatcatccaactatgagcaaccttcactgttgctagaagaagctggtgctgttgtgtcagtcttgcttggttttgctcctccttccacccttccagctgccagctcatccaagttgaatgatgttctgattcctaacccattcaagaggcctcgtgctgtgtttttgcctgaagtgaatggaatccatggtcttggaaat

SEQ ID NO: 38321 - DNA, 339 bp, Glycine max
  Clone ID: LIB3056-006-Q1-N1-D8
ctcaaacattgtttgttgtaggaagaggaatcttgagaaatggcaggggacagcaagagcaagattctgttcatcggagggactggttacatcggaaaattcatcgtggaagccagcgccaaagctggccacccaactttccttttggtgagggagtccactctctccaaccccgcaaaatcacccctcatcgacaatttcaaaggcctcggtgtcaatcttgttttaggagatctatacgatcaccaaagtttggtgagtgctataaagcaggtcgatgtggtaatttctactgtaggacacctgcagctagctgatcaagataagatcatttctgca

SEQ ID NO: 38322 - DNA, 431 bp, Glycine max
  Clone ID: LIB3056-006-Q1-N1-D9
aaacccgcacacagcagaacacaaattccttactctcgatgcgacgcttctctccttccttcaacggcactttccactctggccaccgatatacttggtagctgataacagaatattggtgattagttatggaaacattggaacttctgagcctgaagcagaagttttcttcggtccgggaccaggtcatgtggcagaggctgaaattattgggctctcagtgagcacattaggctcaactatttatatcaatgtcaagaacagaggactctttgcatatcagtcacgtggacatttgctttggagtgtggaacctgtgctttaccaattcggctaccgtcaaggatgcaggaaaaatcttacaaattgttactttgcttcagttcctttgcttgatcattgtgagggtagtatatatatctcaaacacag

SEQ ID NO: 38323 - DNA, 153 bp, Glycine max
  Clone ID: LIB3056-006-Q1-N1-E1
cttatgccctagatctgtagactcagctggtaatctggtggtagcacatgttgtgcatcctacgctgattccactatttgtcggatttattattgtcttcggaattctaggaacacttgtagtaggccttgccactctacgccttcacattag

SEQ ID NO: 38324 - DNA, 300 bp, Glycine max
  unsure (1)..(300): unsure at all n locations
  Clone ID: LIB3056-006-Q1-N1-E10
ctcattctgggcggcgatagttttatcggtctctatctccaagatggtccgagaacacggtacgaagtcacttgcctccgatgatcagaaaacaccacttctttccgggcacgagccaatggaaggaacacgcaccagcgtctncttcagcatcaaaacaattctaacactggaaaacttgtacgtgattctgggacctatgctggctcttttcatatgcctcttcgtgaagctcgacgcgccacccacaagccagaaaatgcttggtgtgattgcgtgggtcttcgcttggggggtcac

SEQ ID NO: 38325 - DNA, 437 bp, Glycine max
  unsure (1)..(437): unsure at all n locations
  Clone ID: LIB3056-006-Q1-N1-E11
agaataagcttagatcggaaaaattcacctctcggatcccgatcccatcgttgcaaatgatccgattcattctgttgcagaacaggcagggcaagacccgtcttgccaaatactacgttcctctcgaggactccgagaagcacaaggtcgaatacgaggttcatcggctcgtcgtaaacagagaccctaaatacacaaatttcgtcgagtttcgtacgcacaagataatatacaggcgatatgctgggttatttttctcactctgtgttgatatcactgataatgagttggcgtatttagagtgcatccatttgtttgtggaaatattggatcacttcttcagcaatgtctgtgagctcgatttggtttttaacttccacaaggtctatcttatacttgatgaattcattctagcgggtgaactgcangaaacaagc

SEQ ID NO: 38326 - DNA, 376 bp, Glycine max
  Clone ID: LIB3056-006-Q1-N1-E12
agcaagcaataccctagcggcgcctgctttctttgttcgtgttttgcatcaggatggagtctcaggtgaagcacgcacttgttgtcaaagttatgggtcgtactggatccagaggacaagtgacccaggttagagtgaagtttttggatgatcagaaccgtcacatcatgaggaatgtgaaaggacctgtgagagaaggagacattctcaccctactcgagtctgaaagggaagcaagaagattgcgctagatggtctcttttttttggcttgcctccaaattcgaacaaaagcaatatttttcttgatatttatggtagttagtcggtgctaaaagggttatagcaccctatcttaattgtttggatctattttc

SEQ ID NO: 38327 - DNA, 422 bp, Glycine max
  unsure (1)..(422): unsure at all n locations
  Clone ID: LIB3056-006-Q1-N1-E3
ctcgagccgcaataacatagcatagagtgagaagtgagaagagaaaaatggcaatctccatacccagtagacaacttttcatagatggagagtggaaagtccctcttctcaacaatcggtttccgatcatcaaccccgctactgaagacatcatagggcatattccagccgctactaaggaagatgttgaccttgcggtggatgctgctaaaagagccttttcccataacaaaggcaaagattggtcttcagctcctggctctgttcgtgctcgctatcttcgagccatcgcttcaaagataacagagaaaaaggatgaactaggaaagcttgaagcaattgattgtggaaaaccactagatgaagcactggcagacctggatgatggtattgggtgttntaactactatgccgagcttgca

SEQ ID NO: 38328 - DNA, 308 bp, Glycine max
  Clone ID: LIB3056-006-Q1-N1-E4
gttctattctaacttcatatcttctcctctttatctattggcgacggcatggcttatgctttcgaagtgtctacctttgtcatcaatgagaatggttccctaactggcacatcatatctacaactattggaggccctaatcgggaacccaaaccgactattagctacatggcataacgggttgtaggaactggatcattttgcatcgcgttgcaagctaaatgcttggaaactggagaggcagtgtcaattgacaaggttttacaaggcagaagatactagaatcgtgaactgcaattaatgcgtgtg

SEQ ID NO: 38329 - DNA, 419 bp, Glycine max
  unsure (1)..(419): unsure at all n locations
  Clone ID: LIB3056-006-Q1-N1-E5
cgaacgaaagacctcgacaattcttctgatccgtttcgtgcagatcaaaacttgcctgtttgcaacgctgcttctgacaaaaaaacgttgtaccatccgaaatgtcggacacagtggaacatacagatcaaagagctgaagctattccccaatccacagctacaccaaattggactattcatgtgtcagacataagaacagttaaggttagcaacatatcattggttacttccaagaaggacattgaagaattcttttcattctcaggtgatattcgatatatcgagatgcaaaggtcagagtcagagcacctggatagtggtcacactcaggttgcttatgttacatgtaaggatacacanggagcagacacagcagttctcttaacgggttccaagataggtgatctatatgtcacc

SEQ ID NO: 38330 - DNA, 418 bp, Glycine max
  Clone ID: LIB3056-006-Q1-N1-E6
tgctgtttgctttttccattccatcctccaaggcgaagcagtgatggccaagaccacgctagattcgggatggcttgcagctaggtccaccgaggttcatttcacaggcactcaactcaccaccacgcaccctccctctgcctccacccaaccatggatggaagctattgtccctggaactgttcttgctaccttggtgaagaacaaagcggtgcctgatcctttttatggactaggaaatgaggcaatcttggacattgctgactctggaagagaatattacaccttctggttctttacaacctttcagtgtaagctgtcaggcaatcagcactgtgatctgaatttccgaggaatcaattactctgccgatgtctattaaaatgggcacgagatggtcctcccaaaggaatgtttc

SEQ ID NO: 38331 - DNA, 365 bp, Glycine max
  Clone ID: LIB3056-006-Q1-N1-E7
cttgttcctgatacgcactagtctctctctttcttctcggtccagtgtctctttcaaagtgctgctgctgccagcattgacctgagctagagcagtaaccgtcatcaccactgccagtacggtaccatggctgtgcttcaatctttcgtttcggtccacccagattctcactttcccatacagaaccttccctacggagtgttcaagccccaatccgcttctgctcctcgtaccggcgtcgccatcggagacttcgtcctcgacctctccgaaatctctttcgctggtctcttcgacggccctctactaaaaaactccgattgcttactccagcctaatctaaataagtttgtatcactgggaag

SEQ ID NO: 38332 - DNA, 321 bp, Glycine max
  Clone ID: LIB3056-006-Q1-N1-E8
gcgccacttcagagaacacaacctgcactatcacaaactcctatggcgccttccctgatcgaagcatttgcaaagctgctcaagtgttgtaccccaccaccgagcaagagcttgtgtcagtggttgcatcagcaaccagaaacaaaaccaagatgaaagtagctacccgtttttcccacagcatccccaagctggtgtgcccagaaggcgaaaatgggttgttaataagcaccaaatatctcaacaaaatattgaaagttgatgtggaaacaagaacaatgactgtggaaagtggtgtgactctgcagcaacttataaatg

SEQ ID NO: 38333 - DNA, 389 bp, Glycine max
  unsure (1)..(389): unsure at all n locations
  Clone ID: LIB3056-006-Q1-N1-E9
gttggcaagtaagagatgaattcgtacttgacatcctcgatgtgggagtaacaggaacaggttgatgcccaacatacttagccaattcacacgacaaaaacagtggaaatcaacacaatcctcggaccctcttccatggctactgtttcttctctttgcgctgtttttcccatactcacaccaaccttgtcgaaaccccgcttggctcccctctcttgccgaatcccaaaacgacgtcgtatcagtatcatcacccctgttgccgaggatcgagaaatagttccggtgtctgaaggcagaggaacccgtttgaacgaagttgaggggtttcaaccttcggagcctnacacagagtcggaggttgttgtttcgagcctcacaagcagtag

SEQ ID NO: 38334 - DNA, 289 bp, Glycine max
  Clone ID: LIB3056-006-Q1-N1-F1
attgaggcctagattattctgttcaccaaggtagcatatggcgtgccaaatcatgcttgcatccgtcattcctctatagtttgaatttatgattgaattctacccggtggtaacaaatatattcgaccgtactgagcaatgcgattccaatagtggtgtattcaatgggtcgtgccccgaataacgtggtatcagtcgaggcagcttacagagctgtagtactcattgttgaagtagtgattgatgtctatgagccagtctgatattctgatgctccatgatccgatga

SEQ ID NO: 38335 - DNA, 357 bp, Glycine max
  Clone ID: LIB3056-006-Q1-N1-F11
ctcgcaccgagccaacggtgttgaatccatatcaactgaggtgtggatccttattgtaaccaatgccactcttaatcagagtccagccaggaccttgaccggctaatacccgcaacaccaggaacgataccacagatgccctcatctcaaacgcaaaatctgagtacacctgatcaggcaccggcaatgcctaccttatgctaacgccctacgtgcttatcacatcagctggctttattttcgcaaacatggcacatgccaaccatctgttggcacgtggcggaaagccaccgatcaatactacagaaactggtaccccaaactcgatctttgcctcgttaccacccaaatcctgga

SEQ ID NO: 38336 - DNA, 238 bp, Glycine max
  Clone ID: LIB3056-006-Q1-N1-F12
atgcatcgcacgccgacgttagatggtaactgggctttagtctaaaggtttatgtttccgaattactgaggcaacaatgcgcatacgtcaaatggaatccatggcatgcctattatgcttaatgctaatccaacagacatgaataccggaatgactctgagtattccaaatccccatcttgtcgaaatagagctgccccattgttcatatatgaatggctattacatgactactgaat

SEQ ID NO: 38337 - DNA, 404 bp, Glycine max
  unsure (1)..(404): unsure at all n locations
  Clone ID: LIB3056-006-Q1-N1-F2
aatgagacctagatttttctctccaccttcctccctgatggcagaccaaatcatgctggcggccttcattcctctattggttgccttcatcgatgaattgggttcgttggaaacaaatctattcgaccgatgtaagcaatgcattcggggaagtagtggaggttatcggccttgccccaaatgacgaggtataagtcgaggcaagggaatttgcggtggtggtcatcggcaaagttggttttggtgtcagggagccagacagagggtttgatgtagaaggagcggangaaggcagggtcganggcgttcggggtggcgatggcatgccaccgatctagggctcgaccttgacgacgacaatgctggcctagacatgcagcggtgtttgggttaatttttttcta

SEQ ID NO: 38338 - DNA, 271 bp, Glycine max
  Clone ID: LIB3056-006-Q1-N1-F4
ttcatcatcaacaacagaagaagaaacagctcagagggtttcattggccaaaaaaatcacaggacaaaacttcgtgatctgagacatcacattccctcttcgatttgtgccctagattggaactcccaccttttttccaggtcaaccttaacaagtttcgttttccttttttccacatttccgagaaaaaaaaaaatcagaaattcccgagtttctatttctaatggtaaattggtaactattccctttggaacaattcaattgcaatttt

SEQ ID NO: 38339 - DNA, 408 bp, Glycine max
  Clone ID: LIB3056-006-Q1-N1-F5
ctcgagccgattcggctcgagctcagcttcttcccaataagtagcaatattggcactggcaccataataccaggtcaattcaacaacataagtggtagtaaccaaggaacaacaacaacaacaacaacaacactctatggcaattcaatagaaaacgagtcatcccctcatgctggatcgagtttttcttctatctttggcaattcaatagaaaatgcgtcatcctctcatatgtctgccactgcgttgcttcaacaagctgctcaaatgggttcaaccacaaccacaaccaccaacaacggttcttctttacttggaggaatgtgtactaacaatagttccaaagctgaaaatgaccaccaccacaatcttcaagggttgatgaactctattgccaatggaaacacg

SEQ ID NO: 38340 - DNA, 272 bp, Glycine max
  Clone ID: LIB3056-006-Q1-N1-F6
cttcccctataggctcgtcactcgttgctcttagcccacctgctattcgacgacgtggccaccggcaggatggcggaggccgcgtacgacgccagactacgagctgatccgtcaggtggtgccagaagagggcgaagccgaagaggatgacagcctgctgaacgccgagcaccagtctgcgagctataaggccaagttagccaagacctaagccaacaaggaggagcacgaccagagctagggcgacactaagtccaacagtggcagagcca

SEQ ID NO: 38341 - DNA, 408 bp, Glycine max
  Clone ID: LIB3056-006-Q1-N1-F7
aatgaagcaagcaagcctacaatagtacaccaaaacatttcagtagaaaaagttattctagaccatgaatttaaccccttgatcacagatgccggcctccctaagcttcttgcagatgatgttgtcttctcagctcttaaagcaagtgctgccatgggatatctagctcccgaataccttaccactggacgctttactgagaagagtgacatatatgcatttggggttattgttcttcaagttctatccggaaaggtattgatggggggtacaatccgggtggcagttgaagctttcagatttgaagattttgttgacacaaatctgaagggagattattctaaatctgaagccgcaattctttcaaagcttgcaattcagtgcactcttgaagtgccagagcaaaga

SEQ ID NO: 38342 - DNA, 440 bp, Glycine max
  Clone ID: LIB3056-006-Q1-N1-F9
cactctcccaccccacttacatacacactctcccactcctgcgagccggtcgagttgaatcggtgagtcagtgaccgagttgaaccatgtcggacgaagagcaccatttcgaatccaaggccgatgccggagcctccaagacctatcctcagcaggccggaaccatccgcaaaaacggctacatcgtcatcaagggtcgtccctgcaaggttgttgaagtttctacttccaagactggtaagcacggccatgctaagtgtcactttgttgggattgatattttcactgccaagaagcttgaagatattgtgccctcttcccacaactgtgatgttccccatgtgaatcgtactgattaccagttgattgacattgctgaggatggatttcttagcttgcttactgaaaatgggaacaccaaggatgacctgaagttacct

SEQ ID NO: 38343 - DNA, 339 bp, Glycine max
  Clone ID: LIB3056-006-Q1-N1-G1
ctcgagccgtttcttcccattttgccccttcctcctttccttgtatccgaggagggccaaccacatatgctaaacaaggaaactaaattctaacctacttcagatctacaccaccctactgtgtttttacagtttcataaattctacaccatgggcacggaggttctacggccacaacattgtatcacccaccggatcgctgcaccaccggcggagttttcccagagaagaacctctgggacacacaacaacaattacttcatgggcacgcggaagccggttacccgacccgaacagagaaaactggttgttgagaaaatgcccagcttcgatgattcg

SEQ ID NO: 38344 - DNA, 300 bp, Glycine max
  Clone ID: LIB3056-006-Q1-N1-G10
aattcttccatcaccccttttacttattcttcctcaattgtgccaaaaatcatatttttaccgttctgattggtgtttcagcttgtgggtcgatgtcaactgtgtcgaaagatgacaacttggtgctggcttcggaggactcttcgtgcccagaagagtctgagcttgaattgggtcttggcttgagcctgtcttctggcccttcatgaaagtctcattagcaccatgttcatgctcctacaactctttatgctagaatttacactgctaaggattttgctttttacgcagtagcagcat

SEQ ID NO: 38345 - DNA, 365 bp, Glycine max
  Clone ID: LIB3056-006-Q1-N1-G11
caacaacatgggagagaacaaacctgcagaggtgaaggatttccagatagtggtagctgagaacaaggaagagagcaagaaacagcagcaacagttggcaccaaagaggagttccaacaaggacaggcacaccaaggttgaaggcaggggaaggaggataaggatgcctgctctctgcgcagccagaatcttccagttgaccagggaattgggtcacaaatctgatggggaaaccatccagtggctcctccagcaggctgagccatccatcatagctgccactgggactggcacaataccagcattctgctctgcttgttgttggaaactaattttaacaaaaagctgcttctttttaataatcc

SEQ ID NO: 38346 - DNA, 330 bp, Glycine max
  Clone ID: LIB3056-006-Q1-N1-G12
cataaagattttaaattcatggcggtgtaagtgtaatggcgggtcgggcgcttcgtctacacggtccggcgtcgggtagtatgaagaacgcgacgctaatttgactccgcatgatggtcgattcaggggagaagatgaagatcgatgggtacataacgaaagccccttgggctgcccttgtggaaattcaaacggatatttgctacctatgaaccctatgcaaatctcaaagacttagttgaaaaacgttatttaccctgggcgtgcactatcgggccagactataccggagaacggtctaatgggacaaaggcttgacggggaagctca

SEQ ID NO: 38347 - DNA, 391 bp, Glycine max
  Clone ID: LIB3056-006-Q1-N1-G2
ctcgagccgttgagattgtgaggaacaagaaagttaagttttggaagaaagtgtatgttatatacagctttttctttggtcgcaaaatcatcggccacatggtcaccttcttcttctactgtgttgggattccccttacaatcctggtccctgagggtcatgttccaatctggggagcctgttatattccttctgtcatcaccattctcaattcaattgggacaccaaggtccattcaccttctgttctattggatccctcttgagaatgtgatgtctttgcaccgtaccaaggcaacatttataggtctcttagagtatgggagggctaatgaatgggttgtgactgaaaaacttggtgactctgtcaacaataataataagaataaatc

SEQ ID NO: 38348 - DNA, 383 bp, Glycine max
  Clone ID: LIB3056-006-Q1-N1-G3
caggcacacaagattcttgtactgggaaggaaagcttatccttgcatttgctgatcaattttgggttaagtatctggttggctgggtgattccacccaaggtttctctccttaaggcaactcaaggtgatgctataagaaactattaccaatgaatgcatgtcattcaggacatgcttggtcctttgtacaaggtgggataggctttaaaatgggttcaccgtgagatggaagtataccccatttggcttttgccacacaaaatggtcaagcttgctggaaaactatgatttaccagaagcagggtccgactacatcgcagcaagagacacccaactgttcaatgtcacagatgtggagttactatgcaccagtcctgtttta

SEQ ID NO: 38349 - DNA, 95 bp, Glycine max
  Clone ID: LIB3056-006-Q1-N1-G4
ggtaaaacctacctgtggtggctcaagccttggtcttggagttgcatattgtgtcaatggttcccttggactagccaattgaaaaacgtacgtcg

SEQ ID NO: 38350 - DNA, 417 bp, Glycine max
  unsure (1)..(417): unsure at all n locations
  Clone ID: LIB3056-006-Q1-N1-G5
gctgaatcctagctttatcttcccttcccttcaaaataatatctctgttccaaacaagtccaacaacacactgcttctatctcaaacgcacatcgagaaatgagtttgagtaatgggaaaaccgaggcaccattgccaattagtaatggggatgagaagaagccgttcaagatcttcgtagggtatgaccctcgtgaagatcttgcctacgaggtatgtcggcactccatcttgaaaaggtcttcaatccctgttgagatcataccaattaaacagtcagatctgaggaaaagtggctcgtattggcgtgagaagggccagtttgagagcactgagttctccttttcaagattctngacaccttgcctggccaattaccaaggttgngcaaatgttgtggattgtgatttcctctac

SEQ ID NO: 38351 - DNA, 390 bp, Glycine max
  Clone ID: LIB3056-006-Q1-N1-G6
ggcagcactaatttatatagcaagctagctaggttgaaaatagtttggttttgtagtaagtgaggtgaggtgccaaaatggtgaagataactcttggtactttcgatgactcttttggtgttgcctgtcttaaggcttatttggcagagttccatgcaactctgattttcgtgttcgctggtgttggttcagccatcgcttacaacgagcttacaaaagatgcagccttggatccaacggggctggtggcagtagctgtggcccatgcatttgcactgtttgtaggtgtctccgtcgcagccaacatctcgggtggccatttgaacccagctgttacttttggattggccattggaggcaacatcaccctcattactggtttcttatact

SEQ ID NO: 38352 - DNA, 312 bp, Glycine max
  Clone ID: LIB3056-006-Q1-N1-G8
ttattacggactaccttcgaaggagtaagaaacagcattgtattcatgatgttgcccctcatcatatccataatgtggaagttcatgaaggtgagtgagataaatctggcaatatcaaagtgcttacataccctgatggcgacactgttgagaccttaacggagagagtagattttgatgatgaaaacaagatgattacctacaccatattggagggtgtcatgttgaagtactataagagctacaaggttatcgttcatgttttaccaaaacgtgatcagcacagccttatgaagtggactttcttgtatg

SEQ ID NO: 38353 - DNA, 404 bp, Glycine max
  Clone ID: LIB3056-006-Q1-N1-G9
agcgcctataaaagaaagccatttgctcactatttgtgtagatctgcatctcattctcattcgttcactgtcactttacccaatcctaacactttcttctctctgttttccttcttcctcgcatcaatggagttggacggcgttctcctcggcatgtgcaaccctctcctcgacatctctgccgtcgtcgacgacgctttcttgcaaaaatacggtatcaagttgaacgatgcgattctcgccgaggataaacacaaacctatgtatgaagaattggctaacaatcctaatgtggagtacattgctggaggtgctactcagaattcaatcagggttgctcagtggatgcttcaagcaccaggtgccacaagttatataggttgcataggaaaggacaaatttgg

SEQ ID NO: 38354 - DNA, 348 bp, Glycine max
  unsure (1)..(348): unsure at all n locations
  Clone ID: LIB3056-006-Q1-N1-H1
cgacacttctcgctcagcctcaaccataacaaacaatttcacgatgtctctttctctccccttcttaaatttctaggtttcgattctcttcctgcatttgcatcccaactttagatgtacagtagcgcaataacagaatctccgttcatcattttctggcttccttttatagcttgagctggaattgccatccgatctgacttcgtttcgcagggtttggtcttgattatttgacaattttggtcttcgattaagaaatttggtagaattcgttgtttgttttgttgctataggngattagggctttttgtagaatttagggttacaagtatatctatggcggctagt

SEQ ID NO: 38355 - DNA, 421 bp, Glycine max
  unsure (1)..(421): unsure at all n locations
  Clone ID: LIB3056-006-Q1-N1-H10
ctcgagccgattcggctcgagctcaggttccggtccaaatggaaggacaatttctggtgttacttataaatacggcactaaccaagtcagaattgtatgtgcatgccatggttctcacatgacccctgaggagtttgttcgccattcaaatgaagaccaggcagctgcagaggggaatacagttttggggacagtagcaaacggcaatcctgctgcctcttcccacagctaatcttgtatcgctgtacgttaatattaaagttctcaacaggagagtcagggaaatcgagctttgattnttgtatagatgaatgagattcctaccatttttctgtatacactttaataacttggtatttggctatcccgctttatttactttgtagccaatgcaatcaagtttgcagttgtatttaataat

SEQ ID NO: 38356 - DNA, 373 bp, Glycine max
  Clone ID: LIB3056-006-Q1-N1-H11
gttttgccaagttaaacagatctatgctacttattcgccccatctgttttctgatagttttcccggggtctcagctaatgactgcaaggagaaagatgatgctggagaaaaacattgtgagggaaatcctgatcagtatggaaaccaccgcttgccaaagattgtatcactgaagcatcattggtggtggatgatgaacacggtatggaatgggttgagagagacaagggatcattctggtcatattcttttcattgaagaagaccactttatatttcccaatgcgtatcgcattctacaggttctaatttcactgaagcctaaaaagtgtcctgattgttatgctgctaatttagcaccttctgatgtgaac

SEQ ID NO: 38357 - DNA, 389 bp, Glycine max
  Clone ID: LIB3056-006-Q1-N1-H2
agctgtcaggacaggagctacctttatttgctcgctatgggctggaacattgtttatcagttcaggaagggtcaaaacgaaatcgatagatacctgcgtctggttcctctcattactcttgtggacaattctcgagtcaaggagagacttgaagttatcgaaatggatcaacgtgaatacacattggatgatgaagaccaaaaagcacaaacagttatttttaaaccttgacctgacaaggatgacactgctgtgttgaagaaaacactatcatgttcttaccccaactgttctttcactgaagcacttaaaaaagaaaatgaaaagcttaaactagaactacaacggtcacaagcaaatttggatatgaatcagtgtgaagtcattca

SEQ ID NO: 38358 - DNA, 421 bp, Glycine max
  Clone ID: LIB3056-006-Q1-N1-H3
ctaagttcggcaccagcgaaacgctcttcgttatcttttctcagactccgcggcgtagatccgaggagttcgggaaatcctaactcatcatctcaactcaagtcatggctggacttgcacctgagggatcacagttcgatgctcgtcaatatgattctaaaatgagtgacttactttcatctgatggacaggacttcttcacatcctatgacgaggtttatgatagttttgacgctatgggtttgcaggaaaatcttctcaggggaatttacgcatatgggtttgagaagccatctgccattcagcatagggggatagttcccttctgcaagggacttgatgttattcagcaggctcagtctggaactgggaagacggctactttctgctctggtattctgcagcaacttgactatagctt

SEQ ID NO: 38359 - DNA, 415 bp, Glycine max
  unsure (1)..(415): unsure at all n locations
  Clone ID: LIB3056-006-Q1-N1-H5
agcaattacatatagcacaattgtttaagagtgtattacgaaggaaaaacaatgaaagttgtgtacttccttgttgccatcttggctttgacatcctctcttgtctctgcctatgatcctagtcctctgcaagatttctgtgtggcagccaaagaaaaagatggtgtgtttgtgaacgggaaattttgcaaggaccctaagcttgtcaaagctgaagatttcttcagacatgtagaaccggggaagactgacaacccagtaggttcaaacgtgactcangtgtttgttgatcaactaccgggactaaacacacttggcatagctttggctcgcatagattttgcaccaaaggggttgaacgctccccacactcaccctcgcggcactgagatccttatagtccttgagggtactc

SEQ ID NO: 38360 - DNA, 404 bp, Glycine max
  unsure (1)..(404): unsure at all n locations
  Clone ID: LIB3056-006-Q1-N1-H6
gcacaatcagcttaaaccaacctttcttgtaaactttattgattttgagaattaaagagggtatagacatggctagagcaattgcagtttctttcttggttctgcttctggctttccccactgtatttggagctgaccatgaagttggtgacactggtggatgggccctaggggttaattacaacacctgggcctctgggaaaactttcagaattggtgacaatttggttttcaagtatgactctacccatcaagttgatgaggttgatgagagtggctacaacagctgcagctcaagcaacatcatcaagaactacaaggatggaaacaccaagattgaattgacttcaactggcaaaaggtacttcttgtgccccatttcaggccactgtgctggangcatg

SEQ ID NO: 38361 - DNA, 412 bp, Glycine max
  Clone ID: LIB3056-006-Q1-N1-H7
gagaagcaaggagaaagagaagggttagaaggcgaagaagcatggcttcactcaagaagaagaaaccctattacccgcttccgttaattcctatctattactacttcttattcaaagggtgatatgatcttcttcttccaagcgtctcatgcatgctactttcttctctcttctcggggaattgaagcgttgtggtccgatagtttgctagatcaagcaaattaacctgtatactggtttatatatcttcaccttgcacctttctctctctctctctctctatctctctctctctctatatatatatgggtttaatctcttactttctttatcttttcactttttttcagttatggtttgatttaattacgtgattaaaatttacatatatggatttgaatatatagtacgt

SEQ ID NO: 38362 - DNA, 424 bp, Glycine max
  unsure (1)..(424): unsure at all n locations
  Clone ID: LIB3056-006-Q1-N1-H9
ctcgagccgctcgagccgattcggctcgaggtgatgagaaccctcgggagatcaagctacccgcaacatcgggggagctcatgatccaagaattcggccatgtcatcactccggtcgacgaactccgtagaacgggacgggtttcggctttattggccgacgaggaacttgtagccggtaaggtttacctgctactgccggtgaatagggtcaattcgaaggcttcagagtttgagatggctcttgcggaaaaacagagtggccacacaaagaggacgaggggtaataatatggcgaaggtttcaccctctgtgtgtccgaggtttgggaaccaagtacgatggaantcccgttttggatcctatctttgaataatagaatcgccctcatctctcaaccaatttgtcttcctcctgcactttac

SEQ ID NO: 38363 - DNA, 400 bp, Glycine max
  Clone ID: LIB3056-007-Q1-N1-A1
ttcacacttggaaccttaaattcaattaaggttctctctcttgtaaaatgctccaagggaagggagttttataacatgacctagtaacgattcaccacatcatgcgtgccactcctctttaactctctcatcctttttctctttccgtgtcaccctctttcaggttaatttgcaatgactgaaccttccaaggtcattcacgttcgaaatgtggggcacgaaatatctgaaaatgatttacttcagctgtttcagccttttggagtcataacaaagcttgtcatgctgcgtgcaaaaaatcaggctcttatccaaatgcaagatgttccttctgcagttaatgccttacaattttatgcaaatgttcagccaagcataagggggaggaatgtttatgttc

SEQ ID NO: 38364 - DNA, 416 bp, Glycine max
  Clone ID: LIB3056-007-Q1-N1-A11
cagagattgacgccatggcattacaggtcgaatccactggcggggcttactttgttactgcttataaaggatacggtgccccatggtggcgtgaggatgctcgcggagttagtattgcaataacaaggtttactagcacgggtcacattgcccgagctgtgcttgagagcatgtgcttacaagtgaaagatggcttggattcaatgcataaagattcaggagaaagtgaatactagactacagagttatagcttagagtggatggctgggcatctgtacacaacctgctgatgcatattcaggcagatttggtggaatgtccagtaattatacctgctgacatagagacgacagcacttggagcatactatgctgacggattagctactgggatttggaaagaagatatattttca

SEQ ID NO: 38365 - DNA, 369 bp, Glycine max
  unsure (1)..(369): unsure at all n locations
  Clone ID: LIB3056-007-Q1-N1-A2
ctgcattngtttatttgacaccttccaacccacacctgtacgccgctgtctcctccgactccaaggccgctacttcgctagacctaactcaacccgatctcgataatagcggcggcggtgctaacggaaacgctaacggcggcggcggtggtggaggaggcggaggaggtgatgatagcaagggcgaggaaggatcggacggtgacaagaggaaaatggctctgttgatgtctcagaaattcactctagcttatgctgcactcgtcggagtgggtggtgtaatgggtcatctaaagagtggcagcaacaagtcacttttggctgggggtttgtctgcatcactgctgcatattggttatactgagctac

SEQ ID NO: 38366 - DNA, 402 bp, Glycine max
  Clone ID: LIB3056-007-Q1-N1-A4
gttttagggttataggctatcacattcaggagttactggtctggattcttcaaatgccataccacatttacgcaaccggcaatacatgctttaagcttgtgccgattttaaaccttcttgattctaatggattcgtggtggtccttggcaaatagttattaagagagacgcattatccatgccagagttggtcaacaaagctggcttgactttaccccttggtatgtatatgatggttcttcaactacttttagatgctgcaattatgcgatttctcagagcatggacgcatggacatttattgttacgagggtcgtatttttgaagcaaagtcattagaacttatgacaaataggcatggtaatcccatcttattatgtgtctgatcaggatacttaattt

SEQ ID NO: 38367 - DNA, 413 bp, Glycine max
  Clone ID: LIB3056-007-Q1-N1-A5
cagctttgtgcctcaaggtttttgaccttgacaagatgcaatcggagagttcgagcacgacaagtcctgattgcgttgggatattgcgaatattcactaatcagtttcctgaggcaaagattacatcatttttggttttagaagaagtgccacctatactactcatagctattggcttggacagtggttctatttactgcatcaaaggagacattgcacgggagcgtatcactcgtttcaagcttcaggtggaaaacaaccattcggacaaaactctttctgctgtaactggacttgggtttagggtggatggtcaatctctacagttatttgttgtgactccaagttcagtgagcttgttttcgttgcatgatcaaccgccaagaaggcagacccttgatcagattggatct

SEQ ID NO: 38368 - DNA, 411 bp, Glycine max
  Clone ID: LIB3056-007-Q1-N1-A6
cgcctcgaggccctgaggcccattagggaggacgaggtcacctccatggttgactccgtttacaatcactgcaccagcactgaaaatttggggaaaggaatattgttgaggaagcacttgggggttgtggcattcaacaacataaccaggttggcatttgggaaaagatttgtgaactcagaaggtgtgatggatgagcaaggagtagaattcaaggccattgtggaaaatgggttaaagctaggagcatctctagccatggcagaacacatcccttggcttcgctggatgttcccactggaagaaggagcttttgccaagcatggagcccgccgcgaccgactcaccagagccatcatggcagagcacactgaagcacgcaagaaatctggtggtgccaagcaacatttt

SEQ ID NO: 38369 - DNA, 404 bp, Glycine max
  Clone ID: LIB3056-007-Q1-N1-A7
gaaatgaaggttgtttacttcttcgttgtgctattggctttggcatcctccattgcctttgcttatgatccaagccccctgcaagacttttgtgtggctatcaatgataccaaaactggtgtgttcgtgaatggaaaattttgcaaggatccaaagcttgctaaggctgaagatttcttctttcctggattgggacccggaaacacttcaaaccccctaggctcaaaggtgacagctgtcacggttaatgaaatattagggctcaacacacttggcatttccttggcacgcatagattttgcaccaaagggtttgaaccctccacacactcaccctcgagggacagagattcttgtagtcttggaaggtaccctctatgttggcttttgtgcgtccaatcaaaa

SEQ ID NO: 38370 - DNA, 271 bp, Glycine max
  Clone ID: LIB3056-007-Q1-N1-A9
tggcacggttcttcgtttggccaaagatttggctgagaacaacaagggtgcacgtgttgcttgtgtctgctctgagatcactgcagtcacattccgtgggccaagtgacactcaccttgatagtcttgtgggccaagcatttgttggagatggaactgctgcagtcattggtggttctgacccaattccacaagttgagaagcctttgtatgagcttgtttggactgcacaaacaattgctccagacagtgaaagtgctattgatggacac

SEQ ID NO: 38371 - DNA, 427 bp, Glycine max
  unsure (1)..(427): unsure at all n locations
  Clone ID: LIB3056-007-Q1-N1-B1
cctagattcagccacagttggaaaaaaaaaaaaaaaagttgttcgagatggcacgtacgaagcaaactgctcgtaagtccacaggaggaaaggcacctaggaagcagctcgcaaccaaggctgcacgtaagtctgcaccaactactggtggtgtgaagaagccacatcgttatcgtcctggtaccgttgctcttcgtgagattaggaaataccagaagagtaccgagcttttgatcaggaagctccccttccagaggctggttcgtgaaattgctcaggacttcaagactgatctgcgtttccagagccatgctgtgcttgcattgcaagaagctgctgaggcataccttgttggactctttgaggatactaatctgngtgccattcacgctaaacgtgtaactattatgcccaaagatatccagct

SEQ ID NO: 38372 - DNA, 412 bp, Glycine max
  Clone ID: LIB3056-007-Q1-N1-B10
agagtgacataattcaagtcgacaacgttgagctgagctgcggttctctcagataacattcgttggatctgatttcatactttctttgtttgtctgtcttttatattctgagaattgagaatagagagcacaaagaaactgccatggacgctctgacgaaacaagccagcaagctcagagagcaagttgccaaacagcatcaggctgtaataaagcagttcagtagtagtggttatgagagttcagatgttgtggtcatcgatgaggtcgaaatgcagagacatcaccagctggaaaagttgcatagggccacacgttcagggaaggacttccagaaggaaattgttaaagcagcagaaacatttacagctataggttataagcatattgaaacaggaacataactttctga

SEQ ID NO: 38373 - DNA, 175 bp, Glycine max
  unsure (1)..(175): unsure at all n locations
  Clone ID: LIB3056-007-Q1-N1-B11
cgaccctttcatcaccaccgattacatgacatacatgtntaaatacgacagtgttcatggacactggaagcatcacgatgtcaccgttaaagacgagaagacccttctcttcggtgacaagccagtcactatttttggacacagaaaccctgaagagatcccatgggggtcaact

SEQ ID NO: 38374 - DNA, 346 bp, Glycine max
  Clone ID: LIB3056-007-Q1-N1-B2
ccaaatcatcttcaaaggttgcaggatggtgcatttacctgaatgggaaggattggaatgggccatcagatggaaaatggaacctgggaacgtcagctaggatgaaggtagaaggagtgaaaatatggaatgcttgctcattatctaacttcatagcaaggaatccctggagcatatgtcttggggcatcgcccattatatcgagctttaaggactgacagagctccgaactttggatggtgaagcttgttttacctgctttacctaggatactggatcttaactgcagtagctacttccatagctttaaaaggaaaatccttgacaggcatgctgccagtcatac

SEQ ID NO: 38375 - DNA, 375 bp, Glycine max
  Clone ID: LIB3056-007-Q1-N1-B5
tgaatggaatacaaaacacaagacagagtcattcagcaaggcttgaaacgagaagcgaggatgcccatcagatgtattctgcattggcaaccgaaccaaggaagcgttgtgaacagccaagtcctgaatgagatctcgcagtgcgtcgaaagccttaacggcgtcaaagaaggaagatgcaaagcctccctcactttctacagacccaatttacgagaccaatcggtgaccatcgattttcctcgcgattttctggggatatcgatgctggagcagccgaacaaatactacttaatcattcgcggccagaagattgttctcgaggccgattcttctatcttgcttatcatggagaaactccaatcctacaagttc

SEQ ID NO: 38376 - DNA, 108 bp, Glycine max
  Clone ID: LIB3056-007-Q1-N1-B6
atatatatatatatatatatatatatatatataagtgttttatctatatagttattgtgatgtttgaaatgtagaataaaattataatatgcgtgtttgcttctgtcc

SEQ ID NO: 38377 - DNA, 414 bp, Glycine max
  Clone ID: LIB3056-007-Q1-N1-B7
gtttgtcagtacaaaggcatcatcgctgccagtgtcgtcgcgttcagaggaaggaggccttcgcagacgtctttcttcgctgtctctgaagatccaagacagcccaacatggtcattttccagatccaagtccctctcatccatgggtgactatgtaaggacatgctgggcctggatcctctccaggaagctcatctttgccacagatctcgaaatgaacgaccagaaaactaagctccttggctcccacaacaggggcacttggagccatgtcttctataagctgcgctctgagatcagacggttcatctctacttctgatcacgccactcttgccaaaacctaccacaggtccacacctcaagtcttctcataattccctccacatttctcaatgcttacttcaaataattt

SEQ ID NO: 38378 - DNA, 416 bp, Glycine max
  Clone ID: LIB3056-007-Q1-N1-B8
tccaatcatatttaaatagaaacacacactcctcatcccaaaccctacattttcttcaagcgctgcggtggatcagattccccattaaggatggaggatggtgagaaacccagccatggcattgctgatatggatgttgttgatgccactttgcaaagccatcgtgtggcttctgatcaagtaatggtcctacagggtcatgatatcaaaaacggcgattctgatcctgctcacgtgccagcaaccagtgcaattagcaataatcagtttgaacttgaagatgctaagactgtttcgcatcaggaactgatcactccaaagcctaaagaaaagaatgtcagagaaatgaagaatgtgctaaatgataccgagatgactgattatgatgagtatggcacgcctctggatcgagaaac

SEQ ID NO: 38379 - DNA, 160 bp, Glycine max
  Clone ID: LIB3056-007-Q1-N1-C10
gagagatctatctatctatcaagatggcgctgttggttgagaaaacaagcagtggacgggagtacaaggtgaaggacatgactcaagccgatttcggaagattggaaatcgagctggcggaggttgaaatgcccggcctcatgtgcttccgcaccgagtt

SEQ ID NO: 38380 - DNA, 338 bp, Glycine max
  Clone ID: LIB3056-007-Q1-N1-C2
gttctagccaatgcaccaacattggtccaatagattctggcgagacaaaccttctaagagtgatcaatgcagcactgaaccaacccttggtctttacaggggccaaccaccagcttacagggggtggtgcccattccttctaacttaaaacctttaacaaccaactcattattgctggacccagcccaaacaacggttgtcctattccaaggggacaaacttccaaaaggctattacttggccgaacttgcttaccattcggccaaaaacgaaccgttggccaccacaacaacaacggcatttttcgattttaaatccgaaccgtgcccaaccaaggg

SEQ ID NO: 38381 - DNA, 394 bp, Glycine max
  Clone ID: LIB3056-007-Q1-N1-C3
gcaccatcctttggaattggcaggatctttaagttttttaattctttccatcaatgtctttttaagtggatgcctaacttttaacgcaggtacaaagaaggaagaagcacgcgtgggggtgtgggtgaatatatggcgaaaagagtaccagtaggagagttgttggtgttggtgttattattgttggcaccaaagacaaaggcaatgagcataacaagaggtcataataaaagcaggggcaaagagtcctctggttctagtgatgaggggggtgcaattagcttttgtttgagttggagattggcagtggaggcaaacaatgtggttgcatggccaacagttccacctcagtgttcccgatatgttgagacttacatgatcaatggccagtacg

SEQ ID NO: 38382 - DNA, 387 bp, Glycine max
  Clone ID: LIB3056-007-Q1-N1-C4
caaccatcctttgcaattgcaagaatctttagtttttttatgggtggccatcagtgtctctttcagttgagtgccttacttttaacgcaggtacaaagaaggaagaagcacgcgtgggggtgtgggtgaatatatggcgaaaagagtaccagtaggagagttgttggtgttggtgttattattgttggcaccaaagacaaaggcaatgagcataacaagaggtcataataaaagcaggggcaaagagtcctctggttctagtgatgaggggggtgcaattagcttttgtttgagttggagattggcaattgaagcaaacaatgtggttgcatgggcaacagttccaacttagtgtttccgatatgttgagacttacatgatcaatgg

SEQ ID NO: 38383 - DNA, 395 bp, Glycine max
  Clone ID: LIB3056-007-Q1-N1-C6
cagaaaaaatgggttcttcttcttctatgtggacggtgtgtgtgattttggcatcactggcctctgcagcactctgtgccaacccacgcaggccagtggatgtacaatttggccgaaactacgtgcccacatgggcctttgatcacatcaaatatttcaatggtggttctgacattcagcttcatcttgacaagtacactggtactggcttccagtccaaagggtcttacttgtttggtcacttcagcatgtacataaagatggttcctggagattctgctggcacagtcactgctttctatttatcttcccaaaacgcggagcatgatgagatagactttgagttcttggggaacagaacaggacaaccttacattctgcaaacaaatgtgttc

SEQ ID NO: 38384 - DNA, 142 bp, Glycine max
  Clone ID: LIB3056-007-Q1-N1-C9
ggaaaagaataaagttactaaaaaattaaacggtattaaagagtccaaattgaaagccaaaacggtgaatggaaattggagcttgaggacgaacaagctcagcttcccttacgtcttcctggtctgaatcttattattcctg

SEQ ID NO: 38385 - DNA, 368 bp, Glycine max
  Clone ID: LIB3056-007-Q1-N1-D1
aatgtaggtattattatatcttcttgatgaagtttttctacatggaccatttcctaaatcatagattgcagaaatcgatgcattagaaatatttaaacgtaattgattgttgattgattaagaaagcaaggttttttcacgtgacttcagtttagaattttgactaaatgaaacgctttgtgagaattgcttggacaatgaacaagaatgaatgatggtataattttccgaaaaaaaaaattgggggacttaattatagttagcgcgtaatgttttagtgaccatattatattttgtgaaaaaattggtttattaaattatacaaattttaatatgattcatctatttaatttctaagaaaagagagt

SEQ ID NO: 38386 - DNA, 396 bp, Glycine max
  unsure (1)..(396): unsure at all n locations
  Clone ID: LIB3056-007-Q1-N1-D11
aatggattttggccaaccttaaaaccttggaaggtagcctcttggaccttttccaatattactcgaatatgcttgccgaaggccttggcctgtctggtatggggtaaatcctgttaacaggaatagtcatgaaacattatacgtattccaatttatcgaaaagttctaaacggtttgcctctgcttttttcgagttgatatcatctttagctgaaacatttgtatttatatacatgggctttgatattgctatggagcaacatatctggtcacatgttggattgatattcttctgcattatattaattggaattgcaagggcaacaaatgttntctcatgtgcttatttggtcaatctggtcagacccactcatcgaaagatacctccaaaacatc

SEQ ID NO: 38387 - DNA, 330 bp, Glycine max
  Clone ID: LIB3056-007-Q1-N1-D2
cttgaagttattcttttgctgtacgtcatttccgcttccaggtacgtgttattatatctccttgatcgaagtcctctacatggaccattggctaaatcgtacactgcagaaatcgacgcattacagatcttcaaacgtaatcgatggccgagtgattaatacagcaaggcttgttcacgtgacttccgaatgagaattttgactaaatgaaacgctttgagagaattgcttgggccatgaactagaatgagtgacggtataaccctccgaaaagaaccattggtggacttacttatagttagcgcgtaactgtttagtgaccatattata

SEQ ID NO: 38388 - DNA, 295 bp, Glycine max
  unsure (1)..(295): unsure at all n locations
  Clone ID: LIB3056-007-Q1-N1-D4
tttttagcgatgaagagagtcgtagtctactagagactccttgctcgtgtctggtatttgagaccctcagcttaccacgctactatgtgctggtgtctgtagacttatgttgcacatgcatagagctagggtgtagcaaccgaggcttgagtacactgaagtaaggtggtacactcgacgtcataccggagctatactacaatcgtacgtgagattgaggatcacgctagatcatgaatctgcagntgccatagcttgtaaagcagctcctcacctctcaatgccaaggaagtca

SEQ ID NO: 38389 - DNA, 414 bp, Glycine max
  Clone ID: LIB3056-007-Q1-N1-D5
ggctcctctcacattctccttcttcttcatccttatctcttacatttcttcatcatcagaagcgggatcaatcggaataaactatggaagaattgcgaacgacctacctacaccggcgaaagtggtggagcttcttaagagtcaggggctgaaccgtgtgaagctctacgacaccgacgccaccgtcttaaccgcgtttgccaactcaggaatgaaggtggtggttgccatgccaaacgagcttctcgccaacgccgccgcggaacagtccttcaccgacgcgtgggtccaagccaacatctccagctactaccccgccacgcaaatcgaagccatagccgtgggaaacgaagtgttcgtggacccgaacaacacgacaaagttcctcgtacccgccatgaagaacgttcacgc

SEQ ID NO: 38390 - DNA, 400 bp, Glycine max
  Clone ID: LIB3056-007-Q1-N1-D6
caagagattgttctctgccaaagttcaaaccgaagcttttgattcagaagattagagggaagaggcttatgtttgttggagattcactgaataggaaccagtgggaatcaatggtttgtatggtcaattctgcggttccttcacataacaagacctggtacaagactggttcacttgctatcttcaaaatccaggagccggagcacgttaccacagtggaattctattgggcaccattccttgtagagtcaaattcagatgatccaaacatgcacagcatattaaaccgtataatcatgcctgaatcaattgaaaaacatggcgtgaattggacggatgcggactacttgatctttaacacctacatatggcggatgaacactttctctatgaaagttct

SEQ ID NO: 38391 - DNA, 408 bp, Glycine max
  Clone ID: LIB3056-007-Q1-N1-D7
gtttgtctactaaagcagcgaaaaaaaatgacagtggagcttatggggttccccaaaatggaagaacagaatgcaattcaagaagctggcttcgaaggcctcaaggccatggaacacctactgcgactcctatcctatcaaccctatcacctccactctcaccacactgacgcaaccgctatcaacttcaaacaactgatgtacttactcagccgccgcaccggccacgcccgattacgtcgcgcacatctaacttcacaggcaccggctaacccggtcacactacaccaacctatcttcaccttcgtcccttcgcactcatcagtctgtaaccctcggtttcacactacctaacatttaagacttcaacgtcaaatccatggaccttcaatactctaaagaaacctt

SEQ ID NO: 38392 - DNA, 367 bp, Glycine max
  Clone ID: LIB3056-007-Q1-N1-D8
gctattctactcgcaagcaaatcagaacaagagaagagaatggcaggagcagaggggctaaacagagaacagtacgtgtaccttgcgaagctgtcggagcagtcggagcggtacgaagagatggtggagttcatgcagaaggtggtggtggggtggacgccggcgtcggagctcacggtggaggagcgcaacctcctctcggtggcctacaagaacgtgatcgggtctctgcgtgccgcgtggcgcatcgtgttctccatcgaacagatggaggaagggcgctagaacgacgaccacgtgtccctggtgaagcactacagatgcaaggtcgagaacgagctcacgcacgtatgcgccaagcattcta

SEQ ID NO: 38393 - DNA, 406 bp, Glycine max
  Clone ID: LIB3056-007-Q1-N1-E11
ctcttgaattctatgatatctctaattattggtgataaatgattattacctaccctttactattggccaatggtatttaaatggcttggtgaaagtctggtaggattccattcagtgggttttgtaaggacctgcattggctgagcagaaaatttggctgtggatctgggtttagggttccaagtagggaagacaccccaatttcggcaaattagggggctacttttcattccaaaattttgaacttgagctgaatgttggtaatatttgcccttaaaatgattaatgaatcgtttgaccgtgtgctgcttgagagttttaacactgattttgatatatattcctttcttttcaattgcaggaatgacattagctgagtatttcagagatatgggttataatgtca

SEQ ID NO: 38394 - DNA, 401 bp, Glycine max
  unsure (1)..(401): unsure at all n locations
  Clone ID: LIB3056-007-Q1-N1-E3
atccaatccaagacacagaacagaagaatggcctcaaaatcattcaccattagacttggttggttctgctacttcatgctcttcaactttatgcatttcaacagctggaccgggctcttattggaaaggtatgcaagcacatgccatgggtccattgctggatgccatcaagaagatgagctgttgatggagtctgaaataagccgaaagtttctggagcagaagagatcatacatttccaatggagctttacagagagacanaccagtttgtaatggtggtggctctggtgaagcttatagtaaaacctggagggtgtcttcctcccccctcaaatcctcaaagtagaggctgctctaagtattatcgctgtaggtctgactcttgattacatcttcatg

SEQ ID NO: 38395 - DNA, 319 bp, Glycine max
  Clone ID: LIB3056-007-Q1-N1-E4
cctcagcagtcgtcacaaagactccataacccaaaaatgcctttcaagaggtaccttgagattggaagggtcgctcagatcaactattgcaaacagttcaggcggttcgcgatcattgtcgatgtcattgacccaaatacggctcttggtgatgctgccgacatggtgagggcccaagtgaacttcaagaagctctcgctcactgacatcaagattgatcttaagaggatttccatgaagaaggatctcattcaagccatcgaagcttgttatggtgataacagaatggaagagagttcttggggcacaaaactgattg

SEQ ID NO: 38396 - DNA, 396 bp, Glycine max
  Clone ID: LIB3056-007-Q1-N1-E5
aaacttctgggttgcaaaaatgaattcggacacgacttcctattggtgctacagctgcacgcgcttcgttcacatacaagaacagaacgacgtcgtttgcccgcgctgccacggcggcttcgtcgaaaaggtcaccgccccccaatcgtcaaggcaaggcttccgccgccgacgccgcaacgccgggaaccactcggcgttcaacccggtgatcgtgctccgcggaccgggagaggacgaggagagcagctttgagttatactacgacggcttcgacggcgaggggctccgcccgctgccatccaccatgtcggagttcttgcttggatcgggattcgaccggttgctggagcaggtttcgcagatcgagatcaacggcctcgggagggctgagaa

SEQ ID NO: 38397 - DNA, 387 bp, Glycine max
  Clone ID: LIB3056-007-Q1-N1-E6
tcgacgcattccacatttctttcatatactaccagtcacatttcttatacagaaaagcagtgtctgcagcacccaaacgaaacgacagtgaccaaaacagcaaaacgacattacagagagagagcgacgatgccggaagaaacgacgtcgatcgactacgtgatggaggcggcatctgggccccacttatccggcctgagacttgacggccgtatgccgtcctgcgccaccgacggcgccgcgtactactctgccgattctaccctaacgctcgatttgctacgcaatcaacccttcgtcataggtgtttcgggaggtactgcctcgggaaaaaccaccgtctgcgacatgataattcagcaacttcacgatcaccgcgttgttctc

SEQ ID NO: 38398 - DNA, 266 bp, Glycine max
  Clone ID: LIB3056-007-Q1-N1-E7
ccgacaccgttcccggcgactccgtccactgttggatttcaattggatcttgattttgaacggctgagtaaagaggcatggctgacagagacgaagagtcggcaatgcctatggacgcgaaaattgcgaagccttagcagacatcaatggaccgactacgactacggaacctggctttattcacacagcttctagagcctagagacttgactacgcttgtgcatgtgcttaagccgatgcacaacgtctgattcatagctatgctc

SEQ ID NO: 38399 - DNA, 385 bp, Glycine max
  Clone ID: LIB3056-007-Q1-N1-E8
aagaaattgagtttgagatctgattgtgcggcgacgatggagaacaacgacagcatcatatcgcgggagaagatcgaccaggcagcggtgtggctcggctccgacgtctcttccgctctcttttcctcattggaacgcttttcctgcgtcaacgtctaccacctctgaccccgacaacgacgatgactactacgattattactccaccaccaccgccactcctacctccgcatccaccaccaccaccaccgtgctcgacaccactcctccctccgttcaggtcaacgggcaaaaaacaaacgacgacgtctccaacctacccgtttgaggcaatataacgacgacgacgtcggtgctgcgctgcgtatagaaccttttccctttt

SEQ ID NO: 38400 - DNA, 388 bp, Glycine max
  Clone ID: LIB3056-007-Q1-N1-F1
tgaacaagcgattgagcatctcatttcttgttgtcctttgattgaagatgtaactttgaagtgttgttctgtattgaacaatggtggcataggaggtctacttgagcccaggacctctaggatgcaatctattagtatgaatgctctgccaaagctcaagaaagttgatgttcaagggataccggagattattatcattgatgctccaagtctagagtatttctgtttttgtcctggtggagatgtgcattcaccttttaagatgaattttgacaagtgcagaaatttgagagtgttatacttatggtcattgaagagcactactatcacagacaagtggtttcttgatctatttactaaatttcccttccttgagtgtttgaaattt

SEQ ID NO: 38401 - DNA, 175 bp, Glycine max
  Clone ID: LIB3056-007-Q1-N1-F11
acaaaacccattttacttcttcttttacaaaagaaccatatgtgttggtatttggcaaacttcgaacattatttaaaaccatggctttctttaccaaattggctttgggccttttaatttcattcctttttattcatgcctttttaacttaaaatgtgtgttaaggcccggccaa

SEQ ID NO: 38402 - DNA, 203 bp, Glycine max
  Clone ID: LIB3056-007-Q1-N1-F12
acaaaacccattttacttcttctttcacaaaagaacaataggtcttgctatttgccaaactacgaacatcatttagaaccatgtctttctctaccaaattgcctttggtccttatattttcatccctttttatccatgcatctttagctgagatggtgtgtgaggacctgccaaaggaagcgtgtgctttctcattagcttca

SEQ ID NO: 38403 - DNA, 258 bp, Glycine max
  Clone ID: LIB3056-007-Q1-N1-F2
ccaacgagggatcgatcattttaactcctgcttctctttgctttgggacccctcaagcttgttctggtctgtgcaggccaattttcttttgattaggtgcactctttgatctgatcaacaaaattcgagaattcaagtatgggaacggccattactctttagagccaaacagatcgcaggatcccttggactaatagccactaatgaaaaagtttcaaccaatggtatttaaccacttgcccaggagttcaaaaatct

SEQ ID NO: 38404 - DNA, 335 bp, Glycine max
  Clone ID: LIB3056-007-Q1-N1-F3
ctggcatatgctttccttgcccccatcgtgcactttagagcaaattgttaggaaagacatggcaagaacggggacatggatggaccttggacttgatgccgtaacaattggttttgaaatgggtgaagacatacttggtgaactgatggaggacaccattttgagccttgtgagtgaaagtccagaaagtaaatggttctctggttctatttgagggaaagaacaatgagaacaagtttcaattgttaaagacaacttaatggcttttgatcatgcaagatgttaaagggatttcatatgtgtgaagtgaaatggaaggttattagggattaaaa

SEQ ID NO: 38405 - DNA, 235 bp, Glycine max
  Clone ID: LIB3056-007-Q1-N1-F4
ggcacctaaactaccttggttggttttggtgcccaaggaaatcaagcctaaaatcggcttccgaagacttcagccacgccctgaaccaggaacccatccatttcactggcacagattatgtcaaagatgatttcagaggggaacggaattaagaaaatgggtttaaaggtgatcaacttggtcctgaccgtaaaaggttaaattttgaaaaaggaggcttttaacattgaaaaca

SEQ ID NO: 38406 - DNA, 422 bp, Glycine max
  Clone ID: LIB3056-007-Q1-N1-F5
aataggatcacctgcagatatatcttgggatattagtgtggatactcctcaggttgatgtcattgatgatgataatgccccaactgtagtgctggagaatcagacttctcttcctgattccctatctcaattgacaggaaacaaggaagaaaggagccagcttttagatacggagtacagaaataaaattcttgatgatctgtatgagatgaaatcctttttaaatcaacggttggctgaattgaggaatgaggaaactttgtccctgcaacatcaagtccaggcagttgcaccctttgtactacagcagtatgctgctgatgccattgaaacaatgcaaagtgatatttctttggcaatttcattgctgacaaataggaagacaagggatctgattatgattctcaactccaaaagatttc

SEQ ID NO: 38407 - DNA, 405 bp, Glycine max
  Clone ID: LIB3056-007-Q1-N1-F6
gcatctgaattctcagtcgcttctcgaaccctacttcttccgcggtgattgcatttgaattcctgtaatggcgattgataatatttttaaacatgaagccagtgaagaaaaaggagagcgggccagaatggcttcttttgttggagccatggctattgctgacttggtgaagacaaccttggggccaaagggaatggataaaattttgcagtcaacaggtagaggacgtgaagttactgtcactaatgatggtgctacaatcttgaagtccctccatattgataacccagctgctaaagtccttgttgacatatcaaaagtacaagatgatgaggttggggatggaactacctcagttgttgtattggctggtgaacttttaagggaggcagaaaagctggttgc

SEQ ID NO: 38408 - DNA, 345 bp, Glycine max
  Clone ID: LIB3056-007-Q1-N1-F7
gcctcgtcctacacacactgaccctagccactgacccagccacagcctacaccttcggatgcattcaagaggccacagggagctcactgccaccacaagggctaatgtgcctgggccgacgcccattattactcttggcccaaacacaaaaactgtaccaatctaccttgtctaattgcttgcccacctttaaaacactcaactttagtgacgtcactgagacttgggcccgtggcccatgccacgaggatcaagtataccagtcttatcaaaaatcctagacgatcttcactttactatgtgacatacctggctatgagagcctaccatgagaattgacgatat

SEQ ID NO: 38409 - DNA, 410 bp, Glycine max
  unsure (1)..(410): unsure at all n locations
  Clone ID: LIB3056-007-Q1-N1-F8
cgtttctatattacttgcaatagccactctactatatacattacaaattaattgaagcacacttgtcacatttacatttagtgacagatatatagtaacatcatcatgggtttgaagaacagtggcgttggtcatagagcatggagcctccttcgggcatcattgctgtgggcaagcaaaggtggcgtgttgaggcgcagggtggcgatggagctgcgtcttgtaccaaagtacttgaagcgactcggccacactgctcctccaagccacattcactactttgaacgcgagctctcgttcgacaagacccccatcttccatgtcaagatgtaccgtccaaccaccatgcgcttgcacttgcctcacattccttgcataaacccacatgttgattntaatgatgatgatga

SEQ ID NO: 38410 - DNA, 413 bp, Glycine max
  unsure (1)..(413): unsure at all n locations
  Clone ID: LIB3056-007-Q1-N1-F9
gtaaatgattccttcttcttcctttttttccccccttttcgggtttaggtacctattaacccttttcctccttcctcctttaccacaacggcctaactggaggtttaagttttcaaacctgggatccgattccataactgaaattcctcttctctctctctttctttgccgaatatggggccgcttgggccagcagttgaaggcggccaggcgccgaaggggcggcagcaacagccgcaaggagggtttggcctttccggaatcatacgcatggcagttttctggtacttcgcctccaaattcttttcccccaaaaaacctaccgaaccttccgctctcatctccaatctctatcagaaggcacagcctctggatatgtggctntatctttccgagtacgagaaagtcaatga

SEQ ID NO: 38411 - DNA, 325 bp, Glycine max
  Clone ID: LIB3056-007-Q1-N1-G1
gaaaaaaaaggacattcattcatctatggctacccttattgctcccagcaaccactctccccaagaagatgctgaagctctcagaaaggcttttgaaggatggggaactgatgagaacactgtcatagtaattttgggtcatagaactgtgtatcagaggcagcaaatcagaagagtttatgaggaaatttaccaggaggatcttgtgaagcgcctagagtctgagatcaaaggagactttgagaaagccgtgtaccgatggatactggaacctgcagatcgtgatgctgttttggccaatgttgccatcaagagtggcaaaaac

SEQ ID NO: 38412 - DNA, 336 bp, Glycine max
  Clone ID: LIB3056-007-Q1-N1-G11
agctagaagtttgcattcgtaggacaacccagtgtgatattggcctgaccaatttcatttattggggattttggccagatgccatccctggatatgccattgttgaacggacaagctttgaaatttctactgagactcatgatgagcttttatatgacaaggtgaagctgctttgaaatggggtacggttgtagactgatatatcagaaaacctgagatctgaaagcctttatcgctgataatttacatgtgatccttggcctgatgcttttttcgtctaattgggcaatgatctatgaaatgaccagcgcatgaatttaaagaactgtatgcata

SEQ ID NO: 38413 - DNA, 375 bp, Glycine max
  unsure (1)..(375): unsure at all n locations
  Clone ID: LIB3056-007-Q1-N1-G3
gcttttggtggttacacccctttggaacccttcctggttatgatgccttgacttctttctaaattctgtcccaccgtgaatggttctttttcttttttttctgggtctctggccataaaagtcctaccttttgtgggttggatggatctaatgccagtttgggtttctggggtgtctgtgttccctaacccactttccctccttttaggatactcgtctaaatgaatttttttttccttttttgctcaagttattttctgaatttgggtcttcagtttgcttatgctgttttggtggctttggaagtttgaaccaangggttcttagatccttttgcacttttccccttgctgaaatttttcagacatatcaaat

SEQ ID NO: 38414 - DNA, 386 bp, Glycine max
  Clone ID: LIB3056-007-Q1-N1-G6
ctaacactaccccgtacgccaaagtgtacctctctctattcttcttcctcgatctattcaatccccttgacacgatatccaaataaaaccaagacccagaaagtgatcaagataaagaaggacaaagaaggaatatacatacacacatatacatacacaccatgaaactcgttcggtctcccgaatcatccttacaagcttacatagacacggataaatcatgtgagaaattcaaggaaaccggtgtaccagagttgctatcagccatggctgcagggtggaacacgaaattcatagtggaatcatggtcctacagtggtgccatagctgcaagcgtatgcctagcagatgcagctcgcaacactggtgcaagacacgtgtgcata

SEQ ID NO: 38415 - DNA, 403 bp, Glycine max
  Clone ID: LIB3056-007-Q1-N1-G7
gtcttctcgatttccttctctataacacaacgctctcttctcttgcaaccaaagtacttgttccagtgtctactctactcaaaaaggatttgggacatcatgtgcagcgattcgaaaagtgaactttcttgcccaaccctagtcgtcatggagaatagtaacattcacaagcagaatctggatggtctctacaactcggttctgcttgaattgtctgcatctgatgattatgaagctttcaaaagagaggtggaggataaaggcttagatgtgaacgaggcacgcttttggtacggtagaagaattgggtcacagaagatgggatctgaaacgaggacccctctgatgattgcttctttgcttggaagcgccaaggtgctcaattatattcttcttcagaaag

SEQ ID NO: 38416 - DNA, 414 bp, Glycine max
  Clone ID: LIB3056-007-Q1-N1-G8
gaagaggtagccaatatgagacacaacgcactatttagaagatttataagtgctcttacacgtggaggacctggtggattgcctcgaccaattgaagtgcatgctcatgacccactacgatatgtcggtgatatgctaggctggttgcatcaggccttggcatctgaacgtgaacttgtagctgtattacttgatccagatacaattaccgattctggtccaaagcaattctccaataactctgaggatggctctgggaagacagaatctgacttgatgtttgctcttgatagaatttttgaaggagtatgttgaccatttaaattgagagttgaacaagttttacagtctcaaccaagtcttatagtatcctacaaactcagtagtacacttgaattttactgctacactatc

SEQ ID NO: 38417 - DNA, 208 bp, Glycine max
  Clone ID: LIB3056-007-Q1-N1-H1
gatctctggttccttccgcgcctcttctcagagtcgcttagtttacagtctttacgcgaatcctttacgagctcgagctgtgacagaacggagtcggagcaatgccgcgacgagtcggcggcgatggttctgaaattcgtggcggtggcgtcgattctggtcgccggattcgggggagtctcgattccgctggtcgggaagtcgcggc

SEQ ID NO: 38418 - DNA, 365 bp, Glycine max
  Clone ID: LIB3056-007-Q1-N1-H10
gtaagccatttcccaacacaattggcttcattcatgcatatcgcgatcggatttatggtggtgaagttcaagagtcctttcattattgcaagtataagcgtgatgaataccaacttacatatttgctgatgattgtgttccaaggtggctaactgcatcataccacatagattttgacaccatggcaggtgcagacaagtttggaaatatctattttgtgcggttgccacaagatggttcagatgagatagaagaagatcctactggtgggaggatcaagtgggagcagggaaagctgaatggagctcccaataaggtggaagaaattgtacagtttcacattggtgatgtcgtcacatgcttgc

SEQ ID NO: 38419 - DNA, 238 bp, Glycine max
  unsure (1)..(238): unsure at all n locations
  Clone ID: LIB3056-007-Q1-N1-H2
gagatccactttaccaccagacaagaatcacattggcnaagctcaatgacaagagccactaccacatccagccgagacatcacggagaagaacaagcgccgacgcgagcccaaaggcaaacaggctccaaaaacagccgttcctgatcatgtcacgacccacacccccaaggaagaggaagaagatgcccggccagcagctgtataggcaactgatagagaggtccctgaagcttgaa

SEQ ID NO: 38420 - DNA, 220 bp, Glycine max
  Clone ID: LIB3056-007-Q1-N1-H3
caattttcgctccaaaacatgccaaccctaaaccatgttcttacgttgacattcttacttctaccttcttggccatggcaacttcgtcaattgcccaaaaggccccttattttgcccgtcccttaaccggaaaatggttaggcctatgcggaaaacaaaggctcaaccacttcaaatttaatggccatgacatagtgagtggccgcaagcccacttcggt

SEQ ID NO: 38421 - DNA, 394 bp, Glycine max
  Clone ID: LIB3056-007-Q1-N1-H5
gtttctacatcagaggatgtgcttttggaaaactcgttggtttcaggatttgctgaagcctgtggagatatgggaattggcaatgttgctttccatggatcttgctccattgatgatgcaaatcatgaagaaatcacaactttgcactcagttcaagactatttgaccaagaggatggaagagagtcacagagggaaaactgatttggttgtgttctgcaatgaaggctctcaagctcttgagaatgttgacaggacacaatctgaaggggaagttttatccaatcttatcaattctgtggaggaatctggtgcaaaatatgccattctttatgtgtcagatccctcaaggtcaatccagtatccttcttacagggatctgcataggtttctag

SEQ ID NO: 38422 - DNA, 377 bp, Glycine max
  Clone ID: LIB3056-007-Q1-N1-H6
gatttttcctggacaaccagtcaaggattacattgactctgcagtgagacatgtgctactaagacagggtgttcttggtatcaaggttaagatcatgcttgattgtgatcctatagggcaactggttcctaaatctcaactttctgatcttgtcacgattctcacaccaaaaggagaggaagaatatgcacagcctgctgttgtttgggcagctgatatagtggacgctgtcgctctattgagaatgatgacaggtcgcgttgtgaaggataggatctgattactcatatcgcttctgtcaaggaatctgacgcagaatgtaccattctgtatgtgacagatgcctcaaggtcaatgcagtatccttcttacaggga

SEQ ID NO: 38423 - DNA, 412 bp, Glycine max
  Clone ID: LIB3056-007-Q1-N1-H7
ctgagttttccgttgcatattcgccgtttctccctatcctggatacagatttgcgatttggatctgagaagagaatggatcgagaaaatggcgacggcgacattgaaggcggtggtggcgccgacgacggtggttttcgctctccgattggtcgcaagtaccaccctgtcttggccaacgatcgcgcggtgctcgaaatgtcctccatggatcagggaccttcttcttcctcttccgcatttccagatcagcatcctaatatcagaaaagtaaatacaagtgtgaatggtagttcggatgctaaagaagagaacccttctcatgaaaaccaacctaatggatccctgcagcaggaatctaaactggaattgtttggttttgattctcttgtcaacattcttggtctcaaaag

SEQ ID NO: 38424 - DNA, 413 bp, Glycine max
  Clone ID: LIB3056-008-Q1-N1-A1
tatgacgtcgcatgcacccttccttaacctcgaaatccgcttcaacccctttcatcttctaatctcttctcttttccctgctaatcatggcaaccttgtcaactgtgaaggtttccccccattgcatgtttcaaacagcaagcaaaaatccatccactgttgccaccacaatgaagtgcccttcttcttttgggtctgtgaagagcatttccagatcttttggcttgaagtcatcctcttcatttagagtcactgccatggcttcttacaaggttaagctgattggcccagatggaacagagaacgagtttgaagccactgacgatacttacatcttagatgcagcagagagtgctggagttgaacttccttactcttgccgagccggagcatgctctacctgtgctgggaag

SEQ ID NO: 38425 - DNA, 412 bp, Glycine max
  Clone ID: LIB3056-008-Q1-N1-A10
cgataagaaacatttatcaagtatgggtttggacctttctgaagggaaaatcagaaacaacttggaggctggagttattgagcctgcaatgagcaaagtaaaaattattcagtttgcaactgaagctgccattactatccttcgaattgatgacatgatcaagcttatcaaggatgaaagtcaaaatgaggattaaagtataactgaatctatgaggcatctactccgcagtgcttacaaaagggagggttgtgttagtgtgcatttgaagagggtatctgcatttaatcttcaatgcccttgttcttgaaggacaactgctctaattattcttctgaaagtagctgtattatatttacatctttgcattttatattccaacaatttttaggcaaacatgtttggtcatgca

SEQ ID NO: 38426 - DNA, 414 bp, Glycine max
  Clone ID: LIB3056-008-Q1-N1-A11
ctcgagccgaatcggctcgaggtccaatcatgctttctactctctttactctttagtttaattttattttttgtatatattaaggcggcacagacccaagtgggtgtaagtcagtcttgggagtgagtcactcttcttgcataacccagatctgacaatatgcgaagaactggcttgttacatttgttatgccttgtcattgctttagtaagtgtgcaagcagaagatgcgtataagtattacacatggacggtgacttatggaactatttctccattgggtagtccccagcaggttattcttatcaatggtcagtttcctgggcctagacttgacttggtgactaatgagaatgtaattctcaaccttatcaacaagctggacgagccatttttactcacttggaacggtatt

SEQ ID NO: 38427 - DNA, 346 bp, Glycine max
  Clone ID: LIB3056-008-Q1-N1-A12
accgtgaccatggcggctgcgtttacaagtacaagtgcaacactgagactgtcaaatgttggagagagcagaggtttgcagctgcgtaagtgtaaccctaatcctaataagctgaaggttatgggggggtttggaggttgttctggagtggcagtgggtgtgagagaaagaaaaggaattggaagggttagggttcgggttcgggcgagttcttcgtcggacgaggcagtgagtgcgcagtcaaaagtgactcagaaagtattctttgacgtcagtattggaaatccagttgggaaagcttggggacgtattgtgattggactgtacggcgacgatgtcccccaaa

SEQ ID NO: 38428 - DNA, 370 bp, Glycine max
  Clone ID: LIB3056-008-Q1-N1-A2
gcttatagttatgagcggcagatctataagttactgtgcgggatcctctatatgctatactacatttactcaactgtcagtacatgcttatgctactcttgtcttaaccttatctgattcctagactatctgtatatgctgtagtgaattcgttattatgagtgacgcataatccatgccagagttggtcaacaaagctggcttgactctaccccttgctatgtatatgttggtccttcaactacttttacatgctgcacttatgcgatttctcagagcatggacgcatggacatttattgatacgagggttgtatggttgaggctgagtcattagaacttatgaaatacactcatggtaatcccatctt

SEQ ID NO: 38429 - DNA, 363 bp, Glycine max
  Clone ID: LIB3056-008-Q1-N1-A3
ggtgaatgcgtttaacaggacaatacagaaattagcgtgaaaaatgttgggtgtgttcagcagctccatagtgtcgccgccggaggagctcgttgccgccggcagccgtacaccgtcgccgaagatgacggcggcggcgctgcggaagtggttcgaggagaagaacccctccgcagtgtcggtggaggtcggagagcatgtccagctcgcttatacccaccagaacgagtcgccgtttcagcccagatcctttgctgtgaaggatgaggtattctgcttgtttgagggagcccttgacaatttgggcaacttgagacaacaatatggattggccaagtcaaccaatgaagtattggtggtcat

SEQ ID NO: 38430 - DNA, 396 bp, Glycine max
  unsure (1)..(396): unsure at all n locations
  Clone ID: LIB3056-008-Q1-N1-A4
cttcgtctcgtaaagaaaattcgaaagctcaatagagagaactcaattgaatcatcaaatgaggacagtgatttcgcgcttgatccattccacgccttccatttccaggctcaatgccacggtagtgtcaatcagcgggagaaatctctgcacagattctaacaaagttgatgggccattcaaagttgaagaagcagagactgtaaatgtgcctccactcccaacagaaaagttgcttgtgttgggagggaatgggtttgttggatcacacatttgtagagaagccttagaccgtgatttgtctgttgcgagtcttagcaggtctggtaggtcatccctgcatgattcctgngctaccaatgttgcttggtataaagggaatctcctttcaactga

SEQ ID NO: 38431 - DNA, 346 bp, Glycine max
  Clone ID: LIB3056-006-Q1-N1-C10
ctcgagccgagaagagccatggtgcacgtttccttctaccgaaactatgggaaaaccttcaagaagcctcgtcgtccgtacgagaaggagcgtttggacgccgagttgaagctggtcggtgagtacggacttcgctgcaagagggagttgtggagggttcagtacgctctcagccgcatccgtaacaacgccagaaatcttttgaccctcgacgagaagaacccgcgccgtatcttcgagggagaagcccttctccgaagaatgttccggtacggacttctcgatgagactcagaacaagctttgattacgtgttggctctcaccgtcgagaacttttctcgaacg

SEQ ID NO: 38432 - DNA, 374 bp, Glycine max
  Clone ID: LIB3056-008-Q1-N1-A5
ctccaatttccaaaccgaatcgaatttgaatttcgatttgaatttgaatttcattttcaacttccctgtgatgccttacacggtccgcgagaacctttcgatcgggaacatcggcgacgcggcggagattctcgaaaacggcgccgtccagagcgtgacacacatcctctccgtcctcagctccgcctccatctccttcttctccgaatggaaaaccactctctccatccccgccaaggagatcaccaaagtccacgcggcggacgccgccgccaaatcggcgctcccgccggagaagctcctctactctctcgagtacgccggccgcgacctcaagctcgtgcgcatggccgtgcctctcagagacaccgaga

SEQ ID NO: 38433 - DNA, 391 bp, Glycine max
  Clone ID: LIB3056-008-Q1-N1-A6
catttatcaactcactcatcaatctcgtttgttctcactaactattacttcatcatgtcgtcgagcacagttggtcaagtcatcaaatgcaaagctgcggtttcatgggaggcagggaagccacttgtgattgaagaagtagaggtggcaccaccacaagctggtgaagtgcgtttgaagatcctctacacctctctttgccacactgatgtttacttctgggaagccaagggccaaactccattgtttcctcgtatatttggtcatgaagctggagggattgcggagagcgtaagtgaaggtgtgactcatctcaaaccaggggaccatgctcatccagtggttaccgggggagtgtggagaatgccctcattgcaagtcacaggagagc

SEQ ID NO: 38434 - DNA, 382 bp, Glycine max
  Clone ID: LIB3056-008-Q1-N1-A7
gtgacgaagccatttcgccattatcactcctctcgcaccaaaagcgatgaaagtctagttgctgcttttctcgttttgatccgtacatttccctctgccgttgcgatctacgaagctgcgagattcttctgcctcgattgcgcacttcatgtttttacatttctggagtagctgaatcagatgaggcggatggtcttttgttaattacttcaacttaggtagacgaatctgccttggtgaatctgtcaagattgaagaatagactgcagattacttgtctggcagaaaggattcaaaatgagttggaacctacacatggagctccattacaataccattagctatccctataatacagcaggaagctctatcgaatattttg

SEQ ID NO: 38435 - DNA, 383 bp, Glycine max
  Clone ID: LIB3056-008-Q1-N1-A8
cgcataatctagggtttgttcgttggttcgcatcaatggcgatgaggagattctacaacgagatcaaggggaagagggtgagcgaggttccggagcacgtgaagccgatgctgtcgctgaactacatcaagaatgcgattcaccgaggctgcgataattaccatgccaagtacattgaaaccagctcccccgatcccatcttccatgtctgctacggcggcatgatcttctgctacctcgatgctctcccgcacgagcgccggcacctacagcacgcgcaggagcacgcccagcagcaccactgatccatccacttcagctggatcctggctgaatcgtaggtggttggcttgcttgatctttgatctaaaatctggaaaatc

SEQ ID NO: 38436 - DNA, 411 bp, Glycine max
  Clone ID: LIB3056-008-Q1-N1-A9
gaaaattttgaaaagtgttttgtgcagcagtactcaatgattcaccgacttgaaacaaataaactgcgaaatgtggcaaagttttttgctcatttacttggcacagatgctctaccttggcatgttttatcttatatacgcttgactgaagaggacacaacttcttcttcacgtatatttattaagattctcttccaggaattatcagaacatcttggaatccgactgctaaatgagcgattaaatgatctaacaatgcaagaatcttttgaatccatatttccaaaagataatccaaaaaacacacggttctgcattaacttctttacatctattggtcttggtggtcttaccgagaacctacgtgagtatttgaagaatatgccacgtcttatcatgcaacaacagaaa

SEQ ID NO: 38437 - DNA, 377 bp, Glycine max
  Clone ID: LIB3056-008-Q1-N1-B1
agccaatattggattctcttaacttcaaaggtggaaactaggcttcagatcaagggttctggtggacaggtctatgatggcttttggaacaaggcaggcacttttggcaacatttaacccgaaaataatcagtcactcgaaagctctaaaggggaaatggggcaaaaaggatcaaatcggctccgggactaatcacatgaaggaacagtttgggtacgcagcaagtgctggaagcataaacaatgaacataacataatgacaatgaacgtcatagagggtgacgtgctgcgactctacaagagcttcaagtctaatttgcaagttactccaaaaggaaagggcagcgtagtgctatgggcaatggaatacgagaaac

SEQ ID NO: 38438 - DNA, 390 bp, Glycine max
  Clone ID: LIB3056-008-Q1-N1-B10
gcaaatttcatcaaacaaaaaatgtgggacataagagacacagttctataatgtctcgagaaaaaaaaatgaccttatgatcaaataaagaaacttaccattttctgaaacaacggtatctgtagtcaaagcctggatcttatccagatttaatatctcaggaacaggtagtggaaaggggaccttgtttagtaatatttctcttggtgttgccaatgcctgaaatcaaacataccatacacaacgttggcattttacaaaaccacagcttcacactataaactcgcaacattaaacgagaattcatcacccgtaacgtaagcagccaatacccagcttaaacaagaaaggaccaaatgatagctatctttcaactcacaaatgtgattc

SEQ ID NO: 38439 - DNA, 349 bp, Glycine max
  Clone ID: LIB3056-008-Q1-N1-B11
ctcatattccaaaacgcagagccgaaccatgtcggacccattgaaccactctgacgccagccacacccacgaccgtagggacgacgacgacgactaacgacccaccgtttaccctgcgtcgggaaactccgttcagcatcccgtcaacttcgatctacggcggacctgaaccagcacccgctaagtcggagacccacgtgttccattccgctgacgtgacaccaggacacgtgtaccatgacttcaacaactactccgctccaccgactgcacccactttccaccatgatcctgatcgcgatcatgactccttcacccacgctgacgcacctgctcacgttgcagctga

SEQ ID NO: 38440 - DNA, 388 bp, Glycine max
  Clone ID: LIB3056-008-Q1-N1-B3
cacccgctcagaacgcagaggagcagaagcctaagccttcaacatggcgagagggttgaagaaacacttgaagaggctcaatgctccaaaacactggatgcttgacaagcttggtggggcctttgcaccgaagccatcatctggaccccacaagtccagggagtgtcttcctttgatccttatactacggaacaggctaaagtatgctctaacatatagagaagttattgccatcttgatgcagcgccatgttcttgttgatggcaaggttaggacagacaagacataccctgctggtttcatggatgttgattctattcccaaaacaaacgaaaatttccgtctactgtatgacacacaaggtcgattccgtcttcactctgtaagg

SEQ ID NO: 38441 - DNA, 384 bp, Glycine max
  Clone ID: LIB3056-004-Q1-N1-C5
atttattgcctggctcttccatccccaatatccgaactcaaacgcggagtggcagcagagaacaaaaacatgtcatcttggctgagatctgcggtcaacaaagccgtcgaggtcggcaacaaaaacaacctcactcgcaccgtcaagaactacgccgacaccgtcgttcaacacgccggccaagccgtggccgagggcgccaaaatcctacaggatcgcattagtgctcggaattacagaagtgttgcgcagaccattaaaaggttggaagaagctgctgtctcgtataggggacctgagagagtgcagttgcttagaagatgggtggttgtgcttcaagagattcagaagttgtccgaggcttcattggctgaaggcaaagag

SEQ ID NO: 38442 - DNA, 329 bp, Glycine max
  Clone ID: LIB3056-004-Q1-N1-C6
ttgaactatgttgttttagttgtgtaattgtgttaattgactcattacgggcacgggagtgcggcaattggttaagcagcctgattttgctaaggcagtgggttatagcagcagggtggattcattagtggtacttctatggaatttaactgggcctaaaatttgacaaaaaataaaactcttaaatggtagagggttataaacctacaatagaaaaaataaaaagagggttttgaaaaagacaagaatacaaacaaaaaatttaaatattaggttaatttattgtataaaaaaatttaaaattttattttaaaaaaagggggggcccc

SEQ ID NO: 38443 - DNA, 430 bp, Glycine max
  unsure (1)..(430): unsure at all n locations
  Clone ID: LIB3056-004-Q1-N1-C7
attccgactagccgcgttgactcggttccgtttttcattctcgcggatctaatattaaggaatagcttaagggcacattacaatgaaggcattgattctggttgggggatttggaacaaggctgaggccactgacactcagtttccctaagcctcttgttgattttgctaacaagcctatgattttgcatcagatagaagcccttaaggccattggagtgactgaggtagtgctagccatcaattaccaaccagaggttatgttgaatttcttgaaggattttgaatcaaagctcggcatcaagatcacatgttctcaggaaactgaaccactgggaacagcaggtcccctggctcttgctagggataagctgatagatgattctggagaaccctnttttgttctcaacagtgatgttatcagtgagtat

SEQ ID NO: 38444 - DNA, 387 bp, Glycine max
  Clone ID: LIB3056-004-Q1-N1-C8
atttcatctcagatttcgccttcgttcgtatcgaagaagaagaagatggggaaacagattgtgccggtgaaatcagtgatctacgcgctctcccctttccagcagaagataatgccgggtctctggaaggacttgcccacaaagattcaccacaaggtctccgagaattggatcagcgccactctcttgcttggtcccctcgtcggaacctacacgtatgttcagaactacctggaaaaggagaagctgtctcacaggtactgaactcatgcaagagctgattggataaccttctagtttgttgccttgatcttgtttagccacccaataatgtgacactgttgaaacttgctctaccgtttggttttgagatgtctgagtttgagc

SEQ ID NO: 38445 - DNA, 312 bp, Glycine max
  Clone ID: LIB3056-004-Q1-N1-C9
aactccaacttcaaaagggtttctctttacctctttcagtgcttctccctttgcccccagtttcgctgtctagcatttagttttaggtttttggagcttctcatattctcacatgggtcttctccttcatcatgctttgtgattaatttccttctcaagtttcaatctttcaaagaggaagaagaaaaagaggctcgtgggactggattcgcttgaatttcgtgttgggtatggcgtttgagagataaaaacttcattttttaaagccctgaaggaaagatggacagagttattcaacctcctttggttgat

SEQ ID NO: 38446 - DNA, 393 bp, Glycine max
  Clone ID: LIB3056-004-Q1-N1-D1
ccagaatacttcaggaggcagcaactgactgacaaatctgatgtttactcgtttggtgtggttctctttgaggtattgtgcgctcgaccagcattgaaccccacccttgctaaggagcaagtgagtctggctgagtgggcagctcattgctaccagaaaggcattcttgactcaattattgatccttatctaaagggaaaaatagctccagaatgcttcaagaagttcgccgagactgcgatgaagtgcgtggctgaccagggcattgataggccatccatgggtgatgtcttgtggaaccttgaatttgctttgcagctgcaagaaagtgcagaggaaagtggcaacggttttggtgacattcactgtgaagagccactgtacacagattct

SEQ ID NO: 38447 - DNA, 424 bp, Glycine max
  Clone ID: LIB3056-004-Q1-N1-D10
gcttgagattctttttgtagaggatttttttctttccgtaagtgtcaatgcattgttatgcttctggtctttctttctataaaaaccaaccctcgggtctttcatttcacatgttccatagttcttgctctgggtgggtaaagatggaaggtgctagtagagtcttatgcttgtttctggcggcatttttgtggtttaatgctcaacatgcttttgtaagttgtgctttgacatttgagttgcaaagcaaaattgctaaagccaaccaagagggaccttacctaggtttaatcataccaaattcttttgaactagaccctcttcttcagaatcctggctacacagctagtgacaccatcatagacttcgctggaaggagatttcgctttggagccattggtgacaagcctggtatactggtcat

SEQ ID NO: 38448 - DNA, 410 bp, Glycine max
  unsure (1)..(410): unsure at all n locations
  Clone ID: LIB3056-004-Q1-N1-D11
gggttttgggctggtgtttttgtgaagcttgagatcaggaattaatttcagtggttcagagaatggcaacggattcttcaaatggtaatggacatcaccagacaacaacaaagcagcctcctttgccatctcccctgcgcttttccaaattttttcagtccaacatgagaatcttggttactggaggagctggattcattgggtctcacttagttgacagattgatggaaaatgaaaaaaatgaggtcattgttgctgacaactacttcactggatccaaggataacctcaaaaagtggattggtcatccaagatttgagcttatccgtcatgatgtcacggagcctttattgatcgaggttgatcagatctaccatcttgcatgccctgcctctnctattttctacaaa

SEQ ID NO: 38449 - DNA, 352 bp, Glycine max
  Clone ID: LIB3056-004-Q1-N1-D12
gtctcaaaggtccacggctcctcactcctcgtacatagcctgcggtcttcactctcatctccaggtctccagtgagatgaaccctagcttcaattggtccctttaatcaattacctcttaattagtaattacttaatctcaattagcctttcactcttacacacaacaacatcatgggcgtcaaaagttgtgtcgaaagaggcattgcttgcatcattgcaggatgttccacacacgcacttgatctcatcaaggtccgtatgcagcttcacggcgaatacaatctgcccaaaccggatcaaaatctccgacgcgcactcgccttacaaaccggttcgaccgttcacgtggc

SEQ ID NO: 38450 - DNA, 401 bp, Glycine max
  Clone ID: LIB3056-004-Q1-N1-D2
ttcccaaccactacgccactactactcactcactgcagatctcaattgcatcgctgtccatggctaccatcgttagcatcaaggcccgccagatcttcgacagtcgtggcaatccaactgtcgaggtggatttgacttgctccgatggtacttttgccagagctgctgttccaagtggtgcatccactgggatttatgaggcccttgaattgagagatggaggatctgactaccttggaaagggtgtatcaaaggctgttgacaatgtgaacaccgtcattggccctgctttgattggcaaggacccaactgagcagactgctattgacaacttaatggttcaacagcttgatggaactgttaacgaattgggttggtgcaagcaaaaactaggagcaaat

SEQ ID NO: 38451 - DNA, 367 bp, Glycine max
  Clone ID: LIB3056-004-Q1-N1-D3
attcttcaattccatatattctctttctctttcttgatttgtgttgtgaaacagttaaaagtggtcttgatgtctgaggcattggaagaggttgttccttcaatgaaaggagggtgtgaagaagaagggttgaacctgaaggctactgagctgaggcttgggttgccagggtgtgagtcaccagagagggagggtgtgtttaagagtgtggtggtgtctggggccaagaggggtttttctgatgccattgatggaaactggaatggtggaagatctgaaaaagatgcccgttgcttggtttctccaacttcaaagggtgctgttagtgttagtgttagtgcttccaagtctcttactctcactgcaa

SEQ ID NO: 38452 - DNA, 373 bp, Glycine max
  unsure (1)..(373): unsure at all n locations
  Clone ID: LIB3056-004-Q1-N1-D4
cttacacttacccacagggaggcgaacagagaaactcagagacccgaaggcagatttcaagatgaagttcaacattgcgaatcccaccaccggttgtcagaagaagctggagatcgatgatgacctgaagctgcgagcattttgggacaagaggatctcacaagaggttgttggtgatgctctgggtgaggaattcaaaggttatgtcttcaaaattactggaggttgcgacaagcaaggatttccaatgaagcaaggagtgttgacccctggtcgtgttcgcctcttgctgcatagaggaactccttgtttccgtggttacggaaggcgcaatggagagcgtangatgaagtctgttcgtgggtgcattgtc

SEQ ID NO: 38453 - DNA, 429 bp, Glycine max
  unsure (1)..(429): unsure at all n locations
  Clone ID: LIB3056-004-Q1-N1-D5
caataattgttctctctgccatgggaaagacaactaacatgcttttgctggctggagaaaaagctgtaagctgtggagtaactaatgctgatagtattgatgagctcaacatagtaaaagatcttcatctcaggactgtggaacagcttggagtggacagaaatgttattgagaagcatctagaagaattggagcaacttctaaaggggatagctatgatgaaagagttgactccacggactcaagactatttagtttcatttggagagtgcatgtccactaggatatttgctgcatatcttaatacattaggagttaaggcccgccaatatgatgcatttgagatgggtattataacaactgatgacttcacaaatgctgacattntggaagcaacatatcctgctgttgcaaagaggttacatagtg

SEQ ID NO: 38454 - DNA, 384 bp, Glycine max
  unsure (1)..(384): unsure at all n locations
  Clone ID: LIB3056-004-Q1-N1-D6
acataagggataccacagcggcggtaacagaagaacaagcagagaatgggtcgagtgagaacgaagacggtgaagaaatcctctcggcaggtgatagagcgtcactactcgcgcatgaccctggacttccacacgaacaagaagcttctggaggaagtggcgataatcccgtcgaagaggctaaggaacaagatcgcggngttctcgacgcacctgatgaagcgcatccagaaaggccctgtgcgcggcatcntcctcaagctccaggaagaggagcgcgagcgccgcatggacttcgtccccgacgtcttcgncatcaacaccgaccacatcgaggtcgacaagggaaaccctgacatgcttcaactcctcggtatcaacgac

SEQ ID NO: 38455 - DNA, 423 bp, Glycine max
  Clone ID: LIB3056-004-Q1-N1-D8
ctcagggcctttgcaagttccacatcggttgagctttgtgtcaggtggcttagtgttatccttaattattcttgtggtcagtatttctcttctttctttcttcttttccaatgagctttgatttgtataactgtataagaatttgcgattcaatatattttttctattgttagctttttaatttcacttgtgacttcattgatttctattattatcatgttttagatttgttttgaagaaactgtgtgtttagattcaatttgaagcttagctagttcaagctttcttaaacgatttactatgcagattgctgaataatcaaactcatatgtgtcctaatttagtttttttcgaggatagcaatctcaattctcaacctctgaaatttgtcttcaacttattctgaatactgatctaagcttc

SEQ ID NO: 38456 - DNA, 267 bp, Glycine max
  unsure (1)..(267): unsure at all n locations
  Clone ID: LIB3056-004-Q1-N1-D9
atctcttcatttttctctctttgttacattttcattatggtgaccaagatatgatctgttatcaatatatattcaatgacatacacagtcccgagtgctaaacctgagtttaaagcttcagatcacaaccgatccaccattcacctcaccactttctcttcacaaggcanatctaacaagaaaaagtagtctctgaagccgatccagtgtcttgtgaatttggaatnggtggtgaaattagatctaaaaagccatagcaaatgtctt

SEQ ID NO: 38457 - DNA, 395 bp, Glycine max
  Clone ID: LIB3056-004-Q1-N1-E10
ctcgagccgtgccgtcctcttcaagagcttgccaaccttacattaattatgggtaaccgagatggaattgatgagatgtcaagcacaaatgcttctgttcttctctcggtacttaagttgattgacaagtatgatctgtatgggcaagtggcatatcctaaacatcacaaacaatatgatgttcctgacatatatcgcctagcagcaaagacaaagggtgttttcattaatccagctttcattgagccatttggtcttaccttaattgaggcagctgctcatggtttgccaattgttgctactaaaaatggaagtcctgttgatattcatagggtacttgacaatggtctgctcgtaaatccccatgatcagcagtctattgctgatgctctttt

SEQ ID NO: 38458 - DNA, 411 bp, Glycine max
  Clone ID: LIB3056-004-Q1-N1-E11
cttttatctgtctctctctctttggcgaatgaaccattctcttcctctccgatccgaaacccatcacttctaacacctgcagatctccctctctcaacctcactccacaccttacaccaaagtctcccaaactttccatcgcttattattccctttttactctctctctcttctcacctttctgcaattgcttctctaggggttctccgaggcgacggattttccaattgtatccggcctttcaattggattgaatgactgtatggcggcacctaggctatgacttcaagcatgttgagtggggagtgaaagtttatctttgggagatctcaatcttgcaattgtggtaccacaagttagaacccacttactcatatattaacagcttgaaggttgggactgacctattat

SEQ ID NO: 38459 - DNA, 400 bp, Glycine max
  Clone ID: LIB3056-004-Q1-N1-E12
cttctggaacatataaaaacctagtattttatctggaggcatgtgaatctggtagtatctttgaaggtcttcttactgaagatatcaatatttatgcaaccactgcttacaatgcagaagaaagtagttggcgaacatattgccacggggagtatcctagtcctaccccagaatatacaacctgtttgggtgacttgtacagtgttgcttgcatggaagacagagacagacacaatttgcgaacagaaactctgcaccaacaatataaataggttaaagagaggactatatctggagattcatactatggctctcacgtgatgcagtatggcgatgtaaggcttaacatagatgtgctattccattatttgcgtacagatcctgctaatgataatttcac

SEQ ID NO: 38460 - DNA, 415 bp, Glycine max
  Clone ID: LIB3056-004-Q1-N1-E2
gcgcaacgagtgcctttgatttcaacgtcgcgctctccgatgacgagaagtacgtccgccgcgagcacgagaaggaggccggagacggagccgccgctgaggagtcgcagatcgacattcaccccgccgtcaatcacaggctcaaggaaggggaaaccattaggattaatgtgaagcacaaatcaactagtggaactggcatgctctcagctgctggcctaaccagtgggcatgctgcgacaccaaagccaaaaatcgtgagtcttgctcccccaccaagtggagctgggaaaatcaagtctcctcttacacccccaccaaatgatccagttgctgctcggactgcttacaccagtcgtgctactggtcctaaagggacatacgaaagtgtgaaacattctaccaacgctttatc

SEQ ID NO: 38461 - DNA, 430 bp, Glycine max
  unsure (1)..(430): unsure at all n locations
  Clone ID: LIB3056-004-Q1-N1-E3
tggaaaactcttaaagataggtggcatttgctacaataagaaactagccaagactctcagaacaatatcagagtctggtccaaaagccttttatgaaggattgattggtcttaatttagttaaagatgtccagaatgctggagggatattgagcatgaaagacctcaaaagttacactgttaaacagaaggaacccatatctaatgatgttcttggtctaaagctccttggcatgcctcccccttcaggtgggcatccaatgatgctactgctgaacattctagatcaatataaactcccttctggcctttctggtgcccttggtttccatcgagaaattgaagctttgaagcatgtatttgccgtgagaatgaatcttggtgaccctgattntgtaaatataactggggttctttctgatatgctttct

SEQ ID NO: 38462 - DNA, 406 bp, Glycine max
  Clone ID: LIB3056-004-Q1-N1-E4
agaagatggctttaggtgttcctgctcttccgttgacatacgtggctcacgttctggcagttgttgccagcgtcttggtcgtggtctcggtcgtcaatttcaggggtggcttggcttgggattctgataacaagtccctcatcttcaacattcatccagttcttattgttattggcttactagttcatgggggtgaagctattataagttacaaagcttttcccctaaagaaggaagtgaagaaattgatacaccttgttttccatgccatcgcattaatacttggaatagttggaatttatactgccttcaagtttcacaatgaaagtgggattgccaatctctacagcttgcattcatggcttggaattggggttattgtcctttatggcattcagtggatata

SEQ ID NO: 38463 - DNA, 412 bp, Glycine max
  Clone ID: LIB3056-004-Q1-N1-E5
ctcaacctcatgaaccaggacaaaatcctcatggaaagctggtactatttgaaagatgcagtccttgaagggggtattccatttaacaaagcatatggaatgacagcctttgaataccatggaacggatccaaggtttaacaaggttttcaacaaggggatggctgatcactctaccattacaatgaagaaaattcttgagacctacacaggctttgagggacttaaatccctggttgatgttggtggaggaactggatctgtagtcaacatgattgtctcaaagtatgccactattaatggcattaattatgatttgccccatgtcattgaaaatgccccatcttatccaggagtggaacatgtcggtggagatatggttgtcactgttccaaaagctgatgctatcttta

SEQ ID NO: 38464 - DNA, 428 bp, Glycine max
  unsure (1)..(428): unsure at all n locations
  Clone ID: LIB3056-004-Q1-N1-E6
caaaattatctaaatctatttctgatctcagcttttcccttgaaagatgggaggtggtaaggacaaacacaatgaagaagagaaaggagttttctcacatcttgctcatggggtagctcaagctgctcatgggtaccctcctggggcataccctcctcaccaagggtacccacctggtcatggctaccctccacaaggcggctatcctccggctggttatccccctgctggctatcctcctgctgctggtggttaccctcctgctggttaccatccacatggttatcctggttcatctgctccacatggatctcatgcgcatgggcatggcggtatgggggcattgcttgctggtggtgctgctgctgcngcggctgcctttggggctcaccatgtntnccatggccaccatggatatggtggatatg

SEQ ID NO: 38465 - DNA, 359 bp, Glycine max
  Clone ID: LIB3056-004-Q1-N1-E7
gcgatactaacagggaggaagatgttaattgaagcaagaggagactgacaatctggggatacggctgctctagaatgacatctatgcaaaccgctgagacgctagtgctgcaggagccgcggagaacacatgagacactggagctacttgctagaagaaacagtgcagttccagggctacataatgaccacaggacgacaactgatggcaattcaagtcgagatactatctggctatgacggaccagcctactagatggggcaaagttcaggcattgtcatgaaccgccatgccgacagcatcagacatctggggcatgaagatcaaagaggtctagaaggcatgaacgctagaattat

SEQ ID NO: 38466 - DNA, 393 bp, Glycine max
  Clone ID: LIB3056-004-Q1-N1-E8
ctcgagccgattcggctcgaggtaaaaacagaagaacggtgttcgaatatggataatgtgatgcgactgataccatggcttcgatcactgccttgcagatcttattatttcgttcttcgaccttctcttatctatcgctctgccaatcctcttacttctacttcaccctcagaatgcaagtctgctctctcaatgagtctagggagtatgagattctatagtagaagatgtgacccacatgcccaatattaaggaccctgagcgttacaatgctgtcaaggatttgatggcggacagttgcagtgagcttccggattctgtcatatctgatcgttagaatgcactgtctagaaacactgatgacatagctggcaaggaggttgtggaaaatgt

SEQ ID NO: 38467 - DNA, 412 bp, Glycine max
  Clone ID: LIB3056-004-Q1-N1-F1
gcggaactcgtgcccggtgtgccgccacgagcttccttccgatttggaaactagagttccgagccagatcgacgaggaagcgataggattaacgatttggaggcttccaggaggcggattcgccgtagggcgattctccggcggccggagaaccggggagagtcatttgccggtggtgtacacggagatggacggtggacttaacacaaatggtggtgctcctaggagaatttctcgttctgttagaagcaatagggttagggaaagtcgagggtttggtagagtttttcgcaatttcttttcattctttggaagaattggttctagaaactcttcttcttcttctgaacatgggtctgtgagtagaagccgtagtcacgtgagttcaatgttcaatagaagctcgcggaga

SEQ ID NO: 38468 - DNA, 390 bp, Glycine max
  Clone ID: LIB3056-004-Q1-N1-F10
cggaaccattctaccagggccacaagagcaccaacgtgctgaacccggtgtttaagggtcagcaattggtgccactcaacgctgaccaatccgcggaactgaagaaggagaacgccactggggtgtacgagatcgatgtgaagatgtaccttagggtcaggttcaagttgggtgtcttcaagaccaagacgcttaagcccaaagtatcatgcgacttacgtgttcctttgaaaggaagcgccggtgctggtgtctttcagaccaccaagtgcgactgggatcgctgatggattcggattcacccgacccgacccgacccggttctgctttcacgtcatttctcccttttcttatttctttattggttagttttggacatagtcggcgtac

SEQ ID NO: 38469 - DNA, 376 bp, Glycine max
  unsure (1)..(376): unsure at all n locations
  Clone ID: LIB3056-004-Q1-N1-F11
cacaagcttttcacatggaaatcggctcccccgcattccttaccctcgaagactattcttccttcttcttccctgacatggatcccattcccaattccaatgtcaacaagcgtcgtgcaaacaacgaccagttcgacttaaatgactccgcattcagccacctcctcaattccatcatggatcctaaccatttccaacaccaatccaaaccaatccaattcgactcctccccgaccaagagagctcgccgtgacctcctcgttctcgaagacagccacctcaaccccgcctcggccccgcaacagcagcgccgtctctgggtcaaggaccgctccaaggactggtggcagcggtgcaacagcccggacttncccga

SEQ ID NO: 38470 - DNA, 379 bp, Glycine max
  Clone ID: LIB3056-004-Q1-N1-F12
cgcactgctctctcgtgttctgtgtctctctgactctccgttctctgttcaatcttcagatctcgaaaaatgcaaagcgcggctttcactttctctacctctctccatatccgcaaccctagccctaactcttggaggagaccctctctttctctccgactccacgccaaacacagcaacaacaacaacaacagtaacagcaccgaacgcgttaactccaatggcgtctcttacacttccttcactcgccgatcttggactcttcttccttcttcttctttcaaattcaggcctcttgcttcttcacctaatcgcgccgtcgaaaacgccgttcccgaaagcgcagcatcacacgtcgaaaacccgatcttcaaaactc

SEQ ID NO: 38471 - DNA, 391 bp, Glycine max
  Clone ID: LIB3056-004-Q1-N1-F2
ctttttcccatcgatctcgtttctcccaaattcgagtcttgcttcgtttccaagtcagcgttaagggtttagtttggcgcgtgcgatgaagatcgaggaattggacgatggagagtgtagtatggaccatgaagagaagtttgagaggcagattgtgagcgttgatgccaagagagcgttggttggagcaggtgctcggatcctgttctatcccacactcttgtataatgtgcttcgtaacaagattgaagctgagttcaggtggtgggatcaaattgacgagtttttgttactgggcgctgttacgttccccaaagacgttcctcacttgaagaagcttggtgtgggtggtgtgattactctcaacgagccctatgaaacctttgtgcca

SEQ ID NO: 38472 - DNA, 361 bp, Glycine max
  Clone ID: LIB3056-004-Q1-N1-F3
gaacgcacacgtacgcatgctggaacttgggatttagctttaggaattatccttatagatcgatgccagattgatacggataggtgatcctcaatacaatgagggtcaagctcagatgggaacaaatttgtttaaattgtctcttgatgatgttgaaactcctaaaggttccatgttggatcttaaaaattctcaatctaaaattgcactttccaaaaacacaagttggaggaactattctgcgtaatgatctattggcaaaatttttgacagaaggcaattttagaacaagtgttgatttgcagcgcactcattgtattaaaagaatgattaaaatggtggccacaagttggatttctga

SEQ ID NO: 38473 - DNA, 351 bp, Glycine max
  Clone ID: LIB3056-004-Q1-N1-F4
gctgagtatgtgacatacatgtttggttatgatatggtacgtcctatgaataccggtgctgaaggtgtggaaacagcactgaagttagcacgaaagtggggttacgaaaagaaaagaattcccaaagatgaggctattattgtctcatgttgtggctgcttccatggtcgtacactaggtgtcatatctttgagctgtgacaatgaagctacccgtggttttggtcctttattacctggcaatcttaaagttgattttggtgatgcagaaacccttgaacaaatttttaaagaaaaaggagagcacatagcttgattcattatataacctgtacaatgtgaagctggggtg

SEQ ID NO: 38474 - DNA, 423 bp, Glycine max
  Clone ID: LIB3056-004-Q1-N1-F6
cttaattccatactgctagtcatttcagatctactaggaatagagattcgcactgttgaaattactagaaatccatggctgctccacaggcaagagctcgagcggattacgattatctgataaaactttatttgatcgacgatagtgaggtcagaacaagtagccttcttgtacgagtctctgacggttctttcacaactagtagcatcacgactataggcattgattctaagatcagaaccattgagctggatggaaaacggatcaagctacaaatgtgggatactgcatgatcacgagcggttgacagctattacaaccgcttactatcgtgatgctatcggcatattgctagtcgatgacgtttcagacgaatcttgatttaacataatcaggaatcggattcggacattgtggcagctg

SEQ ID NO: 38475 - DNA, 418 bp, Glycine max
  Clone ID: LIB3056-004-Q1-N1-F7
gaaaaacccatagagattgatgccagattgagacaaagaatagatcctcaatacaatgaggttcaggctcagatggaaacaaatttgtttaaattgtctcttgatgatgttgaaactcctaaaggttccatgttggatcttaaaatttctcaatctaaaattgcacttcccaaaaacacagttggaggaactattctgcgtagtgatctattggcaaattttttgacagagggcaattttagagcaagtgttgatttgcagcgcactcatcgtattaaaggaatgattaaaatggtggccacagttggtattcctgagaatacaggcatagcattggcctgtgctatgaatagttcttttagggggcgtgccagttctgatatttacaccatctgctctcaagactgtgaattatgga

SEQ ID NO: 38476 - DNA, 409 bp, Glycine max
  unsure (1)..(409): unsure at all n locations
  Clone ID: LIB3056-004-Q1-N1-F8
cagaaatttcactaaaacccgtgcatgttattttgcttcattaatattaagagttctttagttttaggtttcagttatggcttccaaccaagaaataacagtgccttgcagatattgggtggacaatgaacgaaagcgtgtagttatggcggaagcaagtggacactttgtagatgttctctttagtttcctaacccttccattgggaactatcatccggcttgggaacacatttgggcaaccaatagagattggttgcattaacaatctattcaagagtgtggaagctctgaacccagatgttttctggaacgacatctgcaagcgaatgttgctttcttcgcgcaacccgttagaattctcttaccagagactaaaacttgaagtggatgatacgcaanccacaaag

SEQ ID NO: 38477 - DNA, 332 bp, Glycine max
  Clone ID: LIB3056-004-Q1-N1-G1
ccgacgactgtggctgtgacgttactctctatgggatcagagaggctgctgagttcgccaaggagtgggttccgttctgtaacatttatggggtcaagtcaaggtgtcccaaggtcttcttctctccctttggggaggaggatcaacacactcttcgccacgatggattcagtacacaacgagacctcatcaaggctaaatacgagaagatgcataaaaatatcgagaaatttggctcagaccctaaaaatcgtcgtattgtgagtgacagacctcctcgaattgagattataaatgaccaaccgggaatgccacttgttgtttatgtgtct

SEQ ID NO: 38478 - DNA, 229 bp, Glycine max
  Clone ID: LIB3056-004-Q1-N1-G11
atgggactgttcaacaaccttgacttggaggctgggcaggtggagctgagggtgaatccgcttgggatccgtaattgccagcgaggcccaacctgcaagtcaaggatatgggactgggcatcaacctagcccaaatgctgccaactatgcaccacaagctcaaccacactatggggtgatgtcaacctcactaacggatactaacgtcagtcaacctataggtgaatgc

SEQ ID NO: 38479 - DNA, 403 bp, Glycine max
  Clone ID: LIB3056-004-Q1-N1-G12
gcagttgtgaaaaaggctctttatcaaattgcatctcgacttcatgacaatccttcacgatctcagcatcttcttacttctgctgtttctggtgtatatcctgccggtggttcgctcattggtccaggtgctggagctccaattgtggggatagctcctcttgttggttcttatgggggatataaaggtgacactggtgactggccaccgcggtccatgtactcagctccaagggacgaggcatcttcaaaggaattttcagttcgattggtttgtccaacaggaaacattggaggtgtgataggaaaaggtggtatgataataaatcaaattaggcaagattctggggcaacaatcaaagttgatagttcaacaatagaaggggatgaatgcttaatagcca

SEQ ID NO: 38480 - DNA, 330 bp, Glycine max
  Clone ID: LIB3056-004-Q1-N1-G2
ggcggatcttctttagtcctttgtctccgttccgtcgtcaaccctacctttggatctgcgtttggccttcaggttttgaagtccgaaggacgaagaagaagagattcctgacagcgtaatcatgtttggtgtcgtaaggcgaagggttgcttctggcagcccgtctccttggttgctaggtcagtcagctcagaaaatccggtctggcccatcagtttctgctagagcttcttccattgtggaaaaagagattgtatttcgttcaagcggatgtggatttgtccagaacttcagtcatataactcctggaagctggattaattcaaagcc

SEQ ID NO: 38481 - DNA, 240 bp, Glycine max
  Clone ID: LIB3056-004-Q1-N1-G3
gctacttacttaacatacagagatatgcatgatgctatgcgccgtacatgtaccttggctctatggtgctcaccatactatagtgacagacagggcaggggaagacctaagttccagactcgtatcaaggatgctaacaatgggtcatggatttgctggtgccatggatgatacttattgctatataaggatgctgataacagggaacttactgcttatgagtttcgtgaatagctgaaa

SEQ ID NO: 38482 - DNA, 357 bp, Glycine max
  unsure (1)..(357): unsure at all n locations
  Clone ID: LIB3056-004-Q1-N1-G4
caagcttagttgtcaagttggaatcaacccatactccatggaatggactggtttggccaatagattactgagtaagggcaacgatattctgtgttgcgattatgctagttttgatggtttgattaccaagcaagttatgagcaagatggcagaaatgataaacagtctttgtggtggtgatgaaaaattgatgcgtgaaaggacacacctgctgttggcttgttgttcaagaatggcaatttgtaagaaagatgtttggagagttgaatgtggaatcccttctggatttccgctcacagttatttgtaatagcanttttaatgagatgctcattagatatagctatgaaaaattact

SEQ ID NO: 38483 - DNA, 385 bp, Glycine max
  Clone ID: LIB3056-004-Q1-N1-G6
agggaacaaataaagacggcagtttgcctgcactgatcagttcttagagcatgaattcagcatccccgcagtttgtttcctcaagaaggatgagtgtgtacgatccgatccaccagattagtatgtggggagaaggcttcaaaagtaatggaaatttaagtgcagccatgcctctaattgatgagacagacatgaagtttgatagtcagtcagaggatgcttctcatggtatactgggagagcctaataagtatgaccaagaagctaacaaacctactgataagatacaaagacgtcttgcacaaaatcgagaggctgctcgtaagagtcggttgaggaaaaaggcctatgtgcagcagttagaatcaagtcgtttgaagttgat

SEQ ID NO: 38484 - DNA, 381 bp, Glycine max
  unsure (1)..(381): unsure at all n locations
  Clone ID: LIB3056-004-Q1-N1-G7
caaaaacatcggctccattatggacattggctccccaacgaacgtgcgccatgttgcgcatgtcacctttgataggttcaatggtttcttgggcttgcctgttgagtttgaacctgaggtccccagaaggcctcctagtgctagtgcatctgtttttggagtttcaacagaatccatgcagttgtcgtatgactcaagagggaacagtgtgccaacaatactgctgttgatgcaaaggcatctgtatgttcaaggagggttgcacgtggaggggattttcagaattaacgcggacaatggtcaagaggaacatgttaaggatcaattgaatttgngagtggtcccagaaggcattgatgtacattgtttggcatggctaat

SEQ ID NO: 38485 - DNA, 428 bp, Glycine max
  Clone ID: LIB3056-004-Q1-N1-G8
gagagaactcagaaaaagggaggcatggtaatgtgtgctactgtgcttctcatcatgtgcttcgtaatgttggttctcttaatcattaaggaaattattttgtgatccatggtgatattcgatttatttttaatatttggccacctcttgttggtgtgacctttcatttgacaccaatatcccttgcctacccggatagtaacacgcagcttgccttggagaagaccaagcagttttggagtagacaagccacattaattttctcaatttttggttgtatgtagaggccacattaattttctcaattttttttttttgttttgcaattgggaagtaaggtggagtaggtgtgttagaggcacaagaactttagaagttggtgtggtatagtaggaaaggatatttaggtcagaaaatgtataatgttt

SEQ ID NO: 38486 - DNA, 357 bp, Glycine max
  Clone ID: LIB3056-004-Q1-N1-G9
aattgctccatactatggccgtggacctcatgacgaccggttacacccgaaacgacaacatcagtagtttcacaaccaaagccgaggaaaatgccgtccaagaagccgcttctggtctagagagcgtcgagaagctcatcagactcctctcccaaacccaagcccaagcccaagcccaccatcaattcaacaacaacaatagctctagtaatgaaatcgccatcgccatggactgcaaagccgtcgctgacgtggcagtctccaagttccagaaagtcatttccctcctcggccgaacccgtaccggccacgccaggttccgacgcgcccctcttcccaaccaacaccaacacaccc

SEQ ID NO: 38487 - DNA, 418 bp, Glycine max
  unsure (1)..(418): unsure at all n locations
  Clone ID: LIB3056-004-Q1-N1-H1
ccgctgcttccgatctgaggccatggcggggtctgggagttccatgctatattcctttcttctcttcacagtcattctctcacttcaagaaatgtaccgagggaaactagcatcatcagaattatacactatacttggagggttcgttagttctctcctatttcttgtgctcctaactttcattggaaattttcaggaaacaattggtgcaagaactggttggggagctgtcattgttgcagaagctgttgctctgattgctgcaagcactgtccaccgagtttgcatcactacatgtttcctgttctcggctgcattgctgtatgaggttaacaagatctctgggtcagcgctttcaacaagtgactccaggactaanaagcanagtggaagagcttaagcctatgtatgcttacta

SEQ ID NO: 38488 - DNA, 409 bp, Glycine max
  Clone ID: LIB3056-004-Q1-N1-H10
ctcgttcactctgcatctgactcctatagtttcctctgctaattccatatccccgttttccttcactcttgaaccccgattcatttccaccagcacaagaagcatggctgcaatatcaataccttctcacatgaaagcttggacatactctgagtatggaaaatccaaggaagttctcaagtttaatcagagtgtggctttgcctgaggtgaaggaagaccaggtcctcatcaaggtcgctgctgcttcccttaaccccattgatcataagagaatggaaggctatttcaagaacagcgactcccctttacctactgctccgggttatgatgttgctggagtggtggttaaagtgggaagtgaagtgaagaaatttaaggttggggatgaagtttatggtgatatcaat

SEQ ID NO: 38489 - DNA, 382 bp, Glycine max
  unsure (1)..(382): unsure at all n locations
  Clone ID: LIB3056-004-Q1-N1-H11
ttctgaactgtattacaatgaaaacactaaaggttttatgactgttacctcacttcttctggaaatgcttttgcttcatgtgcttcctctcattcttctggtcattattattaccataggatgcaggggtactagggaagcaaatgaaagatggagtaagattgatggggcgtggttctgagcagatcaagtggccaattcatctagaggtagacttgatttggaggctaatagtgtttagaggatcataatcatgccttttgattctcaagtctttggaaatgcttttcttaacactttntaaacttgcgtttatctaatgttgtaaatttcaccacggtcataattaatcatcattgntacttttgctaaatagtttatg

SEQ ID NO: 38490 - DNA, 338 bp, Glycine max
  unsure (1)..(338): unsure at all n locations
  Clone ID: LIB3056-004-Q1-N1-H12
caataaatccgtaatntgtgctccaacacannaaaatgaaagctacaatcaccattctcttgttgtctctactacttctcataacttcaccctccttggcaacccgacccgcatccaaccctgatcaagtcaagcacaacaaaaacaacaaccaaggtggtggtgctggtgctggtgctggcgggttctttggccctggaggagggttcagcatacccggttttggaaacgggtttggaaatggcatcataggaggaggatacggatccgggtatggaggtccgaatggaggctcctctaaaagtggtatcattagaccaaccgttgtgtgcaaagac

SEQ ID NO: 38491 - DNA, 405 bp, Glycine max
  Clone ID: LIB3056-004-Q1-N1-H2
gttgcagaatatgcatgttgcctaaaggctgatacgaattgggatgcttaagaggaacatccaacagacgtcaaggagttgggtaaaagcaaatggtcagaagattatggtgaagatgacattgatcaaactgaatgtatgaagggcaatataaatgctctgtctgggttaattcatcattatggcaaggagcgaaaatctgtacattggggtgatcagggtggcaagacaagggtttcaataagggctgcaaagaaggtaaatgctttgtctttagtgatcggacctggtgctggatataacctagaatctaattcattacctggagaggatagtccaacccgtaatagtgtggattcaaagaagcatagcatatttcaagaacatatccggtctgaacgagaa

SEQ ID NO: 38492 - DNA, 402 bp, Glycine max
  Clone ID: LIB3056-004-Q1-N1-H3
tccactccgaaaattattttgaacacccttcatcgatctaaatgggtttggcaggatttctcagaaaactccaagatatctattctaaacataagctcatatccactgttttcttctgtctcttggtctcacctccgtccttcttctataccttctatgccataagtcatttatccagtgtttttctcaccagtgaaggtgccgacaactctgtaggcgcaacctttcactatatcatagttattgcacaagttgaatgttttgccgttcttggcatatccatgttttccttgctaaagccactgctccatatcttagcctcagagcagaagatagacccagaagcggagttgagcatcaaaaacctcattttatcattgaccaaacccgcgagaagcttac

SEQ ID NO: 38493 - DNA, 412 bp, Glycine max
  Clone ID: LIB3056-004-Q1-N1-H4
gcgggctgagctgcggagcgtgcttcgagatcaaatgcgcaaacgacaagcagtggtgtcactccggcagcccttccatcttcatcaccgccaccaacttctgtccccctaactacgctcttccaaacgacaatggcggctggtgcaaccctcctcgccctcacttcgacctcgccatgcccatgttccttaaaatcgccgaataccgcgccggcatcgtgcctgtcgccttccgcagggtggcatgtaggaagcatggtgggatcaggttcacaataaacggtttccgttactttaacctggttttgatcagcaacgtagcgggtgcaggggatatcgtgcacgcctacgttaagggatcacgaacggggtggatgccaatgagcagaaactggggacagaactggcagtc

SEQ ID NO: 38494 - DNA, 371 bp, Glycine max
  Clone ID: LIB3056-004-Q1-N1-H5
gaaaatagacggaagtgagagaggaggcactgagcatccagcaatggccttgttctctgctaccgcaaccgttcttactcggaacctcgcattcgcttcctccaccaaactctgcctctctctcagtcactctcttctacatcacttcctttcattccccactcccaaatcatcaaaccctcgcaaccggatcgcaatctctctgcaaacaccacgcgctcaatccggcgcgtccgactacgtcttcttccataggctgtgctacgtcgtcagcgacaacatctacaccgatcagatcattcccgcggagtacctcaccctcgtgccttcgaagcccgacgagtacgagaagctcggcttctacgccctag

SEQ ID NO: 38495 - DNA, 398 bp, Glycine max
  Clone ID: LIB3056-004-Q1-N1-H6
cttctttctttttctgtgagcctttctttcaggttcttaacttgatcagtgtgcagtgtccaaatcataagggtagttgcaaattgcaatggctaagcatgatgttgagggtggttccttctctgcaaaggactaccatgatcctcctccagcaccgttgattgatgctgaggaactcacacagtggtccttctacagggctttgattgctgagttcattgccacaatgctcttcctttacatcacagtgctcactgtgattggttacaagagccagagtgatgtaaaggctgggggtgatgtgtgtggtggagttggcattcttggcattgcttgggcctttggtggcatgatcttcattctggtgtactgcactgctggaatctcaaggggtcaca

SEQ ID NO: 38496 - DNA, 425 bp, Glycine max
  Clone ID: LIB3056-004-Q1-N1-H7
gtgatgcgcacaatctgtgaagtcagatcaatctgcaaagcacaaggaaaagatggtaagaagaagaagcaaacacctgcaacgacaattattagatacagagaactgaacatttacagctacataagaaaataagcgagtctgattcctaaattcattagaatactgcacagaaaacatagaagcgagcaagtgaagtaattcatatatcgtgaatccttccgattcattccttttgattatatggtcgacattgaatagaatagaggcaagcgatatataaaaaatgtagatcggaggaaatccttgggagtgggtaatttaaacgggctcggtgtattgtaatgtgttgtgaagaaaagagatagagtaaaagatgagagatcgaaacccttaaacgtgaagaagaaaggaaagatgtgaga

SEQ ID NO: 38497 - DNA, 390 bp, Glycine max
  Clone ID: LIB3056-004-Q1-N1-H9
cgaagcccttcagcaaccatgtcgaggagaaaggttagggagccaaaggaggaaaatgtcactcttggtccagccgttagagacggtgaacatgttttcggcgtggctcgcatctttgcctccttcaacgacaccttcatccatgtcactgatttgtctgggagggaaacccttgttcgcatcactggtgggatgaaagttaaagctgacagagatgaatcatctccatatgctgctatgcttgcagcacaggatgttgctgccagatgtaaggaactgggcataactgctcttcatatcaggctccgtgccactggtggaaacaagaccaaaacacctggtcctggtgctcaatcagctcttcgagcccttgcacgttcaggaatgaaa

SEQ ID NO: 38498 - DNA, 363 bp, Glycine max
  Clone ID: LIB3056-005-Q1-N1-A1
actatcttgagattcatctcttttgggctggaaaaggtacttgttgcataccaactcaaggtacttatgggcccttaattcaagcaatccatgctatcccagatttcatacctactgttagtaacaaacctccaagtagtaacaacaataatatcggtctaattcttggaatcgtacttggagttggagttgtaagccgtttatcaatttttgcaattctctggatcattcggagaaaaagacatcgagatgatgaaaaagagcttctaggaattgatactaagcgctacactgtcagctattctgaggagaagaatgctacaaatgattgtaatctttgaaataagcttggaaagggaggtt

SEQ ID NO: 38499 - DNA, 261 bp, Glycine max
  Clone ID: LIB3056-005-Q1-N1-A10
gggaagactgtttatccaactgatcatattgctaaatcggaaactgggttggaggagtgcttattttgcagttattgtgttcatgttgtttttatttagttgaactttctgcaaactacaactgtattttgacttagcctcggctatttttccttggcttattagtcttatttttgcttgttaccatttaaatgtaaacaagtatggaaatgctatgagtacatcacaatcagattatgaaataagtttatttcgtcctcc

SEQ ID NO: 38500 - DNA, 386 bp, Glycine max
  Clone ID: LIB3056-005-Q1-N1-A11
ctggaaagaccagcgtgcaggttcttcaatcttctagagagagaaagttaaagattgaaatttggatcggagagagagagagagatggcgttgaatcctcaattgtttcctaatggaatgcccgttcctttcgtgaacgagatgtttgtgttggccagagacggcgtcgaattcgaggtcgataagattcctgcctctggaaatcatgggggtcatctcaaaacaaagggaatcgtgtatttgtcaaatattcggatggtcttcgttgctaaaagttcagttggacacttcactgcttttgatatgcctttgctttacatccatggtgaaaaatttaaccagcctatatttcacttgaacaatctttctggacatgttgagcctgt

SEQ ID NO: 38501 - DNA, 132 bp, Glycine max
  Clone ID: LIB3056-005-Q1-N1-A2
ctgcaatgcttgcctgtcaccctaagctccggccatatgacgagcatttaaaacattgacgcggcaggctaacgtagatgttccgaacaagtctattgagacactaggcatcaacccttggaggcttaacgg

SEQ ID NO: 38502 - DNA, 303 bp, Glycine max
  Clone ID: LIB3056-005-Q1-N1-A3
gttccttccattcctttcttccggatcacagggaaaataaaaaacaatggagttggacttgacaccaaagacagcagaagtgttgtttgagggagatggtggaggttactacacttggtggagttctaaagagccactgctggccaagaccaatgttggtgctggtcggttagtgcttcagcctcagggctttgctattgctgattattcagatatatccaaagtaggttatgtgcttcaagggaacgatggcgtagctgggatggccctgcggaacagtgctactagagaagaggtggttgt

SEQ ID NO: 38503 - DNA, 293 bp, Glycine max
  Clone ID: LIB3056-005-Q1-N1-A7
aaacggtgacggttcaaaacgagtagcgctagatacgggtagtcaaactaaatttgatttatcttactatagtaatttgaggaattcgcgtggaattctgcaatctgatcaagcactttggagtgatgcttccacaaagacaactgttcagaggtatttgggcttgataaaaggcttgcttggattaacatttaacggggaatttggaaaggctatgatgaagatgggcaacattgagttgaagactggtactgatggtgaaattcgcaagatatgttctgccatcaactaga

SEQ ID NO: 38504 - DNA, 394 bp, Glycine max
  Clone ID: LIB3056-005-Q1-N1-A8
aacacaaaccaagacatagcaaacgatccaaactctttttttcatttgcagcatcaaaatgagtggtagcaacgatggtagcggcagctggagctctaggtttttgaaggtggctagtgcagctgccgctacagccgccgttgccggcggtttatatgccattctttcatcctcaacctctgctagctctgagatggaagtgccgtttggcagcgcacggcgtgagagcaaagaacgtgacgatggtggctccgggtctcatcctcgcgagggtgccaccacggtcagtcgttggaagaaacctgagattggttgggtgaagctgaacgtggatggttcacgcgacccatacaaaagttgctccggtggttgtggtggtgttctgagggacgca

SEQ ID NO: 38505 - DNA, 216 bp, Glycine max
  Clone ID: LIB3056-005-Q1-N1-A9
gctttcgacgctgccgccgcttgttcccagccgggatgcttattattgctgctgggggttcttccccatggggtttgttggtggcagcttctgttctcctccgcagccggcggaagaaactgctccttctgcggcggacgcgccaccgtcaccgtctgctacgtcacagtaaccggcttcttcgctgactaattggatgcccgtggcagcggagaa

SEQ ID NO: 38506 - DNA, 64 bp, Glycine max
  Clone ID: LIB3056-005-Q1-N1-B1
ctcgagccttatcggttcgagggaaacttctgaggttgaggctaagagtaaaatcaggataagg

SEQ ID NO: 38507 - DNA, 394 bp, Glycine max
  Clone ID: LIB3056-005-Q1-N1-B11
tttcaatctctctctctctctgtctctctctctctagacttagattttgtgaatggctgaagtggaagagggacaggtcatcggcgtccacaccgttgatgagtggaagctgcaactccagaatgcaaaagactccaaaaaactgattgtggtggattttactgcttcctggtgtggtccatgccgttttatggccccagttcttgcagagattgcaaagaaaactcctgaattgatcttcctcaaagtggatgtggatgaagtgaggcctgttgctgaggaatattccattgaggccatgccaaccttcctcttcttgaaagatggcgagatcgtggacaaggtggttggtgctagtaaggatgaccttcaagccaccatagccaagcatgca

SEQ ID NO: 38508 - DNA, 349 bp, Glycine max
  Clone ID: LIB3056-005-Q1-N1-B12
gtttcttacctggtgctagatgaggcagacaggatgctggatatgggttttgaacctcaaattaggaaaattgtgaatgaggtgcctaatcgcaggcaaactctaatgtttactgcaacatggccaaaggaggttaggaaaattgcagctgatctgctagtcaagcctgtacaggtgaacattgggaatgtagatgagcttgttgctaataagtccattactcagcatgttgaagtattgccaccaatggagaaacaaagacggctggaacatattttgcggtcacaggattcaagatcaaaggtaattaatttttggtctaccaagaaaatgggtgatcaacttggtc

SEQ ID NO: 38509 - DNA, 303 bp, Glycine max
  Clone ID: LIB3056-005-Q1-N1-B3
ctggggttaatgcctgccactcctccggagaggcctaaaacgccaccttatgcccctccaagagctccttctcctaggcctccctctccaagggttccttctccaaggcctccatccccaagggctttccgagggcggcttctccgcgagttacctctcccaaagccacgtcttcccggattgctcatcaccacaaggaggttggccacagaccagaaccaactttgaggcaacagcaagcctcagctactaagatccagtctgtttacagaggttatatggccaggaaggagtttagagctc

SEQ ID NO: 38510 - DNA, 395 bp, Glycine max
  Clone ID: LIB3056-005-Q1-N1-B4
gaagaagaatgaacataagtcaaaagttcaatttagggtaacaaaatggaaaatcaagcctcatcatcgatgcagttcctcatcctcgaacaagttcagttcttgaaggtgaacgacgattccctcttgcagtgggaactcgtcgacgtcgttgacgccgaagaggagatagatggctttggttcttcggattcttccgtttcttggttcgaatccgattcttcgtcctgcgatgccccaattgaagaaattcgacaccttcttcttcattccgatgtgggtttacaagatcgacatgatggtgttgatgaatcggagcaagattcgggtttggaaaatcatcatcactaccattatcaccatgatgatgataatatgggcggtgatgataatga

SEQ ID NO: 38511 - DNA, 268 bp, Glycine max
  Clone ID: LIB3056-005-Q1-N1-B5
ctcgagccgcttgactcacttctctacaaccctctcaatatcttattatacccaacaaaaattcttcactcactctgaatttcttatggcatcatccgagaacgtagccagcattgagccatgtatgcttggtccccctgtcaccgattcatggctcgcagagttcttcgctcgtgacgcctatgccttaaccaaggctcttcagaagtctctctccgaggctgtcttgccggacgaggaagactactattctccctttctgcccaag

SEQ ID NO: 38512 - DNA, 408 bp, Glycine max
  unsure (1)..(408): unsure at all n locations
  Clone ID: LIB3056-005-Q1-N1-B6
gcctctacagcagagtcccagatctctgcattccaattcccatggctggtcgctatgacagtaaccccttcgatgaggaagaagttaaccccttctataatcctggaagtgttcccgctgccactaattcaaggctttcacctctgaagccagaacctgttgattataattatggctttggtgcgacagttgatatacctcttgattcatcaacggatttgaaaaagaaggagaaggaacttcaagccaaggaaactgaattgaggaaaagggaacccagaagtgaagacggagagaagaagctggttcacgagctggaattgttccttgaggaaaaagaattgggccgncttttttcccaataatccatcacgacattgctaatgaaattccaattcatcttcaaaa

SEQ ID NO: 38513 - DNA, 271 bp, Glycine max
  Clone ID: LIB3056-005-Q1-N1-B9
tcttgtgcgaggccgaggacaaatcctacatcaagcgcaccggaagcgcccacggttgggatatcgtcttctacattttcagcttcctcaagggcatttcgctcttcactctaattgtcttgattggcactggctggtccttcctcaaacccttccttcaagataaggaaaagaaggttctcatcattgtcatcccccttcaagtcattgccaacattgctcaagtcgttattgacgagagtgggccctttggccatgactgggttacctg

SEQ ID NO: 38514 - DNA, 354 bp, Glycine max
  Clone ID: LIB3056-005-Q1-N1-C1
ctcaagtggtgagaaaccgaatgaagagtgtgaggaatatccagaagatcaccaaggccatgaagatggttgccgcatccaagctgagagccgttcagaccagagctgaaaattcccgcggcctctggcagccgttcaccgctcttctcggcgacaatcccagtgctgatgttaagaaaaacgttgttgttaccatctcttcggacaaaggtctttgtggtggaatcaattccacgtctgtcaagataagcagggttttgtacaaattgaattctgggcctgataaagagacaaaatatgtcatattgggagagaaggctaaagctcaattggtgcgtgactcaaggaaacaca

SEQ ID NO: 38515 - DNA, 214 bp, Glycine max
  Clone ID: LIB3056-005-Q1-N1-C11
ctcaaaaagagtcaacaaactttcgatggagaccccagtaaagctcaactaatggaagcattgtgtcactctcaaacacgtgcaagggaagcagaggaagcagcaaaaaaagcctacgcagagaaagagcacattgttactctcatttttaaacaggcttcacaactttttgcctataagcaatggttacaattgctgcagctggaaacttctt

SEQ ID NO: 38516 - DNA, 354 bp, Glycine max
  Clone ID: LIB3056-005-Q1-N1-C3
cggctcgaggagagagagagagagagagagagagagaggagagagtattggcgcttcatcaagatgggtatttctagggattccatgcacaagaggcgtgccactggtggcaagaaaaaggcttggagaaagaagagaaagtatgagcttgggcgtcaggcagcaaacaccaagttatcaagcaacaagacaatcaagaggattcctgttagaggtggcaatgttaaatggagggcatttgagcttgatactggcaattactcatggggtagtgaagcagttactcgcaagactcgtattctagatagtgtttacaatgcctgaaacaacgagcttgtgcgaactcagaccctg

SEQ ID NO: 38517 - DNA, 186 bp, Glycine max
  Clone ID: LIB3056-005-Q1-N1-C4
cactactttacttgctagagacataactcaccacaaatgagcataagggtcttgtcttcatgtgtgaacttgtcttagagccactgactcgacttgtatattctctagcattgctttcagcatgatcattgccgatctataggcaacatcagactgctgctattctcttggctaccgactactact

SEQ ID NO: 38518 - DNA, 336 bp, Glycine max
  Clone ID: LIB3056-005-Q1-N1-C5
cacaactttatcaaaccaaaaaacacaacaaaagaaagaaagaaagaaacaaagagttccttgctttgtagtaagatatatcatcaaaaatggttttgtcttggactagaagaaacgttttccgccgtgcaaagaaggagaaggaacaaagtcaactattagaagttgaggttgtgattcccaaccactttcgctgtccggtgagtttggagctgatgacagatccggtgactttatcaaccggcattacctacgaccgtgtgagcatcgagaagtggatcgagggagaaaacagaacctggcccgtcaccaaaccagtgctgacaacctttgact

SEQ ID NO: 38519 - DNA, 266 bp, Glycine max
  Clone ID: LIB3056-005-Q1-N1-C7
tgatgggctcaatgctgctcagtctcagaccctttctcaccaccatcttctttctcacactcacagtgctcaaggtttcagcatcatcctcagtgattttctacaacaagtgccagcacccagtgtggcccgggatccagcccagcgcaggaaagcccgttctggcccgcggaggcttcaagctcgccccaaaccgggcctactccctccagctccccgctctatggtccgggcgcttctggggccgtcacggctgttccttcgac

SEQ ID NO: 38520 - DNA, 247 bp, Glycine max
  Clone ID: LIB3056-005-Q1-N1-C8
aaggtcccaaagtcacttagggaagattattaggggagggaaactggatgaatccacgaagaatggggctgtgacctcactcgccttcctcttgccactacaggacgcacagagggcccgcaagctcgttgaagacaccattgccgacaagcagagcaagctcgaccgcctacgaagcatagacaccgtcaacaacagcctcatgaacctatgtcacaagctgcccgaacagatcttccacgacatc

SEQ ID NO: 38521 - DNA, 281 bp, Glycine max
  Clone ID: LIB3056-005-Q1-N1-C9
gggagaaggagctgttgaagaactcattgattccatagcagagtcaaaaacaacaaatgaagagcaattgaataagagtgttgaaaccaaggatgatcggaaagaggaagcacctcaaatagatgagacaaataaaagatcgcatcaagaagagtcttcggagtcactggtctctctctccatttcttctaggaaaaaagcttcagatgccgagcctgaagttaacagtcctattcgactcgtatgcacaaaagaagcatttgggtcatccccaagtgttg

SEQ ID NO: 38522 - DNA, 362 bp, Glycine max
  unsure (1)..(362): unsure at all n locations
  Clone ID: LIB3056-005-Q1-N1-D1
cttagggttttaccgttaaacgattctcttcgtctttctctgttctgaaaccactaccgtttcgtcgtcaccatgccgcaaggggattacatagagcgtcacagaagagactatggctaccgtcttgatcacttcgagcggaagcgcaagaaagaggcgcgtcaagttcacaaacgttcttcaattgcccagaaggctctgggtattaagggcaaaatgattgccaagaaaaattatgctgaaaaggcacagatgaagaagactttggctatgcatgaagaatcaacgtctaggcgcaagactgatgataatgttcaggatggagctgttcctgcttatctncttgatcgtgataacacaac

SEQ ID NO: 38523 - DNA, 303 bp, Glycine max
  Clone ID: LIB3056-005-Q1-N1-D10
gaagagaataataatttttccgggaaaattcaagttccaatcggaatcggaatcggaatctgaaatgagtagtagggtttggtttctactattccttctgctgatctcgaaatgccatcaagtgtggggctcctacgcgggttccgctagctccatcgtcaacccttccaaggtcaaacagatttcctggaagccaagagctttcgtttatgaaggtttcctcacggatttggaatgcgaccacttgatctctttagccaaatcggagcttaagagatctgccgtagcggataatctctctgg

SEQ ID NO: 38524 - DNA, 301 bp, Glycine max
  Clone ID: LIB3056-005-Q1-N1-D12
ggggatctgaaccatctaatttcagccaccatgagtggtgtgacatgttgtcttcgtttccctgggcaactcaactcagatcttcgcaaacttgctgtgaatctcattcccttccctcgtctgcactttttcatggtgggttttgccccactcacatctcgtggttcccaacagtacagagctcttactgtacccgaattgacccaacaaatgtgggatgctaagaacatgatgtgtgcagctgatcctcgccatggtcgatacttgacagcttctgcgatgttccgtggtaagatgagca

SEQ ID NO: 38525 - DNA, 388 bp, Glycine max
  unsure (1)..(388): unsure at all n locations
  Clone ID: LIB3056-005-Q1-N1-D2
gtcaaatggaagcccaagggcctatgcctcgtccataaccagcaccagcacaactttggaagagggagctatcagttatcccctgtccgggttgagtgctacgtttgagaacaacgaggtcaccattttcgccactctcacactttcaaacgggaccacctnctttgtccacgtctggcaagatggccctctctctggaactaccccacgagagcatagccacgagacttcccaccaaaactccaaggaaatcttggatcttctctctggttcctncactcagccaaccggaaattcacgccaaagaggaagaaacacccatggagtgctaaatgctgtgagctggggcatattgatgccaacgggtgccataatcgcaaggtacttg

SEQ ID NO: 38526 - DNA, 358 bp, Glycine max
  Clone ID: LIB3056-005-Q1-N1-D3
aaacaaacaaacaacacagtttttcttgtctctatattcttccggccaccgcagatggcggcggagcacgacagctgctgctcgcgctgtgtcaccttcctaataaccataggcctcacagcgctcttcctatggctgagtctccgcgttgacgaaccaaaatgctacctcgactacatttacgttcctgccctcaacaaaaccctaaattccaattccactcacaacaaaaacaccacaatactcttcgctctcaagctcaccaacgggaacaaggacaaaggcatccaatacgacgacgttctgctctccttcagagtcttcgagagcgtcaacctcacgcgcccactcggcaacg

SEQ ID NO: 38527 - DNA, 320 bp, Glycine max
  Clone ID: LIB3056-005-Q1-N1-D5
cgtttgtgttgtgttgtgtctcataaacctcacactctcgctcactattctccagcctccactcgctgaaagagactcctactcgtcaatcattgtgaagaaaagaagtgaacactgactctgttattggtctgaatttcctcaccctatacaactagttttaacgaacatggaaactgaaaagtctaatgtttcaaaggctgaagaatttaaactccgtgccaatgaagcattcaatgctcgaaaattctcccaagccattgatctatatacacaagcaattgagctgaacagtcaaaagacagtgtacttttctaatc

SEQ ID NO: 38528 - DNA, 368 bp, Glycine max
  unsure (1)..(368): unsure at all n locations
  Clone ID: LIB3056-005-Q1-N1-D6
ctctgctggtatcgcaaacacaggatcttacattgattggatccttttagaggtgatctttgattccggtttcttgtgaagtggtaatgataatttgatgggtttatccatcatctcattttcctatatttgcgagtttatcttctcgcactgtagaatgctagaatcacctgtacaagaagatagctaaattcttttttctntgcctatctgngtgcttccttgtgtgctcttctttcctttttaagctgtcctcatgaatgattttgtaagtaattggggtttgtactttgtaggggtattggagggagggaagaagttgaagtatgctttaatgttttctgaaaaatgtggacacatcattgtca

SEQ ID NO: 38529 - DNA, 386 bp, Glycine max
  Clone ID: LIB3056-005-Q1-N1-D8
gctaggttgaaaatagtttggttttgtagtaagtgaggtgaggtgccaaaatggtgaagataactcttggtactttcgatgactcttttggtgttgcctctcttaaggcttatttggcagagttccatgcaactctgattttcgtgttcgctggtgttggttcagccatcgcttacaacgagcttacaaaagatgcagccttggatccaacggggctagtggcagtagctgtggcccatgcatttgcactgtttgtaggtgtctccgtcgcagccaacatctcgggtggccatttgaacccagcttgtacttttggattggccattggaggcaacatcaccctcattactggtttcttatactggattgcccagttgttgggttcc

SEQ ID NO: 38530 - DNA, 241 bp, Glycine max
  Clone ID: LIB3056-005-Q1-N1-D9
tttaaacacacttacagaatcagttacaattaggcgactttcactagctattacactatttgagggtgtttttttatattctactatatatgggggcaagctcgggtatagtactagaaatcacagttatatcatgcgaaaaccttcttgtcacggaagatccatacgttggctacagggctgactcgataaattgtggcacatttaatatagcgaatgattgagggagcaacaaatcgag

SEQ ID NO: 38531 - DNA, 332 bp, Glycine max
  unsure (1)..(332): unsure at all n locations
  Clone ID: LIB3056-005-Q1-N1-E1
gaaaactccttatggtcaccttcaaaaccagtcaaccaacgtgatgctgatctcatccatttttgggataagttccgcaaagctcctgagggttctctcaggaaaaatgcagctcagaaacaagttttggaagcaatgtctcatagaatgcatgtagacaacagtgtaaaacttattgggaagcttttatttggtattgaaaagggtccagaagtactcaacgctgttagaccggcaggatcggcacttgttgatgattggcactgccttaaaacccatgggaggactttngagacacattgtgggtccttggcttaatatggcatgaaaca

SEQ ID NO: 38532 - DNA, 402 bp, Glycine max
  Clone ID: LIB3056-005-Q1-N1-E10
ttacactcttgagatgtgcatgactggcctggatagagagaaagcacaggttttctacaaagaacaatctgcttcagctgccatgatgactgttaattccggcattagaaaaattcttccagattccgagatttgtgactttgactttgaaccatgtggttattcaatgaactctgttgaaggcgctgctgtttctacgattcatgttaccccagaagatggtttcagttatgcaagcttcgaaactgttggttatgacttcaaagcggtgaatctgaacgaaatggttcagagggtattggcatgtttcctccaaactgagttttctgttgcagttcatgtggatggtgcaagcaagtcgtttgagcagacctgctttctggatgttaagggatactgtcg

SEQ ID NO: 38533 - DNA, 397 bp, Glycine max
  Clone ID: LIB3056-005-Q1-N1-E11
ctcgagccgattcggctcgagatcaggaaaaccttattctgataaagattctgaattagttgaatctcctgcttccaaaggttctgtgattgcacatgaaatgacaccaatggaagttctggttcgcaataacaccaaggatatgatcaaaatgagtcttaatattacatgcagagatgtagctggggaaaattgtgtagatggtaccaaagcaactgttctatggactggtgttctgagtgatattactatggaaattcccccacttcaacaaattaaacactctttctgcctacattttcttgtccccggagagtatacattacttgctgcagcagtgattgatgatgcaaatgacattcttcgagctcgtgcaaagaccacttcagctgctgag

SEQ ID NO: 38534 - DNA, 384 bp, Glycine max
  Clone ID: LIB3056-005-Q1-N1-E12
cttgtctccagctacctccgttcctcgatctcattcaccagacagaacagaatgggttgtcaaggtagcaaggagaaaaaatcaaagacagaatttactacttcctatggatcagcagccactggtagtggtggtggtactagttacaacactgttcagcctccgccgtcgccaccaccacctactactactgctactactactaatcaggttcaaacatcagcagcacccaaaccacaatcaaaagcttctcctacagtgcagcagaaagcagacacgaggattctggggaaaccctttgacgacatataaaaatactacagtttagggaaggaattgggaagggggcaattcgggataacgtatctgtgcacggataatgcg

SEQ ID NO: 38535 - DNA, 355 bp, Glycine max
  Clone ID: LIB3056-005-Q1-N1-E2
gtggaaacctgatacacgattggcggtttggtatacaactaaatccacagctcatgggtatcgacctcaaatttttctttgttagagctggaatgatgggatggctacttatcaatttatctattcttatgaagagcattcaagatggtactttgagccagtcaatgattctctaccagctattctgtgcactatacatcctggactattttgtacatgaagagtacatgacatccacctgcgacataattgcatagagactgagcttcatgttggtctttggagatttagtgtggattcctttctctttcaacatacaaggatggtggctcttgatgaacaatgtggaatttac

SEQ ID NO: 38536 - DNA, 392 bp, Glycine max
  Clone ID: LIB3056-005-Q1-N1-E3
gaacaaaaaggttttctgtcggtccaatattgacaacttggtgggaagtaacgaattttccttggactatgacttcttggttgtagcagtaggagcacaagtaaacacttttaacacccctggtgtcaaggagaactgtcattttctgaaggatgttgaggatgctcagaagattagactgtctgtgattgattgctttgagaaggctgttcttcctagtctatctgatgatgagcgaaggtcaaatcttcattttgtagttgttggaggaggtccaactggtgtggaatttgcagccgagctggatgattatgttcaagaagatctaattaaactatattcaactggtaaaagataaggtgaaattacattggttcaaattggagatcata

SEQ ID NO: 38537 - DNA, 368 bp, Glycine max
  Clone ID: LIB3056-005-Q1-N1-E4
tgtaaatccaagattggcaaagatattagagaaagttgcagtcaaacgagagcttatagtttgtcttgcaaacaccaatgtgaaggagatgctggaggtctggttcaccaatatcaagagagttggcataaccaattatctagttgctgctttagacgatgagactgcaaagttttgtgaatcaaatcaagtcccagtgtataaaagagatccagatgatggtagttgatatcattggaagaacaaggagcaaccatgctggctctggtcttaaatttcgtattctaagagaatttttgcagttgggatataacggtcttctatcaaatggtgatattggacatttgcagaatccttttgatcatcta

SEQ ID NO: 38538 - DNA, 320 bp, Glycine max
  Clone ID: LIB3056-005-Q1-N1-E5
ctcaccgcacgcactagcactgtctctcactgaaacttgttcgcacattttcacggatctaactaagttatcgccatgaatcgccaccacgatcccaatcccttcgaagaagaagaagtcaatcctttttcgaatggcactactgctcctgcatcaaagtcacgtattccaccattagcatctgagtcactgggctttggtcaaaggcatgatgctacagttgatattcctttggatactacaaatgactccaagaaaaaaggtcaagagctagcagcttgggaagcagatttaaaacggatagagaaaggaataaaaag

SEQ ID NO: 38539 - DNA, 418 bp, Glycine max
  unsure (1)..(418): unsure at all n locations
  Clone ID: LIB3056-005-Q1-N1-E6
ccccgactcaattacaccacgcttctaaattctgagaatgaattcgtaagatcgaagcaatagcctttttctctgccgccactggtttcgatcccacacccacaaacgcaaaccctccatcctttgaatgctcttgcgttttcctttcactacctcattcctaactcacacacacacaacgggtgatatcaatgtcgactcctgctaggaagaggctcatgagagatttcaagaggctgcaacaagacccgcctgcaggaatcagcggggcaccttaagataacaacataatgctggggaacgctgtcatanttggtcctgatgatactccatgggatggaggcacgtttaagttgactctccaatttactgaggattatccaaacaagccaccaactgtacgatttggctctcgaat

SEQ ID NO: 38540 - DNA, 366 bp, Glycine max
  Clone ID: LIB3056-005-Q1-N1-E7
gcggaatctgctagaattttctaataatggcgaaagacgttgagcaggtcacagagcaaggtgaatactccgcgaaggactaccatgaccctcctccggcaccgttgatcgacccagatgagctcacaaagtggtccttgtacagagccgccatagctgagttcatagcaacactcctttttctttacatcaccgtgttgaccattattggctacaagagacagagtgacaccaaaatccccggtaacaccgaatgtgacggcgttggcattttgggcatcgcttgggcctttcgtggcatgatcttcatccttggttactgcactgccggaatctctgggggacacatcaaccctgcggtgacat

SEQ ID NO: 38541 - DNA, 397 bp, Glycine max
  Clone ID: LIB3056-005-Q1-N1-E8
gtgaatgcgtataaaaggaaaataaagaaattagcgtcaaaatgttgggtgtgttcagcagctccatagtgtcgccgccggacgagctcgtggccgccggcagccgtactccgtcgccgaagatgacggcggcggcgctgcggaagcggttcgaggagaagaacccctccgccgtgtcggtggaggtcggagagcatgtccagctcgcttatacccaccacaacgagtcgccgtttcagcccagatcctttgctgtcaaggatgaggtgttctgcttgtttgagggagcccttgacaatttgggaaacttgagacaacaatatggactggccaagtcagtcaatgaagtattgttggtcattgaagcttacaaagctttgcgtgaccgaacacccta

SEQ ID NO: 38542 - DNA, 387 bp, Glycine max
  unsure (1)..(387): unsure at all n locations
  Clone ID: LIB3056-005-Q1-N1-E9
gccttctctctctctctctctctctctctctctctgtgttgcgttttgtgaaatcttattcgacatggcgtcacgggacaacaagaaggcgtcgagcagccgagccggcagaattcgcaccctctccgatctgaaccgtccctccgccgattccgacagcgactccgatggccctcaggagtactacaccggcggcgaaaagagtggaatgcttgtccaggatccttcaaagggaaatgatgtggatgaaattttcaatcaagctaggcaacttggggctgttgaaaggcctcttgatcagcttcaggagcctncaaggtcaactagctntactggaactggcaggttactcttcgggggaaactacacgatctactaataatcagc

SEQ ID NO: 38543 - DNA, 401 bp, Glycine max
  Clone ID: LIB3056-005-Q1-N1-F10
ggcagttgttgatctgtcaaagtgtgttgaaaatcttgaaatgacaaagtctcgattactagagacagagcaacatctagctgaagttaaatcacaattgacttctgctcaaagatcaaacagcctggctgagacgcaactaaaatgtatgacagaatcatacaggtcaattgaagcacgcgcaaaggagtttgaaactgagcttaatcatctgcaaatgaagacagaaactctggagaatgaacttgaagatgaaaagagggctcatgaagaagctttggctaagtacaaggagctagaagaacaactacaaaggaatgagagctcagctgctgataatgacattaagactaagcaggagagagacttggaagctgctgctgaaaagttagctgagtgtc

SEQ ID NO: 38544 - DNA, 317 bp, Glycine max
  Clone ID: LIB3056-005-Q1-N1-F11
ctctagccgaattaatcatcttacttatttattgtccgaaaatggttgatttacattggaaatcaaagatgccaagttccgacatgccttccaaaactctaaaactctctctctccgacaacaagtccttaccctctttgcaactacccttccgcaccacagatatctctcacgccgcaccttctgtttgcgccacttacgactactatctccgtcttcctcaactcagaaagctttggaactcctcagattttcctaattggaacaacgaaccaatcttaaaacctatcttgcaagctctcgaaatcaccttccgc

SEQ ID NO: 38545 - DNA, 377 bp, Glycine max
  Clone ID: LIB3056-005-Q1-N1-F12
ctcgagccgcaagatttcagttccaaacaaaacttatcaaaatctcatatactgattcagttctatacataaccatcgagatttattatcaaaccaaaaattctcaaaatctcttcacctctgtgatgaccatggaatacagaaccttagaactcaacatcatatccgcaaaggacatcaagaacgttaacctcttctccaagatggacgtatacgccgtcgttacgctctccggcgaccctctccaccctcagggcgccaccacccacgtccacaaagacgccggcagcaaccccacgtggaactaccccgtgaaattctccgtcaacgaatcgctggccaaggagaatcgtttgtctcttgagatcaagctcgtc

SEQ ID NO: 38546 - DNA, 335 bp, Glycine max
  Clone ID: LIB3056-005-Q1-N1-F3
atttaatccggtattggaatgtgggggtgtccgtgaggggtgaggaggaacttaatttgaacgtttccctctgactctgaggttacaagaatcctccacccaacctctgttgtgtttccggagattaggatctggttgggaaactgctatagaagtgtacggatctcatccatcggggcatagcttgtttttgcgatgggttggagatacaacgctggattggtcctcatagtcactgttgttattatttgggtcaccttcgccgaagttacccaggatatttttacagattataagcagccctttgcaggaacatatcttggagcttctcttat

SEQ ID NO: 38547 - DNA, 312 bp, Glycine max
  Clone ID: LIB3056-005-Q1-N1-F4
ctctcactcagattcagcaattttctattttcttctctcatggcttcagattccaaaaaggatttccctgctgatgacaaagctggaacagcagagaataaagcatccaaagatgaaacgtcatctaaagattctccagcagcacaaagagctactacagctacttctggacctgcaactggtttttcaagcaacccttttgatttctctgcaatgtctggcctggtcaatgatccaagtatcaaggaattggctgaacagatagcaaaagatccatcattcaaccagatggctgagcaacttcagaaaact

SEQ ID NO: 38548 - DNA, 387 bp, Glycine max
  Clone ID: LIB3056-005-Q1-N1-F5
tggatccgtgccccttcgtgcggatcctcgtcggaaacctcgccgtcaagtccccggcatcatcaaagccctcttctttctccggcaaagtccacccttcgagttcccccttcttctgcaagatcctactccagggacttgattcgaattccacttctcctagagtgtccagtgtccctctgatatcagactccgacccacaccctcactccttcgccggctcctttgatttctccaaagcccaaatcttgaaagcctcgaagaagcccctgatgaagatctccgtctacaagggcccgaaaactccctcctgcgtcttcacctccggcaaactatagtgcaaagtttcaatacccctcgatctcaccttggccgagtcacgcccct

SEQ ID NO: 38549 - DNA, 387 bp, Glycine max
  Clone ID: LIB3056-005-Q1-N1-F7
ggggattgggaaatcctaaattgacatttagtgacaatgtgaagctgagggctggcaataacaagctttctttacttagcgttgcagttggtctcccgaatgttggtgtgcactttgaaacatggaatgcgggggtgttaggcccagtcactctgaagggtctaaatgaggggactcgagacttgtcccggcagaaatggtcttacaaggttggactgaaaggtgaatccttgagccttcacaccgaaagtgggagtagctctgtggaatggatacaaggatcattaatggctaaaaaacaacctttgacatggtacaagacaacttttagcgcaccggccggcaatgatccattggctctagatttgggaagcatgggaaagggtg

SEQ ID NO: 38550 - DNA, 284 bp, Glycine max
  Clone ID: LIB3056-005-Q1-N1-F8
ctattattctctttttcatttctcagtttcgtttccaaaataacattccttctggatagagaatctataagctttttgctcatagcctcacaagcaccttgctttctctttttcccattgttagtggtttttattgatttctgggtcagtgtggttttttcctgttccacgagtttggtcaagtttccagtgaatttgttaggtgtgatccatgtagccgatctcacctagtgggataaggctttgttgttgttgttgtggtggtggttatgtgattattgggc

SEQ ID NO: 38551 - DNA, 386 bp, Glycine max
  Clone ID: LIB3056-005-Q1-N1-F9
gtgaccctgaacgaaacaggggagcaatactacatttgctccgttggatcacactgttccgctggccagaaactggcaattaacgttaacagagcttcttctaccggtccttcccctgcacctcaacccagaggaagtggttctccaccaagggctagccctgtccccacacaagcaccacaagccagtagccccactcctccaccaaggtctgcaccagcacctgcttttggtccatcctctgaaccagctactttcattgttggagaaaccgctggctggattgttcctggcaacgcttccttttacacagcttgggcctctggcaaaaacttcagggttggagacgtccttgtgttcaactacgcatcaaatacacacaacgt

SEQ ID NO: 38552 - DNA, 297 bp, Glycine max
  unsure (1)..(297): unsure at all n locations
  Clone ID: LIB3056-005-Q1-N1-G11
aattgatttgaggaaactgaatatgggtgagccttttgctcaaggagcttttgggaaactttaccgaggtacttacaatggtgaagatgttgcaatcaaaatcttggagaggcctgaaaatgatccagcaaaggctcaattgatggaacaacagttccagcaggaggtcacaatgttggccacactaaagcattctaacatagttcgtttcattggtgcatgccgcaagccaatggtatggtgcattgtaactgagtatgccaaaggtggttcagttcgacaattnttaatgaagcg

SEQ ID NO: 38553 - DNA, 386 bp, Glycine max
  Clone ID: LIB3056-005-Q1-N1-G12
catatacacacttggctgaggaaggtcggaaaagaaaatggagttgttcttctacacggtgttcggtggtttggccgcggttgtggcagttatggagctgagcaagaacaacaaggatcgaatcaacacctcttccgcattcaattccttcaagaacaactacctcctcgtctattccctcatgatggctggagattggctacaaggtccatatgtctactacctttacagtacatatggatacgggaaaggggacataggacaactcttcattgctggttttggatcttccatgctctttggaacaattgtcggatctctagctgacaaacaaggccggaagagggcttgtgtgacttactgcataacctacattttgagttgca

SEQ ID NO: 38554 - DNA, 346 bp, Glycine max
  Clone ID: LIB3056-005-Q1-N1-G2
tgctgaccccaaccccaaccccaacgacgccatcaagattcttcccttcgagttcgtttccctcgaggcctgtctggaggctgcttgtagcgtcttggaaaacgaggctaaaaccttggagcaggaagctcatcccgccttggacaagctcaccttcaagatcagtactctcaatttggaacgcgttcgtcaaattaagagccgattagtcgccatcaccggtcgtgttcagaaggtcaaggatgaattggagcacctgctcgatgacgacgaagatatggctgaaatgtatctctctgaaaagctagccgaacaacaggtcttggatggcgacgtcctcgtcgtc

SEQ ID NO: 38555 - DNA, 340 bp, Glycine max
  Clone ID: LIB3056-005-Q1-N1-G3
cggaatctaaggcaaagcaaaccaaacatcttgaatcatgggttcaacaggtgagactcagattaccccaacccacgtatctgatgaagaagcaaaccttttcgccatgcaactagccagtgcttctgtccttccaatgatcctcaaatcagcacttgagcttgatctgttggaaatcatagccaaggctggccctggtgttcatctttcccccactgacatttgttctcaacttccaacacaaaacccttatgcaccccgtatgttggaccgtatattgcgcctattggcttgctacaatatcctgtgtttttctctgcagactcttcctgatggcaag

SEQ ID NO: 38556 - DNA, 381 bp, Glycine max
  Clone ID: LIB3056-005-Q1-N1-G4
gcaatcgggagagagagcaaggtcccttctcaaggatggcgatgactgtacacgtccttgctgggttggcttttatgttttcagctagcattttgcttcagattctggcatgtgcaatatataacaattggtggccaatgttatcagctctgatgtatgtgctggttcctatgccttgcttattctttggaggtggatccactcaatttctaatgagccgtgatggtggtggttggatagatgctgcaaaatttttgactggagcatcagctgttgggagcatagccattcctataatcctcaagcacgctcatatgattgagacaggcgcgatgctcattgaacttgtatcgttcttcatttttatatgtactgttttat

SEQ ID NO: 38557 - DNA, 363 bp, Glycine max
  unsure (1)..(363): unsure at all n locations
  Clone ID: LIB3056-005-Q1-N1-G5
attcattctattcatacaccgagagagagagagagagagagagggaagcagcgaaaccaagagaagagtggcatcgttggttttcgcttcaattcatcttcgctcaaccttctacaatgttctaccgaggtaaatttgctgatggtggtgatgggcgtgaaatggctgcaaaacgccagcgcactgttgatccaggatcttcattctatggtgcttccactggttccaatnttatgtacaacccatctccttatggatatgtcagccaaccttctcctccaccttttcctgttgttcggctacgtggccttccctttgattgtactgaaactgatgtggcttgattctttcatgggctaaaca

SEQ ID NO: 38558 - DNA, 368 bp, Glycine max
  unsure (1)..(368): unsure at all n locations
  Clone ID: LIB3056-005-Q1-N1-G6
agcatggaaagaaggaattagaaaagcctcaagtgaagtgtacttgcatcttgttcttggaaaatttcagttgaatatggggactccaagaggaatagctcttctcagtttcacatccttcttgttttggagctcagcgaatgctttgctttctcctaagggagtgaactttgaagtgcaagctttaatgggcataaaatattctctagaagatccacatggtgttctagataattgggatggggatgcaattgatccattgagcttgactatggtcacatgttcttctgaaaacttggtcattggactgggcacttctagtcaaaggttatcttggactctatctncaagcataagcaacttaacca

SEQ ID NO: 38559 - DNA, 152 bp, Glycine max
  Clone ID: LIB3056-005-Q1-N1-G7
gtgttacgcgttaacatccactctattaagcaaatgtgctcctagtagtacattaaaaatttaaattaaattaaaattaccaaatattaatataaaatggggtcctggcaggttccaggttccaggttccagagtaatgcacaacgaatctt

SEQ ID NO: 38560 - DNA, 368 bp, Glycine max
  Clone ID: LIB3056-005-Q1-N1-G8
gtcactcttcttgcataacccagatctgcagacaatatgcgaagaactggcttgttacatttgttatgccttgtcattgctttagtaagtgtgcaagcagaagatgcgtataagtattacacatggacggtgacttatggaactatttctccattgggtagtccccagcaggttattcttatcaatggtcagtttcctgggcctagacttgacttggtgactaatgagaatgtaattctcaaccttatcaacaagctggacgagccatttttactcacttggaacggtattaaacaaaggaagaattcatggcaagatggagttttgggaaccaactgtcccattccttcagactcaaattacacata

SEQ ID NO: 38561 - DNA, 314 bp, Glycine max
  Clone ID: LIB3056-005-Q1-N1-G9
gttccttcattcatcttcatttctcttgcaagtaactcttcagattttggttttttgttccctatccgctctctcttattcacttcttgaacatggcggtggcaccttacaccaccggttccgcacctcgtttttctcctcctcctacttctagtgttgccacaaagctctattccggattgaaacttcaagctgcgagttctttccgagcggcaagacctaacgtaaccgctgaattttatggaaaagttcacaacactcttcactgtcggtatgctaaccacaatccatcaatggcacgtattcgaatgatg

SEQ ID NO: 38562 - DNA, 336 bp, Glycine max
  Clone ID: LIB3056-005-Q1-N1-H1
gaatttctatctatctcttgtttcaatttcaacaacggttactcctttttcgttttgagtttcaatcaagccatcatcatgtctaccgcatcgcaacccaaggccaagaaaacggcgtcgtccaagaagcccctctcccaccctcccttcgccgtgatgatagcagaggcgattgcgagtctgaaagagagaaccggttcgagccaatacgcgataaccaaattcatcgaaaggaaacacaaggagttgcctgcaacctacaagaagcttgtcctcgttcatctcaagaaatctgttgctgctggcgagcttggtaaagtgaaaaactccttttag

SEQ ID NO: 38563 - DNA, 271 bp, Glycine max
  Clone ID: LIB3056-005-Q1-N1-H10
ccgaggcgaagagaagagaaaaattaagatggaggggaaggagcaggatgtgtcgctgggagcgaacaagttcccggagagacagccgattgggacggcggcgcagagccaagacgacggcaaggactaccaggagccggcgccggcgccactggttgacccgacggagtttacgtcatggtccttttacagagcaaggatagcagagtttggggccacttttctggttctatacatcactgtcttaaccgtcatgggaatcgccggggct

SEQ ID NO: 38564 - DNA, 245 bp, Glycine max
  Clone ID: LIB3056-005-Q1-N1-H11
gttggtagaagaatttctctgggattgactttgattgaatgattgttcactgttcatgctaaacaacacaaaccaaacggctattctgactactttttgatcctgtttctaatcttgtttctaggatcctgtctgtctctcttggtttggtttattagacttgtgctgtgtctaagtctttctttcagggctctgtgagttgaattcaggtgtcacatccaaggcaacaaatcaagatgatgagt

SEQ ID NO: 38565 - DNA, 367 bp, Glycine max
  Clone ID: LIB3056-005-Q1-N1-H12
ctgttatctacaaccaagataagccatgggatgaccattggatcttttgggtaggaccatttattgcggcagccattgcagccttctaccaccagttcatcttgagagcaggtgcagccaaggcccttggatcattcaagagtaacccccataattgagatgtctttctcttcatgatgatggctctagtggaaagaagataattggagagatggatgttgatatggcaagtttaataatgggaaatgcttttggctatgcatttgcaacgtttctttgaccctctcgattatgtcttcaagattgtggataagtgtacattaaagtctctctcatgacaggtggagccttttgcactttcctctgt

SEQ ID NO: 38566 - DNA, 388 bp, Glycine max
  unsure (1)..(388): unsure at all n locations
  Clone ID: LIB3056-005-Q1-N1-H2
gacagcttcaaagtgcaaggttgcaagcacctncaccttcttactgttgttctcttctcctcattcatattttccatttttatttttctaataaaacaaaacaacataagcaccgttcttttctctctgaaattcccatattcatcacttctgagctctggacgagatccctctctctcccattccagatctcgccatcagattcaccctttcattttaagcaaagtcataacttgaagaaggttcatggctgctccaccggcaagggctcgtgccgattacgattatctcataaagcttctcttgatcggtgacagcggtgttggaaaaagttgcctccttctgcgtttctccgatgggtctttcaccactagtttcatcacaacta

SEQ ID NO: 38567 - DNA, 252 bp, Glycine max
  Clone ID: LIB3056-005-Q1-N1-H3
caacacacgggtagctgctgctgctaacaatgtgacatttgtgacaccaaacattgctttacttcaagcacattctttcaacaagtgcaaaggagtgtacaccacatatttcccttgcaaccctgctttcaagttcaactacactggcactccaccaagcaacatctttgtgagtagtggcactaagacagtggggttgccatacaacaccagtgtgcagctggtacttcaagacacaagcattattggagc

SEQ ID NO: 38568 - DNA, 399 bp, Glycine max
  Clone ID: LIB3056-005-Q1-N1-H4
cacactctcttaaccaatccggggatttcgccctctgcaaacgcctctcttccattctgcacaaagtaatggggttttcgaaggaacagcttcttgcacgattgaaggagcttcttattaatttttcccagtatgagcatccggctattttgacagtggaggaaggggaaaagtatgttggacatttggggggtggagtgagtaaaaatttgtttttgaaggacaagaaacagcggttttatcttgtttctgctttaaaggataccaaagtggatataaaagtgttatctcagcggcttggtttaggaaaaggaggtctaagaatggtgccttcagaggctttaggtgaaatacttcaggtgtccttgggttgtggcactccatttgcagtggtgaatg

SEQ ID NO: 38569 - DNA, 320 bp, Glycine max
  Clone ID: LIB3056-005-Q1-N1-H5
gttttagttgttaattaaatatatagatagaaatccaaggaagaagatgaagcagtttgccgtccaaaacgtcgtcgctccatcccacgatgagattagcgtggtttgccccaagccccgccgcctcggcctcttcaacttccccgtgaacgatccccctgttagacccttctactggcatctcaggtataattaatttgttcttcttggtctaattctaatattgttcttgttattattattattattattcagctttgcgtactcttttttctttgcagttgccaggctgagccatgtgattcaaactcgtctggttc

SEQ ID NO: 38570 - DNA, 284 bp, Glycine max
  Clone ID: LIB3056-005-Q1-N1-H6
gccatacaaaactaccacagctgaagaggacactgccaagtactccaacaacaacaacttctacagcttcaagaaggatggctacaacaccaaccaaaatgagttgagtgaaacaacaagactcacaggcactttttacaccaacaacaactacttctacagcggtaaggatgcttttgctaaacagaatgaattgagtgatacaaagtacactgaaagtgggtacaacacggaaaatcagaacagcaacaacaactacttctacaacggcaaggatgcttttg

SEQ ID NO: 38571 - DNA, 196 bp, Glycine max
  Clone ID: LIB3056-005-Q1-N1-H7
gacatcccattcgtcaacacgcgcagctatccctgcatcgtgctctaactctggctctgcctcgagctctaggtcagacgacatcgccgagtactactaagggcggcatgacagcgcgctgagcactgagccgaagcacttgctcatggcccagttcttcggagttaagggttcctacgcttggctgtacgcacgg

SEQ ID NO: 38572 - DNA, 401 bp, Glycine max
  Clone ID: LIB3056-005-Q1-N1-H9
gccagttctccaccccggaagatatgcttgctggaacctctaaccgtcctcgaacttttagacagaaagaagctgagcatgaagaggaagaacccgaggaagtatctggagatgaatctggagaagaatctgaagaagaacttctaagaaaaaaggaacacaaggggttattgagattgaaaatcccaacttagtaaagccaaagaccttgaaagctagagatgttgatgttggaaaaacaacagaactttcaaggcgtgaaagggaggagatagagaaacagagagcccatgagcgctatatgaggctgcaagagcaaggaaaaacagaacaagcaaagaaagatttagaacgtttagctcttatacgtcagcaaaaggaagatgctgcttaaaagcgag

SEQ ID NO: 38573 - DNA, 256 bp, Glycine max
  Clone ID: LIB3056-006-Q1-N1-A1
catgtccttatgtgagtggcattgctgctttgctcaaggctaggcaatcacattggagtcccgttgccatatggtactcttttatgaccactgcttctgttcatgacaataccatcaagcctttcagatgtgcactcaattccagagccttaactccttatgaacatggaacttgacccatgatgcctagaatagctcttgatcactgattagtctatgatatttagccactcgactacattgaattcctgtactg

SEQ ID NO: 38574 - DNA, 355 bp, Glycine max
  unsure (1)..(355): unsure at all n locations
  Clone ID: LIB3056-006-Q1-N1-A10
aaaaaaagcatccaaaaatggttctcacatccactgccactcacccagatgaaaaagaccagagcctaaactctacttttgcttccagatatgtgcgtgatcctattccaaaattcaagatgccagagaaatcaataccaaaggatgcagcttttcagataataaacgatgagttgatgttggatggtgcaccaaggctcaacttggcttcgtttgtgaccacttggatggagcctgagtgtgacaagctcataatggcttcacttaacaaaaactatgttgatatggatgagtatcctgtcaccactgagctncagaaccgttgtgttaatataatagcaaatctattccatgc

SEQ ID NO: 38575 - DNA, 357 bp, Glycine max
  unsure (1)..(357): unsure at all n locations
  Clone ID: LIB3056-006-Q1-N1-A11
gaatcattaaagataagattatattgctaagaagaaaaaatatgaaggttggctacttgcttggtgccctcttggctttgacatcaactggtggctctgcctatgaccctagtcctctgcaagatttttgtgtggcagccaaagaaaaagatggtgtatttgtgaacgggaaattctgcaaggaccccaagcttgtcaaagcagaagatttcttcagacatgttgaacctgggaaaactgaccacccactaagttcaaacgtgactcangtgtttgttgatcaactaccgggactaaacacgctcggcataggtttggctcgcatagattttgcttcaaaaggtttgaacgctcccc

SEQ ID NO: 38576 - DNA, 435 bp, Glycine max
  Clone ID: LIB3056-006-Q1-N1-A12
atagggttcacccttcggccaaaaccaccgccaacgccgggcccaagccgacattccccgctacgaaatcccagctttccggcgccaaccgccccacctaccgcccccaaccgcagcaccaccgccgccgccgtagtcgcggatgtgcctccaccctctgctgctggctcctcctgatcctcctcttcctcctcctcctcgtcggtgccgccggcaccgtcctctactttctctaccgtccccaacgacccacattctccgtcacctccctaaaactctcttccttcaacctcaccactccctccaccatcagcgccaagtttgacctcactctctcaacaactaaccctaacgacaaaatcatcttctcctacgaccctacctccgtatcccttctctacggcgacaccgccgtcgccagcaccaccatcccct

SEQ ID NO: 38577 - DNA, 420 bp, Glycine max
  unsure (1)..(420): unsure at all n locations
  Clone ID: LIB3056-006-Q1-N1-A2
gtgattcaaatataaattcagcaggtgttgtgagattaaatatttatcaagtatgtttgttgtgtgcaatgaaattccattgctatattcgggatctatctatcatgtgcaaactccacaaaagattttgttcaaatattatacaaaggtccttgaggtacatgtaccagatgataaagaaacaaatgcactccataagtcttaattcagatattcagccgattcttgtattggagaaggaagaagtagaattggcttggatttcatgctttcgtacaagtactgaagagaaagcaatcacaacataaggagttgctgtcaantttgaggtcaagggtgtcatcacatagaatatctgagagtgtctcacctgaactgaaatatgcaattaataccaagaattctctttgctatggaaca

SEQ ID NO: 38578 - DNA, 308 bp, Glycine max
  Clone ID: LIB3056-006-Q1-N1-A3
aacaaatcacaactgatcaacacaaactattgcaatggcgtctgctcagtgtgagaaacccaacaccacagttgaagttagccaaccaaaaagccatcacaaacccaatactgcaattgaagtatgccaacccaaaacccagcacagctcgttcggccaaaaattatctgagataactagcaaggctttcaaagggcgtcatggcagcaaccaaaatcaacttcaatactatagccaaactcaggttgagtcccaaggccacaatggcaccaaaacagaggctcactactatggccaaactcagaccc

SEQ ID NO: 38579 - DNA, 411 bp, Glycine max
  unsure (1)..(411): unsure at all n locations
  Clone ID: LIB3056-006-Q1-N1-A4
agagcaatggactcataagagtagtaactaagaaaaaaaaaggtttgtgatttatttagttcggcacttccgatcatttctccgcggcggcgcaaccgattcccccgccgcatatggccaaaggtcgaaaattaacgaccagccggagcgaacgttttttgggaacctacgcctatagccaaggctccgncgccttgaacccatcggatctccgggaagaagatgtctggggcgccggagatgacgccggcgatcgcgagtgggagccacacgccgncgncttaaacaacagtggcgtcagccggcgccggattccacgtgacacggangagcaccggcgcgtgggtggactgtcactggcgtttgaagctccggctagtggctcgtcgccgaggatggtgcaccagtttc

SEQ ID NO: 38580 - DNA, 329 bp, Glycine max
  Clone ID: LIB3056-006-Q1-N1-A5
caaggagagtacgagcctccagaaagaccagatcctgatacagattatatcagagctcaggaggcccggcgcttcatgatttatgttcatgccaagatgatgatagttgatgatgaatacataatcgttggatctgccaacataaaccagagatcaatggatggtgccagagattctgagattgccatgggtgcttatcaaccatttcatttggctgccaggcagcctgccaggggacagatccatggtttccgcatgtcgttgtggtatgagcaccttggcttgcttcatgactctttcctccaccctgaaaatgaagaatgtattaa

SEQ ID NO: 38581 - DNA, 261 bp, Glycine max
  Clone ID: LIB3056-006-Q1-N1-A6
ctagcagacggagcacatgtacaacatagcgctcgtactagtgtcttccttaaagaacaacaacattcataatactgagcctactgaatcatataacactagtaccagctatggataatactacaggattggctcacacagatgaaagcttggatctgactgtaagcattgcagcactggactcggcatctgtaacagtggaactgtacatctcagcgcgtcctatcaggctacgcactacatgagagcaacaggacaaaa

SEQ ID NO: 38582 - DNA, 368 bp, Glycine max
  Clone ID: LIB3056-006-Q1-N1-A7
ttcacagtggtggaccccactaaacgtgctggtacagagttgaaatacgggccatatgaaaatcatcccccgtattcatattctcctgtacttattcattttgaaaataacaatgcatttgctgttgttgaggagctagaacgtgaaattgaaatatctcactggggaagcattcaagtcactgagcaatatagcttggtccatgctggtgctcgacataaaggtgttttttcaagggttgaatatcaaactaaaccaggtggtactggtgtttcttcatttaaacatcttttagcgaaactaccccctagggttcactcagtatactaacaggatggaataagaaatatttcctcttcacatctacg

SEQ ID NO: 38583 - DNA, 419 bp, Glycine max
  unsure (1)..(419): unsure at all n locations
  Clone ID: LIB3056-006-Q1-N1-A8
ctcacacgtccctattttggcacccttgccaattgggttcgctgtgttcttggtgcacttggccacaatcccaatcactggaactggtatcaaccctgcacgaagtctcggtgctgccatcatcttcaacaaagaccttggctgggatgatcactggatcttctgggttggacctttcgttggtgcagctcttgcggctctttaccaccaagttgtaatcagagccattcccttcaaatccagttaattaattggattacaacgattcgtggtcaatcaaagttgggtaaataaaaagacccaaaccaagcaagtttctggttntattttatgatatatcgtcatctgttttcttttctccttattnntctctctttntttattattaaaccttctattttgtatgtaaattatgtaat

SEQ ID NO: 38584 - DNA, 341 bp, Glycine max
  Clone ID: LIB3056-006-Q1-N1-A9
acaaacctctctaatttttgaagcttattattcccaatctcgatatgcaaatctttggggaaaccctaactgggcagacgatcaccttggaggtggaatcctctgacaccatcgacaacgtgaaagccaaaatccaagacaaggagggcattcctccggatcaacagcgtttaatcttcgccggaaaacagctcgaagacggcagaaccctcgccgactacaacatccaaaaagagtccacgcttcaacttggtcctccgccttcgcggcgggattgcaaatcttcgtcaaaacccttactggcaaaacaatcacgcctgaaggtggagtccttccgacac

SEQ ID NO: 38585 - DNA, 417 bp, Glycine max
  Clone ID: LIB3056-006-Q1-N1-B1
ctcaacttttcttcattttctctcttcctctcaccgagtgacgcactcgcctcgactcgtacggactccgatcccccccgagtcacactcagccagcaccaccgcccgatccgacgatgtctcgcgcctcttccgccgcctccggcgagatcatgctgttcggggtcagagtcgtcgtcgattcgatgaggaagagcgtcagcatgaacaacctctcacagtacgaacatcctttagacgccaccaccaccaacaacaacaaagacgccgtcgccgccggctacgcctccgtcgacgacgccgctcctcagaactccgggcgccaccgcgagcgcgagcgaaagcgaggagttccgtggacggaagaagaacacaagttgtttttggttggattgcagaaagtagggaaaggtgatt

SEQ ID NO: 38586 - DNA, 306 bp, Glycine max
  Clone ID: LIB3056-006-Q1-N1-B10
aaaagactcagttgtgtatcgttgcagctctactagctagggtttcgcaagtgcgatcgaagaagaacgatggcgatggctgctgctctgcgtcgcgaaggaaggcgtttgacccaaccaatcaacgccctccgttcctctctcatctctcaagaccaatcccctcatggcgcgcgcttcatttccactcaagtggtgagaaaccgaatgaagagtgtgaggaatatccagaagatcaccaaggccatgaagatggttgccgcatccaagctgagagccgttcagaccagagctgaaaattcccgc

SEQ ID NO: 38587 - DNA, 405 bp, Glycine max
  Clone ID: LIB3056-006-Q1-N1-B11
cttcttcttttttctctggtgacagacaccacttcaacttggctcatgcctcaattcaacttggattcatattttgaaagcatcgcaaggtaaaaaaaaaaaacctacttttattattaatcgccttggatttatacaaaaagatgactagggagcaaagcaaaagtgctggggaatcggtgctaaaaatccaatttggaaattggggaatttggtgacggttggaagaagtcaagcctatcaaccatgcttgatgtgcgttaatatcgactgaaattacatgaaatggttttttaatcagtacttttataaggtgtatataatgccctttaagaaacaaaatttagattttgaagtcttctgctcttgttgaaaattatgtctatcatgagcaattctttcata

SEQ ID NO: 38588 - DNA, 424 bp, Glycine max
  Clone ID: LIB3056-004-Q1-N1-C4
catttccataacttaatccaaactcgacacatgcagcggcggcgggatgtggttgatgacaacttagctgcagaagtgattgaggaaatgagcgataggttaggggagcctccagaggttcaggaattgctagacgaaatgggccaccctagtataccattaagtgttatttcaaaagctgcagggcttcagtttcagtatactgtcgacaaagtattactgggtaataggtggttgcggaaagcaacaggcatacaaccaaaatttccatatatggttgactcatttgagagaagaagtgaagcttctcttctgagagctacagagtcaagcaactgccttgagaactctaaagtggaagatgataggcaaatttctgaatgcttaaactcttctaattgcagtttggatggtatactggagc

SEQ ID NO: 38589 - DNA, 328 bp, Glycine max
  Clone ID: LIB3056-006-Q1-N1-B12
agatgacccaaattatgtttgagactttcaatgtgcctgccatgtatgttgcaattcaggctgtcttgtctctgtatgccagtggaagaactacaggtattgtgcttgattctggtgatggtgtgagccacacagttcccatatatgaagggtatgctcttcctcatgcaattcttcggttggaccttgctggccgtgatttaacggagtacttggtgaaaatccttactgagagaggatactccttcagcacctctgctgaaaaggaaattgtccgtgatgtgaaagagaaaatggcatatgtggcccttgattttgaacaagaaat

SEQ ID NO: 38590 - DNA, 414 bp, Glycine max
  unsure (1)..(414): unsure at all n locations
  Clone ID: LIB3056-006-Q1-N1-B2
gtaaacaaaaaccactggaatttttctattaggacgaccaccgcaaatggcagcattgaacctttgccgcatggcacttcgatcctcgaagcttctctctcgcccttatcatcgtctttctgttcagttgcagatgcagatgcagccctcttctcctncactcactcgaaagatgagcatggatgcacagagtgttgcttctcaacttaatagttctggattggtgaggactcanggccttattggagggaaatggagtgatgcttatgatggcaaaaccataaaggttataatccagcaactggtgaatctatngtagatgttgcatgcatgggtggaagagagacaaatgatgcaatttctgcagcctatgatgcatatggatcatggagcanaaccactgncgctgaacga

SEQ ID NO: 38591 - DNA, 256 bp, Glycine max
  Clone ID: LIB3056-006-Q1-N1-B3
tcttacttctaccaataccatgtttaaagatatttgatgcacagagtgttgcttctcagcttaatagttctggattgttgaggactcatggccttattggagggaaatggagtgatgcttatgatggcaaaaccataaaggtttataatccaacaactggtgaatctattgtagatgttgcatgcatgggtggaagagagacaaatgatgcaatttctgcaacctatgatgcatatggatcatggagcaaaaccac

SEQ ID NO: 38592 - DNA, 359 bp, Glycine max
  unsure (1)..(359): unsure at all n locations
  Clone ID: LIB3056-006-Q1-N1-B4
aaacacgccccaacaccaccatgggcaccagaggcttcccttccggtggccttcttcttttcttccttctttttcttcttaaccttttaagcgcccgggatctccccaaccctttctcccaacccaaacctcactccgaacctaaaaccgtttcgttcacgatcgacaccatcgatcccgttccgctgacgctcctncgcttccgtccgatcaaccggcacttccagcccggccgtccgttgccgctgtctctccgcaccggccaccgccgttgccgncaccgncgcgagatcccctacggcaacgacgcaatcctggtcggcgacgccgctgccgncagtcggatccatccgcgctgg

SEQ ID NO: 38593 - DNA, 385 bp, Glycine max
  unsure (1)..(385): unsure at all n locations
  Clone ID: LIB3056-006-Q1-N1-B6
atcagaagtacttaataaattcttctcagctatgaagaagctgtgtcccaatcttgatcgtgaggatgggctcgaaaccgtgcttgaggtccctatcccggaggagattctcacccacaagagtggaaccaccaaagcttggcacaacatgaagaattggatgaaaccacacgctgaatcgagatcaaattcagcttccatggcagcagttttcggagggaaaaacactgagattcagcttttgttaggcgttgttggagcgccgttaattccttcacctatcngccctgacaaccaaacccatcactcgcagcattaaagaccaacacattgaggtttcaatggctaaatacatagtgaagcagtacgtggcagcggtgggagg

SEQ ID NO: 38594 - DNA, 363 bp, Glycine max
  Clone ID: LIB3056-006-Q1-N1-B7
gcagcgcttagtggcgcagaaaaataaaacctaatttaccaaattcagacacagagattctcattcctcaagatcttctcatttcttgtctcaaattaatcctcaaacttgcctctctctgtctctctacaatgtgctccatttcctcactccaccaaaaccatgtctaaggatattgctaacatgaaggactcttggtttttcgacaataactttaatggtctgtcagatgagatttttgatgatgtcatcaacttttttgatttcccgctggaagacgtggatgctaatggtgtggaagaagactgggatgctcaattaaaatgccttgaagacccgcggtttgatgtctattcagcatca

SEQ ID NO: 38595 - DNA, 418 bp, Glycine max
  unsure (1)..(418): unsure at all n locations
  Clone ID: LIB3056-006-Q1-N1-B8
ctcgagccgctcgagccgctcttgctgaatcttcaggagttaaatttggagcccagtgggaagagatagttgtgaggctgaatgtacttaattacttcaacctctttttcctagtatcattcattttcacctgcatgtgcgttttatcacctgttcaaatatgagattcagcgtcacatactgatggtcattatcattaaatggagcacctgagataagggaggttcaatcagggtttatccattttcagcggttctgatcttgaatagtctctaactttgtcggatgtcaaggatttgatattgatatgttgtggctcaattatgttgcactgttgactcgatttgttgactccacctccataagttgcatatactngtcctaattgtggtgctatataccctgttaaaataaaatt

SEQ ID NO: 38596 - DNA, 403 bp, Glycine max
  Clone ID: LIB3056-006-Q1-N1-B9
gtggtggcaagcttctgagcagggtaatgaacatgctgctttactcaatggagatgcatattactatggtcggggtactggcaagggttattaaccaactggttaagcttatatgcctgctaaatcacaattgaacgcgcaagccatggtcaaatctggatacatgcatgagcatgggccaagactttcatatgacctttatctggccaaacgttactatgatgaagctctagagcatgattctgcagccaagttgccggtcacgctggctctttcaagcctgtgggttcgtaagaactatgctgacagtttcatggtacaggtaattgattcattgcctgaactgtatcctaaattagaagcttgggtggagaatgtgcttttggaggagggaaatgctaca

SEQ ID NO: 38597 - DNA, 301 bp, Glycine max
  Clone ID: LIB3056-006-Q1-N1-C1
caaatcgatcaagctggcgcgcacatgtcatctgctgttgcaaatcattgaattggagcttagttatcaataagtgtgtggttaaagtcgttggagctatgtggaagtgatactggcagtccctgaagtgatggatagcatcgacactgggaacagtgaccgtgctaggaaatactcatccaatgcgattggtaaacgtattgcttcatttaactagctgcagattgactaaacccatttcgtcgacgatgttaaggatcacactgatgagtatatgacggctattattgaggctcacagc

SEQ ID NO: 38598 - DNA, 382 bp, Glycine max
  Clone ID: LIB3056-002-Q1-B1-D1
gcaaattggagcaaattgttcatcaatttcttttgaagtgcttgcacatcattttggactcaagggtacctttgttactcccgcatgatagaagcggtggtgacttgtcgatgggtcctcgcgtgaagaggagcgacaagtggtttaacttggctttaggtgataggccttctgctctggataacttgcacttctggcacaagaatttgatggatccaatgataattgacattatacttgttcatgaagaggctggctcttctgctgagacggttatagagaggtgggttgttcagtatgattgtccccgtgtggtggctcctcaaaccagtgacattactagctcttacaagaagacataccagaagtcaatagtgctttt

SEQ ID NO: 38599 - DNA, 170 bp, Glycine max
  Clone ID: LIB3056-002-Q1-B1-D10
aactttctcatctgggaagatcagttgacgaatcgaggatccgatgacgtgcaaggaatgacggtttcaatcaatcgcatcacacacagacaatcatgtttaaccggatgtccggtccacctaaacaggaaagcatagcagttgccagtttgggcaagccaaactaaaca

SEQ ID NO: 38600 - DNA, 374 bp, Glycine max
  Clone ID: LIB3056-002-Q1-B1-D11
gccgcgtgacgagaaggccaatttcatgcgcgagattctcctcaagtatctgcccctcggggaacgcaacagagctcaaaagcatagagaatatagagagaggataatagcaaattatcagcctctacatcgggagttgtactctgtggatcctgctacattctttgtccccacatttctgagagcaattaatgataatacggaacaaagtattagaagtatagtgtctgagccctctccaggcatttttatatttgacatatttcagacccacttttgtgagttattgctatctgagattgaaaattttgagaagtgggtgaatgaaactaaatttcggatcatgcgtccgaatacaatgaataaatttggtg

SEQ ID NO: 38601 - DNA, 350 bp, Glycine max
  Clone ID: LIB3056-002-Q1-B1-D12
gaaacctggcgcgtcatgcttcttcgaatgcaaccgcaaccaaagccagttattactctaccatctccactcaaaccctaaccaacaaaccctgaacccaccacgacaaatttcccactctcactttcattccggcacgaacaaaaccctaacccgatggagaaccgaaccacccaggttcggtgcccggagaaccaggagctggccacctacgtgtggaacaagtggaaggaaatggcgcagcaacccaaaggcatttctgacaacatcgacatgaaccctttcaaaggccacttttaatctctgtaactccaaaacccccattcgaaccatcaaagatttctctcaag

SEQ ID NO: 38602 - DNA, 396 bp, Glycine max
  Clone ID: LIB3056-002-Q1-B1-D2
agcaaactaaagttgatgtttgccagatacaagatgggaacgaaccattttcagcagcaacactgtgctgatgggagcatgtggatggagagtcagggtcagcaacagagctatgccttccacgaagagtcgtggagccctgagaacaactatggccacagtcacaagcaattcgcacgcatgcacatgaacatgagcaacaacaacatcaacagatggcttggtgcttttgctgctgtggactctgacttctcaatgcacaaacatcatcatgggcatggcaacggcgtatgagccatgcacatgaacatgatcaggcatggtggcaagttaggacgcatgtttcaacgatgcatgcacagtgaccaccatggtggcagaaagttcccttttggt

SEQ ID NO: 38603 - DNA, 371 bp, Glycine max
  Clone ID: LIB3056-002-Q1-B1-D3
cacacacctctgtttctttctctgctccacactttctcttcctccattattgagcttccactagtttttttttctttctttctttctttcaaggacttaattgcactgcttaaagtctcaagctttacaacttttggaagacacccatcaaaccattttttgcagccatcacttgcctaaggaagagggttcttttggtttcaaccattttctgcttttagcttcaaaaggatcatcatagatgatagccagctccttctgcaatgctgattctatgttttcaagagaagaggggatagatgttagaaagatgatggaacataaaaggagcccctgctctgtttgacaaagcagttatacttctattgcct

SEQ ID NO: 38604 - DNA, 370 bp, Glycine max
  Clone ID: LIB3056-002-Q1-B1-D4
ctctgctctttgccttctctgacacatttggtgccttgtagagcgtgttttggcatgaatgtggtatggcgaatgacgttgatgttgctgagcgtggctccttctctgggaaggactaccaggaccctccaccagcaccactcattgatgctgaggagctcacaaagtggtccttttacagggctctcattgctgaattcattgccactttgctcttcctctacattactgtgctcacagtcatagggtacaatcaccagactgacctcaaggaaaatggtgaaatctgtggtggggttggcattcttggcattgcatgggcctttggtggcatgatcttcatccttgtctactgcactgctgggatttc

SEQ ID NO: 38605 - DNA, 211 bp, Glycine max
  Clone ID: LIB3056-002-Q1-B1-D6
atttctctcagtctcatcttcctcactgccgggcctcagtttcttctcttgtgtttcggttcggaccatgaccttctgtcgggagcaacgtgtagtcttttagaaccatgtgagtaagctcgaaagtcaggttgttatcacgactcgcgaaaataggttaggtgtttgcaatttcaccgtctgtggtgttcacaggatttgacttgggtgc

SEQ ID NO: 38606 - DNA, 399 bp, Glycine max
  Clone ID: LIB3056-002-Q1-B1-D7
caacgactgaaatcgagagggagacgaaaagttttgatcgagagagatgggaaaggagagtagcaaagatacggttccggtgacgcagtggctgaatcgaatggtctcagaaccttactacctcttccatttcttaaccttcttctcctatttcgtcgttcgcagctccgcaacccaaaacttagcgcctcatctcactcaccatctccttcgtcgcgaaatacaaacactgctagtgttcgcgatattggctttcatcaagggaataaaagaagaaacatgggaagcctttatagctgatgtgcttttcctggccaagatttgtctttttctcctagcctttacaatggatcgccgcttagccgtttggtatattcttgtatttttagtgatacatat

SEQ ID NO: 38607 - DNA, 342 bp, Glycine max
  Clone ID: LIB3056-002-Q1-B1-D8
cacaataatctaaaactagtactatatcgaataattctctaattaacatggcttcgacatgtacaccctccacactcattctcctcaccctcaccacattcctcattgcccaagcccaagcccaagccccggcaccgtccccgtcgggcgcggtgaacctcaccgcgatcctggaaaagggtgggcaatacaccaccctaatgaaactcctgaaggacacacagcagctcactcaaatcgagtcccagctcaaatcaaactcagaaggcttcacgctcttcgcgccgaccgacaacgccttccagagcctggaaaccggttgcctaaacaagctcagcgacg

SEQ ID NO: 38608 - DNA, 386 bp, Glycine max
  Clone ID: LIB3056-002-Q1-B1-E1
gcaatagcaagtcggtcgctcagacacgcacagatctgatctgatctgatctatctgaagccgaaaacgccgacggtgatgatgaagatggggtgttcacgttgctccttcttcctcttcctcatcctcttagtggcgctcttcccctcgtcgctctccgagatccgcttctccgagatccgaaacgacgatcgccgcatcatccccttcgatcagtttggattcacccacaagggtcgccttgagctcagcgtttccaaaatctcactctccaattccaatttggacctctcgaaggtcggcttctttctctgcaccctcgattcctggcttcatgtcctccagcaactcgaggacggtgagattcggtgcgcccttcaatccga

SEQ ID NO: 38609 - DNA, 367 bp, Glycine max
  Clone ID: LIB3056-002-Q1-B1-E10
caacacaatacagaagaagcttaacgtctcttccacacagctactctaccagtctgctccattccaagcagcaattctttttgtttcaggccctgttgtggatcagatgctcaccaagcaaaatgtcttcgcctacaaatattctcctgtggtcttggtaatattcaatcctcaccatgtattatatttaaattaatatgcatgtcatatgcgagtattggagcagaaccactgttgttacaactaatttccacgtgaacctgtaactgaattttattaattctttcatctaaaatgagaatctcagtttactatcacgtaaagaatggtcatgacatatacacatggtgattccagaccatgtaat

SEQ ID NO: 38610 - DNA, 369 bp, Glycine max
  Clone ID: LIB3056-002-Q1-B1-E11
cttcattgcattattgcagataagatcaaccctactcccttcagattcgggccaagatggcatcacttcatgctaatgtgacatcagttgtttgcaagagtggcaaccatgcttctcaatcgaaattcacaagctcttcattcttgcctgggtttgatgttgttggtcgtgcttcaaatgcttggaagaaagaacttgtcccatcttccatttccttggtgcctagagccacactaacatttgatcccccaactaccaactcagacaaaaccaaacaaaggaagcacactgttgaccctgcttctccagattttcttgcccttccttcatttgaacagtgctttccaaagagcaccaaagaacacagag

SEQ ID NO: 38611 - DNA, 380 bp, Glycine max
  Clone ID: LIB3056-002-Q1-B1-E12
acaagaagtacattatacattacacttacggatgtgactacaatatgaagggtgaattgacttatggcaaagttggtgaatggagatttgacaaaaggtcgcatctacgaggacctccaccaaaaaacttgcccctgcccccaccaggggttcctgaaagtgtggtaacccttgtaaagatggtgaacgaggctagtgctaacatcccaaattgggacacatcgtaaatattttccacctcatcatgatgatatcccaagtgcacattttaaaaagaaaaaaaattgacaatgagtctttttttttttttttttatcacgagtttagtcttattagatggatagatgaatgtaagcaataccattttatatgacaattaa

SEQ ID NO: 38612 - DNA, 353 bp, Glycine max
  unsure (1)..(353): unsure at all n locations
  Clone ID: LIB3056-002-Q1-B1-E2
ctgagcaggccgagcgttacgaggagctggttgagttcatggaaaaggttgcaaagactgtggaggttgaggagttgacggtggaggagaggaatctcctctctgtggcttacaagaacgtgattggtgcgaggagggcttcgtggaggatcatatcctccattgagcagaaggaggagagcangggcaatgaggaccacgtggccattataaaggagtacaggggcaaaattgaggctgaactcagcaagatctgtgatgggattttgaacctccttgagtccaacctcattccttccgctgcatctcccgagagcaaagtcttttaccttaaaatgaanggtgattaccac

SEQ ID NO: 38613 - DNA, 392 bp, Glycine max
  unsure (1)..(392): unsure at all n locations
  Clone ID: LIB3056-002-Q1-B1-E4
ggaatttttagcccaggtttcaatggcatcaaggctgaagcatgaaaattttgttcagttgcttggatattgcattgatggaacctcccgtattcttgcttatcagtttgcatctaatgggtctcttcatgatattttacacggcagaaaaggtgttaaaggagcacagcctggtccagttttgacatgggcacaaagagtaaaaattgctgtangggctgcaagaggacttgaatacttgcatgagaaggctgatccacacattattcaccgggacatcaagtcaagcaatgtgctaatctttgatgatgatgttgctaaaattgcagattttgatttatcaaatcaggctcccgacatggctgcacgtcttcattctactcgtgtccttg

SEQ ID NO: 38614 - DNA, 355 bp, Glycine max
  Clone ID: LIB3056-002-Q1-B1-E8
cttctggatcaacacctgagacccatgcttcctcttcaacaactgatgtcagtctagcgttcttttcaagttcaaatgcctcaacctcagttgggtggaacgcctctcctcagacgacaagaactccagtgtcgaaatacgagatagacgcatgtttgttgggtggctgcttcaactcgagcgtgttcaaaggcaaactatgttgtgcacccaatgtctgaggtctcacatcatcattttccaaagtttatggatctttattgttgccaagtgtaggcagcaacaggacaagcagttcagttgtcaggaagtgatatacgtattagagttatgctgtaacccaagttaacttttc

SEQ ID NO: 38615 - DNA, 342 bp, Glycine max
  unsure (1)..(342): unsure at all n locations
  Clone ID: LIB3056-002-Q1-B1-E9
cggcgacaacaacaaagattctttctagtttcttcctttcctttcctttttcgtcgccaacacggtaaacaaaaccccccaaatttcctcaattagggtttcaatccacattccaattccccaaccctcttcttccccatcctccaaatcccgaaactttccccaactgggtcctcaagtacgccacggcgagccctcgtagctcgcgatctcagaaaccaacgatgccgaaatcctcacgattcctcgtcgtcgcgatcgccgtcgccgcgctctgcgtgatcctccccgtcgcggcggcngcggatctcgaggaccccggcgtgctgcggctgccgtcgg

SEQ ID NO: 38616 - DNA, 388 bp, Glycine max
  unsure (1)..(388): unsure at all n locations
  Clone ID: LIB3056-002-Q1-B1-F1
ataaccaaacactcttcttcatgttcctcttcttcttcttgtacttgttctatctgtgacgagcatcatggcctcgagagcagtgctattgttggctatgtgtgtgcttccggccatggttgtggccattcgcccagcaaagaaccctttttgcgtgaagggtcgcgtctactgtgacccttgccgtgctggttttgagacctcagcaaccacctacattgccggtgctgagattatgttgcaatgcaagagcagggttagcaacgaggttgtgtacaccaagaaggggtacactgactcaactggagcatacacaatgtacgtggacgaggatcacgcagatcanatatgcagtgccaagcttgtaagcagccctcaacctcaatgc

SEQ ID NO: 38617 - DNA, 346 bp, Glycine max
  unsure (1)..(346): unsure at all n locations
  Clone ID: LIB3056-002-Q1-B1-F10
attttttttgttatatattgaatcatatatatttttagaataattgtaccgtcgtataggatacatatcatatattggtgcatatttgcactctctggttgtgttgtatgttttgaaaatcaatgcccgcaaaatggaatgctgaagtcacactttttcatgttctgtangggggtatactgaaaaaattaaggacatatgtaggttaaaggagaaggagagatttttttaatagctagaaactttaaacaatttttggaggctgatatttccttcttcagcatgttaataaacgttggtgatcttgcacatgatttcagtctgcaggctgtttagtgaggcttgt

SEQ ID NO: 38618 - DNA, 333 bp, Glycine max
  Clone ID: LIB3056-002-Q1-B1-F11
tgaatgtgaaagtgaaattattctactccaaaaaaacgctccaccgtcctcgtgtatgcgagagaaagaaaaagagagagtgagagggaaaatgcggttattatgtaacattatgattatgatgatctgtgttttaattaagacgaaagcttgaaaagtcggtttgtctggtctagaagggatgatgaaatgaacgagtcatatttatttggctttggtccactgtcgggggtggttgaaagttgaaatgatttgtgataagagtctcagggcaacgatgcagtacggtggagcgttttattgtaatgaatgtgaaagtgaaattattctact

SEQ ID NO: 38619 - DNA, 378 bp, Glycine max
  Clone ID: LIB3056-002-Q1-B1-F12
gagaaacccaatgtggatctctcagcaagaaaactcttcaagttggttcttcctcccagttgttaccttcatcatcctctttcttttacgtactttcctcaatcttttatccaaccggaacaatgattccaaaaaaccctcaccaccatctcctccaaagcttccaataataggaaacctccatcaacttggtacccacattcaccgcagtctccaatccttagctcaaacctatggttctttaatgctacttcacttaggaaaagtgccagtccttgttgtctccacagctgaggcagctcgtgaagttttgaaaacacatgaccccgttttctccaacaaaccacatcgtaagatgtttgatatcctcttgtatgg

SEQ ID NO: 38620 - DNA, 400 bp, Glycine max
  Clone ID: LIB3056-002-Q1-B1-F3
cgactcttagccgccgatctctcagggcttgcatcttctcaggtaagctgtgaagatgtacacatcaaggaagaaaatccacaaggataaggatgctgaaccaactgaatttgaagagtcagttggacaggcattgtttgatctggaaaataccaatcaggagcttaaaagtgatctgaacgatttatacataaactcagccgtgcaagttgatgtttctggaaaccgcaaggctgttgttattcatgtcccttacagattaaggaaaggtttccgtaagattcatgttaggcttgtcacggagcttgagaagaagtttagtggcaaggatgtaatcttgggtgccacccggaagattttgacgccaccgaagaacggttccgcagctcagcgtcctcgc

SEQ ID NO: 38621 - DNA, 388 bp, Glycine max
  Clone ID: LIB3056-002-Q1-B1-F4
tcaggctgatgctcaaaactcagttactgctgcattaagacaaggggagaaatacacaacttttgaagatgaagactctctcatggatgggtcttcacacttaactaatgtactctactccccaagctctcccaagactgagggatcaagtgccattttggctccccaaaagactggaggattcaattatccgcctgcaagtgcctcttccccagatatcatgtcatccatttattctgttggtggaactagtagcttggatgactattgcttgcctaattttgacagcatgggctttagatatgatcagaccctcagctttccagttcaagtttccaactctttgatctgtgacactgattcaatggctcatgcttttagtgatgaa

SEQ ID NO: 38622 - DNA, 381 bp, Glycine max
  Clone ID: LIB3056-002-Q1-B1-F5
aattccaattccacattttcaagatataaggaggcaaatatgttcatatagtaattggaattagttgttttcttatgtaggcctatcctgaagccaaaggaaatgagatcgggattcctcggggaattccaattccacactttcaagaggtatggaggcaaaaatgttcatatatggattggcattatttgttttcttagtaggcctatcatgaagccaaaggacatgagatcggaattcgtcggggaattccaattccacattttcacgatatacggaggcaaatatgttcatatatgaattggcatcaggtgatttcttattaagcctagcctgaatccataggaaatgagatccgcattcctcagtggtaccgagctc

SEQ ID NO: 38623 - DNA, 294 bp, Glycine max
  Clone ID: LIB3056-002-Q1-B1-F6
caatggttcaggtcttgcatcatatccaatacacactgttacaataagaatgatgatgacctctggtgaagctgtcaagtacaagagctccttggatgcaatcacacagatcctcaacagtgaaggtgccaaatccttgttcaagggtgccggtgccaacatcctccgtgccgttgccggtgctggtgtgcctgctggttatgagaagttgcacgttcttgtgttcggcaagaagtacggatctggtggggcttaagttccaatgctgactcagtactatgatatgtttttata

SEQ ID NO: 38624 - DNA, 316 bp, Glycine max
  Clone ID: LIB3056-002-Q1-B1-F8
gccaggtcctcacccaggctgtgagcctaggcatgattgttacgtctgcactgataatatggaaggcattgatgtgcgttactggcagtgaatctcccgttgttgttgttctttctggaagcatggaacccgaattcaagcggggagacatcttgttcttgcacatgagtaaagatcctattcgggcaggggagattgttgtgtttaatgttgatggacgtgagattccaattgttcatcgtgtaattaaggtacatgaaagggaagatactggggacgttgatgttctcaacaaaaggagacacaattaatggga

SEQ ID NO: 38625 - DNA, 377 bp, Glycine max
  Clone ID: LIB3056-002-Q1-B1-F9
atatcatccgcctcataaattatggtcaaaatcgaacataacgctttggacattctctcatatcaccatcttcgtcgcgcgtgcgacgagaggtgacaagttcttcctctgcccagagtcattgaaaccctgttccaatctctagttattttaatgtcttcccgctataagtatctccttcacaaaccctctatccctcataacatcaattatcacatagccaagccttgtacctctcaaagtttgattcttttctcttgcccaaagcgatttggattgctataatttttgttcgtactacatgttatgcagtcatgaatgattgagagacaacacaaatgtcttccccagtgatcagcgagatcctcatctctggc

SEQ ID NO: 38626 - DNA, 375 bp, Glycine max
  Clone ID: LIB3056-002-Q1-B1-G10
gttttccttgtttcccctattattatctcgctctcacaaaatcatggcattctctagtgctttgattctgtggtcgttgctagcaatcaacatggccctgccaaccctcgcaaccgtctacaccgtgggagatacttcaggttgggcaattggtactgattatagcacttggactggcgacaagatcttttcagtgggtgatagtctcgcgttcaactatggagctgggcacacagtggatgaagttaaagagagcgattacaagtcgtgcaccgcagggaattctattagcacagacagtagtggtgcgaccacaattgcccttaaaagtgcaggcactcattacttcatatgttctgttcctggacattgttc

SEQ ID NO: 38627 - DNA, 379 bp, Glycine max
  Clone ID: LIB3056-002-Q1-B1-G11
ctctaccagtcactctccaaaatgcaaataatcagtcttcgcaaataggtgatcaacttcaaaagggtattatacttgagctctcatcatgagtgcttccgtcgcacacgtgcagcctcaggacgccttgaggagcttgaaactgacgaagacactgtctcacagttcagctggaaaggctccgacatcagggtaagcagctacgacctcgtctacgactaactcaatcaaggactcatcgacctccgcaagcttagtgactgtgcgtcatcaaccgtatgtatcatcaccaaaatgtacaagtgtgatgcttccagcaatgatcgtcatgttgcaaagtgacacacggaggtactcgatgcttctgataataatacac

SEQ ID NO: 38628 - DNA, 376 bp, Glycine max
  Clone ID: LIB3056-002-Q1-B1-G12
gaaaaaggtgaagggcgaagacacgttcttctctcaagtgctgaaaaaaaggaaatagcagaaagttatatggataacaaatcaccgagcaataaggcatctgaggagctggcacgtgagttgcttattgctatctctgattctttaccagataaaactctggattccgattttgtgcccgaaagcaaggacgcagacagctttgcaagaccaaacggtgattgggatgacaagtttaggtctgaattgatttcaatctcctatgttgaatctcccgatgtcaaaatctgatatattacgagtctagactgttagtaacttatgctacccttctggtttgttatgtggatgaatttccgctgtgccaattgttgtg

SEQ ID NO: 38629 - DNA, 269 bp, Glycine max
  Clone ID: LIB3056-002-Q1-B1-G2
ctccaacaataccgagttccagatcgtgccgagcatcatcagggatggcttgaagaccgttctcaataagtaccagaagatgaaggacagaatcgtcggtgtctcagaagacacgaggacgagtgtcaataggctctagcagatgcaggtcaatggctcactcttgttcacggccatcaacgtcaatgactcgatcaacaagagcaagtttgataacttataaggatgccgtcactcgcttcacgatggacagatgcaagctactgatg

SEQ ID NO: 38630 - DNA, 400 bp, Glycine max
  unsure (1)..(400): unsure at all n locations
  Clone ID: LIB3056-002-Q1-B1-G3
cgtagatcgaaagggaatcttcttccatgggctccaagcggattccgaaagaacttaagggactccagaaagaacctccaacctcttgcaacgccggtcctgttgcggaagatatgtttcattggcaagcgactataatgggtccccctgatagcccttatgctgggggtgtttttctagttactattcattttcctccggattatccattcaagccacccaaggttgcatttangactaaagttttccacccaaatatcaacagcaatggtagtatttgtcttgatatcttaaaggagcagtggagccccgccttgacaatatctaaggttttgctctccatttgctccctattgacggatccaaacccagatgattccttggtgcctgaaattgctca

SEQ ID NO: 38631 - DNA, 343 bp, Glycine max
  Clone ID: LIB3056-002-Q1-B1-G4
gggacataaaacctcaaaatttactggtcaatcctcacactcatcagctaaagatttgtgactttgggagtgcaaaagtcttggtcaaaggggaaccaaacatatcttacatctgctctaggtactatagagcacctgaacgtatatctggtgcaactgagtacaccacagccattgatatttggtcaactggttgtgtacatggtgaactaatgcttgtccagcctctattccctggtgagagtggagtacatcagcttgttgaaattatcaaggttttacgtaccccaataagggaagaaatcaagtgcatgaatccttaatataccgagttcaaatttcc

SEQ ID NO: 38632 - DNA, 382 bp, Glycine max
  unsure (1)..(382): unsure at all n locations
  Clone ID: LIB3056-002-Q1-B1-G5
cctaactcccaatccaacgcaaccctcttccttgcaaagttctatggccgccaaggcctcctcaccctcctcaccaacgctccctcacaactacaacaagccgttttaaaatctttgctttacgaagcatgcggtcgaatagtgaacccggttctcggctcgaccgggttgctctccaccgggaattggcatttgtgcgaagccgcggtcaaagccgttcttaatggcgcgccgattgagcaggctcctttggacggcgccacaagcctgcagctcaaggcttgtaatattcgccacgtggcaaagagtgataaatcgtgccgctctgatacacttcgcaaggtgaagtctcgcnacancacgttcaagcgccgagccgcaa

SEQ ID NO: 38633 - DNA, 384 bp, Glycine max
  Clone ID: LIB3056-002-Q1-B1-G6
gccgtcgtcgctgtttttgtgtgtcgcttcttcgtaagtgcagctgcaatggtgaagggacgccaaggagaacgtgtcagactctacgtgaggggtacaatccttggatacaaaaggtccaagtcaaaccagtatccaaatacatccctgatccaaattgaaggtgtgaatgccaaagaagaagtatcatggtatgctggcaagaaaatggcctatatctacaaggctaaggtgaagaagaatggaagccattaccgctgcatatggggcaaggttacaacgcctcatggtaacagtggtattgtccgtgcaaaattcaagtcgaaccttccacccaaatcaatgggagcccgagtaagagtattcatgtatccaagcaacata

SEQ ID NO: 38634 - DNA, 382 bp, Glycine max
  Clone ID: LIB3056-002-Q1-B1-G7
atcaatgttctccacaagcaaatataagtctccctcctggcttcgatcctaattacagagctcgtgaggtgcacatattattttaactggctgagatcaaactacatttgcatatgagcacaaatctaacatggagatttttgggatgggccaagtcaatttattgtgttgtataaatattgatatttttttaatgatcctagttagcatttgttttttgttggccaaataaaggtataattattatattttattttatttattttcaatattatctgctatactagttgtgtgcttgtaggagccaaactttagtctgttattgagccatgggaattactagtgttggtgacatttgggatatatgggaaaatgttaatag

SEQ ID NO: 38635 - DNA, 307 bp, Glycine max
  Clone ID: LIB3056-002-Q1-B1-G8
ccaaaaccaaaactttttgtcaattcatttcttgttgttagactctgcttctttctccaacttcacacacaaaaaaacatggcaaaggatagaacaattggtgtggctctagatttctccaaaagcagcaagaatgctctgaaatgggcatttgagaacttagccgataaaggtgacaccatttatgtcattcacatcaacccaaactctctagacgagtcccgcaacaagctatgggcaaaatctggttctcctcttattcctttggtagagttcagagagcctgagattatgaaaaagtatgatg

SEQ ID NO: 38636 - DNA, 378 bp, Glycine max
  unsure (1)..(378): unsure at all n locations
  Clone ID: LIB3056-002-Q1-B1-G9
aaaagtggctgtccttccgatatccattcataattctccggaacaacacacttgtgtttcctttccattttacggaaaaaagagaaagataagcgaaacaaacaatctctgaattgatgggctaaaagggaataaaaaagaaagagcttcaaatctggcaaatctcgtgggattgagggctcggtctgcgtcgaagcaagcttctccccatttgcacgacgacgaggaggagtgtaggccttggcgtcgaaggttaaccatgtctttgtcttgggcctccgccctcaggatcaccattctccttctcctcctcgccgcggtcatcgtcgcatgcttcactctcncaatcganaagatgatgaaggacttcttattatg

SEQ ID NO: 38637 - DNA, 397 bp, Glycine max
  Clone ID: LIB3056-002-Q1-B1-H1
gtctttcgctgttccaagatgggtgtggctgagaacattcccgatatggaggagggtaccttggagattggaatggaatacagaactgtatctggagttgctggaccattggtcattcttgacaaagttaagggacccaaatttcaagagattgttaatattcgtttaggagatggaactactcggcgtggacaagttctagaggttgatggtgaaaaagctgttgttcaggtatttgaaggtacatctggaatcgacaataaatttacgactgtgcaatttactggagaggtgttaaaaactcctgtctcactagacatgcttggacgcatatttaatggctctggaaaaccaattgataatggtccaccaattttacctgaggcttacctggata

SEQ ID NO: 38638 - DNA, 378 bp, Glycine max
  unsure (1)..(378): unsure at all n locations
  Clone ID: LIB3056-002-Q1-B1-H10
atcaaagaagaaacaaccgcaacagatctccgtttctcgccaaacaaacacaaaatggctgccttcagcggcgacgaaaccgcacctttctttggcttcctcggagccgccgctgccctcgttttttcctgtatgggagcggcgtacggaaccgcgaagagcggcgtcngggttgcttcaatgggcttgatgaggccggagctggtgatgaaatcgatcgtgccggttgtgatggctggtgtgttgggtatctacggtttgatcattgcggttatcataagtacgggcattaaccctaaggccaaatcgtactatctttttgacggctacgctcaactctcttcaggtctcgcttgtggcctcgctggcctctccgct

SEQ ID NO: 38639 - DNA, 376 bp, Glycine max
  Clone ID: LIB3056-002-Q1-B1-H11
tagaagagccttccatatatagcctcccaaaaaaatgaagagtactacctctttggctctctttctactttgtgccctaacttcatcatatcagccttcagccaccgctgatattgtattcgacaccgaaggcaatcctattcgaaacggcggcacatactatgtgttgccagttataagaggaaagggcggcggaatagaatttgccaaaaccgaaacagaaacatgccctctcactgttgtgcaatctccctttgaggtctcaaagggtctaccactgataatttcatccccatttaaaatccttgacatcaccgaaggacttattttgagcctcagtttcacttatgtacccccctgtgcctcaactccttct

SEQ ID NO: 38640 - DNA, 383 bp, Glycine max
  unsure (1)..(383): unsure at all n locations
  Clone ID: LIB3056-002-Q1-B1-H12
cggctcgagcctctctctcgtgtcgggtgaagggaaaaatcaaatcaacatgctgagagtgggcgcaaagagggttttggaaacgacgttgtttggggttagggttccggcgaggctgtaccacgagagggttgtggatcactacgacaacccccggaacgttggatcgtttgacaagaacgacccgagcgtggggacgggtttggtgggggccccggcgtgcggcgatgtgatgaagctccagattaaggtcgacgacaaaaccggaaaaatcgtcgatgctcgattcaaaactttcggctgtggctccgccattgcttcttcctccgtcgctactgattgggtgaanggaaggcaaatggangaagttctgactataaaaa

SEQ ID NO: 38641 - DNA, 359 bp, Glycine max
  Clone ID: LIB3056-002-Q1-B1-H2
gttctgttctgacgtttaactcacttcttcttcttcttcttttgatctcttcgttcgcatcttgcggataaaagcagcgctgtaattttcgtttctctgctttgtgcttttttcatacgttgcgtttgggtgttaagttgttccgtttcagccatggtggagaacaatctcttcgaggatatatttatggtcgaaaaattaaaccccgatgacaaaaaattattcgataaagtcactcgcattgaagcaagaagtgaaaagtttgacatgtttatgcacctggacattaattccgagatatatccgttaaaggttggtcagaagtttgctcatgtgcttgtttcaacacttaatcctga

SEQ ID NO: 38642 - DNA, 396 bp, Glycine max
  Clone ID: LIB3056-002-Q1-B1-H3
ccagcaccaagagactcttcaagatcacgctctctctcctccgcctcggcttcaactcctccaaatgcaaaacggcagccaagatggccgtggccaggatcaagctgctgaggaacaagcgagaggtggtcgtgaggcagatgcgtcgcgacattgctcttcttctccagtctggtcaagacgccaccgctcgcatcagggttgagcatgtcatgagagagcaaaatgttttggctgcaaatgagttcattgaactcttctgtgaattagtggtggccaggctcgcaatcatttcaaagcaaaaggaatgtccagcagatttgaaagaaggaattgctagcttgatatttgcagcccctaagtgctctgaaatcccagacttgtggcacttaagaa

SEQ ID NO: 38643 - DNA, 369 bp, Glycine max
  Clone ID: LIB3056-002-Q1-B1-H4
aggtcgactacaaaggattcggctcgaggtttcagtgagtgatcggtgttcacttgatccttcataagtcgtcatcatcatcatcatcatcaccgttgattgaagaagatgccgatcagaaacatcgccatcggaaggcctgaagaggctactcaccccgacacgttgaaggcggggttggctgagttcatctccaccttgatcttcgtgttcgccggttcaggttccggcatcgcctacaacaagctcaccgacaacggcgccgccactcccgccggcctcatctccgcttccatcgcccatgctttcgccctcttcgtcgccgtctccgtcggcgccaacatctccggcggccacgtcaacccgccg

SEQ ID NO: 38644 - DNA, 346 bp, Glycine max
  Clone ID: LIB3056-002-Q1-B1-H5
cactgttccaatacggaatctaaggcaaagcaaaccaaacatcttgaatcatgggttcaacaggtgagactcagattaccccaacccacgtatctgatgaagaagcaaaccttttcgccatgcaactagccagtgcttctgtccttccaatgatcctcaaatcagcacttgagcttgatctgttggaaatcatagccaaggctggccctggtgttcatctttcccccactgacatttcttctcagctcccaacacagaaccctgatgcacccgttatgttggaccgtatattgcgcctattggcttgctacaatatcctctctttttctctccgcactctccctga

SEQ ID NO: 38645 - DNA, 293 bp, Glycine max
  Clone ID: LIB3056-002-Q1-B1-H6
aaaacactctgacacaacaaacacaaacacaatcgtcaattaaaacaacaacaatatcgaagctgcacaaattaatatccaacactctcaagctttcgagtttcaaactctgggcgctgaatttggttcatttttctaaggtagtttttcttttacaactttaactgaaaatgaatactctttcttagccttcttgatgttccaaaccaatacaacgtcggtggttgtctgaatcaaacatatgtgatatgtctctgtatctgttttctctgtcctttttttttttaagaaac

SEQ ID NO: 38646 - DNA, 393 bp, Glycine max
  unsure (1)..(393): unsure at all n locations
  Clone ID: LIB3056-002-Q1-B1-H7
tcagggacctcccaacgcagctctcaatcaagcccgatttggtgacctacaacaccatcatcaaggcgttttgcgaaaagggttcgtttgattccgcattatcagtgtttcaagagattgaggagaagggtttgagccctgattccatcacgttcaacactttgcttgatgggttgtattcaaagggtcgttttgaggagggtgagaaagtgtgggagcaaatgggtgtgaagaatgttgctcctggtgtgaggagttactgctccaagttggtggggttggctgaggtgaagaaaatgggtgaagcagttgtgctttttanggaaatggagaagttgggtgtgaagcctgacctcttctgcatcaatgctgtgatcaaaggtttcgtgaatg

SEQ ID NO: 38647 - DNA, 333 bp, Glycine max
  Clone ID: LIB3056-002-Q1-B1-H8
atcccctcggggaattccaattccacattttcaagaaataaggaggcaaaaatgttcatatatgaattggaattatttgttttcttattaggcctatcctgaagccaaaggaaatgagatcggaattcctcggggaattccaattccacattttcaagaaataaggaggcaaaaatgttcatatatgaattggaattatttgttttcttattaggcctatcctgaagccaaaggaaatgagatcggaattcctcggggaattccaattccacattttcaagaaataaggaggcaaaaatgttcatatatgaattgggattaattgttttctta

SEQ ID NO: 38648 - DNA, 353 bp, Glycine max
  Clone ID: LIB3056-002-Q1-B1-H9
gaaggcgtcttcataaacgcctttcttctccgtttccgtttcctcgttcaaattcgctttttgatctgcgaaaatgagagagtgcatctcgatccacattggtcaggctggtatccaggtcggaaatgcttgctgggagctctactgcctcgagcacggcatcgggcccgatgggcaaatgccaagtgacaagacagttggcggtggtgatgatgctttcaatactttcttcagcgagactggtgctggaaagcacgtgccacgtgcagtgtttgtagatcttgagcccactgttattgatgaggtgagaaccggaacttaccgccagctttttccaaccagagcagctcatc

SEQ ID NO: 38649 - DNA, 319 bp, Glycine max
  Clone ID: LIB3056-003-Q1-N1-A11
ggcggcttcttcttccgttgatgtctatcggcgtgaacaatggcgacttacgctgcgatgaagcccacatagcccggcttggaggagccccaggagcagatccacaagataaggatcaccctttcctccaagcacgtcaaaaacctcgagaaggtttgtgcggacttggttcgcggggcaaaggacaagcgcctaaagggtaaaggacctgtcaggatgcccactaaggttcttctcatcactaccaggaagtccccttgtggtgaaggtaccaacacatgggacagatttgaacttcgtgtgcacaagagagtgattg

SEQ ID NO: 38650 - DNA, 341 bp, Glycine max
  Clone ID: LIB3056-003-Q1-N1-A12
caacactttctttcactcccacaattcttcttcgtctggagctgcgatcctctgcttcgatggccaccgtgcaactccaatccctaacccttgttcgctcctccgcactcccttccgccaccttctcccctccgatcgccctctccggccgccggaactccgcctcgctgccgcgctacgccggcctccgactccgacccgccgccgagacctgttttccgactcgcgccgccttgagaaccgctcctcgcggcggaggcgtcaagtgcgaggcaggagacaccgccgttgaagtggctcctattactgatgcaaattggcaatcacttgtgcttgaatct

SEQ ID NO: 38651 - DNA, 390 bp, Glycine max
  unsure (1)..(390): unsure at all n locations
  Clone ID: LIB3056-003-Q1-N1-A2
caactntagaatccaagggcataaaatgacaattgttgaggtggaagggacccacactctccaaaacatttatgattcacttgatgttcatctagggcagacttactctgtgttggttactgctgatcaaccaccccaagactacctcattgntgtcacaacacgattcacctcccaagtgttgaatgctacctncatttttcgttatagtaactctggtggaggtgttactggcctttntccttgggggccaactattcaagttgattggtctttaaaccaagctcgctctcttaggaggaatttgacagcaagtgggccaagacctaatccacaaggatcataccattatggttngataaacacaactcgaacaattagacttcaaaa

SEQ ID NO: 38652 - DNA, 259 bp, Glycine max
  Clone ID: LIB3056-003-Q1-N1-A3
ttattaggcctatcctgaagccacaggaaatgcgatcggaattcctcggggagttccaattccacattttcaagaaataaggaggcacaaatgttcatatatgaattggaattatgtggcttcttattaggcctatcctgaagccaaaggaaatgagatcggaattcctcgaggaattccaattccacatttgcaagatatgaggatgcgcaaatgttcatatatggatgggaaattatgagtttcttattaggcctat

SEQ ID NO: 38653 - DNA, 247 bp, Glycine max
  Clone ID: LIB3056-003-Q1-N1-A4
tcgaagagctgtagaaaagaacctagagtggccactttagacgaacgcccttctgcgaaaagggggcttcctcttgaagctaaccctgaagtcatgaaccagttcctttggggtcttggccttccactggacgaggcagagtgctgtgatgtgtttggcttagatgaagagcttctggaaatggttgcgaagcccgtactcgccgggctatttctttatccaattaccgcagagtccgaagaagaaa

SEQ ID NO: 38654 - DNA, 393 bp, Glycine max
  Clone ID: LIB3056-003-Q1-N1-A6
gcatgatcaatttttttggttcttgatttccttcttttctcttggtttgtgttgtcgttgagaagtcgcacataatcttcttccttctcgattttcctctccttcgacgattcttagggtttcgcttcgttcaccaacgcgcgtggtttctcttctcttcacgattttggggtcgaaatttggagtttagtttgccggcatgtccatgagtgagcgcaagactattgacctagatcaaggatgggattttatgcacaaaggcattttgaagctgaagaacattctataagggcttcccgagcctcagttcagctcggaggactatatgatgctatacacgaccatatacaatatgtgcactcagaaaccggcttatgactattcccaacaact

SEQ ID NO: 38655 - DNA, 255 bp, Glycine max
  Clone ID: LIB3056-003-Q1-N1-A7
cttcgtttgcgtgctgaagctcttgttgtctcacaggtacacaacagcactggaggcaatcacagagggagtgaaccacatcaacatgtctgattcatacaagaagaatcgcatgtaggtcttcaacaccaaaaagcctacattcttctacgtcaatctcgccaagaggtctatgcaacaacataacgaggttgagctgtcagcactaggaatggctattgctacagtgattactagggctgagatcttgaaaaa

SEQ ID NO: 38656 - DNA, 257 bp, Glycine max
  Clone ID: LIB3056-003-Q1-N1-A9
attaaccatggcttcttctacatcacattcatcctttaggtccctgctgaacctgtctgcatccattcccatttcttcttgcgtatgcatgttcccaccgtctaaaaaacctagcaaagcaacaaaacggcgtcatgcttgggaagtagcatgcaatggtaaccctagaaataagatggacattctgatcggtcttggaggactctatggtgctacaacaagtctcacaagtaacaacaatggttctggatttgggg

SEQ ID NO: 38657 - DNA, 341 bp, Glycine max
  Clone ID: LIB3056-003-Q1-N1-B1
ctattctcaagtttctctctgtttcttcctacttcatgctatagcacttacaatactcaacaataacctaaccaaaccaaaccaaaccaaaacccttatctgcactcacttcacacaaaccaaagttaattaattaccaacacaaaatggatggaggctgtgtcacagacgaaaccaccacatgcagcgactctctttccgttccgccgcccagccgcgtcggcagcgttgcaagcgccgtcgtcgaccccgacggttgttgcgtttccggcgaggccgaatcccggaaactcccttcgtcgaaatacaaaggcgtggtgccgcaaccgaacggtcgctgg

SEQ ID NO: 38658 - DNA, 364 bp, Glycine max
  Clone ID: LIB3056-003-Q1-N1-B10
ctgaagttgcgagagtgaagaaatggcgcaagacttggcattggatttggaggagcttcgccgcctccacagcatcgccaaaagacctcgaaccctctctcttctctcctccgaaattcgtaacctcgaaaagttatcgtcagaggaagcttctgcgcagattccggcgccgatttcgaccggaactaaagtggcgccttcacctgcgctgaagtatgcggcactcgcgtcgttcagttgggaccaggatagtgacaaagttaagatatatgtgttaatggagggaatcgatgagaataaggttgaatccgagtttaagtcgatgtcattcgatgttaagttccatgatgttcaagggaagaac

SEQ ID NO: 38659 - DNA, 303 bp, Glycine max
  Clone ID: LIB3056-003-Q1-N1-B11
gcaacttgtatcaaatcaaaacgtccttcaagagctatggctgtctgaaagagtactaggatttctaagggaaataagggtggcacgtagaacgctgtttatccttttgtcaagaatgactggtacgatatcaaggtcccttgactattctaggtcacgaatattggcaaaaccctcgtatctcgtatccagtgaaccaatattgtatgctaaagactcaaacattggctttttgaagtctcattgactgatctgaaaggggatgaataccactccttcaagaagattcctatgagagctgag

SEQ ID NO: 38660 - DNA, 380 bp, Glycine max
  Clone ID: LIB3056-003-Q1-N1-B12
tcgaaatcataacacactctttcttctctctcgtgaattttagattctttcgctttctcttctatggattcaaagcgattcgatcgcgcgagtcgcaaggttcgggtcgtcaccaggatccgcgggtttgcgggtcccgaggctaattccgaacctgccgcttccagaacggtggagtgggtttcggtgaaccgcgaaaatttggaggatgtcaccatctccttcggagaccaatcttccagtcggtattcggtggactattgctataaggaagatgaagataatgaattgatatattcaagggaggtgaagcctcttgtgtctgcagcttttgatggtcataacagcactgttattgcacatggtgctaggggtagtgg

SEQ ID NO: 38661 - DNA, 321 bp, Glycine max
  Clone ID: LIB3056-003-Q1-N1-B2
cacaaccgaaacagattccatctctttacaaaacgacaacgctatcaaattggtcccttcttttccttttcctcttcctctccacccttcacatagctatcaccctatcaacccccaccaacttcatcaagtactcctgcagcaccacccagtacccagccctctgcatgcagtccctctacgtctacgccttcaccatccagcaagacccccacgagctcgtccagacagccctctccctctacctcaaccacaccgaggccatcaaaaccttcgtcgcaaaatgcaacaaattcagaggcctgaaaccgagagaatacg

SEQ ID NO: 38662 - DNA, 355 bp, Glycine max
  Clone ID: LIB3056-003-Q1-N1-B3
ctcgagccgaatcggctcgagtcagcacttgagttattagtatcaaccacgaatgtccacaagttgagaaagaaaagcaaaagatggaagctgttaagttggtgtctagtgatccaagtgagagaccagacacataccgagtcgcttacataattcatttcttgcttggtgctggcaacttgctcccttggaatgccttgatcactgcagtggattactttgcctacctctatccaaccaaacacatagaaaaggtgttctctgtggcctatatgatttcatctgtgatggtgcttcttgggatgatcagttggggaggttggagcaaaacaacattgaggctgagaatgaactt

SEQ ID NO: 38663 - DNA, 365 bp, Glycine max
  Clone ID: LIB3056-003-Q1-N1-B4
ttcaaattttgttcgttcaagtcaaagaaagtgtcactggtggtacccatgccgaggaaagttccaagacccgcacaactccagaggaggtggtggtctctgacgtggcacctgctgacgagaaaccagacaccaccaccgacgttgttgttccccgagagaaagacgcacatcaagaacaagaaacctcgccagaaaaaggagaaagagaacgttcccgaaacaactgaaaccgagtccgaggttgtttcaaaaccaagcggtgacgacaacgttcctgaatccggttctttcaaggaaggaaagcaccattgtttccgacctacctgaaaccgagaaaaaggctctgcaagaactcaaacaac

SEQ ID NO: 38664 - DNA, 367 bp, Glycine max
  Clone ID: LIB3056-003-Q1-N1-B5
ctcttggatcctatagtttcatgtgttcctaggcccctagaaattaaaagtgcatgcctagattgccatggaagatgcaagagggagtagtctcctactaccaaagaacatggaggagcacaacccaacacatgatcatggaacaacagaactgaggaacttcagatcatacctgagatgggtttacgtggatcacttcaacgtgtgcaaagcgggtctctcatggtccgggttcttcactttagcctttgttgtaccaacactctcacactttctacttgaatggcccacctgcgaccgggatcataagcgaccataccacatacccgtgcagatttctctctccgtctttgccggtctctctttc

SEQ ID NO: 38665 - DNA, 390 bp, Glycine max
  Clone ID: LIB3056-003-Q1-N1-B6
ctcttcttcattcagtctttgacttcttggctttcaagaatgacatccaattttggaacaaaaataaatctatggaaggactctctgcaaagaccgttgttgtgagctttgcttgtcagcttatcatcttcctttatctacttgacaatgacacctcttggatgattcttgcaagctctggaattggttgtgttattgagttttggaaaattggtaaagccatgcgcatagagattgataggacaggaaggatacctatgttgaagctccgcgatcgagaatcatacgtacggaataagacaaaggaatatgatgatattgctatgaagtatttgttctatgttttatttctccttgttgctggcttttctggttactcactgatgtatg

SEQ ID NO: 38666 - DNA, 401 bp, Glycine max
  Clone ID: LIB3056-003-Q1-N1-B7
gattgtcagatgagtgccccctgtaacaccacagttctttatccaagcaagggtggcaacattcattgtttcaaagccttaaccccttgcgctctctttgacgttctttcccctgcttactcatcagaagatggaagacactgctcatatttcaggaagtcaactaggaaagatcttccaggtgttgagcttgatcagctgagtggtgtaaagccatctgaaataacctggctagaagagatccaagcacctgaaaacctggtggttagaagaggtgtttacaaaggccctactataagacgatgaaagatacaactaatttgtatttacataacattagccaggcatgactagaaactaaatatgatggggatattaattaaaggggggatatcttggga

SEQ ID NO: 38667 - DNA, 399 bp, Glycine max
  Clone ID: LIB3056-003-Q1-N1-B8
gagcaatgttgttgacgatatggtcaacagcaacgccatcctctatgagcccggtgaacatccagaccatgtggttgtcattaagtacgtgccttatgtaggggacagcaagagggccatggatgagtacacttctgagatattcatgggtggaaagaacacaattgtgttgcacaacacatgtgaggattcactgttagctgctcctattatcttggacttggtccttcttgctgagctcagcactcgaatcgagtttaaagctgaaaatgagggaaaattccactcattccacccagttgcgaccatccttagttacctgaccaaagcccctctggttccaaccgggtacaccagtggtgaatgcgttgtcaaagcagcgagctatgctggaaaaca

SEQ ID NO: 38668 - DNA, 336 bp, Glycine max
  Clone ID: LIB3056-003-Q1-N1-B9
cctccttctagaatataaattcacgagagaaacacgaaaatctttcgattccggacagaaaaaaacttgggacggtgaaattggagggttttccgggatcccaaggccgaatcttgattcaatttacgaaaagagaacaccatccgttgctgaatcttgaagccgaatcaaatcgtagagagagagagagacacccagataggcgaatagcgtttagagagagaaaggtgaagtggggttgtctaaagtttgggtcttgtgtttgttgtgtgtggtgggtgaaagggaaagatgacggatgtggtactgcatatatacgatgtgacgaatagtgga

SEQ ID NO: 38669 - DNA, 390 bp, Glycine max
  Clone ID: LIB3056-003-Q1-N1-C1
gttttcgtatgcttaaaatgctgtggtgtgcacagaagtcttggctctcagatatcaaaggttttatctgtgacattggatgaatggtcaagtgatgaaatagatgcaatgattgaagttggaggaaattcttctgctaattcaatttatgaggcttattttccagaaggatttacaaaacctggaccagatgccactcatgatcagcgtgtgaaattcatccggttaaagtatgagcatcaagaatttttgcaacctagtgtgcgcattgtgtcaggaaaaagcaaccccccaaaaagtatatccaaagggattatggatagttttcgaattacaagtgattcacagcatatggaaaggatggtagaatttattggaatgtaaaaggtg

SEQ ID NO: 38670 - DNA, 369 bp, Glycine max
  Clone ID: LIB3056-003-Q1-N1-C10
ggctcttccaggtgacaatgttggctttaatgtgaagaatgttgcagtcaaggatctcaagcgtggttttgttgcatccaactccaaggatgaccctgccaaggaagctgccaacttcacatctcaagtcattatcatgaaccaccctggccagattggaaatggatacgcaccggtgcttgattgccacacttctcacattgctgtcaagttttctgaaatcttgaccaagattgacaggcgatctggtaaggagcttgagaaggagcccaaatttttgaagaatggtgatgcaagtatggttaagatgattccaaccaagcccatggtggttgaaactttctctgagtatccctcccttggtcggtt

SEQ ID NO: 38671 - DNA, 325 bp, Glycine max
  Clone ID: LIB3056-003-Q1-N1-C12
gcatgcgtactctagatgatcctctcgatgtattccaattccttatcttcaagatataccgagcaaaggcgagcatatatgaattggaaggatgcgtaatcttattaggcctatcctgaagccaaaggaaatgagatcggaattcctcggcgaattccaattccacatattcaagaaataaggatgcaaaaatgtatcatatatgaataggaattataagatttcttattaggcctatcctgaagccaaaggatatgagatcggaattcctcgattaattacaattccacataatgaagacttattgacgtataccagaccatat

SEQ ID NO: 38672 - DNA, 358 bp, Glycine max
  Clone ID: LIB3056-003-Q1-N1-C2
agaatacaataacatagcatagagtgagaagtgagaagagaaaaatggcaatctccatacccagtagacaacttttcatagatggagagtggaaagtccctcttctcaacaatcggtttccgatcatcaaccccgctactgaagacatcataaggcatattccagccgctactaaagaagatgttgaccttgcggtggatgctgctaaaagagccttttcccataacaaaggcaaagattggtcttcagctcctggctctgttcgtgctcgctatcttcgagccattgcttcaaagataacagagaaaaaggatgaactaggaaaggctggaaacaattgattgtgggaaaccactag

SEQ ID NO: 38673 - DNA, 287 bp, Glycine max
  Clone ID: LIB3056-003-Q1-N1-C3
ctgcgttcggcaccagcgaaacgctcttcgttatctttttctcgactccgcggcgtagatccgaggagttcgggaaaccctaactcatcttccttcacaacagaacaacgcttcttttccctatccatcatctcaactgaagtcatggctggactagcacctgaggggtcacagttcgatgctcgtcaatatgattccaaaatgagtgacttactttcatctgatggacaggacttcttcacatcctatgacgaggtttatgatagttttgacgctttgggtttgca

SEQ ID NO: 38674 - DNA, 411 bp, Glycine max
  Clone ID: LIB3056-003-Q1-N1-C4
ctccaatccattagccttctttccagttttcttcccctctctctggtcaccaggctctaacataaaacagaagcctttgtgaaaaaagagagaagagaatgctccctccacaacagcagtcacgggttggaggactacaaacctctctatctctagtttcttcagatccccgcctttctcccgaggagcctagatcaaactctgacaatctccgtgaatctcctactgaaagtgccagttctcgagaaacttggcctactgctgatgcaattgctgcaaagaagatggaaaatggaaaagcagaaatggattgccctgatcagtcaggtattcgctgggtttctagtgcagacaaaattagtcttcaggacattgccagaaaacgagttgatataatatgtgagaaaatgc

SEQ ID NO: 38675 - DNA, 204 bp, Glycine max
  Clone ID: LIB3056-003-Q1-N1-C5
cttcagctatggagtttcgttgccttccattggttttctctctcaatctgatcctgatgacagctcatgctgccatacctccagaagtttactgggaaaggatgcttccaaataccccaatgcccaaagcaatcatagactttctaagccttgatcaacttcctctttggtatggtgctaaggaaacccaatctacagatcaaa

SEQ ID NO: 38676 - DNA, 382 bp, Glycine max
  Clone ID: LIB3056-003-Q1-N1-C7
ctcgaacaaccacaacaccatcttcatcacatggcaaacgcagcatctggtatggcagtccatgatgactgcaagttgaggtttttggagctgaaggcaaaaaggacacaccgtttcatagtttttaagattgaggagcagcagaagcaggtcattgtggagaagcttggtgagcctgcccagggctatgaagatttcactgccagccttcctgctgacgagtgccgttatgctgtttatgattttgagtatctgactgaagggaatgtccctaaaagcagaatttttttcattgcgtggtcccctgacacatcaagggtgaggagcaagatgatttatgcaagctccaaagacagattcaagagggagctggatggaattc

SEQ ID NO: 38677 - DNA, 362 bp, Glycine max
  Clone ID: LIB3056-003-Q1-N1-C8
ggaaggcgttattctgagaagggtcattccttcggataacagttgcctcttcaatgctgttggctatgttatggatcatgacaaaaagaaagctgctgagttgagacaggttatagcagcaacagtagcaagtgatccacagaaatattgtgaagcatttcttgggaagccaaacacagagtattgtaactggattcttgactcagagaagtggggaggtgcaattgaactttcaatattagcagattattatggacgtgaaattgcagcatatgatattcagacaactcgatgtgatttgtatggtcaggaaaggaattattctgaaagagtgatgctgatttatgatggtctccactatg

SEQ ID NO: 38678 - DNA, 315 bp, Glycine max
  Clone ID: LIB3056-003-Q1-N1-D1
gttcctcacgcgcgtgatttcgcatccgcaggcactcgcgcagtgcgagcacactctcaccaaactcggcctgaacgtggcgcgcgaggccgtggacgacaccgtcggcgctgccgagttcgtcgccagcaacaatctccgcgacaccgccgtcatcgcgagcgcacgcgcggcggagctctacggcctgaacgtgatggcggacggaatccaagacgatccgagcaacgtcacgcggtttgtgatgctcgcgagagagcctatcatcccgcgcacggaccgggctttcaagacgagcattgtttcgcacacgac

SEQ ID NO: 38679 - DNA, 367 bp, Glycine max
  Clone ID: LIB3056-003-Q1-N1-D10
gttattattcttgcccggtattgagaaaatactttttcgctgaagctctgaataacagaccatcatcgacagatggggtctgaaggtcctccagcagctgtggcaacagttcatgtaacaggtttcaggaaattccatggagtttctgagaatccaacggagacaattgtcaataatttgaatgaatatttgaacaagaagaagggtttgccaaaaggcttagttattgggagttgcagcattcttgagactgcaggtcaaggagcactcattcccctctaccagacattgaagtctgccattacttccaaggaatcagaatcttcaagttccaataaaattatttggctgcattttggggttaaca

SEQ ID NO: 38680 - DNA, 368 bp, Glycine max
  Clone ID: LIB3056-003-Q1-N1-D11
ccaaacagtaccaaatgatctcacacacatactaagaagctgcaactctgattcacaggacatcatccaccggaaaaagactgaaagagctccatcacctcgctgcaacagttgatgtaacaggtttcaggaaattccatggagtttctgagaatccaacggagacaattgtcaataatttgaatgaatatttgaacaagaagaagggtttgccaaaaggcttagttattgggagttgcagcattcttgagactgcaggtcaaggagcactcattccgctgtaccagacattgaagtctgccattacttccaaggaatcagaatcttcaagttccaataaaattatttggctgcattttggggttaac

SEQ ID NO: 38681 - DNA, 380 bp, Glycine max
  Clone ID: LIB3056-003-Q1-N1-D12
ctctctttctccgattcattgccgctccaccagcaatggccacgcacgtgagtcacgtgatagtagcggcagcatttcttctatttcttctccctttctctttctccttctccatctcccattctcaccgatccgctgcaatcaacctcttcgctgccactcccacaagcttagaagacgcgtacgaggcgcttagagtttttcagattctcggaatcgaagagaagaatactcctgtgaacgaggacacgtgtcagaaagtagttgaaagtctagcctcgtcttctcctctcaaggatttgttctatgccttgaaagttaacgccattttaaaatgcaatgtcaatgggaacgtttttaaggatattgcttcaaggact

SEQ ID NO: 38682 - DNA, 382 bp, Glycine max
  Clone ID: LIB3056-003-Q1-N1-D2
gcaagcgcttaaagaggctcctgctgatatgcaatgcaaggatgagtttcttcttcagagtgtaaaaactgttgatggtaccagtccgaaggatatcactgcagacatgttcaacaaggatgcaaggcatgtggttgaggagtgcaaattgagagtgctgtatgtttctccacctcaaccaccgtctccagtcccagaaggttcggaggaaggatcctcacctaaaggttctgtttcagagaatggaaatgccaatggttctgacttcacacaatcggcaagaggatttactgagcgacctgaatcttaagacagatctgcatatgctagagctcttatcttaaggctgactgaagaaaagaataatgcaattcaacaaaat

SEQ ID NO: 38683 - DNA, 371 bp, Glycine max
  Clone ID: LIB3056-003-Q1-N1-D3
ctcgagcctgtatttttcaggctcgtactgctcacacagaactccttgatttaaaaccgcttcccatgtcttcccttggcaacagtacttatgaagcattatataaattttcacattttaatcctatacaaacacagacttttcatgtcctgtatcacacggacaataatgttctgttaggagctccaactggaagtggaaaaactatatctgctgagcttgccatgcttcgtctttttaatactcagcctgatatgaaagttatttatatagctcctttgaaagctattgtcagggaaaggaatgagtgattggcaaaagcgtcttggctctcaactagggaaaaaggatggtgaaatgactggagacta

SEQ ID NO: 38684 - DNA, 400 bp, Glycine max
  Clone ID: LIB3056-003-Q1-N1-D4
gaaaactcttcttcaacaacccttcttttgatctgtgcaagtgatcttgaaaggagggaacaacaatggtgaagtctataaactttctcctacttctgtctctactagcctttgctcccttatgtcactgtaaaaagaaaataggaggttacctctaccctcaattctacgacggttcatgccccagagctcaagagattgtccaatccatcgttgccaaggcagtggcaaaagaaccccgcatggctgcttcgttgctcaaactacatttccatgattgttttgtcaagggctgtgatgcatcggtgctgctagatagcagtggaactattatcagtgagaagaggtcaaatcccaaccgtgattcagcccgaggattttaaagcattgatgaaattaa

SEQ ID NO: 38685 - DNA, 335 bp, Glycine max
  Clone ID: LIB3056-003-Q1-N1-D5
ctcctcttctgccctccacacaacttctctctcctctctctctctctacaaatccttctttcttctcttcgctgctcactgtagcgtagccatggctttcagagttggaggagcgggaggaggaaatgcctcttctggcatgggtgttgctgagcatagcgtaagcacgttcctggaattgcagaggaagaaagttcatcgctatgtgatttttaaaattgacgagaaaaagaaagaggttgttgttgaaaaaactggaggccctgctgaaagctatgatgatttcactgcatccttgcctgaaaatgattgccgatatgctatctttgactttg

SEQ ID NO: 38686 - DNA, 402 bp, Glycine max
  Clone ID: LIB3056-003-Q1-N1-D6
ggatgagataccaagtgctcacactattaacctcctgagggggtgtgatgaagtaccctcaatccttcatctgcagctgaaaaattatctctattcatttgaatttcgcgtggatgataagagctggagggcttcaattcacaggtatcagactggtaagaccaggtatgcacattatcgacagtctgatgacatattggcggatgctggctggcattgtagcttttgcttacgtcggatcagcgatttcattttcaagatgaaagcctacagccattatgatagagtcaggttctctcactatttaaatcccgaaagaattcagatggtaatctgcaaagggaccgatttatttgacatgctgccggacgagtacactttcaaggatatcattggtaaaat

SEQ ID NO: 38687 - DNA, 346 bp, Glycine max
  Clone ID: LIB3056-003-Q1-N1-D7
tcttcttcttcttcttcaatgcaactctattctgttcggtgacacaacatacatcactctgaagaacatagcacgcgtggcccctttctttctctctctctctcttcaacaactgtgctctcagaacagatacagtttccactgagtaaatcgcaatgcaggtaactgagacgaggactgttcaagttaagcagctttcagatctagctggtgtaagagagattcacgagttcttctccttttctggagaaatcgagcatgttgagatcctgagtgaagatgggaaatcaaagactgcatatgtgacatttaaaggatcccaaagccctttaaattgcattattat

SEQ ID NO: 38688 - DNA, 384 bp, Glycine max
  Clone ID: LIB3056-003-Q1-N1-D8
attccaataaataccttcctctctatattttcgcacaataccctctcacccttcaacgatgagttactacaatcagcagcaaccacccgtcggtgttcctcctccccaaggttacccaccgccggattcttacggaaaggacgcgtaccctccgccagggtacccgccgcaaggaggataccctccgcaggcgtatccagcacaggggtaccctccaccctacgcgcctcctcagtacgctcagcctccgccgcaacaacaccagaattcatctggcccaggttgcttagaaggatggtaagtctctctctctctctctctctctgcatatttctgagtgaaggtgttcgtggcaactcagatcgggattcactcgattgattg

SEQ ID NO: 38689 - DNA, 298 bp, Glycine max
  Clone ID: LIB3056-003-Q1-N1-D9
aatttttctacaaactcgttttactattatgcatactacattggagcaaatgcctcctggattgtaatacccttgatcattgccatccgctgctggaggaagatctgtgcagcatttcgagttcaaggtggccagacaaaaaagcctaaagttcgttgaaggaaacattttcaggttattggtcttagagatcctgagctaataatgatgttttggggtagttgagataggagagattgttgtaagaattgtgacattgattctcttaaactgcatatctcaaggagaaaaaataaat

SEQ ID NO: 38690 - DNA, 397 bp, Glycine max
  Clone ID: LIB3056-003-Q1-N1-E1
caagttctcaaatcactcttcttcttcatccttctgatctgctaattctcaaggtattcaaaattgggtggttttcgattgaactgtgatgtccaagccactgctaggcatagcgtaagaggaaggtcaaagcaatgtcactttgttggtttcttcctcagccaccatggaaagtgtgtgcctgaatagctcaaaactgaaagagcgcaactacatggggttatctgattgttcatctgtggacagctccgcgccgtccttctcagatgagactaagagcaatctgaacctcaaggctactgagctcagactggggcttccggggtcgcaatctcccgaacgagattcagatctttgcttgagaagttcgattcagtttgatgaaaagccactgttt

SEQ ID NO: 38691 - DNA, 379 bp, Glycine max
  Clone ID: LIB3056-003-Q1-N1-E10
cagtgactaaaccaaacctctcactcgccgtcgtagggtttctcctttcgtttagcaacaacaacaatggttgcagccaagaaaaccaagaagacccatgagagcatcaacaacaggctcgctcttgtcatgaagagtggaaaattcaccctcggttacaagacggttctcaaatcacttaggagctccaaagggaaattgattatcattgctaacaactgcccccctttgaggaaatcagagattgaatactatgctatgttggccaaggttggagttcatcattacaatgggaacaatgtggatttgggcactgcatgtggaaaatattacagagtgtgctgccttagcattattgatcctggtgattctgatatca

SEQ ID NO: 38692 - DNA, 369 bp, Glycine max
  Clone ID: LIB3056-003-Q1-N1-E11
atttttgttgtttcgagtgagcgagggaagatgtacggtggatattcatggtgtgcagcagcaacaatggatgcaaccaacaaaaccatcagtacccatgatagcattaaaactatactccctcttctcatgaagagtggaaaattcaccctcggctacaagaccgttctcaaatcacttaggagctccaaagggaaattgatcattattgctaacaactgttccacctttgaggaaatcagagattgaatactatgctatgttggcacaaggttggacttcatcattacaatgggaacaatatggatctgggcactgcatgtggaaaatattacagagtgtgctggcttagcattattgatcctggtg

SEQ ID NO: 38693 - DNA, 356 bp, Glycine max
  Clone ID: LIB3056-003-Q1-N1-E12
cacaaacttgtttttagaccactaagttgcaggctcacaggcgaggcaaatgatcagttacgtcaatggtttgaacatgatgaagcactcgagcgtgctattaatggataatggattctattaccgcatggagatggaacaggtctttcaaagcctatatctttaagtcgaattgacatgaaacccttcataatcgggagtgcaccaatgcaagataattcaagcagttcagttacaatttcttcaccacaggtttcttcaacgcatgctcgaattaactataatgatggtgccttcttcttgattgatttacagagtgagcatggcacctggatcattgactactaatgaaagca

SEQ ID NO: 38694 - DNA, 400 bp, Glycine max
  unsure (1)..(400): unsure at all n locations
  Clone ID: LIB3056-003-Q1-N1-E3
ggatggacgaagaatgaaattgaaaagtgaaaagtagagatggaagaagaaaaagcagcggcatactacgacgagctgagccgtaagggcgagggagccgcgaggttcaagcaaggtctcggcttttcctcttccgcgccaaacgacgacgttccaaaaccctcctccttcctctccaaattcgtcaaagcctcctccactgcgccttcaaactctgagaagcaagcgcagcttcaatccatccaccacaagctcaagaaaaagccctcttccgagtctagggtttcgagcagcgatagcgatagaagtagaagacgaagcagagatagatacagggaatcgcggaggcgaagtangagtagagaaagacatcggcatagggagagagggagacggagga

SEQ ID NO: 38695 - DNA, 410 bp, Glycine max
  Clone ID: LIB3056-003-Q1-N1-E4
ctttaactttttttagcaaaatatataattaatattattattattattctttgagaattatagagaagattctaatattggcaatagaggttggcgggttttcctgaatttacaagggacatgtctttctttaatctaaactttttttcaaaaaaagaaaagtgcaatatttgtaattatccgtctaatgaccggaagaaaataagagatttcattcctataacttatagtttaagaataaatggctttatctgtttatttttccatgaattttgtaccattgtgttgtgatagtaattggtgcaaaatctgtcttttttcgggctgaaacacactttttttgatttggaagtgcaaaaaggttcttccaattgtgtggcttttcaagtacctagtttttaaaattgcag

SEQ ID NO: 38696 - DNA, 409 bp, Glycine max
  Clone ID: LIB3056-003-Q1-N1-E5
cgcagattgctgctctgtctcctcctcgtccatctctacctagcagtcctggagcctatgttgttgattgtgggaatgttatggaggagtttttgccagattcacgaagctacaaacaagatgtggaggaagagaatgatgtgcaaggttggacaatcaaaaagtcaagatgggattgtgatgatgttccgtcaccaaggggggctgatgaaaaacagaagcacggtaaagtgagctccagtcctgaaattggtggtggatcgtcggagagcacaatcactagatcatcaggaagcaatggaagagatcattattcgggtgcttcgtctgatgacaccgattctgaaaaggacttccttttggattccatggtcgatgttggagaacaaagtgatgatgattattctct

SEQ ID NO: 38697 - DNA, 407 bp, Glycine max
  unsure (1)..(407): unsure at all n locations
  Clone ID: LIB3056-003-Q1-N1-E6
gaagagcagtagaaagaaactagaatggccactttagacgaacgcccttctgcgaaaaggtggcttcctcttgaagctaaccctgaagtcatgaaccagttcctttggggtcttggccttccactggacgaggcagagtgctgtgatgtgtttggcttagatgaagagcttctggaaatggttccgaagcccgtcctcgccgtgctttttctttatccaattaccgcaaagtccgaagaagaaaggttgcaacaggaaaacgaaaaaaaggattatagcagcaaagtgtattttatgaagcaaaccgtgggtaatgcttgtggtacaatagggttgcttcatgcacttgggaacataacctncgaagtcaagcttgtttgagggtcattctttgataaattttttaa

SEQ ID NO: 38698 - DNA, 410 bp, Glycine max
  Clone ID: LIB3056-003-Q1-N1-E7
ctcgagccgtggtgttcatctttcccccactgacatttcttctcagcttccaacacagaaccctgatgcacccgttatgttggaccgcattttgcggctcttggcttgctacaatatcctttctttttctctccgtactctccctgatggcaaggttgagaggctctatggtctcgcccccgttgctaagtacctggtcaagaccgaagatggtgtctccattgctgctcttaacctcatgaaccaggacaaagtcctcatggaaagctggtactatttgaaagatgctgtccttgaagggggtattccatttaacaaagcatatggaatgacagcctttgaataccatggaacagatccaaggtttaacaaggttttcaacaaggggatggctgatcacttcacaatca

SEQ ID NO: 38699 - DNA, 402 bp, Glycine max
  Clone ID: LIB3056-003-Q1-N1-E8
caaaactctctctcgctctctttctctcttccattcccacgttgaaactgccggaaaacacagcgtcgccggagcgaagatcggaaaacgcaaccggaccacataattagggtttctcgaagaatgccactctgcaggcaccacattcggagcgcgcacgctctggcggatccggagctgtgccgcaccgccgatagcgacgactccgaagtgctcctagaagccgtcgcaatgtccggactcgtcggctttctccgccagctcggcgacctcgctcagtttgctgctgagatgttccatgacttacatgaagaagtactggctactaccgcaagaggccacagtcttatgtctcgtgttcaacagcttgaggctgaaagtccaacactagagaaagttttt

SEQ ID NO: 38700 - DNA, 390 bp, Glycine max
  Clone ID: LIB3056-003-Q1-N1-E9
gtcagttcaggtcttgcgaatgatggctcacttttttcaataggagacccaatgccttcagataaagatgcccatgaaatttctgatactccgttatctgttgaatttgctggtgacattcctgaccagacttttgttcctggtagcctatttctaaggaagtcacgttctttacccaatatcagagcttctatactttcttctgaaagagatgcttttaaacatgcattgtcaagatcttccgatgatcttcacgctttacgcatgtggcagaaagaggaattcatcaatgagtttgatgatcaaataagggcagatcaagaaagagagaatgacatgggaaaacctgaagatggtcgtatggacaggttctttgaagaatggtttgaa

SEQ ID NO: 38701 - DNA, 354 bp, Glycine max
  unsure (1)..(354): unsure at all n locations
  Clone ID: LIB3056-003-Q1-N1-F1
ggcaggggttcacgtgggaggcgtttagcggtttggatgggggcttcaagctctccgctgcgtccgcggtcatgctgtgcctggagacatggtactttcagattctggttttgctcgcggggcttctccctaatcctgagttggctcttgattccctntctatctgcaccacaatttctggatgggtgttcatgatctctgttggattcaatgcagctgcaagcgtgagggtgagcaacgaactangagcaagaagtccaaaatcagcatcgttttcagtggttgtggtgacagtgatttctttcataatatcagtaattgcagcactggtggttcttgcattaagagatgtca

SEQ ID NO: 38702 - DNA, 379 bp, Glycine max
  Clone ID: LIB3056-003-Q1-N1-F10
ccaaatttcaattccaccaaaaaccctaatttcctttctctccaactcttagatcttcacgttttagggctttctccaccttccgcaatgcacaaattgggaagaggtcatcgtgacaaactccagcagttcataacaataactggagccagcgagaaactagccctgcaggctctgaaggctagtgattggcatcttgaaggagcatttgatttcttttacagccaaccccagcttaaaacatttactgattctaggcacttggaggagctatacaatagatataaagatgcatatgttgatatgattttggcagatggtatcactctcctttgcaatgatatccaggtggatcctcaagatatagtaatggtaggtc

SEQ ID NO: 38703 - DNA, 315 bp, Glycine max
  Clone ID: LIB3056-003-Q1-N1-F11
ttttgcgctgaatccgtgtcctttgcgatcttctacgttcgtgaatttcgtcgagagggttaaacagcttggtaccctcgccttttctgcagtcattgggaacatcttctccgcgatcttgaccttctgcttcgcattagttggcactttgttgggggctttgactggagctttgataggacaagaaactgagagtggcttcattcgaggggctgctgttggtgccatatcaagagctgtattttccattgaagtgttcgaatcctatctagtctctggcattctgatgaatctgggattggctggtgtctatac

SEQ ID NO: 38704 - DNA, 354 bp, Glycine max
  Clone ID: LIB3056-003-Q1-N1-F12
atctaattacaccccacgtgtggttgaatccttgaagggaaagactttgaccagagtttctgctgcaaaatatcacacaattgtattaggatctgatggcgaggtatttacctggggtcatcgacttgttactccaaaacgtgttgtagttagtaggaacttaaagagaagtggaagcactctgttaaaatttcaccgcaaggaacggcttagtgtggtttctatagctgctggaatggtacacagcatggctcttacagatgatggcgcattattttattgggtctcctctgatcctgatcttagatgccaacagttatatgctatgtgcggaaggaatatggtgagcatatc

SEQ ID NO: 38705 - DNA, 326 bp, Glycine max
  Clone ID: LIB3056-003-Q1-N1-F2
aaacttgacgtcctgccgcgtcgtaactcgattcgctcgagcaaagtgccttggggaccctggaagtggtcttatcaagcgcctaaggaatcgatgacaatgattttctctccagcattgatccttatgtgattctcacatacagggcacaggagaaaaagagcactgtgcaagaagatgctggatccaagccacaatggaatgagagctttcttttcactgtctctgacagtgcatctgaacttaatctaaagataatggattaagacaactttagtcaagatgattgtcttggcgtggcaaccattcatctggatccagtgttt

SEQ ID NO: 38706 - DNA, 408 bp, Glycine max
  Clone ID: LIB3056-003-Q1-N1-F3
gtgagagtgagtgagtggttctcttgcagcaacaaggtttagtgacaccaaacagactggaaatgggtcgtggggtcagtgctggtggtggacagagttccttggattatctctttggcagtggggtacctgccagcagtgcaaatggtgctcgcactcaaaatgcaagtgctccttcaccaccggttgataagcaaagtccagcaccagcagcagcagcagcacctgcacctgcagcagcagcagcaccagcacctgcaccagcaccagcaccagcaccagctgataagcaaattccagctggaattcctggaagtctcagaaacaattaccatcgcgctgatgggcaaaactggggcaactttctcactgatcggccatctaccaaggttcatgctggcccgggtg

SEQ ID NO: 38707 - DNA, 361 bp, Glycine max
  Clone ID: LIB3056-003-Q1-N1-F5
ctttacctttcccggacctcacagtcgtcaattcagttcagccgcacgacctcctcccaagtcccaaccctccctctccctcacgccttgctctctcagccaccgggaggtcagccgtcaaggaagaaagccatcgcgagcacatccagcagacgaccacgaagccactgcagtcagtcacttggtcgggacgcttccgcttgtcacccatttacgagctcacaccgtcgcgattccaccgccgacagccactgtgacccccaaatgagtatcactagacagcgcccccttggtggtgggggtcatcatgtattggactacctggagcgcatgcaagcagaaaatcctgctttcttctatg

SEQ ID NO: 38708 - DNA, 369 bp, Glycine max
  Clone ID: LIB3056-003-Q1-N1-F6
cattttcaagctgtttggtgtaaagatgggacaagtgcttggttgtgttcaagtgaagcagtcaactgtagccgtcaaggaatgtttcgggaagtacgatgatgttcttcaacctggttgccattttgtgccatggtgtcttggctgcggtgtggctggtgtcctttctacgcgtgtcatgcagctaagtcttcgttgtgaaactaagacaaaggacaatgtgtttgttaatgtggttgcctcaatccaatatcgaacattggcagaaaaagcatcagattcctactacaaactcaccaataccaaatcacagatacaattctaagtctttgatgttatcagagctactgttccaaagatggaacttga

SEQ ID NO: 38709 - DNA, 382 bp, Glycine max
  Clone ID: LIB3056-003-Q1-N1-F7
tgcttccaagatggttctgctagagaagctctgggatgacgttgttgctggccctcaacctgagcgtggccttggcaagctcagaaaactcaccaccctcaaaactattgatgaaggagacagtagcaagctgcagaagacgttgtcgatgccgtcgacaccgacaaccccgatgactcccacgactccaacgacaccgggatccgcgcgtaaagctgacaacgtttggaggagcgtcttccatcctgggagcaactccgccacaaagaccatcggtgctcagatgtttgacaaaccacttcccaacactcccactgtctacgactggctgtacagtggggagaccagaagcaggcaccgctgaaaggataagctaagaaaa

SEQ ID NO: 38710 - DNA, 390 bp, Glycine max
  Clone ID: LIB3056-003-Q1-N1-F8
ctcgagccgattcggctcgagtacactactctctctctctctcttattgtatggccgccaattccagtagccgagggatcaccgccttagggaagcgagtcgccaaccggatctggacttccaacgcaccttctctcacttcaaggaggggagcatacagtagcggctcagtgtacgacaagaaccctgatgatgagatccagtctgggcaggtcccagacgatgtgatccaggcggcaacacaatccggcaaatactgggccccacatccacagactggggtatttgggccccccggaggaggtgaccaaactgcttctgccattcactctgatgcgctggaggagaaggcctggtttcgccccaccagtctcgaggatttcgagaagc

SEQ ID NO: 38711 - DNA, 361 bp, Glycine max
  Clone ID: LIB3056-003-Q1-N1-F9
ctttcaaccttaacactcctcacttcgtttccgtcgcaggtttttacacactccaccgctgcttccccttcacctccgatttcgttaatcagagatcaaaatgtctcgaagatatgacagccgtacaacaatcttctccccggaaggacgtctttaccaagtggaatatgcaatggaggctattgggaatgctggtaccgcaatagggatcttatcaaaagatggggtagtgctggttggtgaaaagaaggtcacatccaagctgctccaaacctcaacttccaccgagaaaatgtacaagattgatgatcatgttgcatgcgctgtggctgggataatgtctgatgccaacatcctaatc

SEQ ID NO: 38712 - DNA, 357 bp, Glycine max
  Clone ID: LIB3056-003-Q1-N1-G1
ctaatctcatttcttttcttgcgccgaaacatcctctcaagtctgaaaacctttaagatattatgtcgcgctcttgccgtcgctgctctcgctgttgatcctcccgttttgaactcaccgatccaagttcactttcatctacaactactctgatacaccgtgaagccaacggcggccaagacttgtacggcattagtccttgtggcgtttcagctttaggagttatcaattatgggtgagtttacaattcagattagcaacgaccttgttaatcaacttgttgatgattcggtcccgaagaaaaagaccagaaagactagacggaaggtggcaagagagactgaaaagccccaatct

SEQ ID NO: 38713 - DNA, 272 bp, Glycine max
  Clone ID: LIB3056-003-Q1-N1-G10
attagaccagtgaatgcaaagtgatgttccgagaattaccatacaggaattgaaagaacgacgcttgaacggattcaggagcccctgtagcgtgccaggacaagccatgcgatcaatacaagctagcctcggcagttcttttcttacgacccaattccgcattactatgcatatcctgcgattccgacattcactgctcgaacaaactcatgtaccgccacgatcccgtgtcgatgtgtgagacgtgcgagcctgcacccattgatgtcacg

SEQ ID NO: 38714 - DNA, 381 bp, Glycine max
  Clone ID: LIB3056-003-Q1-N1-G11
cggctcgaggaaatattcagcgtattttacagtgagtgttgttggacttggacagtagctgctgctttttcccttgtctccagctacctccgttcctcgatctcattcaccagacagaacagaatgggttgtcaaggtagcaaggagaaaaaatcaaagacagaatttactacttcctatggatcagcagccactggtagtggtggtggtactagttacaacactgttcagcctccgccgccgccaccaccacctactactactgctactactactaatcaggttcaaacatcagcagcacccaaaccacaatcaaaagcttctcctacagtgcagcagaaagcagacacgaagattctggggaaaccctttgaccacctt

SEQ ID NO: 38715 - DNA, 365 bp, Glycine max
  Clone ID: LIB3056-003-Q1-N1-G12
ctcgagccgtttgatcgcaacgcaatggctggcaccggcatccatccataccaccagcaatgggctccggcggcagccgctcctcctcctcctcctccggcagccgcgggcggtcctcctcctcacccaggggaggaggttcgaactatattcataactggtcttccggaagacgtgaaagagagagagctgcagaatctgctgagatggttgcccggtttcgaagcatctcaattgaatttcaaagctgagaagccaatgggttttgctctcttctccgcaccacaccaagcactcaccgccaaagacattcttcaggacatgctcttcgatcccgacaccaagtccgtcctccatactgagat

SEQ ID NO: 38716 - DNA, 210 bp, Glycine max
  Clone ID: LIB3056-003-Q1-N1-G2
ccgatagcaatttcggacctctctcactctctcgcaaacgctagcgacacatccctcgttcggtctcgcccccacggatcaaggtcagaaacacaatgagttcgtcgaacctgagagatcttcaacgcgaattggagaacaaagccaacgatctcagcaagcttcaaaaggaaattgcaaagaatcaccaaatgagaaagaagtacacac

SEQ ID NO: 38717 - DNA, 406 bp, Glycine max
  unsure (1)..(406): unsure at all n locations
  Clone ID: LIB3056-003-Q1-N1-G4
ccttctcatcgaatcgaagcgccgcaccgtgtttcttctgtgcctgaataacgcaaagaaaattgaagcatcctaagggttgtttctaagggataccgggttgggagagaagatgaagcaggtggtgggaacggtggtttcaaataagatgcagaaatcagtggtggtggcagtggatagactattctaccacaaattgtacgaccgatatgtcaagcgcacgtctaagtttatggctcatgatgagcacaatcattgtaacatcggtgaccgagttcggctggatccttctaggcctttgagtaagcataaacattgngcagttgctgaaattctcaagaaagcacgtatatatgttccgtcctcaatgccaatgccggngagtgtgagctcaagctctgaaaca

SEQ ID NO: 38718 - DNA, 401 bp, Glycine max
  Clone ID: LIB3056-003-Q1-N1-G5
cttctttcagtttgtctcccaggttgtcaatattccctcaatttatgtttcatttacgacgctctcaatttgttcaggtctttaacaacagcccagatgagactgcttactttagaatgatactgaaccgtgaaaatgttacaaattctgttgtcatggttcagccttcgttgatttgttattcattccatgctggtcctgaaccagctcttcttgatgttgcggccattgcggcagataagatcctgcttttggattcatttttcactgttgtcatttttcatggttcaaccattgctcagtggcgtaaggctggatatcataatgaaccggaacatcaggcatttgctcaattgctactagctcctcatgatgattcagatttaataattaaggagaga

SEQ ID NO: 38719 - DNA, 376 bp, Glycine max
  Clone ID: LIB3056-003-Q1-N1-G6
gagagatcagttcagagaaacgaaacgctattggaggcaaagcacgtaaaagatgtagttacagtatttcacggtttaagagctcctactctgagcgttcgaaagtacattgatcgtatcttcaagtactcaggttgcagcccatcatgctttgtcgtggcacacatatatgtggacagattcattcaacacacagaaatcaaattgacttcacttaatgtgcaccggcttctgataacaagcatcatgctagcagcaaagtttatagatgacgcattctacaacaatgcttactatgcaaaagttggaggagtgagcacgtctgaattaaacaggttggagatgagctttctatttggcataaattttaggcttc

SEQ ID NO: 38720 - DNA, 390 bp, Glycine max
  Clone ID: LIB3056-003-Q1-N1-G7
tgaagagagaaggcttaattaataagcaaatggaaaggctaaattttattaaaaatggagtgagtagattgcctccaggttttcgtttccagccaacagatgaagagcttgtgtttcagtacttgaaatgtaagatattctcgtgccagttgccagcttcaatcattcctgagattaatgtcagcaaaaatgatccttgggatttgccaggaaattgtgatgagcaagagaggtactttttcagctccaaggaagccaagtatcgaaacggcaatcgtatgaaccgaacaactaactctggctattggaaggcaacaggatcagacaaaaaaatttcatcatcaataagtaatattggttttgcggggcttagaaaaactctaatattta

SEQ ID NO: 38721 - DNA, 410 bp, Glycine max
  Clone ID: LIB3056-003-Q1-N1-G8
ttcaaatctcactgccccaaaaatcctttcttttttaaatagccatttgacttcagcctctacagcagagtcccagatctctgcattccaattcccatggcaggtcgctatgacagtaaccccttcgatgaggaagaagttaaccccttctataatcctggaagtgttcccgctgccactaattcaaggctttcacctctgaagccagaacctgttgattataattatggctttggtgcgacagttgatatacctcttgattcatcaacggatttgaaaaagaaggagaaggaacttcaagccaaggaaactgaattgagaaaaagggaacaggaagtgagacggagagaagaagctgcttcacgagctggaattgttcttgaggagaagaattggccggcttttttccc

SEQ ID NO: 38722 - DNA, 349 bp, Glycine max
  Clone ID: LIB3056-003-Q1-N1-G9
cttataacaacaattaaacatgagtgcagccagcagagcttggattgtggcatcaagcattggagcagtggaggcattgaaggatcaattgggggtgtgcaggtggaaccatgcattgaggtcactgcagcagcatgccaagagcaacattagatcctacactcaggccaaaaccttgtcttctgctacttctgctgctgtctccaataaggtcaagaggaccaaggaggagtccatgaggaaagtcatggacttgagctgttggggtcccaatacttcaaggttttagtgtgtggactattctaattgcattcatcattgtgctgcaaggtttatgaagattcaatac

SEQ ID NO: 38723 - DNA, 144 bp, Glycine max
  Clone ID: LIB3056-003-Q1-N1-H10
gccgttatttgcgcaaatgagccgtgtactataggggggccattgacgtgagaagtgtgaagacctgataagctacctatgtctccgataccagaagtatagtacgatgacctagctaaggttgcactgatcgtggatacacca

SEQ ID NO: 38724 - DNA, 326 bp, Glycine max
  Clone ID: LIB3056-003-Q1-N1-H11
cagcggcggggaatattcgatacggggagtgccagaagaatcatgcggcgaacacggcagggtatgctgtggatggctgcaaggaattcatggccagcgccggtgaaggaacatatgcggcgcttacgtgtgcggcttgctgctgccacaggaactttcacacgagggaagtactgcacggagttaactgaacgaacaagttatcaacttgtcatatgaattgagtgaggtcacacaattacacgtctttacaattctgctccttcatatatgattcgtacgaaccacccgaaatgaggaaatataaaaaatagacacacattata

SEQ ID NO: 38725 - DNA, 365 bp, Glycine max
  Clone ID: LIB3056-003-Q1-N1-H2
cgcacctctaggctctaactttttctcttacacttcaattttgctctcttcaaagcactctcacgcacatgatgaactcgcacaaacaactcttccccctcttctcatttttcttagttctctacctcttaggacaaagggtagtgctgcaagctgaagcaagtcctcaacatggtccaacaaaattgttcgttttcggagactcgtatgctgacacaggaaacattcagagaactgtctcaaattcatggaaggacccttatggcatcacctttcccggcaagcccggcggtcgtttctccgacggaagagtcctaaccgattacatggctaagtatttgaaagagaaatcaccaatccgctac

SEQ ID NO: 38726 - DNA, 368 bp, Glycine max
  Clone ID: LIB3056-003-Q1-N1-H5
gtgactgaaagtgaacgattgctgctctcttttggtgttgtcattgaaagaatttggtagctgagaagtaaacatttaactggttctatttgaaaatttggctgtcgtcttcattatcaatctgtcacatttgcacgtgcaatatgcttattctgctttgcattctccacatcatcttgaatggcccaactctctgccttgggaataaggttgaggacaaaattttgaaagttggagaagagctttggagagaaactttgccattacaagttctttgcagggtatctttcctctggaaactgacatacactaactaaaaaataccagatacctgctagcttttccatacaactgaagagaaacaagtc

SEQ ID NO: 38727 - DNA, 380 bp, Glycine max
  Clone ID: LIB3056-003-Q1-N1-H6
gctaattctcagcgtgtctttatggggtgtctctctgcgagcgaaatggaactctctgaggactacacgcgcgtgatttcacgcgggcctaacccgagaacaactcacatatttgataattgcatcattgagagtagctgctttgaacttgggtgttctgcttcttctgttaaggaaaatggatgttttcttgatcaaaccagctatcactctcggagctttctcagtgtctgctttcactgcaagaaaaatcttgggcagggtaaagacatctacatgtacaggggtgagagagcattatgcagcaatgaatgccggtaccaagggatgctgttggaggaagagatgagcaaattggaagccagtgatatttatgggcc

SEQ ID NO: 38728 - DNA, 403 bp, Glycine max
  Clone ID: LIB3056-003-Q1-N1-H7
gctttgagtcactaagcctagcttaaatttcagttcaatttggttggaaggcttcttggccctaggggtaattcactgaagcgagtggaggctaccacaggttgccgtgtatttatcagagggaaaggttcaataaaagaactagataaggtatcatctattctttagtggattgtcttgcaagttgcaaatcctaagaacctaatttaatgtcagttgcttctcctttcaatttgttgagtgtgtcttttttttttttctgactacatatattaactgtaaccattaacttcactctatcttttataatccaaaggaagagttgttaaggggaaggccaggctacgaacacttaaatgaaccactgcacgttttgattgaagctgagttacctgtcaatggt

SEQ ID NO: 38729 - DNA, 250 bp, Glycine max
  Clone ID: LIB3056-003-Q1-N1-H8
gattcacatatctactactctcaatgatttgaagtcactgcatcattatatctgccaaacctcaacactacgcaacgctaaagtcaatggtttatccgatactattctctgtcctatttacattcactttgagtctagcttttctactctcaaagcgtctatcaaaaagtcaaacacaaaatgttccacaaaggtctcttgcgtaccctatcatcgtagagacacttatttctctcaaagcacatataca

SEQ ID NO: 38730 - DNA, 338 bp, Glycine max
  Clone ID: LIB3056-003-Q1-N1-H9
gccgtttccgtggaagaaaaaccgcgtcccccgaatctggcaaatcgtcgccgatctccaatcgcccaaacgcggcggctccctcgtcgtcgagaccggcttccccacctacctcatcgaccttttcgtcaaaaaccgaagtcgcttcctaaaacaccgctccaaaaaaaccaccgtcgccgccgacgtcaaaatccctatccgccaccgatccgcctacctcgccgcctacctctgcggccacctctccgccgccacgcgtccccacctctccagccactccaatacaacgaaactacaccgtcgtttcggctccggatcgaatcgcccagtgctct

SEQ ID NO: 38731 - DNA, 337 bp, Glycine max
  Clone ID: LIB3056-004-Q1-N1-A1
cgtgaaccttgtgtgaatcgaatgcttattgatcgagtgctgtgactaaggtactacaacatttactactcatactcataggatctcaacgtatggtgtagcatatgatggagcataatggtcacacatgctgacagttgagtgcaccagctgtggttacaggcatccaattagacaaacctttgtctacaagattctatttgtatcaacaattacatctgcaagaagtgtgttgaacggattaagcttgacatctaacaagctggtgagatccaatttttcaagtcaaatgattcagcttgtgattaacactatcacgtgaatggatctctaactg

SEQ ID NO: 38732 - DNA, 425 bp, Glycine max
  unsure (1)..(425): unsure at all n locations
  Clone ID: LIB3056-004-Q1-N1-A10
attcgctacttgttaagggctgcactataccagaatgtctcagggaagaggcagtgcatctttgcctattgtggtcactgtggtttcactactgtgccttttggaacgtgctaacgcagcaacttactccgttggaggacctgggggatggaccttcaacactaatgcttggcccaatggaaaaagattcagagctggtgatatcctaatcttcaactatgactcaacgacccacaatgtggttgctgtggacagaagtggatacaacagctgcaagacaccaaggggtgctaaagtgttcagttcagggaaagaccaaatcaaactagcaagaaggcagaactacttcatatgtaactaccctggtcactgcgaatcntggatgaaaagtgccattaatgcgctgtgatatactagtagtgctc

SEQ ID NO: 38733 - DNA, 376 bp, Glycine max
  Clone ID: LIB3056-004-Q1-N1-A11
tgcctgcacgtctactctagagggtcccctcggggaattccaatagtttattatcaagaaataaggaggcaaaaatgggcatatatgaattggaattatgtggtttcttattaggcctatcctgaagccaaaggaaatgagatcggaattcctcggggaataccaatttcacattttcaagaaataaggaggcaaaaatgctcatatatgaattggaattatttgttttcttattaagcctatcctgaagccaaaggaaatgagatcggaattgctacaccaatttcaattgcacattggctagaaataatgatgcaaaaatgttcatacatgaattggaattatacgttcgcttattatgcctatactgaggcca

SEQ ID NO: 38734 - DNA, 373 bp, Glycine max
  Clone ID: LIB3056-004-Q1-N1-A12
cccttccttagctcggaaattcgcttgagggaactctgtctctctctctgtctctctctctataaacccgattgcacgttttgcgatagaactcgacaatggcgaacagcaaccttcctcgaagaatcatcaaggagacgcaccgtttgctcagagagcccgcacctggtgttagaggcttcccctcttgagagaatatgcgatatttcaatgtgatgatccttgggcctacccagtcgccttatgaaggaggcgttttcaagttagaactatttttgccagaagaatattcaatggctgctccaaggttatggttctaacacaaatatatcattcgcacattgataagcttggcaagatatgtcttgatatt

SEQ ID NO: 38735 - DNA, 419 bp, Glycine max
  Clone ID: LIB3056-004-Q1-N1-A2
actacttatcggactttatttgctgtctatatggtaaacctggtgcatatggagtggtgacacttcctttctcagtcagagaaggaattaacattttcttggctggctttgttccaacagaaaatcttaggttccgtgatgactcactcaccttcaaggttgctgagactccacaggaaactgctgaggaagctcagacatatgctcgatacaaatacccaaccatgagcaaaactcaaggcaattttagacttcgtgtagctgaaggagaatttactgattctcagattattgtgatgctgggtgagaatgggacaggaaagacgacatttattcgaatgctggctggtttattgaaacctgacaccatagaaggtggatctgaagtggagatgcctgaatttaatgtttcatacaag

SEQ ID NO: 38736 - DNA, 428 bp, Glycine max
  Clone ID: LIB3056-004-Q1-N1-A3
ctttgatacatctctattggtctctctctcattcccttaagattgagccaatgaagcaacaaattggtttgcttttctttgttctccttctttcctctttcttagcttctgcccgtctccttgaaccactgaaaggtccaagacaaggtgagaaggaagtggagatcaatgaaaacgcttttcctcaatcatctcatgagctaaaagatgatatggaagaactcatgggatcagaggagtgctatatgaaggatgaagaatgcattatcagaaggatgatggtggaggctcacttggattacatctacacccaacaccataaaccttgaattaattgaacttacaccttgattcaaacttcaaaggcagagtattaagtatgaatccctatatataaaaccaataaatacatgttctggttttccggg

SEQ ID NO: 38737 - DNA, 261 bp, Glycine max
  Clone ID: LIB3056-004-Q1-N1-A4
acagcatgattcactcatactatgaagcatcagcacttatgcaatggatctgctgcttctggaacagaccctgattagtctctacatcgctgctgtggtctgcatgatcgaatatcaactacggaagctgtaattcgtgctaccacacatgagaattcgcgtcccaatcttcggcatctgactcctagtttgtgacgatctcgagcacacgtatcctgaatgatttgaactaaaaactcggtgacatattgctacttcata

SEQ ID NO: 38738 - DNA, 422 bp, Glycine max
  unsure (1)..(422): unsure at all n locations
  Clone ID: LIB3056-004-Q1-N1-A5
cgttgttgaagttgcatgcttagtttctgggatcttgtcctttggatctgagacactctctgagctttctttcttagaaaacgatgtcgtctcaacagcaagaccttcctcttcatctcaacctcttatggtcgacctcactctcattcaaggagctgattctaaaggagctgtctgtttggatggaacggtgcctggataccatttggatcgtggatttggatctggtgcagatagttggctaattcatttggagggaggaggatggtgtaataccatcagaaactgtgtctatagaaaaaatactcgtcgtggatcctcgaaacacatggaaaatcaaataccattcacgggaatattgagcaacatacctgaagaaaaccctgatttctntaactggaatagagttaaattacggtact

SEQ ID NO: 38739 - DNA, 401 bp, Glycine max
  unsure (1)..(401): unsure at all n locations
  Clone ID: LIB3056-004-Q1-N1-A6
gttcttgagagaagttattaatgagaaggtggacatatgggctcttgggtgtctcctttttcgcatatgctacttcaaaagtgcttttgatggggagtcaaagctccaagtcttaaatggaaactaccgcattcctgaattaccaaaatacaattcacctgtgacggacttgataagagacatgctccaagctagaccagataacagaccagatatcacgcaggcaagcgctttgcttgattggccattcatctccatcagtttaggtctggtttcgtgttaatgagcaactacctattaatttacagaagtcattacctgacagaccacctgaattgccctcatccaacgatcatgaaagtgtgtcaatgccctcaaacagatcacctncaatgcctcgt

SEQ ID NO: 38740 - DNA, 419 bp, Glycine max
  Clone ID: LIB3056-004-Q1-N1-A7
cacccttgtttgagccaggggagttaaagtcatggtctttgtacagagctgggattgcagagtttgtggccacattcttgttcctctacatcactgtcttgactgtcatgggtgtcaacagggcacccaacaagtgctcctctgttggcattcaaggaattgcatgggctttcggtggcatgatctttgccctcgtctactgcactgctggaatatcaggtgggcacataaatccggcagtgacgttcggtttgtttctggctaggaagctgtccctgacaagagcgctgttctacattgtgatgcagtgtcttggagctatctgtggtgctggtgtggtgaaggggtttgaggggaatgccaggtatgagttattcaaaggtggagccaattttgtgagtcatggatacaccaagggt

SEQ ID NO: 38741 - DNA, 332 bp, Glycine max
  Clone ID: LIB3056-004-Q1-N1-A8
cgactatgtatttaccttggtctttatagaatgcgggtagagtcttatttgtgactggatgggtttttacaagaccatgtgttcaattgcccaatgcccagactgcactaaccgcctgcactgcaatgtattagcgttccttcattaccatactacgcatcacatgggcaacttgcttacccatgcgttgcagttaaatcatgtaccctcttgatattacgtggtaccaactcttcgagcattatcagctctttattccgacttctatggattcaacaagttacacagaatgtgaagttgcctatgacattccacccatgcttcaatgctac

SEQ ID NO: 38742 - DNA, 384 bp, Glycine max
  Clone ID: LIB3056-004-Q1-N1-A9
gtgtttactagatcatcaagttgggagcagtcagaataagtggcatggttgaaaggctacaattatctcagcaaataagggagaatgtatactctcttttccagcggatccttaatcagtggacatctctctttttcaaccgtcatattgaccaaatcatcttgtgttggttctatggagttgcaaagatttcacaactcaatctaacttttaaggagatcgtatacaactacagaaagcaaccacattgcaaaccacaagtttttcgtagtgtatttggtgattggtcattggctcgccgaaatggggtaactgaagagaacaggacaggagcatattgacataattaccttttacaatgaaatattcattccttctgtaaag

SEQ ID NO: 38743 - DNA, 400 bp, Glycine max
  Clone ID: LIB3056-004-Q1-N1-B1
aggcaagtgagcgtaggttggaagcagagagatggaaggttgggacccgaatacgaagtcgacgctgacacagatccctctgctgacgacgaaggcgggtccacgagacggagcggcatggacgcagaggcttaaggaagagtacaaggctctgatagcgtacacgcagatgaacaagtccaacgacaacgattggttccgtatctccgccgccaatccggaaggcactcgctggaccggtaaatgctggtacgttcacaacctcctcaagtacgaattcgacctccaattcgatgtccccgtcacttacccttccaccggccccgaactcgaactccctcaattggatggcaaaacccaaaagatgtataggggtggaaagatctgcttgactgtgcac

SEQ ID NO: 38744 - DNA, 238 bp, Glycine max
  Clone ID: LIB3056-004-Q1-N1-B10
gctgagttttgggcagaagtcacaatcattgccagaatgcaccacctcaacttggtgaggctgtggggattctgtgctgagaagggccaaaggatacttgtctatgaacacattcctggtggatcattggacaagtacctcttcagggtcaataagtctcataacaataaccatctcaaggagcaatcaagtagtttgaattcaaacacaccacaacaagaaaagcatgttttggatt

SEQ ID NO: 38745 - DNA, 386 bp, Glycine max
  Clone ID: LIB3056-004-Q1-N1-B11
aattagttcattctctttgcgcagttccctacctctcctgtcaagatgcagatcttcgtcaagaccctcaccggaaagaccatcacccttgaggtggaaagctctgacaccatcgacaacgtcaaggccaagatccaggacaaggaaggaattcccccggatcagcaacgtctcatcttcgccggaaagcagctcgaggacggccgtaccctcgccgactacaacattcagaaggagtcaacccttcaccttgtccttcgtctccgtggtggcatgcagatcttcgtcaagactctcactggcaaaaccataaccctagaggtcgaaagctctgacaccattgacaacgtcaaggccaagatccaagacaaggagggaattccccc

SEQ ID NO: 38746 - DNA, 295 bp, Glycine max
  unsure (1)..(295): unsure at all n locations
  Clone ID: LIB3056-004-Q1-N1-B12
caaggttcttgctgtctacaaggaagttattgctgaccttaaggcagctggtgcttcatggattcagtttgatgagcctacccttgtcttggaccttgagtctcacaagttgcaagcattcactgacgcatatgcagaacttgcgcctgctntgtctggtttgaatgttcttgttgagacctactntgctgacatccctgctgaggcatacaagaccctcacatctctgaatggcgtcactgcatatggatttgatttggcccgtggaaccaacactcttgatttgatcaagggt

SEQ ID NO: 38747 - DNA, 393 bp, Glycine max
  Clone ID: LIB3056-004-Q1-N1-B2
cacaaagccaccgcaacacaacagaagaatcctcaattctcattgtccctgttttttgtttggaggggaaaaaaagatattctttcttctttttgctgaaacccaataaagcgaaatcgcaaagggtgtcttggaaaagggtggtttcattaaaaagcagggatctttgggggggaaagagaagagaataggggcaagctttgttttggggcaatgggagatttggagaagcaagagagggtggaagaggatgcggaaggagagaaggagaggcttttggagggtatggcggttttggattttgacatgctttgttcctctgtggcgttgcaaagttcgcatgggagttgggggaaagctgggggttgggatggtgatgaggagcaacaaggt

SEQ ID NO: 38748 - DNA, 388 bp, Glycine max
  Clone ID: LIB3056-004-Q1-N1-B3
tcagtctctgtgtttgcggctgaggattccgaacgagtgaccttcttcgtttctcgcaaagtttaagtaatcatgggtaaggaaaaggttcacatcaacattgtcgtcattggacatgtcgactctgggaagtcaactaccactggtcacttgatctacaagcttggaggtattgacaagcgtgtgattgagaggttcgagaaggaggctgccgagatgaacaagaggtcattcaagtatgcctgggtgctcgacaagctcaaagctgagcgtgaaagaggaattaccattgatattgctttgtggaagtttgaaaccaccaagtactactgcacggtcattgatgctcctggacatcgtgactttatcaagaacatgattactggta

SEQ ID NO: 38749 - DNA, 321 bp, Glycine max
  unsure (1)..(321): unsure at all n locations
  Clone ID: LIB3056-002-Q1-B1-C8
cgcgggtgaggtagaacccttccacggtggtgactgcgcgatgggtgcctacaagtatgtttcagagctatggcgcaagaagcagtctgatgtcatgcgcttcttgcagcgggtgaggtgctgggagtataggcagcaaccttccattgttcgcttgacaaggtcgacccgccctgacaaggctcgtcgcttgggcttcaaggctaagcagggctatgtgatataccgtgttcgtgttaggangggtggccgaaagaggccagttcccaaaggtattgtttatgggaaagccacanacaaaggtgttacccaactgaaatt

SEQ ID NO: 38750 - DNA, 430 bp, Glycine max
  Clone ID: LIB3056-004-Q1-N1-B5
gcataaagaaaagaccatcaaagtttcacttcagccttatgcggtttagggtttcggtttttgaccctacctttgacgtatcgaaaccttaagtttcggatcaggtctgagcaatctggttggtagaacctttggtcttagagagtcaagttttatgtctgaattagacgatcaaattcctactgccttcgatccttttgctgatgcaaatgctgatgactcgggtgctgggtcaaaggagtatgtgcatattcgggtacagcagcgaaatggtaggaaaagcctgacaaccgttcagggattgaaaaaagaattcagctataacaagatacttaaagatgttaagaaagagttctgttgcaatggaacagttgttcaggacccagaactaggacaggttattcaacttcaaggtgatcagaggaagaat

SEQ ID NO: 38751 - DNA, 420 bp, Glycine max
  unsure (1)..(420): unsure at all n locations
  Clone ID: LIB3056-004-Q1-N1-B6
aaaagactgatggccttttcctcaagtgttgccgtgaggttgcagagaaatatcctgagataacttatgaggaagttgtcattgacaattgctgcatgatgcttgtgaagaatcctgcacttttcgatgtactagtgatgcctaacctttatggtgatattatcagtgacctttgtgctggcttgattggaggattgggcttaacaccaagctgcaacattggtgagggcggtattgcacttgctgaggctgtacatggttcagcacctgatattgctggaaagaatttggctaatccaactgctttactgctgagtggtgttacaatgttgcgccatttggacctncacgacaaagcagaacagattcagaaagctatcctcaacacgattgcagaagggaagtaccgaacagctgatc

SEQ ID NO: 38752 - DNA, 427 bp, Glycine max
  Clone ID: LIB3056-004-Q1-N1-B7
gtcaaattattcacaagctatctggacatattttccaattaagccagcataaatttgcatcaaatgttgttgagaaatgtttggagtatggtgatgctactgatcggcagttgttaattgcggagattgttggacatgacaaacaaaatgataatttattgacaatgatgaaagaccaatttgcaaattatgtgatccagaaggtttttgagatctgttctgaaaatcagcgagcaacattactttctcgcataagacttcatgctcatgctttgaaaaaatacacttatggaaaacacattgtggctcggtttgaacagctacttggagaagagaaccaaacaaatggatcatgatgacaataaaggtcttgcgcaatgcttccatgcaagcacaactagtatttctgtgttacaggagacagatg

SEQ ID NO: 38753 - DNA, 369 bp, Glycine max
  Clone ID: LIB3056-004-Q1-N1-B9
tccaaatccaaaaaaatcatggagcagttgtactacctcacccttgtgctactgtttgtgtccttcgtctctgtctcttttttcatcattttctacaggcatcgttctccgttcagcgtccccaacttgccgccggggaaggcggggtttccggtgatcggcgagagcctggagtttctgtcggcgggacggaaggggcttccggagaagttcttctccgatcgcatgacagagtactcttccaaagtgttcaagacctccatcttaggggagcctacagtgattttctgtggagccgcatgtaacaagttcttggtttctaacgagaacaaacacgtcatttcgtggtggcctgaaaatgtcaagaag

SEQ ID NO: 38754 - DNA, 417 bp, Glycine max
  Clone ID: LIB3056-004-Q1-N1-C1
caaagcagataatggtgaactccggcagcgaagacttggcgacccatcagcttcaacaggctataactgaacagcttttcaaagctgcagagctgatcgatgccggtaatctggaactcgcgcatgggatattggcgcggctcaatcaccaactttctcccattgggaagccttttcagagggctgctttttatttcaaagaggccttgcaattacttctccatccaaatgccaacaacagttctttcaccttctcacccactggccttttgctcaagattggtgcttacaagtcattctcagaaatctcaccagttctgcagttcgccaatttcacttgtaaccaagcactgcttgaagctgtggaagggtttgatcgcattcacataatagaatttgatattgggcttggtggac

SEQ ID NO: 38755 - DNA, 408 bp, Glycine max
  Clone ID: LIB3056-004-Q1-N1-C10
aattatcaactctttcaaaagggagaagaaaaggaaaggaaacaaaacgcacaaaggattattatagcaatggcagaacaaaaccaaaaccagacaactgaagctggaaggcaccaagaggttggccacaagagccttctccagagtgatgctctttaccagtatattctggagaccagtgtctacccaagagaacctgaatccatgaaagaactgagagagttgacagcaaaacacccatggaacatcatgacaacctctgcagacgaaaggcaattcttgaacatgctccttaagctcatcaatgccaagaacaccatggaaattggtgtctacactggatattcacttcttgccaccgctctcgctcttcctgaagatggaaagatcttggccatggatattaac

SEQ ID NO: 38756 - DNA, 210 bp, Glycine max
  Clone ID: LIB3056-004-Q1-N1-C11
ctgaattctaccttcacttggacagttagtcactctccgattccctcactcgcagtagtcaatacggatgccggcgccgccggcaaacgccggcctgggcgtcgccgccatgtcctacatcgccgtcgactacctccggcacctttctccggtgtggcactcgcgtctgcaaccggcactgtggtccctcctcgccctcgctgccgtggt

SEQ ID NO: 38757 - DNA, 419 bp, Glycine max
  Clone ID: LIB3056-004-Q1-N1-C12
gaaggaagtgttgtgggaggaaagaggcagagctgcaatcaccagagtggaagcgcgaaacggtcctccccggctttccattttttctcttctgatgaaattttagttcatcccagttgctgattgagattgaatttaaattcgaaaaagcgtacttgtgccactgtacttttacagatctgcggctacgggctagcctatcgtatttttgcgtagatctagtgtccgtgaagcggttaccatttcaccactcaccactattcatctctttcttctatattgatctgaaattgaagatggaaagcgaaaagaaatcgtcagcaatatctgatgtgggagcatgggccatgaacgttgtcagctccgtcggaattattatggccaacaaacagcttatgttccacaatggctatgctttc

SEQ ID NO: 38758 - DNA, 352 bp, Glycine max
  Clone ID: LIB3056-001-Q1-B1-A1
attaaatattcctatataaatataaattgggggtcttgaaattcaaagccatatctgtgattcaccaaatttgtgtttccccgactccgattgcaagcaatggacgccttcaattccttcttcgaatcaagaaaccgatggaattacgatactctcaaaaacttccgtcagatttctccggtcgtgcagaatcaactgaaacaagtttattttactctgtgttttgccgtggttgctgcggctgtcggggcttacattcatgtcctcgtgaacattgggggttttcttaccatagtggcatgcatgggaagcagcttttggttactctccagacctccttttgaacacagga

SEQ ID NO: 38759 - DNA, 347 bp, Glycine max
  Clone ID: LIB3056-001-Q1-B1-A10
ctcgatccaaggcattcagctcataccatggattctgctcatgtgaagtatcgtagctatgatcatgcagcacgcgtgagacacagaagccaaaggactgcgagatatgaatatcacagtgctctcaagtcattatgcagcttcacatcaggaattgctgcactgggaacttgagggagatagaattgttctcattcctgacttgtctatagctgttgaggaccgacatgtgaacaagttgcctgatgtgttagcgccataatgtcaatagtggaaagtgacattgcccgtgagctttgagcaagtcactgagatatgagattcactggttcatgtggcagcagata

SEQ ID NO: 38760 - DNA, 302 bp, Glycine max
  Clone ID: LIB3056-001-Q1-B1-A11
ctcgaggaccttttctaagaaatgcaatggctaggtatcccactatacaacatcactgcatacctccctgtcatcgagtccattggtttctcgagcacattgatggctgcaacatcatgccatgccttcccacaatgtgtgtttgatcactgggacatgatgtcttctgacccattggctgcaggattacaagctgcacagcgtgtcactgacattcgcaagatgaaaggcttgaatgcacagatgactcctcgctctgagtttgaagacaagctttaaatttgtttcataaattattttac

SEQ ID NO: 38761 - DNA, 326 bp, Glycine max
  Clone ID: LIB3056-001-Q1-B1-A12
atctggacgagggtccaagtgaactaagcggcacgttgcactcgctgatgcagcttcaggtgccttcctttgcagcatgtagctctcatgacgagctggcacggggatcatttctacatcacatcagcatctgtaaaagagggttagtcagagagtccgtgtcagctgatttctgatgcgttgcatgatgagtgacgtgaaaacgcgtctaaaagcacggctgcgtgtaagacatgcatggctacgactctcgtcatagtcatcgggcagataaccgccaatgctatagtagacgatgctttcactgtctgcgacacatgacgcaa

SEQ ID NO: 38762 - DNA, 218 bp, Glycine max
  Clone ID: LIB3056-001-Q1-B1-A2
atcagcctgaatgcagctcacttcaattgcggtagcgtatctatagctagctgggtgactaggcatacatttagtatctcaaaatctctcggcgtctaagtgagaagcagcacatgttaattctcgtgtgccagtcgcatcgtgatgctatgtgatttgtgcataggattttcctgctttagaatctcgtacactcagtccgcctctgtctgggcccc

SEQ ID NO: 38763 - DNA, 270 bp, Glycine max
  Clone ID: LIB3056-001-Q1-B1-A4
ggaaaattaaggcgcctttcatttactctgcatctgtagtatcgatcaccaatcaaatcgacacgtctacgcatcagacgattaagaatgaatctgggaaatatagacaaaatgccgtcattacaggatgaactcttcccatcaacctcaggaaagttcaagattgagcagtcccaccacatgaaccgccaactctatcgctgtttcgcgcccaccagcactatgttcctgtgagccctcttcttaatctcccttaacgcgtcctaactc

SEQ ID NO: 38764 - DNA, 336 bp, Glycine max
  Clone ID: LIB3056-001-Q1-B1-A6
ctcgagccgaatcggctcgagatcaaattagttcattctctttgcgcagttccctacctctcctttcaagatgcagatcttcgtcaagaccctcaccggaaagaccatcacccttgaggtggaaagctctgacaccatcgacaacgtcaaggccaagatccaggacaaggaaggaattcccccggatcagcaacgtctcatcttcgccggaaagcagctcgaggacggccgtaccctcgccgactacaacatccagaaggagtcaacccttcaccttgtccttcgtctccgtggtggcatgcagatcttcgtcaagactctcactggcaaaaccat

SEQ ID NO: 38765 - DNA, 321 bp, Glycine max
  Clone ID: LIB3056-001-Q1-B1-A7
tttcgaagcaacccacgtaacgtaaccagtttcgcgcacgaacgatggtggagagcacagaaccaggagcgagagggatactcgggttgttccagttccagttactccaccccaaaacgacacccttcgcgtctcacaagacgctcttagcgttcctgtgggtggccacgctggcctcggtgttgttgtggcagagaactacgatcagcgggtttctggtgcagggcggcgtgccggtgagggcgccgccgaagctaaggccggtggttttctgtttgacggagttcggcggtgtcggcgacggcgttacgctcaacacgg

SEQ ID NO: 38766 - DNA, 357 bp, Glycine max
  Clone ID: LIB3056-001-Q1-B1-A8
tccagacctactcaaggtgacattctgattgatatccaggacaggtttccccgtgatttcctttatgacatgttcgccaaagcaataagttctgaagattcctcaagcattggtccattaccaacagatatagcaggtttgagcttaaatatggacaatcatgagcctaaacgttggtcagattttcagaacttggctctagatgggtttgatactgtatcacgaattgatcaggataatcttggtttttcgtctgctgtgagaaaagtacaatatggggatattaaatcgcatccatctgcgcctcaaccagctggtggtgttttggcaggaagcacatattcccatctaaatatt

SEQ ID NO: 38767 - DNA, 372 bp, Glycine max
  Clone ID: LIB3056-001-Q1-B1-B10
gcaatgaccacatctcttctactcccatctccttcttgtgctgctatactgagcaaagggactaatagaatttgcactcgtgcttcatttcactcacttaaatcccatgtgaagaagggattcagagtgagagctcttaaagaacaaacagaggaaattgaaagtccttcacagccatcttcacctgaggaagttacaaagaaattttcagctcaaaagaggaatgaaaggataattctcaacagaaatcaaagggtgatcaagccaaggaattgctagcaaaatatggtggagcatacttagccacctcgattactctgtcattaatcgctttcgcactgtgttatgcattaattaacgcttgaattgatg

SEQ ID NO: 38768 - DNA, 363 bp, Glycine max
  Clone ID: LIB3056-001-Q1-B1-B11
gcgttgcccagatctcttctactctcatctccctcttgtgctgctatatttatcaaagggactaatacaatttgcattcgttcttcaattcactcacttaggtcccatgtgaagaacggattcatcgtgatagctcttaatcaactgtcagaggaaattgagagtccttcatagccatcttcatctgaggaagttacaaagaaattttcaactcaaacgacgactgaattgatgtttctcatcatacatcaatgggtgattatgcctaagaattgctagcaagatatcgtggagcatacttagccatctcgattactctgtcattaatctctttcgcactgtgttattcattaattaacgctg

SEQ ID NO: 38769 - DNA, 378 bp, Glycine max
  Clone ID: LIB3056-001-Q1-B1-B12
gcttaatcgaactattcagattctaaaaaatgagttggtggtgggctggagcaatcggtgctgccaagaagaaattcgaggaagaggaaccgccgcgaagcttccagagcgtgggcctggtgatcggcgtgacgggcatcgtgggcaacagcctcgccgagatcctccctctcgccgacacccccgccggtccatggaaggtctacggcgtcgcacgccgcccccgtccgccgtggaacgccgaccatcctgtcgagtacatccagtgcgacgtctccgatcccgccgacgccgaagccaaactctccgccctaaccgacgtcactcacgtcttcttcgtgtcgtggaccaaccgctccaccgaaacagaaaactgcg

SEQ ID NO: 38770 - DNA, 322 bp, Glycine max
  Clone ID: LIB3056-001-Q1-B1-B6
caaaagggatccatggccaaaagtttctgataatgcaaaagaccttgtgaagaagatgctagatcctgacccgaggcggcggcttactgcacaagaagtgttagatcatccatggttacaaaatgcaaagaaagctcctaatgtttccttaggagaaactgttagagcaaggctcaagcaattttctgtaatgaacaagcttaagaaaagagctttaagggtgattgctgagcatttgacagtagaagaagctgctgggctaaaagaaggattccagcttatggatacaaacaacagaggcaagattaacattgatgaatta

SEQ ID NO: 38771 - DNA, 356 bp, Glycine max
  Clone ID: LIB3056-001-Q1-B1-B7
caaaactgctgatggccctactgttggaccacgaggtatctattgtgggcatgaggatactgttgaagacgtggctttctgcccatcgagtgcacaggagttctgtagtgttggagatgattcttgtctcatcttatgggatgcacgtgttggctctagccctgtggttaaggttgagaaagctcataatgctgatcttcactgtgtggactggaatccccatgatgataatctgattcttactgggtcagcagataattctgttcgcatgtttgatcgccgcaatctcaccactaatggagttgggtcacccatccataaatttgagggtcacaaagctgctgttccttgtgttc

SEQ ID NO: 38772 - DNA, 353 bp, Glycine max
  Clone ID: LIB3056-001-Q1-B1-B8
caattttgtttttcgccttgtatctctcccaattcctcagtttccttctttcttcatctttgtgtcatggccagaggttcttcccagtctcagtcctccacttcaacagccacgcgaccaggaccagcaggcatggctccccgcggttccgccgccgccaccgccggcatgcgccgccgccgtctcggcggcggaaacagctccgccagcaccggcgttggaggcggcagcagcaacatgctgaggttctacacggacgacgccccggggctgaagatttcgccgacggtggtgctcgtgatgagcctctgcttcatcggcttcgtcaccgcgctccacgtgttcggcaaact

SEQ ID NO: 38773 - DNA, 382 bp, Glycine max
  Clone ID: LIB3056-001-Q1-B1-B9
gtgtttcgctgtctctcccatcctttcgcattctcaatacccttttgatttgtgaaaggaaagcaaacatggttgatcaggtccaacaccctacaatcatggacaaggttgctggtcagctccatctccgttctggtctttcatctggtattagaagttatgatggagcctaccgccacccagctatgtaccaaagaccctcttttgggaattactcgaatgctgcattgcagtttcctgtgatgcccacatgcaaagctaccatggatttgtctgctactgcaacatctgcctcacccgtctttgttgctgctccagcagagaaaggccattttcttttagactttctcatgggaggtgtttcagcagctgtctccaaaac

SEQ ID NO: 38774 - DNA, 261 bp, Glycine max
  Clone ID: LIB3056-001-Q1-B1-C1
acattttagggtaatattcccgcgattgatgaatcacacgacatatacattaaacacatgattacgaaaactctggttttcgcagcttacagtatcttctcactgctggccgaattatagattcgtgaagcagaatcattcccagcgcgagttaacgtctcgagattaggcccaatccatgtcaatgcacgctactacctccctcgataacatcgatgatgaattccattctcgcttgcatcaccacagcatccgtctcac

SEQ ID NO: 38775 - DNA, 374 bp, Glycine max
  Clone ID: LIB3056-001-Q1-B1-C10
ttcagtttctctccttctaaccctcattatatactacctatttctcaaccaagagcctatttatatatctcctgcaatggcactaaatgagcaaaagggcaaggatgatatcccagaaagtcaatatcagaaaggagtgaagcagttgtgtgagaaaggtcatcttaatgcagtacctaaaaagtacatacttcctgtttccgaaagacccaccaagagtagtgtggaagatccaaatgttgtgaagcaaaatcttcagttacccatcattgattttgccgaattgcttggtccaaataggccccaagtccttcaatccctagccaatgcttgtcaacagtatggatttttccagctggtaaatcattgcatgt

SEQ ID NO: 38776 - DNA, 341 bp, Glycine max
  Clone ID: LIB3056-001-Q1-B1-C12
aaagatagaaaaccctagcttaccttttcaactttcacgatgcaaatcttcgttaagacactcactggtaagataatcacccttgaggtggagagttcagataccatatataatgtaaagtccaagattcaagacaaggaaaggatcccaccagatcagcaacgtctcatttttgctggcaagcagcttgaggatggacgtacacttgctgattacaacatccatgaggagtccactcttcacttggtgctccggctccgtggtggaatgcaaatctttgttaagacattgaccggatcgacaaccaaccttgaggtcgatagctctgatcacattgacaa

SEQ ID NO: 38777 - DNA, 292 bp, Glycine max
  Clone ID: LIB3056-001-Q1-B1-C2
ggggtatcactgcgaattcactcatatgatgaatcagaccatggggtttgatgaagcagggatgaactggcacttgtgtgattcaccggcacgaagttactcaaagcatgacacggaaaaaggtccagatcaagcgtaataccatgatcaacctgacatcgctattgaagacactgttactcaaaaagaacctgccaagcgatcagtcatccaacgttcacatgcggatttgtcatctgcgccatgccatttttactcatatgaatgtggaagtggtccagttgattataga

SEQ ID NO: 38778 - DNA, 237 bp, Glycine max
  Clone ID: LIB3056-001-Q1-B1-C3
gcagtcaattcagtgaattcgagggttgagccttttgctcacggttccaccacgtcatgcataaaatggctctatagatcgtagtttccttgcggatccttgcaactgagatagcaaaaatagaattcatgctcaaactgcttttacactcaacaaactctatgcacatcactttgcattcacagagctttgccataataaaatacatgtttagtcaagctcacaaagcttctggtt

SEQ ID NO: 38779 - DNA, 328 bp, Glycine max
  Clone ID: LIB3056-001-Q1-B1-C5
atcatgtttgcagataagatacatagcagaatgggtgaaggaacttttgggcaggtcttagaatgctgggatagagaaaggaaggaaatggttgccgtaaaaattgtccgtggtattaagaagtatcgagaagcagccatgatacaaattgaggtgttgcaacagcttggtaaacacgataaaggaggcaatcgtcatgcatgacttgcgcatgattcatactgacctgaagcctgaaaacatactactaatgtcaccagagtatgtcaaagttcctgactacaagagttcagctagatcaccaagttcctagttcaagagagttccc

SEQ ID NO: 38780 - DNA, 243 bp, Glycine max
  Clone ID: LIB3056-001-Q1-B1-C6
atcatgtttgcaactcagatacatagccgaatgtgtgaaggaacttttgggcaggtcgtaggatgctgggataaatcaaggaacgaaactgggtgccgtcgaaattgtccgtggcattaagaagtatccagaaacagccatgatacaaattgaggtgttgcaacagcttggttaacacgatgcacgacgcaatcgtcatgcaagacttgcacatgatctcatactgacctcgaaccctgacaa

SEQ ID NO: 38781 - DNA, 291 bp, Glycine max
  Clone ID: LIB3056-001-Q1-B1-C7
ttatactgcacgctcccgcttcttcaactcttctaaggaaaatcacaagacgcaagatactttctcagggaatggagcgatggagaatgtggtggggctctcgcagtgtcgtactgcaacaagaagctctagaaatgaggcaagtccaaacgcactttggattcgttagagtctcttggtcgaaaacaagcctcagaggacccaggtggattcgatcaacggaatagggttcacagctgattgctgcattgctgtgtaggaagagaccagagaaatggatatcataggaga

SEQ ID NO: 38782 - DNA, 350 bp, Glycine max
  Clone ID: LIB3056-001-Q1-B1-C8
ctttcattccgtgtcgtaatattccccaatcaagctctctttagtctctacccatttcccttccattaaagtaactcgaaacggtttccctttcccatatggctgacgccaaagattcctccatagtagactccaaatcttccccaacctcaaccttaacatcctcagcctcacaacaacaacataggattatacgaactttcttgatggctcaggacatcctcagaatcctaccaactctcctctccgcagcatcaatcgccgtcatggtcaccaacaaccaaaccgttctcatcttcgctatccgcttccaagcccacttttattactcaccctccttcaagtttttt

SEQ ID NO: 38783 - DNA, 371 bp, Glycine max
  Clone ID: LIB3056-001-Q1-B1-C9
acttgttccacaatctgagaaaagccttgagtctgcaaaatttgtatatttgatgggtgctgatgatgttaacttagacaagatcccagatgatgcttttgttgtttatcaaggtcaccacggtgacaagagtgtttatcgggcaaatgttgttttgccagcagcagcattcagtgagaaggaagggacctatgaaaataccgatggtttctcacaacaaacattgcctgcagttccaacagttggtgactccagagatgattggaagataattcgagctctatctgaggtggcaggagtgcgtttgccctatgatacaattggggccgttcgtgctcgaatcagtactgtagccccaaaccttgtgaaaa

SEQ ID NO: 38784 - DNA, 356 bp, Glycine max
  Clone ID: LIB3056-001-Q1-B1-D1
actcaactcaccaacacagttgcattagtttctttccagatccaactcaaaattgcaatgggagtagaagatacagatatttgtatcatcaaggagccagatcatgttgtagtctattcagatggcatttcccatgattcaggtcatgaagctggaagtgatcatcacaatattacagagtcttatgaacaaatcaatgagactactgaacatcatagttcagaggagagtgcaaaggaatatgaggtgaaggaatgtacaacagaaatttctgttaaggtctctgatgtctctaatgttaaaaaatgtgaggataagttaacctcagattctgagggtgtcctcagtgagaaaag

SEQ ID NO: 38785 - DNA, 345 bp, Glycine max
  Clone ID: LIB3056-001-Q1-B1-D10
ctcaatccgctcttgactcactgacgcaggcccttagttcatacatcaggagaactgggcatggcattgttatggatgaggagaaagatagcgatatggtctcatcgcttcctgaatttaacgcttctcttgacgcattatgggattatatctttttcgtcaacgaagctttcagcatttcaattaaagatgcctttgagtatcttatcactcttcgtcagaagtgacctgtagagttgattgccaagtttttggctgataagcttcatgcaggtaataaaggtacttctgacaaggaactggaagctacacctgacacaatcctggtgttattcacgttcagtc

SEQ ID NO: 38786 - DNA, 365 bp, Glycine max
  Clone ID: LIB3056-001-Q1-B1-D11
agctctctctactgctagattcgacgattccagaagtgccttcctcctcctcctccttcttcccctctaatcggatccaaatccaaatccaaatccagttcaaagaagatgcaatacaagaacctggggcgatctggcctgaaggtgagccagctctcctacggcgcgtgggtgagcttcgggaaccagctggacgtgaaggaggcgaaggccctcctacagtgctgccgcgaccacggcgtcaacttcttcgacaacgccgaggtctacgccaacggccgcgccgaggaaatcatgggccaggccatccgggagctcggctggaagcgctccgacatcgtcgtctccaccaagatcttctgggg

SEQ ID NO: 38787 - DNA, 321 bp, Glycine max
  Clone ID: LIB3056-001-Q1-B1-D12
cggctcgagcttcaattaactcctcaccatggattgtgtcagccataagggttcatgctttcgtctccgtgagtctccgcgattatagttcgagtgtcaatccatcatggatcctgtcaacagttggtttgtgtccctgatgagttgcttactggacaaagattaatccagtacctgaaacaatcacatggcacctattgaacgttaagactgaatcatgtgatgaaacttcaatgggttgatgatcgttgttgtatgttgcgactactgttggtgtggcactatcatctaatgctgttgtctggccgccatgtaagctaa

SEQ ID NO: 38788 - DNA, 185 bp, Glycine max
  Clone ID: LIB3056-001-Q1-B1-D2
atcaagttcacgaagaccaacagcactcatgacgtgcaggctgcacaacatgattccgcagggactctttcagacaagcatgcggacaatgaatgggagcggtcatgctgtgagacacccacatggcatgacccagcctgcgcggctgctacctgggcgtcattgcccggcggagacacagtcca

SEQ ID NO: 38789 - DNA, 341 bp, Glycine max
  Clone ID: LIB3056-001-Q1-B1-D5
ctcaaccctctcaaccacacaatcctcacgtatgtgcagagtctccccattgccatccacttaaccctcgcctacgttcagcaagacccatgggccacacagtatggtcccatcagcaggaactttatcattggccctggaccagaatgcatgccctactgtatcgaagtacacaatatgatcacatgcagtatgacgatggtcacatctcatcctgagaagtatccgagggatactgaatatctctggcttcggcaacttagtcacgatagcatcattaattgctccgtatctcacagaataggatcgatgcaggtcttcgatccatacgtcaatacagt

SEQ ID NO: 38790 - DNA, 253 bp, Glycine max
  Clone ID: LIB3056-001-Q1-B1-D6
ctttcttgttcgactctgcttctttctccaacttcacacacacacacacataaaatctaattaactaacatggtaattgatatagcacttggtgtggctctggatttctccaaaagcagggagaatgctcagtaatggggaattgagaacttagcccaaaaatgtgacactatttaagttgttcacattgacttcaactctcgacacgattccatcatcaaactatgggcagaatctgggtcacctcttaatc

SEQ ID NO: 38791 - DNA, 363 bp, Glycine max
  Clone ID: LIB3056-001-Q1-B1-D7
aaaaaacatagcagcaaagcttcaatttccgcttccttcaatttttgaacaagcttctcgcttccctagcttagcaccgacatcacagatcgttaacgataaaataaaaatggatccaaacgcggtgaagtccactctctccaatctggcgtttggaaacgtaatggcagcagctgcccgtgattatcagaaggaattgcttgctcaagagaagactcaaggatcaagttcagtacatgaggaggttgaccttgacgagttaatggatgatcctgagttagaaaaattgcatgcagataggattgcagctcttaagaaagaagcagagaaacgggaggaatggaagaagaaaagtcatgggga

SEQ ID NO: 38792 - DNA, 343 bp, Glycine max
  Clone ID: LIB3056-001-Q1-B1-D8
gcacagtttttgagtccaaggatgaaaaaagtggaccctgaggtgtcgaaatccatgggaaatgatgcatacaagcagggaagatttgaagaggccttggctctgtatgatcgatcaattgcacttgattcaaataaggcaatatatcattgcaacaaaagtgcagctttaattggcttatgaaggcttcaggaagcaattgttgagtgtgaggaatcaatcaagctggacccttcatatgtcagagcccacaaccgtttggccacaatatatttcatgttgggagaagcagacaaagcactgaattgcaatcagataaccccatatgttgattcaatactta

SEQ ID NO: 38793 - DNA, 278 bp, Glycine max
  Clone ID: LIB3056-001-Q1-B1-D9
aattgacgctatgatctgatatgtacctatgtcagctgagatatagatagtggaaattgcattagttagagtgagatcatgacttctgacatgtatgcagtggagccagttacactggttggagtcaatatgaggcacatagtgcatcgagccgaggctctaattccaaccttgttaaaaccttaacttgcagaactaactttacgtcctgtagctacaagtgcctattcgtccaacctgaatgagcgaaccccatgaccacagggacattcacagcc

SEQ ID NO: 38794 - DNA, 337 bp, Glycine max
  Clone ID: LIB3056-001-Q1-B1-E1
attcatttctcacgtttttgttattggaatcccgttcaagattcgttatccttttgagtgcttctcatcgcacttctgattttcactttggtgtcgttagcacagcttccaccatacacgtatgtaagtggattgggtgatcccaagggaattattgcagagaataggtacgacacgatatgctggaggggtcaactggacttatcattgggatttccataagtgttgtgattggggttggattggcaacttcagcactgttctgtcatagatatcagcggaagcggtcgcaaattggcaagagcagttcgcggatggcacataccataccaatccg

SEQ ID NO: 38795 - DNA, 186 bp, Glycine max
  Clone ID: LIB3056-001-Q1-B1-E10
gtcgcttcgcttttcactgcgattggaatgcttcttcagaatatatgactcttgatggagggattgatcaggtgtttatgaggatagtagctcttcgatgtggtacccatgtgatagttatgcatcaggctggtccatacgcatcgcgcacttcatcatcaccaatgtcttactggaatggacatc

SEQ ID NO: 38796 - DNA, 289 bp, Glycine max
  Clone ID: LIB3056-001-Q1-B1-E11
cggctctagacggaagcgttttcgattacgcacgcaccttatattacctacgagaaaattattattgcgactattacagagagtagcatgcgcccaacggttatggtcagaaggattagctctcatttggattcttcatcttcctcacgatcctgtgatcgcatactcaagactctcgctagtggcttctcacgtcaatgtggcgtcagacctagatcatctccgacttttccaatcgtgcgcatctgaatccgtcaacaatcacctccttcgtgatccccatgatcgt

SEQ ID NO: 38797 - DNA, 258 bp, Glycine max
  Clone ID: LIB3056-001-Q1-B1-E12
cttgttcctgcaacgcactgaattcgattaatcaatccatcttcaattgctttgtttcgatcggaggaaaatggccgatcagttatcgaagggagaggaattcgagaaaaaggctgagaagaagctcagcggttggggcttgtttggctccaagtatgaagatgccgccgatctcttcgataaagccgccaattgcttcaagctcgccaaatcatgggacaaggctggagcgacatacctgaagttggcaagttgtca

SEQ ID NO: 38798 - DNA, 280 bp, Glycine max
  Clone ID: LIB3056-001-Q1-B1-E5
ctctagtatcctccacagtttcatacaaattcgtaatcatttttgctacgatctaccgcctcttcgaagctccaccgtacttgcaaagttgggtggcatggtatttggcctaagtctctccatacacacatcaactctcagtttttaactaaccggcgacatatttagcatccatcgcattcagttccaagctaacttcagtcaatgtttcgcatctaacatagcccatgtcactcactacagatttgctctctcgaactggtggccttcaccatgcatt

SEQ ID NO: 38799 - DNA, 84 bp, Glycine max
  Clone ID: LIB3056-001-Q1-B1-E6
ctcttgaagcctctccagtttgccttcacttcttaataataataataatattaattcctcttttcatgtagcaaactaaattga

SEQ ID NO: 38800 - DNA, 366 bp, Glycine max
  Clone ID: LIB3056-001-Q1-B1-E7
caagtttcgtttccaggtttcggcgcaatcggcttctgcttcaaggaaggagagcttgttattctctatcaacaagtaaaatgtcaggtgaagagggtgtcattgcagttgagccagctgctgctgctgctgccatcccaggcgagccaatggatatcatgactgccttacaacttgtgctcagaaaatctctggcttatggtggtttgtcgcgtggccttcatgaaggtgcaaatagtgattgagaagcatgctgcacaactctgtgttcttgcagaagactgtgaccagcctgactatgttaaactggttaaggccctttgtgcagagcacaatgttagcctgctgacagttccgagtgcaaag

SEQ ID NO: 38801 - DNA, 347 bp, Glycine max
  Clone ID: LIB3056-001-Q1-B1-E8
cgcaagcccaactccactttctactgctgccagctcaagtgaaagaaatatttctgatgagagtaatgatagggcaagccgagtagttcgctccctctttaaggaaacaaacacttcccctggagagtctagcttctctgcacccagaaccagttcagatagtcagcttggcacatcctctgagaagttgctagcagagaatgaggttcttgtaaatgaatttcttcacgagcatcactatagtgttactgatgaatttgatgtctctgatcacattcaaaacagtgttgaggggaaaataaagcagacaatggagaaggccttttgggatggtatcatggaatctg

SEQ ID NO: 38802 - DNA, 303 bp, Glycine max
  Clone ID: LIB3056-001-Q1-B1-E9
gtgaaggcgtggatatggaatgtgcgatgaacacgcaacacgactgccttcttccgtgcattcgccaccgtatgccgcgtcattcctgcagtcatacgatagggtgtcatgcagctcactaatacactcaacgaggagcatgagtgcaaaattcgcacagatgcccgtctggaagcattgttgatgagggaagtcaatgaatcgagactggcagactacctgagagagctacagcgtacagaggataagaaagaacgctatattgcagctctaaaacgagaaacgttaaccagggaaccttaa

SEQ ID NO: 38803 - DNA, 192 bp, Glycine max
  Clone ID: LIB3056-001-Q1-B1-F10
gtctagccatgtttctcacacctgtgttgcacaccctatgcgtgtatcatctggccatctgtaatgaaaacggtatggtgactgttacagggactttggttgttgcggctctggcagagaatctcatggcgaacctgaacaggagggttgaggtggttcctccacgctactgctaggatcgtggtagtgtgt

SEQ ID NO: 38804 - DNA, 355 bp, Glycine max
  Clone ID: LIB3056-001-Q1-B1-F11
taaaattggtcctctaagatgggtaatgaaaaccattaccaccatcagttttactatcagaaaagcacattccttccaatgctttgttcaaggccttccatcaaagaggtgactcttcctcgattcagagacccttctgcttcttctggcaacgaccctttgtccccaagaatcagttgtatgggtcaggtcaagagaaacaacaaaataagcggcattccaccctctcatagactcactttcacaaccaaaaccgacaacaccaacagaaacactacctcctcccctattgtcaaatactccaagctcaaaaaactcttctctggcaagaactttattattagcaccccaaaaa

SEQ ID NO: 38805 - DNA, 379 bp, Glycine max
  Clone ID: LIB3056-001-Q1-B1-F12
acttggtctactctgtatatcaaatccaaaggtcaatgttatggataccttaagcagacttagccatgatactgattcagaagtagctatggcagctgttatctccttgggtctgataggtgctggaacgaacaatgctcgaattgctggcatgcttcgcaatctttctagttattactacaaggataccagccttctattctgtgtgcggattgcccaaggtcttgtacatttgggaaagggcttattaacacttaatccatatcattctgatcgcttcttactgtcaccgacagcacttgctggattaattaccatgttgcacgcatgcctagacatgaaagctattgtgttgggaaaatatcactatgttctctac

SEQ ID NO: 38806 - DNA, 289 bp, Glycine max
  Clone ID: LIB3056-001-Q1-B1-F3
ttcggctcgagcgatgctggcggtgcaagcttctgatttcgaatgcacatgagtttttaaattctactatgattttccaattttccctcaacccctttattcctcgaagttgaaattatgggtttaattcaccatacggggacgattttatagattttatgatactatcattactaatactgttataagattttgagtagtagtagtactgtgataaggtgacatgtctagatgtgtttacatgttgcaaacagaaattgtaatcacttcagaatatcagtcgaatcgc

SEQ ID NO: 38807 - DNA, 374 bp, Glycine max
  Clone ID: LIB3056-001-Q1-B1-F4
actccaaaaggatccctccgggaaatccaattccacaatttcaagaaataaaggaggcaaaatgttcaaaaaagaaattggaataattggtttcctaataaggccaacccgaaacccaagggaatgagattcggaattccccgggaaattcaaattcacaatttcaagaaataatggggcaaaaatgttcataaaataattgggattatttggtttcctattaggcctatcctgaaaccaaaggaaatgagatcggaattccccggggaattccaattccacattttcaagaaataaggaggcaaaaatgttcacatatgaattggcattatttgttttcctattacgcctatcctgaagccaaaggaaatgag

SEQ ID NO: 38808 - DNA, 336 bp, Glycine max
  Clone ID: LIB3056-001-Q1-B1-F5
gctgaaccatccaaaatcgctcagcctttgaatttggcgaaaggttacaatttgtcatggaaaacagatttgtcaggggaaacaaattgggaaggcaggaaagggatgacacaatattacccaagattgtccctcccgtggaccagatttatgcaaaatggcttgccagacaccttgcaagaattcacagctttactccaaaacgtattcgtgcagtgcagccgccggttcattatgtacaacatatgaagttgaatggatggctggatgtggacttggatgatcctgatcttgctcatttgttcaagtacataatttctatatgccatattggca

SEQ ID NO: 38809 - DNA, 332 bp, Glycine max
  Clone ID: LIB3056-001-Q1-B1-F7
cactcacaaacgcacactgaattcaaaaacatcgaaagagagaggcatggccgagcaaaccttcatcatgatcaagccagatggcgttcaaagagggcttattggcgagattattagcagatttgagaggaacggtttttacatgaaagggttgaaactcgttactgtggaccgtccttttgctgagaagcactatgctgatttgtctgcaaagcctttctttagtggtttggtggattacattgtctctggccctgttgttgccacgatctgggagggtaagaatgttgttacaactgggcgaaagattattggaggcgacaaaccagctc

SEQ ID NO: 38810 - DNA, 324 bp, Glycine max
  Clone ID: LIB3056-001-Q1-B1-F8
caaaaccctagagaggacgagagagcgtgcaactttcggcaaccacagaccatgacattcaagcgcaggaatggaggtcgcaacaaacacggccgcggccatgtcaaattcatccgatgctccaactgcggaaaatgctgccccaaggacaatgccatcaagaggtttttggttacgaacattgttgaacaggctgcagtcagagatgtgcaggaagcttgtgtctatgaacaatatacacttccaaaactctatgtgaagatgcagtactgtgtttcctgtgctatccactctcatgttgtgagggttcgaatccgcaccgac

SEQ ID NO: 38811 - DNA, 251 bp, Glycine max
  Clone ID: LIB3056-001-Q1-B1-F9
gtagcatccgcctccgaagttttggtcaaaatcgatcctaacgccttggacattctctcatatcaccaccttcgtcgctcgtgccacggggggggacaagtgcatcctacggctatggtccttgattccctgttccacactccagtttgggtacggtcttgccggtattagtattctccgtcaggaacactctaccctctcacaacatcaatttccacggtgcctagccctgtaccaccaattgtttggcc

SEQ ID NO: 38812 - DNA, 338 bp, Glycine max
  Clone ID: LIB3056-001-Q1-B1-G1
aacattgtacgtacgtacctggggcacttggttcatatgcagataaatggctgccaaataatggtcaccaccttgcttatgcacttatgttttcaaaagctgttgtggtgattgcatgtccatgtgcacttggtttggcaacaccaactgctgtcatggtggcaacatgggttagggccaacaatggtgtgttaattaaatgatgagactccttggcaagggctcatatggtgaactacgtcatatttgataggacaggcactctaactcacgctaaagccactgttactgttgccaaagtgtttggaggaaaggtccgtggtcaatttcgtacactg

SEQ ID NO: 38813 - DNA, 381 bp, Glycine max
  Clone ID: LIB3056-001-Q1-B1-G10
gaatgatgcatgctaccatcaaatcattagccattggctaagcactcatgcaattgttgagccatttgtcatagcaacaaacaggcaactgagtgtggttcaccctatttacaaacttctgtttcctcactaccgtgacaccatgaatattaattcacttgcccggaaagccctggtcaatgcagatggtattatagagaaaacattcttgtggggtaggtactctatggaaatgtccgctgtcatttacaaggactgggttttcactgatcaagcattacctaatgatcttgtaaagagaggagttgctgttaaggacccatctgctccccatggagttcgtcttttgattgaggactatccttatgcttctgatgggct

SEQ ID NO: 38814 - DNA, 371 bp, Glycine max
  Clone ID: LIB3056-001-Q1-B1-G11
caagcttgtcttgactgaagatggatcagtggacataagcactgctcaatttgttgcatgggctgtaaggattttggctgcagttatgattcttcagagttctatggatcctctgttgggaacattggcattattatgtggatcatttgtctccttattgaagaaaatgcataggttgagattccttcgtcatttacgcaggcgtttgtttaaatctcccaagaaaaacaggaggagatcccaggttcctgattcatctccttttgatgattctcgtgatgaacttatgtacaagatgcaaagtaaagaggactctccactttttcggccacaactgagaggccctaccttgtccccttgcaaatctcctg

SEQ ID NO: 38815 - DNA, 320 bp, Glycine max
  Clone ID: LIB3056-001-Q1-B1-G3
gcacgattagcttgttgtttggagcgatccgaggacgactctgtaaacaggttgggttaccagcacatccttacacgtgatcaacttctcgctgacgccggccgttacaaggaaattgacaatggcatgcagtgtgaacttgacgggaactgcgttgttaaaggcgcacttgatgtagacattggtgccaacccttctgctgaaggtggaggagaatatgatggagttgatgatgcatctgttaacgttgttgacactgttgacacattcaaaattcaggagcaacccgcaatctgacaagaagcatgttgttaccgtca

SEQ ID NO: 38816 - DNA, 349 bp, Glycine max
  Clone ID: LIB3056-001-Q1-B1-G5
tgatagtatgcctccgtcagagttattaaatagaaaaaatttgcaaggcaacttggttgttgagaaattagatagcctaatggtgctggcatttttgcaccttgaatcctgtcaaagcagtggccgtttgactgaggtattcgatactctactagcttcatttcagagaaccgtattgaatgcgtacaagtcaaaatttacccagtatgtgatgttctatgcatgtgcactggaccctgaaggatgtggtgtgaaatttgccatggttcttgctgatatgtttggatgtgatgttaatccccctattactaggatgagtgctgctgcttatcttgctagttatttgact

SEQ ID NO: 38817 - DNA, 333 bp, Glycine max
  Clone ID: LIB3056-001-Q1-B1-G6
ttcctttgcaactagttcattgaagagcaacaaaaataatggctgaaacaaagttgagctttaaggacaaaagatggtcactccatgggatgactgctctagtcacaggagctacccgaggcatagggcatgccattgttgaagaattggcagaatttggggcagctgttcatatttgtgcacggtaccaagatgatattgataaatgtttggaagagtggaaaggcaagggacttactgtgacgggttcagtatgtgatttacaatgttctgaccaacgcacaagattaatggaaattctttcctccatcttccacggaaagctcaatattt

SEQ ID NO: 38818 - DNA, 334 bp, Glycine max
  Clone ID: LIB3056-001-Q1-B1-G7
tcctcatccactttcccgattgaaatgaaagaacagtacagacagctctattctggaagattgccgagaacagaggcatcccaccagacgagagcgtttattttccaatccgagcgatgagagttcccgcatccccatatgctagcattagcaatgtccgccacacatgtaccaacccgaacaccttcacctactaacacacctcggtcctcgacatatgccggagcgccaagccactaacggaagctcactgattccatgcatgacccagttcagaacaaccagctagacctgtatgatcacgttctgccaaattctgaatggtgggaatcca

SEQ ID NO: 38819 - DNA, 236 bp, Glycine max
  Clone ID: LIB3056-001-Q1-B1-G8
tccccatccactttctcgattgatatgcaagaacaggacagactgctccattctggatgtttgccgaaaacatgaggcatcccaccacaccaggggcgtgtcacatttcaatcctagcgactagagttcccgcatccccatgttctagcatgtagccatgtccgcggcacatgtttcaatccgagcacccgtcacctacgaacacacctcggtcctcgacatatgccggagcccaa

SEQ ID NO: 38820 - DNA, 378 bp, Glycine max
  unsure (1)..(378): unsure at all n locations
  Clone ID: LIB3056-001-Q1-B1-G9
cacaatctctgttcaacgacgctagagaataatatctcaagtatcatgtgatgagatgaaccaagcacaacaacttcaagaagcttgaagtttgaactgtctcaaacatgttctcaaagcttcagccacaacaccagcaacagcatcaaccttttcaattctctcgtgaatgtcaaacgtccgaggacgatgacagccgaagcagcggtggccctaacaccgccgtcgcccaaaaatcagttttaggcggcggaggatgcagcgatggggccacaattgaagtggtgcggcggcccangggccgcccgcccgggtccaagaacaggcccaagccgcctctcataataacgcgcgagcccgagcccgccatgaacccgt

SEQ ID NO: 38821 - DNA, 351 bp, Glycine max
  Clone ID: LIB3056-001-Q1-B1-H1
atggctttaggtgttcctgctcttccgttgacatacgtggctcacgttctggcagttgttgccagcgtcttggtcgtggtctgggtcgtcaatttcaggggtggcttggcttgggattctgataacaagtccctcatcttcaacattcatccagttcttattgttattggcttactagttcatgggggtgaagctattataagttacaaagcttttcccctaaagaaggaagtgaagaaattgatacaccttgttttccatgccatcgcattaatacttggaatagttggaatttatactgccttcaagtttcacaatgaaagtgggattgccaatctctacagcttgcat

SEQ ID NO: 38822 - DNA, 355 bp, Glycine max
  Clone ID: LIB3056-001-Q1-B1-H10
gtagaagccacttggattctctcgtctcctcggtgatcaccagttacccttctcgatttctcagcacagcgagagagatagagtcattcggcattcgaatgcgtgtgttgtgtggtcagtcaccgatggcagcactaactgccagggtacatgccgctgacgattaacgcatcacactgcctcgtaatggcgataccggtgtcagacagagtgactgcttttgcgaatttctgatggctccatcacaactaattttatgacatcagtggcattgatcttaagagatgaatgattgtacttgatggcaaacgggtcaagtgacaaatctgggatactgctgatcacgagcgatttc

SEQ ID NO: 38823 - DNA, 348 bp, Glycine max
  Clone ID: LIB3056-001-Q1-B1-H12
ggttattcaatgaactctgttgaaggtgctgctgtttctaccattcatgttaccccagaagatggtttcagttatgcaagctttgagactgttgggtatgacttcaaagtggtgaatctgaacgaaatggttaagagggtattggcatgttttctcccaactgagttctctgttgcagttcatgtggatggtgcaagcaagttgtttgatcagacgtgttttctggatgttaagggatactgtcgcgaagagaggagccacgaagggcttggaatgggtggttctcttgtctaccaaaaatttgccaagacttgtgactgtggttcacctagatcaactctgaagtgc

SEQ ID NO: 38824 - DNA, 361 bp, Glycine max
  Clone ID: LIB3056-001-Q1-B1-H4
acgcgtaagtcaacactcgattcgacgcaaccaggaccaaattaaccctcaaactccgtttcactctgaaagaaagtgctgcagaaaacacacccaaacagagagaggaacaggtgtgtgagggatagactaagaattgaaagaaaaaacgtttgcaaaggaagaaaccttgcaaatttaacaccagaaaagaagatctgtgatttctccttcctttttccttttgtttgcataggaaaaaaaacacaaacccttcatctgagcctgaatttgtatcattgagaattttcaaaaaggattgtctcctcagagacacagatcttgacgtatggagacagaagagaagaaccagaaagggtgc

SEQ ID NO: 38825 - DNA, 344 bp, Glycine max
  Clone ID: LIB3056-001-Q1-B1-H5
ctcgagccgaatcggctcgagcggctcgagaatttctctttctctctttttttgtgtgtccaaaatggctcctagttctgctcacaacaatgggttctatgtgcttatgctagttgggatagtggttagcactatggttgctacctgtgctggtagcttctaccaagactttgatctaacatggggtggtgaccgtgctaagatattcaatggtggccagcttctatcactttccctagacaaagtctctggctctggcttcaaatcaaagaaagaatacctatttgggaggattgatatgcagctcaagctcgttgccggcaactctgctggcactgtcactg

SEQ ID NO: 38826 - DNA, 365 bp, Glycine max
  Clone ID: LIB3056-001-Q1-B1-H6
cggctcgagctcgagccgattcggctcgaggcttcttcaaacgaggcaatttggcacagcgtgtccatgggtcagactcacacccgcaagcaaaagaaatagctcagtctcattgagaaggagcaattgtggcccaaaatgttcggtgtcccaattggaattgaagagtgagagtgagagcaaaacgaagccgtatccagcagaggcatcgaggaccataatggagttggctaaggtgggcacgctgtgtacgttgacccaagagggtttgccccttggtactggggttcgattcgcggttgaccctgaacatggcactcccttgttctgcttcaattccactgacaacactaacatcccctcct

SEQ ID NO: 38827 - DNA, 339 bp, Glycine max
  Clone ID: LIB3056-001-Q1-B1-H7
attctccatacctcaacgaagaggttaaagagacggcaacactttgctgtccgccttgaccgagcagagcttcgtcttggccctcgattttgccctaaagtactctcagtcacaacagacaccgtcgtcgtcgtcgtcgtcatcaatggcaccgaagcagaccaaggctgagaagaagatcgcttacgatgcgaagctgtgcgacctaatggaggagtacggccagatcctcgttgtgaactccgataacgtgggatcgaaccagctccagaacattcgcaagggtctccgtggcgactccgtcgtcctcatggggaagaacaccatgatgaagcgctc

SEQ ID NO: 38828 - DNA, 353 bp, Glycine max
  Clone ID: LIB3056-001-Q1-B1-H8
cttggtggaacaatggcacaacgctgtaaaattgcagatccatctggcttcatcttgtttcctcttgttgttcactcattcgatctgatagtttcatcagctggaatattttctatcatgggtacacgtgaaactggagttatagttcctgtggaggatccaatgacaattcttcagaaaggatattcttttacgattgttttagctgttctggcattcggtttgtctacccggtggttactttacactgagcaagcaccttcagcatggttcaattttgctttgtgtgggttgattggtattatcactgcttacatatttgtctggattgccaagtattatactgactacaa

SEQ ID NO: 38829 - DNA, 147 bp, Glycine max
  Clone ID: LIB3056-001-Q1-B1-H9
gtcgctctcactctctcattcataaggttcatagtcgccatagtgcgattcactgattactggatcgcaacggtgttgtctctcatgcattcaactgcattgtcatcgccagaggctgagggtagtcacccgatgtatcacccgcta

SEQ ID NO: 38830 - DNA, 387 bp, Glycine max
  Clone ID: LIB3056-002-Q1-B1-A1
atctttctaacccttgttcctgtcaaagttctggttcttgcacgtttgaaaaatgaacaagaaagcacctacttgcgttacaaattggcaggttataattgagaacaaggatggtatttttgatgggttgcctcacttaatttatgcatccagagagaagcgtccccagtatcatcataattacaaagccggagccatgaatgtcttgactgtgacatgtttgtgaacaatcccaagattgttcaacacgctttgtgcattttgatggattcacaaagaggaaaagaagttgcgttcgttcaatgtttccaacaattctacgatggaataaaagatgacccttttggaaatcagtgggtgattgcatttgagtacattatacggggc

SEQ ID NO: 38831 - DNA, 351 bp, Glycine max
  Clone ID: LIB3056-002-Q1-B1-A11
gatgatctacagattcatcttttgtttggtgtcaatatagagccctcatcacccctaatgcacaacgggatcgtaagtcataggggaggcatcagcagcagtgacgcagccagcataccttttcactacatctagttacctgaacaccacagtgcctgattcggcattgaatcccggaatgacacagactattggtgactcaggcttcctgcatactccagtaaagggggggcattgaatcccaactatcataacgtttgcgatggtttacatgtcacggtcgtttggaagatccatggacatcactaaattcatcagctaggctgagctacgcagtgagcttgctcgtat

SEQ ID NO: 38832 - DNA, 269 bp, Glycine max
  unsure (1)..(269): unsure at all n locations
  Clone ID: LIB3056-002-Q1-B1-A12
taaaagttatgcactaaaaaataatgggcttgacctttggataagtgcttatatgtataataaaatcggtgtgaagtttgacgagaagaatgcttagttatgtagatccttcctttgtatggaaaataaacttggatatgcatgtcggtgatatcttgaagtgtgttaaattatatttggaattgcncantgtnatgcatgggaaaatcataaacatccattcattaataatattcccatgcatcacattgagcacttcaaatgattac

SEQ ID NO: 38833 - DNA, 295 bp, Glycine max
  Clone ID: LIB3056-002-Q1-B1-A2
atctttctaacccttgtacctgtcaaagttctggtgcttgcacgtttgaggaatgaccaagaacgcacctacttgcgttacagattggcaggtgataactgagaacaaggatggtatttttgatgggttgcctcacttaatttatgcatccagagagaaacgtccccagtatcaacatgattacacagccggagccatgactgtcttgactgtgacaggtttggtaagtatcccacgattgttcaagacactgttgtgcattttaatggattcacactcgacgatcagaagttgc

SEQ ID NO: 38834 - DNA, 398 bp, Glycine max
  unsure (1)..(398): unsure at all n locations
  Clone ID: LIB3056-002-Q1-B1-A4
gttctcacaaattaaaaaataaaaatattatatatacatatatatatatatatatattctcttcgagtccgtcgaaaaagaaaacaatggcgaaacccagcagcgaaaagccagaggagcatagcgattccaagtactacaaaggggtccgaaagagaaaatggggcaaatgggtatccgaaataagactacccaacagccgtcagaggatttggttgggatcctacgacacccccgagaaggccgcgcgtgccttcgacgcggcaatgttctgcttacgtggccgcaacgccaagtttaatttccccgacaacccacccgacatcgccggcggaacgtccatgacgccgtcgcagattcagatcngcgccgcacaattcgcaaacgcgggggcccac

SEQ ID NO: 38835 - DNA, 279 bp, Glycine max
  Clone ID: LIB3056-002-Q1-B1-A5
aaatatgcatcacgacgctcaattcccctctggctagtggcgtcgttctgctcatatcaacatcatttcgtcatcgattaactgtggatctccaggatccagtgtcgagcatctacagaacttcagcatgctggcggagctttctaggggataacatcggacatgaaagtggagagtgagctatggcatgacttctggcaatgatctttccatgcactcttggacaggctccactcttggaccgaatgatatagtgtatgaatgaataccttatctgtt

SEQ ID NO: 38836 - DNA, 325 bp, Glycine max
  Clone ID: LIB3056-002-Q1-B1-A6
gaattgcaacgtcgaattagtacaactctatatcgcagcacagcacacatggaagcgttgcgcgtcgccccgagatcgccaactcgcgtccgccgccaccaacctcgcggccgaatgggactccaacccctcacagcgctcgtgcgacacgcgctccacatcgccgcaagcctctccaggcggccgagaggccgctcacgcttccgtcgccgccgctcgtcgcagacgatcgctcagaggcgaggcatcatgcacacatgtgcgtcatgccggattgtctcgactacccgcacggctacggcaggtcaattccagcttgcccttg

SEQ ID NO: 38837 - DNA, 360 bp, Glycine max
  Clone ID: LIB3056-002-Q1-B1-A9
ggccttttcttatctctctctttctttctcatcttttggggcctcaaaatagtaggtgccactacacaatatgggttccaaagtaaagaccttggttttgctctctttgttttgcttggctctatttgagtccttgcaccaagcaagagcagcaaagtcacataatgatcataatgtgactcgcttgaaggggagaaaggagttaaatagatgtaatttgttcattggaagttgggttattgacccttcacaccctctctatgactcctcaagctgcccctttatagatgctgagtttgattgccaaaagtatgggagacccgataagcagtatctcaaatactcttggaagcctgattc

SEQ ID NO: 38838 - DNA, 394 bp, Glycine max
  Clone ID: LIB3056-002-Q1-B1-B1
aaacacaccatggcatccgaaacataccagtccaagaatgtgtgtgtaattggtgctggaccctcggggctattggcagcgagggagctgagaaaagaacgtcacaaggtggttgtgttggagcagaaccatgatattggaggtcaatggctatatgacccaaatgtacaagacgaggatcccttatgaagagacccttggctaaaggtgcatagcagcatctatgagtctttaaggttcatgtctcccatagagatcatggggtcaactgatttctccattttagtcaagaaatgtagagacacactgacgtttccaagccagacaaagttccttctctagcttaacgacttttgtgaatggtttaagttgagtgagatgataaagctcaata

SEQ ID NO: 38839 - DNA, 372 bp, Glycine max
  Clone ID: LIB3056-002-Q1-B1-B10
ctctctcgcacgctatggccactgttctcagaacccccaccttccggccaccgcctccgccgcgcgccgcaaagtcgccgaaatcatcgcgcttcgccgtcgtgtccttcagacagagcaccacctgcgggagaaaaccctcctcgcttctctcctccctgccgttccctaatgttccctctctacggttcgtcaggttcgttcccttcgctttcgacggcgacaccgaggccccgcaagttcaggagccggaggttcaggttctggacccttcagatggtgctgttggtgtaaacgacagtgcaagtgataatgaggttagtgatgctgatgaaacatttgcttcacctttcttactgttacttcaatcgt

SEQ ID NO: 38840 - DNA, 364 bp, Glycine max
  Clone ID: LIB3056-002-Q1-B1-B11
atcaagctcactcatcacttctcatctttcttcacaataactattagctcatcatctccagcacagctggacatgtcatcaaatgcaaagctgcggttgcatgggacgcacggaacccatttgttattgaagaagtaaaggttgcactaccacaagctggtgaagtgcgtttgtagatgctctagagatctccttgccacactgacgtctacttctgggaagctaatggcgacaatcgagatgatcttcgtggatttagtgatgaagctggtcggattgtggagagcgtaagataggatgtgactcatcgtaaagtagaggaccatgctctcactgtgttcaccgaggagtctatggactgcct

SEQ ID NO: 38841 - DNA, 375 bp, Glycine max
  Clone ID: LIB3056-002-Q1-B1-B12
cagaaattgttgccccacttgttgcaacccttcccttggagatcaagggagaaattgaggagtttctcaaagtggttttcactctgtttcaagacctggattttactttcttagagatgaatcctttcacattggttgatggaaagccttatcctttggatatgagaggcgagctagatgacactgctgctttcaagaacttcaagaaatggggagacattgaatttccactgccatttggaagggttatgagtgccaccgagtctttcattcatggattagatgaaaagacaagtgcatccttaaaattcacagtgttgaacccaaagggccgaatttggacaatggtagctgggggaagtgctagtgtcattt

SEQ ID NO: 38842 - DNA, 396 bp, Glycine max
  Clone ID: LIB3056-002-Q1-B1-B3
ctcctacctcgtccttctaacccaacctcaacctgtttctccgagaatcacatccaacgcttctgtcatggaggaagttaacgttgtggaaactaaggatggaactgtctcagtagctgctgcgtttgctggtcatcaggaagccgtgcaggatagagaccacaaatttttaagaaaagctgttgaagaagcatataaaggggtagattgcaaagatggaggcccttttggtgctgttatagttcataatgatgaaatagttgctagttgtcacaacatggttctgtgtaacacagacccaactgctcatgctgaggtgacagcaataagagaagcttgtaagaagcctaagcagatagaacttgcagattgtgaaatatatgcttcttgtgaacc

SEQ ID NO: 38843 - DNA, 400 bp, Glycine max
  Clone ID: LIB3056-002-Q1-B1-B5
gcagaaatgaagatgatagatgatggctttgaggagaaagctaaagagcggaaaaaacagaagctgaaaatgctagaagagaaaggattgttaactaagagaagtaaaaagagaaaacgaaataaagaatttgcagaggaagggaaagaacaaaagaaagaggttttaactgctaggaatgtggcggaaatgaagatgatggatgagggtggcattgaggagaaagcagaagaggggggaaaacaaaaattgcgaacagagaaaggtttgtcaaagaaaaaaaagtcaaaagaaagaagaaaagaatctgcagaggaaggaaaaaaacagagaaaagaggaagtagaaccattagcagatatagcaactccaaagaaaaggagtaagaagagacagtaaa

SEQ ID NO: 38844 - DNA, 397 bp, Glycine max
  Clone ID: LIB3056-002-Q1-B1-B7
gcgtgagaggaggagttctctggtgtttagtattgattacagtactgaagttgaggctttggatggaagtggtagtgatgttggcgctcaggaaagtagcatggcgtctcctccaatcgacacaacacaagtgtccatggttgatgatcctccttcaagcagtaataatagcagcagcaacaacaacaacaacagattgtctatgttcaggaacaagtttggatttttggctggtaggaatttggtgccatgtgccttcagaaagtgggccaacattgatgacatctcaagtaccagctttcaatgatatttattttgtaagaatgggtctagtcacaactgagaagaacagtctagacccagctgcagctccgtttgctaaaaatccaagagacat

SEQ ID NO: 38845 - DNA, 397 bp, Glycine max
  unsure (1)..(397): unsure at all n locations
  Clone ID: LIB3056-002-Q1-B1-B8
caatcggtatcagcattcagcatcgccttcctaaattcaacgactccgttccgttccctttcttcttcctcgaaaccctaatcagcttctgcacttcctgctgattccacttttgcttcaaccgggaagatactgtagggcctgggccacctaatgataagatatccaatttctacataagtttccattgatacttttttaatcaaaatggattcagtgcctgctgatgtgtctaattcacatcctatcaatgaaccgtcgaattctcctccagctgaagagaccgacagacaagcttctgcttctgtagcctccaggcaagataattctccacatgaggcatcacctaggctatctcccacgggcatatcatcctgggccanaaacttgaaaattt

SEQ ID NO: 38846 - DNA, 378 bp, Glycine max
  Clone ID: LIB3056-002-Q1-B1-B9
aaaaaaaaaactcaaacaccttcaagaacttgtatctttctttgttagtatttgttactacaattttacattcttttcatctctacatatttcattagtcatggcacctcaagcagtttccttcaagtccttcgccgttgctcttattgtggcgcttttcttctccgcctccgctctggacttagtttcggggcagtcgccggtgccggcgccggcgccggcaccagatgccggagcagctggatccgtgtcgagctcggtcgccatgattggagcttccgttgtgatttcattgctcgccatcttcaagcactgaagaataatctgatgatggatcgattttgtgtgaagattattgattcgttctgcacactcaga

SEQ ID NO: 38847 - DNA, 367 bp, Glycine max
  Clone ID: LIB3056-002-Q1-B1-C1
cataacctagtgagactctgtgtcagagtttgtgaagtgaatcccataatcatgaagaaaggaaacttgggacttggtctcaaactctcagttcctgtgtctgatcaatctaattttgccaggttcctgactgaaagtgggacttttaaggatggggatctgcttgtcaacagggatggagttcgaattgtctctcagaatgatgtcgaagctccacctccaatcaagcctacagacaaccagttaactttggcagacatagatgtaatcaaagttgttggaaagggaaatggacgggtagttcaattggtgcaacacaaatggactagtcagttttttgcgttgaaggtaattcagatgaatattg

SEQ ID NO: 38848 - DNA, 366 bp, Glycine max
  Clone ID: LIB3056-002-Q1-B1-C10
tactctttgagactctcttacataccccaaatatgggttctaaagcccgttggcgccagagttgggctccacagcctttgacacccttaatggaaggccctggccctgaaatgcaagaggaaggaaccaagaaagagagctcttgggaagtcataagggaatggttcaggactcagaagatctccccaggtggaagcttttcacaatcatcatcattctatggaaccattcatgccaagacacaagatttgaggttgttgcttggtgtcttgggttgccccttggctcctattccctcagcacatgatcccactcttagtattcacatcaaagacaccccatttgaaacttcaactgccaaataca

SEQ ID NO: 38849 - DNA, 367 bp, Glycine max
  Clone ID: LIB3056-002-Q1-B1-C12
gttttgcaactcataattctgagccatatgggccagttccaaagtacagaggaaaatgtgaagctgatccagaaactaaaagaagttactgtaatgggaagattgttggagcacaacactttgctcatgctgcaatagctgctgggtcatttaacccttcaattgactttgcttctcctcttgatggagatggacatggaagtcatacagcctctattgcggccggaaataatggaattcctgtgaggatgaatggccatgaattcgggagagcgagtgggatggctcctcgtgctaggattgctgtctacaaggcaatttatagactgtttggagggtttgttgcagatgtagttgctgcaattga

SEQ ID NO: 38850 - DNA, 390 bp, Glycine max
  Clone ID: LIB3056-002-Q1-B1-C2
attcaattctgttcatcctttgcttcccaaagaacgagaacataaaaagcaatgggtagccttgaagcggaaagaacaacagtaggattggcagcacgagacccttcagggattctctccccatacacctacaatctaagaaacacaggccctgatgatgtttacataagagttcactactgtggaatttgccattctgatctccaccagattaaaaatgatcttggcatgtccaactatcccatggtcccaggacatgaagtggttggtgaggtactggaagtggggtcagacgttagcacgttcagagtgggagagttggtaggagttggactcctcgtaggttgctgcaaaaactgccagccatgccaacaagacattgagaattac

SEQ ID NO: 38851 - DNA, 229 bp, Glycine max
  Clone ID: LIB3056-002-Q1-B1-C3
gtttttggggaaaccttaattgatttggatttatctggatttcgcgggagtttttaggagcttttccattggtagcacgtgtttaggctttgagaaatatgcgttagcgttactgtttgtaataaatcattatgatgattactttgtggggttattgatttccttgactcatttatttgtaattatctctattttttaatgaagaataatatagaatacatttcttttg

SEQ ID NO: 38852 - DNA, 396 bp, Glycine max
  Clone ID: LIB3056-002-Q1-B1-C4
gaattatttcaagaattccttccacaccttcaaagttacaagccatggatacttctcatcctctttctattgaaagcttctcttacagctggttagtgaacctgaagccatcactagaaagccttgatggctcccttagaacttcccttgatgcttctgatgaagcttcttccttcattgaaatggacccaagaatgccaccttctaaaagattcttcagaaactcccaagatttcaaatttgacttcccaatttcacaatcccctctcactcttgttgatgctgatgagctcttctccaatggctacctcatgcacctttttgttgagtcattgaagatggaagcatttgaggcctcagatgccaatccaaccctaccttcctcatcacatgtgc

SEQ ID NO: 38853 - DNA, 397 bp, Glycine max
  Clone ID: LIB3056-002-Q1-B1-C5
attttatctgcctagttttagggtactgtttatcatcgttagaatctgaaagtgtgaagagtgaagatggcagaagagaaagaatcaacgtcaattcctcttagtcaaggggacaatgcatctcgcgacgatcccgaagacccagccaagtctccactaagctcgcccaactcttccactcgcagggcttgctgctttgttctccagagttgggtctctaagaaatttatgactggatgcgtagttctttttccagttgctgttaccttcttcattacatggtggtttattcagtttgttgatggtttctttagtccaatatactccaggctcggcatagatgtgtttggacttggttttgtgacatcgttagcttttgtatttcttattggtgttt

SEQ ID NO: 38854 - DNA, 344 bp, Glycine max
  Clone ID: LIB3056-002-Q1-B1-C6
gttcacaattctgatccagaacttataactcttttcacatctccgtttggtttaggattgagtgttggatctagtcatctagatttaaaaaaaaaatgaagatcattgagaaaattcgcgcagcttctgctgatccaaacagggtggtgttctcatttgagttcttcccccccaagactgaggatggtgtggacaatctgtttgagaggatggaccgcatggtggctcacaacccctctttttgcgacatcacttggggcgctggagggacaacggctgatcttacattggaaattgccaacaagatgcaaaacattgtctggtgtgagaccatgatgcaactc

SEQ ID NO: 38855 - DNA, 398 bp, Glycine max
  Clone ID: LIB3056-002-Q1-B1-C7
tctctttcttcttttctttaatacttaattcgtcttttttatctttctttctttctttccccttttatatttctgggttcgatattgttatcggtttatttgtgcactacttccgccggctattcaggaatcatggctagggttttggctcagtctattaatgtccctggtctattggctgagcataggcatggtcagcaaaaggaatcaggaaaattaaaaagatcgaccaaaatgatgagtgctttacgaacaaatggattaagaatgtcaggtttctcagggcttcgtactttcaatcctttggatactatgttgagacctggaatagattttcattctaaggtatccattgcaacttcttcacggcgagcaagagctaccagatgcgtgcccaa

SEQ ID NO: 38856 - DNA, 353 bp, Glycine max
  Clone ID: LIB3056-001-Q1-B1-D4
ctggcacataggtgtttattgctacacactagaagaattatggaagctctcaagaccctcttcttagccatttttgttgtcttggcttccgcattgtattcagccaatgccaaaatccaggagcatgaatttgttattcaagcaacgccagtgaagatgctgtgcaacacccacagcaccatcacagtgaatggacaattccctggtccaacattggaagtcaacaatggtgacactttggtcgtcaaagtcactaacaaagctcgttacaatgtgactattcactggcatggaattcggcaaatgagaacaggatgggctgatggaccagaatttgtgactcagtgccctat

SEQ ID NO: 38857 - DNA, 339 bp, Glycine max
  Clone ID: LIB3056-001-Q1-B1-F2
cgacgacgacatcgtctccgccttcgaaggaaactccaacctcttctgggccgagcgtttcggcaaacagttcctcggcatgaacgatttgtgggtcaaacactgcggaatcagccacaccggcagcttcaaggatctcggcatgaccgtcctcgttagccaggtcaaccgcttgagaaaaatgaatcgccccgtcgtcggtgtcggttgcgcctccaccggtgacacctccgccgctttatctgcttattgcgcttcggcggcgattccttccactgtgtttctgcctgctaataaaatctcgcttgctcaacttgttcagcctattgccaatggtgc

SEQ ID NO: 38858 - DNA, 288 bp, Glycine max
  Clone ID: LIB3056-001-Q1-B1-E2
ctcgagcatttctccacttccattttctctctcacttttcaagaatcgtaagctatgggaaagtcttacccaactgtgagtgctgattaccagaaggccgttgagaaggcgaagaagaagctcagaggcttcatcgctgagaagagatgcgctcctctaatgctccgtttggcatggcactctgctggaacctttgacaacggcacgaagaccggtggacccttcggaaccatcaagcaccctgccgaactggctcacagcgctaacaacggtcttgacatcgctgtt

SEQ ID NO: 38859 - DNA, 416 bp, Glycine max
  Clone ID: LIB3056-012-Q1-N1-B9
gtggatccaccgggcggcaggaattcggcacgagggttgttcaagacacgataagaggaggagtaaccgacgtttttctaactcttgggggggtcctttttcttcatgctcttttcatagaaaaagggcgtctagagacaacttgcgctgtcttgaggaacttcgtatataatgacgagttaaagctcaaggatgatattcttccagttccaaccaatcatgtccctcatcacactgtggagctcacaaatgaagctatcgactttatacgtgcgatctacctattgcatgacaatgataatgatggatctttacaaccttctccgtttgatgatatctatgtaactgcaccaaaaagtgggccttgatgacaactctggatccttcatattgtttccctaacttgatttgcattg

SEQ ID NO: 38860 - DNA, 290 bp, Glycine max
  Clone ID: LIB3056-001-Q1-B1-A9
cacgcttacgtaagctcggaattctgatccagctcgacccgcatgacttatcccacatcatggatattaagtatttgaatgatcctgttcaggagcatgcacacgttttgtgcatatgttgaatatgatgttcgcctactgctggacaccgctctcacctcagtacactactgggaacaagcatcagcatgtttgcgcacatctgcgaaataaaatggtcccatttccagagctgtataaagctgtagtagacggtggtatcatcaggtttcccgtactgttaacgggtg

SEQ ID NO: 38861 - DNA, 217 bp, Glycine max
  Clone ID: LIB3056-001-Q1-B1-B1
acgtaaactcgacattcggctcgaggcaacgtcttgttgctactgggaagacaagtcttccacctagtccgtgcaagcttccgccgtaagcctctggctaacggcgtttctttattttaagattttgacgctgtgacttgtatccaaggttagtttaggctttgattaaagaaggaaaaaaaaaaaaaagtgcagaaggctgaagcttttatttaaa

SEQ ID NO: 38862 - DNA, 410 bp, Glycine max
  Clone ID: LIB3056-001-Q1-B1-C11
cgtaagctcggaattcggctcaagtcaattttcaagctctcaacgccatctccagctgcttccttatcagaagcgcttcgccccagagattctcgcttcctctccttcaatccttcttcgaacgctattaattacaaaattaacctctccgcttccctccgatccattcactccctccctcttaaaacctccttgcggatcaaatgctcccaaacagatgggaatggaagtcctgcaaagaggacagtgcttcatgatctttatgagaaagaagggcagagtccatggtatgataatctctgcagacctgttacagaccttcttcctcttatagcaagtggtgtcagaggcgtcactagcaaccctgcgatttttcagaaagctatctcatcatcgaatgcttacaatga

SEQ ID NO: 38863 - DNA, 156 bp, Glycine max
  Clone ID: LIB3056-001-Q1-B1-C4
tacgtaaaaccagaattcggctcgacaagtttgagggaaaatgggtttcgtgaaagtggttaagaaccgtggttacatcaagcgctaccaacttaaattcaagatgcaccgccaatgaaagaccgattactttgccacgtaaccgtttgactgtgc

SEQ ID NO: 38864 - DNA, 253 bp, Glycine max
  Clone ID: LIB3056-001-Q1-B1-D3
acgttaactcaacattcggctcgagacgaagttcacccgctcagttgcacatatctgtctttccatctgcaacacatcattgcacagcgacttcttcctactgttctttgaaccatgaatgtggcagggcatgtcttgagccactcacatggcatctcccatgctccaggtcacgtagctgggtctcatcgtcacgacatcactcagttctttccacactttgctacgcttaccacatatcatacttcaaagg

SEQ ID NO: 38865 - DNA, 194 bp, Glycine max
  Clone ID: LIB3056-001-Q1-B1-E3
tggcatattagttgacaataccgtatccaacgtgtgatatacgtatatatctgcaactgcatttactgcttcaagattggcttaacttcagcacatcttcaagtttattttacaacacaatgttttttgaaataatcaagagatattctatattaattgtttgcgagtcaatcacgtaagatatacagaaagat

SEQ ID NO: 38866 - DNA, 195 bp, Glycine max
  Clone ID: LIB3056-001-Q1-B1-E4
gtacgtaaactcagaattcggctccagatttatcatctggcaaggtcccctacatattggataacaattttgcttagaattattgtggcattgctcccacgctttacttgcaaagttgtttatcaaattttttggccttcggatattcagatagccagagaagctaagttaatgagaaaatggcaagataatttg

SEQ ID NO: 38867 - DNA, 335 bp, Glycine max
  Clone ID: LIB3056-001-Q1-B1-F6
acgcgtacataagctcggaattcggctcaagctcaagtcaccagcttagtttgatatcgctgcttcataataatagcaataatgagtcgacttatcgtgcttcaacgaaattgctaagtagagggcaatgggatgtggcataagcagcgaattacacccacatattttcaagtttcaccgaaaggacgatgtacagatagggcatggcattagttgccaacctaccacgcctatatgcacagcatcgaacatcgcataggtagctctcgataaattcgatctctgcgatttgccgcattaaggaggcattgcagttcatgtatggtatgtcatta

SEQ ID NO: 38868 - DNA, 360 bp, Glycine max
  Clone ID: LIB3056-001-Q1-B1-H3
attcggctccagattttttaaatttattttaatctctgcttatcagattcgaaacgcttctagatttaagtttatcgtctctatgcagaaagtgtgatttatgcggtagatcccgatgcagagaatctacatctaagagaaatagttttagttaaaaagcttctgatgtgctttttccttgtttggatttttacttgacctgcttcctttcattgattaataatcaagctgaaattttttatatttgagaactgaaataaataatcttggatttattacaataatgaatttactgtatcggtataggttaagctaattgaggtgattgcgattcgattggcaaaaaaaaaaacatttttt

SEQ ID NO: 38869 - DNA, 148 bp, Glycine max
  unsure (1)..(148): unsure at all n locations
  Clone ID: LIB3056-002-Q1-B1-B4
gtacgtaaactaggnattcggctcgagattaattgcangaatggcacttcgttgcttggtgatgtccctttctgttctcttcactcttggtcttgcgagagaaagccatgccagagacgaagatttttggcatgctgtttgggcaaac

SEQ ID NO: 38870 - DNA, 61 bp, Glycine max
  Clone ID: LIB3056-002-Q1-B1-B6
gacgtcggacgcacgcgtacataactcggaattcggctcttgattcaagccacaatggaat

SEQ ID NO: 38871 - DNA, 410 bp, Glycine max
  Clone ID: LIB3056-002-Q1-B1-C11
acgcatacgtaaactcggaattcggctctagcaagattgaagatgatagaccttgcgcgcgtgcagaaggagcttgtggaatgcagcaaggacgcggagggatcgggcatcaaagtcagccccaaaaacgacaaccttgttctcttgatcggcaccattcctggccccgtcggaactccatatgaagggggcattttccagattgatatcacattgcctgatgggtacccgtttgaaccccccaagatgcagtttaaaaccaaagtttggcaccctaatatcagcagccaaagtggagctatttgcctggatatcttgaaggaccagtggagcccagcactcactctgaagactgcacttctttctgtgcaagcacttctctctgctcctcagcctgatgatcctcaaga

SEQ ID NO: 38872 - DNA, 399 bp, Glycine max
  Clone ID: LIB3056-002-Q1-B1-C9
aggtagactctagaggatcccctcggggaattccaattccacattttcaagaaataaggaggcaaaaatgttcatatatgaattggaattatttgttttcttattaggcctatcctgaagccaaaggaaatgagatcggaattcctcggggaattccaattccacattttcaagaaataaggaggcaaaaatgttcatatatgaattggaattatttgttttcttattaggcctatcctgaagccaaaggaaatgagatcggaattcctcggggaattccaattccacattttcaagaaataaggaggcaaaaatgttcatatatgaattggaattatttgttttcttattaggcctatcctgaagccaaaggaaatgagatcggaattcctcgggggt

SEQ ID NO: 38873 - DNA, 405 bp, Glycine max
  unsure (1)..(405): unsure at all n locations
  Clone ID: LIB3056-002-Q1-B1-E3
cggctcgagtgcantttcgtctctgacatggcgacttaaaatttgtcgaaaaatccgattcagcgatctccgaagagctcgatttgttgcactccaattggaaaaaagaagtgaacttgcgatctgggtagcgagttttcgaactcgttcgatggggaatgatgcagggtcatcgcagggtccggttacgtgtgggtcgtggattcggaggcccgagaatttgaatttggtggtgttgggaaggtccagacgtggcagttcttgtccttctctcttacagattttctccttcgatcccaaaaccacttctttgtctatctctcctctgaccacttatgtgttggaagcagatgaaggtgatcctgttgccattacagttcacccaagtggggatgattttgtgtg

SEQ ID NO: 38874 - DNA, 399 bp, Glycine max
  Clone ID: LIB3056-002-Q1-B1-E5
acgtcggacgcacgcgtacgtctactcggaattcggctcgtggtcttctcggaaagcaaacgaggcgcttgtttgtgtggcaaaaggaggaatgggaaggtatcgtagccggagcagaagctatagcccccggcggcgaagcagaagcccaccggcaccgcgcggacggaagcgctatgtcgacgatcgctacggtgacagcaggtcttacagagaccgccgctcacctcttccttccggcttgcttgttcgcaatctcccccttgatgccaggcctgaggatcttaggatcccatttgagcgctatggtcctgtgaaggatgtttatctacctaaatattactacactggtgagcctcgacgctttggatttgtgaaatatcggtatggtgaagatgc

SEQ ID NO: 38875 - DNA, 378 bp, Glycine max
  Clone ID: LIB3056-002-Q1-B1-F2
gacagcagaaagcgaatgataagccaattatattgatacaaacttaaccagatttcaacaagaaaactctaaatcaaactaaaagctctacaagagataaacaccccttaactaaacagttggatttagaagtacaaatagagaactcccttctttaaactattcacgttttggaaagacaaccaatttacggagggagcagggaaatattttttggaagcaagaaatatgtttatcaggaaatgaccagaccagctacaacagatgatcaaaatcatcagaacctacataaatgcaattatcagtccattctctaatcgtcatcctcttcctcgccactgccttcctcatcatcatcttcatcattcagctcagata

SEQ ID NO: 38876 - DNA, 254 bp, Glycine max
  Clone ID: LIB3056-003-Q1-N1-A1
tgacgtcagatgcacgcgtgcgtgaagctcgggaatgcgactcgagctagggcggtgatgtacaccaaagaggaggcagatggaagaagacttaagaatccattgggcactataagcggaaaggaataggaataaccgggttgaccaggaaatagtgcaatggcagaactggatggggcctttagaggcaccgatagggaggctggtgaaatgtctaggtttcttttgaagagcgatgggctcttccttgggag

SEQ ID NO: 38877 - DNA, 366 bp, Glycine max
  Clone ID: LIB3056-003-Q1-N1-A10
tcggggaattccaattccacattttcaagaaataaggaggcaaaaatgttcatatatgaattggaattatttgttttcttattaggcctatcctgaagccaaaggaaatgagatcggaattcctcggggaattccaattccacattttcaagaaataaggaggcaaaaatgttcatatatgaattggaattatttgctttcttattaggcctatcctgaagccaaaggaaatgagatcggaattcctcggggaattccaattccacattttcaagaaatatggaggcaaaaatgttcatatatgaattggaattatttgttttcttattaggcctatcctgaagccaaaggaaatgagatcggaat

SEQ ID NO: 38878 - DNA, 255 bp, Glycine max
  Clone ID: LIB3056-003-Q1-N1-A5
tcggggaattccaattcttcattttcaagaaataaggaggcaaaaatggtcatatatgaattggaattatttgttttcttattaggcctatcctgaagccaaaggagatgagatcggaattccgcggggaattccaattccacattttcaagaaataaggaggcaaaaatgtgcatatatgaattggaatgatttggttacttattaggcctatcctgaagccaaaggaaatgagatcggaatagctgggggaat

SEQ ID NO: 38879 - DNA, 375 bp, Glycine max
  Clone ID: LIB3056-003-Q1-N1-C11
tcggggaattccaattccacattttcaagaaataaggaggcaaaaatgttcatatatgaattggaattatttgttttcttattaggcctatcctgaagccaaaggaaatgagatcggaattcctcggggaattccaattccacattttcaagaaataaggaggcaaaaatgttcatatatgaattggaattatttgttttcttattaggcctatcctgaagccaaaggaaatgagatcggaattcctcggggaattccaattccacattttcaagaaataaggaggcaaaaatgttcatatatgaattggaattatttgttttcttattaggcctatcctgaagccaaaggaaatgagatcggaattcctcgggg

SEQ ID NO: 38880 - DNA, 310 bp, Glycine max
  unsure (1)..(310): unsure at all n locations
  Clone ID: LIB3056-003-Q1-N1-E2
ctttcaaatgctactgttcacgttcaaaaaaaaaaaagaaaaagaatgaaattgaatacatgaggtcttgggttaagacttggattggtttgaagacttggttgactttgttttgggttgtgaagcatttggtgtcctctacggacttagaggtcttgtaatacggctctttcgcatagaacgagtttttttctttctttctcaaacacgtgccgaattctgttcaattcatactctttatacattcccttgaagtgtttgnttttacatttgctttggtttaacattcaaagaatttgaatattcaacc

SEQ ID NO: 38881 - DNA, 211 bp, Glycine max
  Clone ID: LIB3056-004-Q1-N1-B4
acacgcacgccttcgtgaacttggaattctgctcgagaaaattcgttgtgcctatcctcaagtgttgccgtgagggggcatagaaatatcctgagatagcttatgaggaagttgtcattgacaattgctgcatgatgcttgtgaagaatcctgcacttttcgatgtactagtgatgcctaacctttatggtgatcttatcagagacctttg

SEQ ID NO: 38882 - DNA, 200 bp, Glycine max
  Clone ID: LIB3056-004-Q1-N1-C3
gcacgcgtacgtaagctgggaattgggatttaggtcaagagttttcttttaggtgaaaaggctagaatatccgagatggtgcgcattctgaagtggctgaacaaattcatgctagctgggctaataagccttggcaacagacccgttttggcagtcttctggatccacctgaggtcctacgcgtcaaacaactacacacg

SEQ ID NO: 38883 - DNA, 373 bp, Glycine max
  Clone ID: LIB3056-004-Q1-N1-E9
cagcttacaggcctcagtaagaagtctgtcactttgtcatgggaagacaaaaattgctctaccgtggaaatttcaggacttgatattggatgggggcagagaatacccctaaattttgatgacaaagagggtttgtggtttctcaagagggaattgcctgaaggactctacgagtacaagtacattgttgatggggaatggacatgcaacagcgatgagcttataacctctcccaacaaagatggccatgtcaacaattttattcaagtccttgatgatacaagcagtgttcgtgcctctcttcggaagagattgacggctgatgatcctgatctcacaacagatgaacaactcagaataaaggagtttcttg

SEQ ID NO: 38884 - DNA, 293 bp, Glycine max
  Clone ID: LIB3056-004-Q1-N1-F5
atgaatgcacgcgtacgtaagcttggaattgggctcgaggcggaactctttccttttgtgccgtcacgagcttccttccgatttggaaactagagttccgagccagatcgacgaggaagcgataggattaacgatttggaggctttcaggaggcggattcgccgtatggcgattcttcggcggccggagaaccggggagagtcatttgccggtggtgtacactgaagatggacggtggacttaacacaaatggtggtgctcctaagagaatttctcgttctgttagaagcaat

SEQ ID NO: 38885 - DNA, 236 bp, Glycine max
  unsure (1)..(236): unsure at all n locations
  Clone ID: LIB3056-004-Q1-N1-H8
gaagagtctatgatcgtcgcatgcaccgcgtaccgtaagcctnncggaattcggcttcgagcccatnntttctatcttctttcgttggtcgccccgttcagttcacccagcgtanngcctctgcttcnntcgaagatggctttcctcnnccagaggtgnngtgagtgggttcanngggcgtggtcaggggtgaccagagnngtagaggaaaggggtgnnngcggtggaggggaaga

SEQ ID NO: 38886 - DNA, 314 bp, Glycine max
  Clone ID: LIB3056-005-Q1-N1-A12
tcgcatgcacccgtacggtaactcggaattcggttcgagggtttcttttgtggattggtagtgtgactgtgggaactgttttctccaaagttgcaattttaagaaggaaacgcactaactggtatcaggttccaaaattatcatatataggaaaagacgaaccattttacttttccctgagtaatccccttaggtatatataatcgttctatttctgcttagaactgattgagttcgttgtttttagagtttgcatcacagtaacagtgttttaggaaacttaatgtaatgaatttttgaagggaactaaaatt

SEQ ID NO: 38887 - DNA, 301 bp, Glycine max
  Clone ID: LIB3056-005-Q1-N1-A5
tcggggaattccaattccacattttcaagaaataaggaggcaaaaatgttcatatatgaattggaattatttgttttcttattaggcctatcctgaagccaaaggaaatgagatcggaattcctcggggaattccaattccacattttcaagaaataaggaggcaaaaatgttcatatatgaattggaattatttgttttcttattaggcctatcctgaagccaaagggaaggagatcggaattcctcggggaattccaattccacattttcaaagaataaagaagcaaaaatgttcatat

SEQ ID NO: 38888 - DNA, 246 bp, Glycine max
  Clone ID: LIB3056-005-Q1-N1-C6
gtgacaagataaagatttacatttcccagcaattggaatgagggcttgaaggttttacccgtagattcagggttggctattttttgtttttgttttgagtggcaagtatttaactcacatgtcctaagatattgcaattactagttatctattataagcatatttcgcatgtattaatatttttaccctgtcattgtaaagacattaagtggaaaagttaaggtattagtggtgattcgggtctaa

SEQ ID NO: 38889 - DNA, 397 bp, Glycine max
  Clone ID: LIB3056-005-Q1-N1-F1
tcggggaattccaattccacattttcaagaaataaggaggcaaaaatgttcatatatgaattggaattatttgttttcttattaggcctatcctgaagccaaaggaaatgagatcggaattcctcggggaattccaattccacattttcaagaaataaggaggcaaaaatgttcatatatgaattggaattatttgttttcttattaggcctatcctgaagccaaaggaaatgagaatcgaattcctcggggaattccaattccacattttcaagagataaggaggcaaaaatgttcatatatgaattggaattgtgtggtttcttattaggcctatcctgaagccaaaggaaatgagatcggaattcctcgggggtaccgaactcgaatttcctat

SEQ ID NO: 38890 - DNA, 87 bp, Glycine max
  Clone ID: LIB3056-006-Q1-N1-B5
cggctcgagcatcattgtacacggaacatgttaggaatccttaaaggattaacaatgacacaatcttatattctttggcttttcaaa

SEQ ID NO: 38891 - DNA, 270 bp, Glycine max
  Clone ID: LIB3056-006-Q1-N1-F10
tcgtaaaggaggagaaacctctttacttggacgagtttgataattttccagagcaaagcgatggagaaatgaatgattttgaggagcatatgcgacaaatgtctctgaaatcaaaaaacatggaaaaggacgataacttacctaagttggacgaagttgacaagatttttctgcaagctacttcctttttaaagaaaaagataaaatgagaaatatgcaaaagacaagtgtaatcattgtattggatataaacagtgtagtttgggagaa

SEQ ID NO: 38892 - DNA, 423 bp, Glycine max
  unsure (1)..(423): unsure at all n locations
  Clone ID: LIB3056-006-Q1-N1-H4
gctcatgcacgcgtacgtaagctctagattcggctcgagctaaaatggaatttcgatgctcagtcatctcttttaccattctctgctctcttgctcttgcaagagagagccatgtccatgcatcgctacctgaggaagattattgggaagctgtttggccaaacactcccattcccactgcactgcgagagcttctaaagcctctccctgcaagtgttgaaatcgatgaactccctaagcaaattgatgatacacagtacccaaaaacattcttctataaagaagaccttcatccaggcaaaacaatgaaagtacaattcaccaagcgtncctatgcacaaccttatggtgtatatacatggttaacggatattaaagacacctctaaagaaggatatagttttgaagagatatgcatcaaga

SEQ ID NO: 38893 - DNA, 387 bp, Glycine max
  Clone ID: LIB3056-006-Q1-N1-H8
tcggtgaattccaattccacattttcaagaaataaggaggcaaaaatgttcatatatgaattggaattatttgttttcttattaggcctatcctgaagccaaaggaaatgagatcggaattcctcggggaattccaattccacattttcaagaaataaggaggcaaaaatgttcatatatgaattggaattatttgttttcttattaggcctatcctgaagccaaaggaaatgagatcggaattcctcggggaattccaattccacattttcaagaaataaggaggcaaaaatgttcatatatgaattggaattatttgttttcttattaggcctatcctgaagccaaaggaaatgagatcggaattcctcgggggtaccgagctcg

SEQ ID NO: 38894 - DNA, 461 bp, Glycine max
  unsure (1)..(461): unsure at all n locations
  Clone ID: LIB3056-007-Q1-N1-B12
tatgacgtcgcattgcacgccttcctaagcttgggattcggcttgaggggatttcccagggtcccccattgggggttcaaagggttacacccggttaagcattggcttaaatggggaaactaaggttggcccaatgttttgacctggtaatggctttctacaccattggttggccttcaaatctacagctagtcgcaatccgagcttagattatggattcaaagtgctgaaattgcaatggcatnctattgttcagaacttcaataccttgccaatcctgtcaccaatcatgtccaaagcgctgagcaacataaccaagatgtgaactctttaggcttagtttcttcaagacagacagctgaagcaatagatatattaaagcttatgtcatccactgtcttagttgctttgtgccaagccattgatttgaggcatttcgaggaaaacttgaagacactgtt

SEQ ID NO: 38895 - DNA, 402 bp, Glycine max
  Clone ID: LIB3056-007-Q1-N1-B3
ctatgacatcgcgcatgcacgcgtacgtaggcattgcactcgagccaagacatctgcatagattgcacaatacagaatcaacttggttgggatgatacgcattgtgcatcacatggaatattgcatctggtcaattcaactaggattcagggagaaggcgtgaatatatggatgcttgctattatctacgttatagcaagaaattcctggagcatatgtctcgaggcatcgcccattatatcagacttttaggactgacagtagctccaatcttggatggatgatcctgttctacctgctttacctacgattctgtatcttaactgcaagagctactctcatatctttcaaaggaaaatccttgacaggcatgctgctagtcatacatgtggtgggtgacca

SEQ ID NO: 38896 - DNA, 430 bp, Glycine max
  Clone ID: LIB3056-007-Q1-N1-C5
acgtaagctcggaatggcgctcgagcaaccatcctttgcatatgcaagaatctttagtttttttatggctggccatcagtgtctctttcagttgagtgccttacttttaacgcaggtacaaagaaggaagaagcacgcgtgggggtgtgggtgaatatatggcgaaaagagtaccagtaggagagttgttggtgttggtgttattattgttggcaccaaagacaaaggcaatgagcataacaagaggtcataataaaagcaggggcaaagagtcctctggttctagtgatgaagggggtgcaattagcttttgtttgagttggagattggcagtggaggcaaacaatgtggttgcatggccaacagttgcacctcagtgttcccgatatgttgagacttacatgatcaatggccagtacgaacgggactt

SEQ ID NO: 38897 - DNA, 452 bp, Glycine max
  Clone ID: LIB3056-007-Q1-N1-C7
agacttgcgagcatgcatgcacgcgtactttagatgatactttggctcaagcacaataacttagttctaatacttatatgtgcacggatggtgagatattagcatcactgatcctctgcagttactatgtgccatcctgaacacagccagagaatgtacagtaatgcctaaactacttgcacacatggacctttgatcacatcagatatttcaatggtgatatagacattgagattaatcgtgacatgatcactgctactgtgattcaatccgaaaggtcatacttgtttgttcactaaagcatgtacatcatgatggttactggagattctgctggcgcagatactgatttgtatatatcttgccaaaacacagagcatgatgagatagactttgagttcttacggaacatatcaggacaaccttacattctgcaaactaatgtgtgtcac

SEQ ID NO: 38898 - DNA, 160 bp, Glycine max
  Clone ID: LIB3056-007-Q1-N1-H4
gtcgaatgcacgccgtacgtaagcttggaattcggcttcagggccagcccccccagaatttcctcattcaaaggtttcttgaaaggagggttgtttaactcttaccttctttgcccaattggaaaggccatttttgaccaccttgattgtccttccttaa

SEQ ID NO: 38899 - DNA, 397 bp, Glycine max
  unsure (1)..(397): unsure at all n locations
  Clone ID: LIB3056-008-Q1-N1-G3
tcggtgaattccaattccacattttcaagaaataaggaggcaaaaatgttcatatatgaatcggaattatttgttttcttattaggcctatcctgaagccaaaggaaatgagatcggaattcctcggggaattccaattccacattttcaagaaataaggaggcaaaaatgttcatatatgaattggaattatttggcatcttattaggcctatcctgaagccaaaggaaatgagatcggaattcctcggggaattccaattccacattttcaagaaataaggaagcaaaaatggtcatatatgaattggaattatttgntttcttattaggcctatcctgaagcccaaggaaatgagatcggaatttctcgggggtaccgagctcgaattccctat

SEQ ID NO: 38900 - DNA, 201 bp, Glycine max
  Clone ID: LIB3056-008-Q1-N1-H2
gaaaaattatggtggcagaattttatgttacaagtttcttatgtatggattggcccagcattcttatacacattaatggttgagatgtagtgatttagcaaggtctaaatagatcaacagcaaatgactgtaaattataataggtgaccctgtttctgtaatggttagttgcttatagcagttattaattattatctctta

SEQ ID NO: 38901 - DNA, 327 bp, Glycine max
  Clone ID: LIB3056-009-Q1-N1-C8
tgaagtggaagcagttgctaaaaagaatggaacagatgaaagttccattgaggatgagaaagaagagttgcctgagccagtaccagaaccaccaaaattggttcgtatggcaaatctgtgtgtcgtaggtggtcatgcagtgaatggggttgcagagatacatagtgaaattgtaaaagatgaagttttcaatgcgtactataagtagtggcctgagaagttccaaaacataacatatggtgtgacaccaaggagatggatcatgttctgcaatccagatctgagtaaaataataaccgagtggataggcactgacgattgcgtcct

SEQ ID NO: 38902 - DNA, 427 bp, Glycine max
  Clone ID: LIB3056-009-Q1-N1-C9
tctaatgcacgcgtgcgcacgctcggaatctgggtcgagggctcgcgatcactgcctgtcaacagatacttacttgactggatctttgagtctacggcttgaaacgctgcagatcatgcaccgaacccaagggcgaggcacaacgtagaacgtgcgagtgcagatgaagcactcggatacccatcttatggggcatatgaccatgacctcaagaagctcaaacgcattactgaagctgctgtatcaaccatagaccaacaagtccctgcattacccctttccaatatatcggatgatgcatttaaggagaacaccacagatggtgtcaaatttcaactgtctgtgagcaaatcttatacacaatcaacttcaacttaccctgcaccagtatacacattgaaagtcacaaatgcttcaacttcgaatg

SEQ ID NO: 38903 - DNA, 152 bp, Glycine max
  Clone ID: LIB3056-009-Q1-N1-F4
tcggtgaattccaattgcacattttcaagaaattaggatgcaaaaatgtggatgtgtgaattggaattatttggtttcgtaatagggctatactggagcccaatgaaatgagatcgggattcctcggggaattccaatttcacattttcaag

SEQ ID NO: 38904 - DNA, 379 bp, Glycine max
  Clone ID: LIB3056-009-Q1-N1-H12
gcatgcacacgtacgtaagctggctctaggtttgaagcggcccctttggtttaagtgaaggactgaaagggtacagtggccaccaggaacttggaaaagatggcatccattgatgcacagcttaagcaattggctcctgccaaagtgagtgaagatgacaaactgattgagtatgatgctcttctgctggatcggttccttgatatccttcaagatttacatggggaggatctgaaggaaacagttcaagaagtgtatgaactttcagctgagtatgaaggaaagcatgaccctaagaaactggaagaacttggaaatttgataaccagtttggatgctggggactctattcttgttgccaagtccttttcccacatgc

SEQ ID NO: 38905 - DNA, 118 bp, Glycine max
  unsure (1)..(118): unsure at all n locations
  Clone ID: LIB3056-009-Q1-N1-H4
tctagctatagactatgacatgcactcctcccttacctcggaatggaattcggacncggtccctggcagccgtccaacttttcctaatatggatcggattaaaacctggccgtaaaca

SEQ ID NO: 38906 - DNA, 176 bp, Glycine max
  Clone ID: LIB3056-010-Q1-N1-E3
gtgacattgaacatgagtaggattaatattatatgcatttaattatgatgactagtaaattgtaataatcaattccctaaaatctgctaagaaagggtacttttaattggcattggccatattgtacaatagaattaaaattttatcacaggctttggaatttgggttgacgtgta

SEQ ID NO: 38907 - DNA, 329 bp, Glycine max
  Clone ID: LIB3056-010-Q1-N1-F9
tcggggaattccaattccacatttttaagaaataaggaagcaaaaatgttcatatgtgaattggaattatttgttttcttattaggcctatcctgaagccaaaggaaatgagatcggaattcctcggggaattccaattccacattttcaagaaataaggaggcaaaaatgttcatatatgaattggaattatttgttttcttattaggcctatcctgaagccaaaggaaatgagatcggaattcctcggggaattccaattccacattttcaagaaataaggaggcaaaaatgttcatatatgaattggaattatttgttttcttatt

SEQ ID NO: 38908 - DNA, 402 bp, Glycine max
  Clone ID: LIB3056-010-Q1-N1-H4
ctatcatgcacgcttacgtaatctcgaattccgcttgagggtttcccccccccttcttggtacatattggtattttcgttatttcacacaacatttcattcattcattcaacttttggtaccttttttacctggttattccaggtcctaacttaaaactggaacaacactatgtccattacaggccttatagaccccaaaaatgaatcaccacaagtccttccaccggcgaaataactccggcgagctcgatgtgtttgaggcagcaaggtacttctcaggatacagtgaagttcttggctccaccaccaccacctacactcagaagatcaatatgagagaagaaaggcaccatcatcatcatcatcatggacatagagctgccagaatcagcttagacatg

SEQ ID NO: 38909 - DNA, 397 bp, Glycine max
  unsure (1)..(397): unsure at all n locations
  Clone ID: LIB3056-010-Q1-N1-H9
tcggggaattccaattccacattttcaagaaataaggaggcaaaaatgttcatatatgaattggaattatttgttttcttattaggcctatcctgaagccaaaggaaatgagatcggaattcctcggggaattccaattccacattttcaagaaataaggaggcaaaaatgttcatatatgaattggaattatttgtgttcttattaggcctatcctgaagccaaaggaaatgagatcggaattcctcggggaattccaattccacattttcaagaaataacgaggcaaaaatgttcatatatgaattggaattatttgctttcttattaggcctatcctgaagcccaaaggaaatgagatcggaatttctcggcgaattccaattncacattttca

SEQ ID NO: 38910 - DNA, 264 bp, Glycine max
  unsure (1)..(264): unsure at all n locations
  Clone ID: LIB3056-011-Q1-N1-B4
atctgtcagtcctcagcgaaggtagaaaatcactaggttctgataatgcttccactctgatggattctggtcatagacatgctatttgcagtatttttctgcttttagtttgtctttgggtgcatattttgatcatgtgtcttctgttcattctggtagcctcctangagtttggttgtatatgttgaccatcttcagttattattaatccctgcggtcatacatttttaccatacatagtaccgtatcataattttggcctgt

SEQ ID NO: 38911 - DNA, 232 bp, Glycine max
  Clone ID: LIB3056-011-Q1-N1-E2
taagaatcttgtcttgttcatggatgaatcctgtatcatttagtttgtgggtttggttatttatgctatgccatgttctgttattagttatgctatgccatgtggtgtctgtctacatatgagtgatcccgtatggtatggttgttgtatgtgctatggaataagtgggttccattgttattcttataatttccaactttgctggtagatcttgtaataagaagcacaattt

SEQ ID NO: 38912 - DNA, 416 bp, Glycine max
  unsure (1)..(416): unsure at all n locations
  Clone ID: LIB3056-011-Q1-N1-F8
tatatatatttgacatcatgcatagtatcttctcgtgactggcagtagagcttagacttctgtatatgtcttttgcaggtaaagcatgagagcagttctaacaattcagaagaaccgagagaattcggtgacctcaatgatcttgaagcattgttggacgaagatattttcatgcctacagcaacttaaaatttcattgttaaggggtgatttagaatttcacagctgagttaggtgatcaactgtctcactttgattgttatagtaaattagtaatcttaattctcattcttttgttgttaaggggtgatttgctaacatgtcacacaagaattaaaaaaaaaatgcataaccattaaaaccattcttacaatgcaaaaaaaaaaaaaaagggcggtcgncgactagtgagctcg

SEQ ID NO: 38913 - DNA, 338 bp, Glycine max
  Clone ID: LIB3056-012-Q1-N1-E3
gcaggcgtacgtaagctgtggattcggctcgagcttcagatcatactcacacaggttcgctcttcaaatcaatggcttctcagaaatgggtgtggctcataacattcccgatgcggaggagggaaccttggacattggaaaggaatacagaactgggtctggagacgccgggccatcggtcattcttgataaaggtaagggacctaagttgcaagagattggaaagagacgccagtgagcatgaactacgccgtgctcacaagtgacggaggctgatggcgaaaaggcatgcttgcatgactatgagggtacatagggcgaatgaccatggatttact

SEQ ID NO: 38914 - DNA, 102 bp, Glycine max
  Clone ID: LIB3056-013-Q1-N1-B8
cgaaatgaatatatggtaaacttgatggaattttgctgagctggaaatttgaaagttgggttcaccggcctgtttatgatttgataataaatttatttgtca

SEQ ID NO: 38915 - DNA, 66 bp, Glycine max
  Clone ID: LIB3056-013-Q1-N1-F12
gacgtcgcacgcacacgtacgcaagcgaaggaatcccgagctaggcaaaattattttaacccagac

SEQ ID NO: 38916 - DNA, 471 bp, Glycine max
  Clone ID: LIB3056-013-Q1-N1-F6
agctatgacgtcgcatgcacgccttccttagcctgggatttgggttgaggcccattcaaaatggagccttggattttaaaacattttctaaggtggttcgctttggttctggtggttagcggaaccaccttttgcactggtggcccttacaacaacccaaaggcaaccaagaaacctttggcaaacaaattcccttaattccccagaacgcggcacgtgcggtgctgaggctgcggccattggtgtgggactccaaattagcacactacgcgcaatggtatgccaaccagaggcgcaacgattgtgccctagagcactccaacggaccttacggtgagaacattttctggggcagtggcacggggtggaagccagcacaagctgttagtgcatgggttgaagagcgccaatggtacaattattggcacaattcttgtgccaatggacagatgtgtggacattacactcaga

SEQ ID NO: 38917 - DNA, 354 bp, Glycine max
  Clone ID: LIB3056-013-Q1-N1-H10
cacgcacgcgtacttaagctcggactctagctcttatattcattactttttttccagatacaaatatgcataattggtcacgtatcaactgtaattatatgtatactcatcatgcctatcctgaatccaaacataattatatctgtattcctcattgaatatcaataccacattttcaataaataactacgcaaaaatgttcatatatgaactgcacattatttgacatcttatcacgcctatcctgcagccaaaataattgagatcgccattcctctgagaataccaattgcacatttttatgaaatcaggcatctcatatgtacatatcttaattggaatcaatttgatttc

SEQ ID NO: 38918 - DNA, 364 bp, Glycine max
  Clone ID: LIB3056-014-Q1-N1-B10
gtcttccgaattcgaagttaatttgcaagatggctaaggaaaaggctcagatcaacattgtggtggttggtcatgtggaccctgaggaggcaaccaccattaacgagctgaagaagcctgttgtggagaaagaagctccagggcatgccatatgagggcatgcacgtacggcctcggaggggaaccagaaaattatgttaacaaaataatctggaaccctaatgtatcagtgtcatcatcagtgtgtagtttaagctagctttgctatggttacgttctttgagatgagagtcttgatgaacagtaccattctgatgtattgctttccttgaaagttaatgcatgcttcttaatctctgtctaa

SEQ ID NO: 38919 - DNA, 209 bp, Glycine max
  Clone ID: LIB3056-014-Q1-N1-D9
gtggcatttagttggtacttttgtcctcatgtcttacagtatggttactttgcttccccttgggggattatggttctctgttttagcttgtagtcggatcgaactttgaggatcttgatgacttaattatgatgcacaatgtgttgtgttgatcatgcaaggagagaagtttatggttggatgtttctaacatctggaattttatttta

SEQ ID NO: 38920 - DNA, 288 bp, Glycine max
  Clone ID: LIB3056-014-Q1-N1-G6
agaacaaccaatcgttttccctcattgcccctacaaagcaaaggatatcactacccccgttgttcagtatcaccctttctgcttctgtggggtgaaaagcagcaggggcatggtgaggaagccgggtcccaagcaagggagcctcttctttggatgtggaaattggactgcgactagaggtgctcgctgccattacttcgaatgggcttctaactgaatgcaccttttgatctactatgatcaaaatcctaagttttcttatatgttctatggtaaaaaaaaaattaa

SEQ ID NO: 38921 - DNA, 566 bp, Glycine max
  unsure (1)..(566): unsure at all n locations
  Clone ID: LIB3056-003-Q1-N1-G10.F1
ctcgaccgnggttccaangcacttgagttattagtatcaaccacgaatgtccacaagttgagaaagaaaagcaaaagatggaagctgttaagttggtgtctagtgatccaagtgagagaccagacacataccgagtcgcttacataattcatttcttgcttggtgctggcaacttgctcccttggaatgccttgatcactgcagtggattactttgcctacctctatcccaccaaacacatagaaaaggtgttctctgtggcctatatgatttcatctgtgatggtgcttcttgggatgatcagttggggaggttggagcaaaacaacattgaggctgagaatgaacttggggttctccatgtttgttatgtctcttatggtagccccagtcatagactgancctcgagcagcaccaagctcaatgagagaccgagcggcgcctacggcttgacggttgcagcagtggtgatatgtggtttagctgatggcttggtgggtgggaacttgataggatcagctggaaagctcccaaacagtatatgcaagcagtttttgctggaactg

SEQ ID NO: 38922 - DNA, 437 bp, Glycine max
  unsure (1)..(437): unsure at all n locations
  Clone ID: LIB3056-003-Q1-N1-G10.F2
ctcgagccgaatcggctcgagtcagcacttgagttattagtatcaaccacgaatgtccacaagttgagaaagaaaagcaaaagatggaagctgttaagttggtgtctagtgatccaagtgagagaccagacacataccgagtcgcttacataattcatttcttgcttggtgctggcaacttgctcccttggaatgccttgatcactgcagtggattactttgcctacctctatcccaccaaacacatagaaaaggtgttctctgtggcctatatgatttcatctgtgatggtgcttcttgggatgatcagttggggagggttggagcaaaacaacattgaggctgagaatgaacttgggggtctccatgtttgttatgtctcttatggnagccccagtcatagactggacctcgagcagcaccaagctcaatgagag

SEQ ID NO: 38923 - DNA, 547 bp, Glycine max
  Clone ID: LIB3056-003-Q1-N1-G10.R1
ttctattaaagcagatcttaacttccattcaatttacggattcttacagtacatttctaacctacatacaagtttccttataacctccatgtttcccatgttctggcatgctaagatatgacactcacgacattagagaacaaataaagaaacaaaacaaccaagtcggggcaaggttactaccaaggctttcttgcctcacgattgacaatgaatgctactgcctttttgctcattttattgcaacagaagtaggccttcataagatccagaaccagccaagaactgaaccaccaactaagccaaacccaaggaaccctgtcatgacaatagcagataactcagattctgacaaaggcactgccttggggtgctagaatcataaggacactagtaaggtaaccattgctaaatcctagcagaaaagtcagaaccaccataggtacttcagttttcagccacttcggttcatggaggcacactacaaagagtgggtagaatagtagcctagctgtggctacccatattgcccttggcatagattgca

SEQ ID NO: 38924 - DNA, 552 bp, Glycine max
  Clone ID: LIB3056-003-Q1-N1-G10.R2
ttctattaaagcagatcttaacttccattcaatttacggattcttacagtacatttctaacctacatacaagtttccttataacctccatgtttcccatgttctggcatgctaagatatgacactcacgacattagagaacaaataaagaaacaaaacaaccaagtcggggcaaggttactaccaaggctttcttgcctcacgattgacaatgaatgctactgcctttttgctcattttattgcaacagaagtaggccttcataagatccagaaccagccaagaactgaaccaccaactaagccaaacccaaggaaccctgtcatgacaatagcagataactcagattctgacaaaggcactgacttgggtgctagaatcataaggacactagtaaggtaaccattgctaaatcctagcagaaaagtcagaaccaccataggtacttcagttttcagccacttcggtccatgaagacacactacaaagagtggatagaatagtagcctagctgtggctacccatattgcccttgtcatagattgcataacat

SEQ ID NO: 38925 - DNA, 587 bp, Glycine max
  Clone ID: LIB3056-011-Q1-N1-D11.F1
gtcgttgtgcaggtaccttcatgctccaactacttccccttgcttcctcgtcattatcatcatctgtaatttcgtattagcgtacactacacacactcctcttcctagctgccttcacagcaaaatactggttgaaacctcttttgccttgtctagaggaggaagtggttagagttgggaacgctactacttctgagatgcgtgttggatcaacggctaattgttgttacctgcagctggaactcctcaacagaataatgtaaccgagtcatcatcagatatgtcagatcggatgatcaagatccagatcgcaaatcaccctctttatccagatttactctctgcatatatagaatgccaaaaggttggagcaccgccggaactggcatgccttcttgaagaaataggccgagaaagccaccgcatgaatgctcgccgtgagattgtggagggtcctgaacttgaccacttcatggaaacattctgcgaattcttcatagatacaaggaggagttgtccaggcccttcaatgaagcgacgttatttttgggtgacatggaatcacaactcagcaacctttgtaatgg

SEQ ID NO: 38926 - DNA, 628 bp, Glycine max
  unsure (1)..(628): unsure at all n locations
  Clone ID: LIB3056-011-Q1-N1-D11.F2
cgtcctgccgcgtcgtagctcggaattcggctcgggtcgtggcagtccttctgctccactacttccccttgcttcctcgtcattatcatcatctgtaatttcgtattagcgtacactacacacactcctcttcctagctgccttcacagcaaaatactggttgaaacctcttttgccttgtctagaggaggaagtggttagagttgggaacgctactacttctgagatgcgtgttggatcaacggctaattgttgttacctgcagctggaagctcctcaacagaataatgtaaccgagtcatcatcagatatgtcagatcggatgatcaagatccagatcgcaaatcaccctctttatccagatttactctctgcatatatagaatgccaaaaggttggagcaccgccggaactggcatgccttcttgaagaaataggccgagaaagccaccgcatgaatgctcgccgtgagattgtggagggtcctgaacttgaccacttcatggaaacattctgcgaagttcttcatagatacaaggnaggagttgtccaggcccttcaatgaagcgacgttatttttgggtgacatggaatcacaactcagcaacctttgtaatggaacactaac

SEQ ID NO: 38927 - DNA, 535 bp, Glycine max
  unsure (1)..(535): unsure at all n locations
  Clone ID: LIB3056-011-Q1-N1-D11.R1
tagctacaaatttgataagtatattagccaaacgcacctggcaatcatcagttcagactccaaaatttagtatatcatgtataacagggaatgcaatacatatacattactcctgcaattgcaaagattccaagttcagaatcagatcgttgaggaccactttccagaattaaaacaacataggtcctcttatgccgtccataacggangatcgcatgtcatcagttggtttccaatgacgttttctctgattgatgaaccaattattgatctgcttttgatccagtccagtaatttctgacaacttcactttctcctcttccgtagataaggccatctataatgggtgttccacagtccatgagtgctatccttgcatcctttggtagcttacccttttttcttcgttttagaaattcctttctcaaaccgctaaaatggccgctgtatttgcgaggagcatttctttaagcctttgatcacttgggcaagttacagaagaagatacatgatcttcaaatgcttccatctcccc

SEQ ID NO: 38928 - DNA, 546 bp, Glycine max
  Clone ID: LIB3056-011-Q1-N1-D11.R2
tagctacaaatttgataagtatattagccaaacgcacctggcaatcatcagttcagactccaaaatttagtatatcatgtataacagggaatgcaatacatatacattactcctgcaattgcaaagattccaagttcagaatcagatcgttgaggaccactttccagaattaaaacaacataggtcctcttatgccgtccataacggcagatcgcatgtcatcagttggtttccaatgacgttttctctgattgatgaaccaattattgatctgcttttgatccagtccagtaatttctgacaacttcactttctcctcttccgtaggataaggccatctataatgggtgttccaccagtccatgagtgctatccttgcatcctttggtagcttacccttttttcttcgttttagaaattcctttctcaaaccgctaaaatggccgctgtatttgcgaaggagcatttctttaagcctttgatcacttgggcaagttacagaagaagatacatgatcttcaaatgcttccatctccccacaactta

SEQ ID NO: 38929 - DNA, 571 bp, Glycine max
  unsure (1)..(571): unsure at all n locations
  Clone ID: LIB3056-012-Q1-N1-E9.F1
cttattcatcttttcattcactcactctcactcatggctgaagatgggaacaacaacgatgtacccttacacaaattcaaagacagcaatccaaaccctgaagagttcgatgcaaagggttacagcctcagcggaaaaatcatgctttcagcaataatccttcttttcttcgtcgtcgttttgatgttgtgccttcatatctacgcgcgctggtacctccggcgtgctcgccacgccagctccggcgccaacgcgagctccgccgcacccagcttgtcttttacaacgacgacgccacccccgcagccgtgtcacgtggcctcgacgccgccatccttgccacgctccccgtcttcaccttcgacccggaaaaaaccgggccggagtgcgctgtttgcttgtcggagttcgaacccggtgaaaggtnncgggtcttgcccaaatgtaatcacagtttccacatagaatgtattgacatgtggttccattctcatgacacgtgtcctctttgtcgcgcccggttgaacgcgcgccggaaccggaagttgttgttataacagtacccgatccg

SEQ ID NO: 38930 - DNA, 569 bp, Glycine max
  Clone ID: LIB3056-012-Q1-N1-E9.F2
cttattcatcttttcattcactcactctcactcatggctgaagatgggaacaacaacgatgtacccttacacaaattcaaagacagcaatccaaaccctgaagagttcgatgcaaagggttacagcctcagcggaaaaatcatgctttcagcaataatccttcttttcttcgtcgtcgttttgatgttgtgccttcatatctacgcgcgctggtacctccggcgtgctcgccgccgccagctccggcgccaacgcgagctccgccgcacccagcttgtcttttacaacgacgacgccacccccgcagccgtgtcacgtggcctcgacgccgccatccttgccacgctccccgtcttcaccttcgacccggaaaaaaccgggccggagtgcgctgtttgcttgtcggagttcgaacccggtgaaacgggtcgggtcttgcccaaatgtaatcacagtttccacatagaatgtattgacatgtggttccattctcatgacacgtgtcctctttgtcgcgccccggttgaacgcgcgccgggaccggaagttgttgttataacagtacccga

SEQ ID NO: 38931 - DNA, 534 bp, Glycine max
  Clone ID: LIB3056-012-Q1-N1-E9.R1
taagaaacaaataaagaaaaaatatatatatcaacgaataagtacatcatttatgttcatcccaaaaccattctacgtcataatctcgcgccacctaactcacgcgccgctcaccgcctacattaaaatccagaaacgtcactattacacaccgccacggccaacaacccaagtttttccgcttccaacaagtgccacgtcagcacccgagtcaccgactcactgagtctcctctcgctcacctcgctccgggcggacgtacaatcgccgccgcgcacgacgacggactacgttccccttcttttccctgccgagcatcctcgtaaacgacagcatgcgactcatcggcgaccgaaacgaggaggatgagtcgcaactcggttgaactcggttttgaaaattctcgtccctcggaggcacctcaatttgtcacaccaaccaacgaaggcttaggcttactcaatccaaccgaagaggaagaagaagaagaaccgggtttcgttccgaattttcgcctgaaccgggtttcggaaa

SEQ ID NO: 38932 - DNA, 474 bp, Glycine max
  Clone ID: LIB3056-012-Q1-N1-E9.R2
taagaaacaaataaagaaaaaattatatatcaacgaataagtacatcatttatgttcatcccaaaaccattctacgtcagtatctcgcgccacctaactcacgcgccgctcaccgcctacattaaaatccagaaacgtcactattacacaccggcacgcgccaacaacccaagtttttccgcttccaacaagtgccacgtcagcacccgagtcaccgactcactgagtctcctctcgctcacctcgctccgcggcggagctacaatcgccgccgccgcacgacgacggcgacacgttccccttcttttccctgccgagcatcctcgtaaacgacagcatgcgactcatcggcgaccgaaacgaggaggatgagtcgcaactcggttgcaactcgttttgaaaattctcgtccctcggaggcacctcaattgtcacaccaaccaacgaaggcttaggcttactcaatccaaccga

SEQ ID NO: 38933 - DNA, 568 bp, Glycine max
  Clone ID: LIB3056-014-Q1-N1-C12.F1
cgctagtgcgtaggatcagctgaacgttatcggatacacaaactccaggtcgaaaaaggggtgcctctggtgttgtggtggagaaaactgtggagaggaggcagaagaggatgattaaaaatagggaatctgctgctcggtcacggcaagaagacaggcatacacacaagaactggagattaaagtttcacgattagaagaggagaatgaaaggcttagaagactaaatgaaatgtagagggcattgccatctgtgccaccacctgagcctaagccaaagcaacagcttcgcagaacatagttcagccatcttttgatatcttaattgcaatgaattcctaattcttgcccatgctatcacatcacatagctctcatgtgcattatactcccgcctcttcaagtttggttatagatgggaggctattgtttgtgatgctatcagttctccccagcttgctctattctactaatgtttacctcttatgtatattttgattacaacttaagctgctctataaatatacttactctaattttgggcccatttgtgggaattatgaaattat

SEQ ID NO: 38934 - DNA, 599 bp, Glycine max
  Clone ID: LIB3056-014-Q1-N1-C12.F2
gacgtcctgccgcgtcgtagctcgattcgctcggctcggccgttcgctggtggggacgtttcggatcacaaactccagtcgaaaaagggtgcctctggtgttgtggtggagaaactgtggagaggaggcagaagaggatgattaaaaatagggaatctgctgctcggtcacgggcaagaagacaggcatacacacaagaactggagattaaagtttcacgattagaagaggagaatgaaaggcttagaagactaaatgaaatggagagggcattgccatctgtgccaccacctgagcctaagccaaagcaacagcttcgcagaactagttcagccatcttttgatatcttaattgcaatgaattcctaattcttgcccatgctatcacatcacatagctctcatgtgcattatactcccgcctcttcaagtttggttatagatgggaggctattgtttgtgatgctatcagttctccccagcttgctctattctactaatgtttacctcttatgtatattttgattacaacttaagctgctctataaatatacttactctaattttgggcccatttgtgggaaatatgaaattataagt

SEQ ID NO: 38935 - DNA, 524 bp, Glycine max
  Clone ID: LIB3056-014-Q1-N1-C12.R1
ttaaaaagtaagacttataatttcataattcccacaaatgggcccaaaattagagtaagtatatttatagagcagcttaagttgtaatcaaaatatacataagaggtaaacattagtagaatagagcaagctggggagaactgatagcatcacaaacaatagcctcccatctataaccaaacttgaagaggcgggagtataatgcacatgagagctatgtgatgtgatagcatgggcaagaattaggaattcattgcaattaagatatcaaaagatggctgaactagttctgcgcagttagctttggcttaggctcaggtggtggcacagatggcaatgcctctccatttcatttagtcttctaagcctttcattctcctcttctaatcgtgaactcttaatctccagttcttgtgtgtatgcctgtcttcttgcccgtgaccgagcagcagattccctatttttaatcatcctcttctgcctcctctccacagttttctccaccacaacaccagaggcacccc

SEQ ID NO: 38936 - DNA, 534 bp, Glycine max
  Clone ID: LIB3056-014-Q1-N1-C12.R2
ttaaaaagtaagacttataatttcataattcccacaaatgggcccaaaattagagtaagtatatttatagagcagcttaagttgtaatcaaaatatacataagaggtaaacattagtagaatagagcaagctggggagaactgatagcatcacaaacaatagcctcccatctataaccaaacttgaagaggcgggagtataatgcacatgagagctatgtgatgtgatagcatgggcaagaattaggaattcattgcaattaagatatcaaaagatggctgaactagttctgcgaagctgttgctttggcttacgctcaggtggtggcacagatggcaatgccctctccatttcatttagtcttctaagcctttcattctcctcttctaatcgagaaactttaatctccagttcttgtgtgtatgcctgtcttcttgcccgtgaccgagcagcagattccctatttttaatcatcctcttctgcctgctctacacagttttctccaccacaacaccagaggcacccctttttcg

SEQ ID NO: 38937 - DNA, 608 bp, Glycine max
  unsure (1)..(608): unsure at all n locations
  Clone ID: LIB3056-011-Q1-N1-D11.F3
aagatcatcggttaacaacaaccgctccgatgaggtagctagtggggcatcagnagaggaattaagttgtgggngagatggnnaagcatttgaagatcatgtatcttcttctgtaacttgcccaagtgatcaaaggcttaaagaatgctccttcgcaaatacagcggccattttagcggtttgagaaaggaatttctaaaacgaagaaaaagggtaagctaccaaaggatgcaaggatagcactcatggactggtggaacacccattatagatggccttatcctacggaagaggagaaagtgaagttgtcagaaattactggactggatcaaaagcagatcaataattggttcatcaatcagagaaaacgtcattggaaaccaactgatgacatgcgatctgccgttatggacggcataagaggacctatgttgttttaattctggaaagtggtcctcaacgatctgattctgaacttggaatctttgcaattgcaggagtaatgtatatgtattgcattccctgttatacatgatatactaaattttggagtctgaactgatgattgccaggtgcgtttggctaatatacttatcaaatttgtagct

SEQ ID NO: 38938 - DNA, 458 bp, Glycine max
  Clone ID: LIB3056-011-Q1-N1-D11.F4
cttcgcaaatacagcggccattttagcggtttgagaaaggaatttctaaaacgaagaaaaagggtaagctaccaaaggatgcaaggatagcactcatggactggtggaacacccattatagatggccttatcctacggaagaggagaaagtgaagttgtcagaaattactggactggatcaaaagcagatcaataattggttcatcaatcagagaaaacgtcattggaaaccaactgatgacatgcgatctgccgttatggacggcataagaggacctatgttgttttaattctggaaagtggtcctcaacgatctgattctgaacttggaatctttgcaattgcaggagtaatgtatatgtattgcattccctgttatacatgatatactaaattttggagtctgaactgatgattgccaggtgcgtttggctaatatacttatcaaatttgtagct

SEQ ID NO: 38939 - DNA, 515 bp, Glycine max
  Clone ID: LIB3056-011-Q1-N1-D11.R3
ctcctccttgtatctatgaagaacttcgcagaatgtttccatgaagtggtcaagttcaggaccctccacaatctcacggcgagcattcatgcggtggctttctcggcctatttcttcaagaaggcatgccagttccggcggtgctccaaccttttggcattctatatatgcagagagtaaatctggataaagagggtgatttgcgatctggatcttgatcatccgatctgacatatctgatgatgactcggttacattattctgttgaggagcttccagctgcaggtaacaacaattagccgttgatccaacacgcatctcagaagtagtagcgttcccaactctaaccacttcctcctctagacaaggcaaaagaggtttcaaccagtattttgctgtgaaggcagctaggaagaggagtgtgtgtagtgtacgctaatacgaaattacagatgatgataatgacgaggaagcaaggggaagtagttggagcatgaaggtacctgcacaacgac

SEQ ID NO: 38940 - DNA, 468 bp, Glycine max
  unsure (1)..(468): unsure at all n locations
  Clone ID: LIB3056-014-Q1-N1-C12.F3
gattaaaatagggaatctgctgctcggtcacgggcaagnagacaggcatacacacaagaactggagattaaagtttcacgattagaagagagaatgaaggcttagaagactaaatgaaatggagagggcattgccatctgtgccaccacctgagcctaagccaaagcaacagcttcgcagaactagttcagccatcttttgatatcttaattgcaatgaattcctaattcttgcccatgctatcacatcacatagctctcatgtgcattatactcccgcctcttcaagtttggttatagatgggaggctattgtttgtgatgctatcagttctccccagcttgctctattctactaatgtttacctcttatgtatattttgattacaacttaagctgctctataaatatacttactctaattttgggcccatttgtgggaattatgaaattataagtcttacttttta

SEQ ID NO: 38941 - DNA, 434 bp, Glycine max
  Clone ID: LIB3056-011-Q1-N1-D11.F5
atccgatgactctggtagtgttccattacaaaggtggctgaggtgtgattccatgtcatcccaaaaataacgctcccttcattgaagggcctggacaactcctccttgtatctatgaagaacttcgcacaatggtcccatgaagtggtccagttcaggaccctccacaatctcacggcgagcattcatgcggtggctttctcgggctatttcttcaagaaggcgtgccatgttccggcggtgctccaaccttttggcattctatatatgcagacagtaaatctcgataaagagggtgatttgcgatctggatcttgatcatacgatctgacatatcggatgatgacctcggctacggtattcggttgtggatcttgcgtctgcaggtgacggcaatgagccagggagccaacacgcatctgagacgtagaagcg

SEQ ID NO: 38942 - DNA, 652 bp, Glycine max
  unsure (1)..(652): unsure at all n locations
  Clone ID: LIB3056-011-Q1-N1-D11.R6
cttctgagccccctagctacctcatcggnacggttgttgttatccgatgactttgttagtgttccattacaaaggttgctgagttgtgattccatgtcacccaaaaataacgtcgcttcattgaagggcctggacaactcctccttgtatctatgaagaacttcgcagaatgtttccatgaagtggtcaagttcaggaccctccacaatctcacggcgagcattcatgcggtggctttctcggcctatttcttcaagaaggcatgccagttccggcggtgctccaaccttttggcattctatatatgcagagagtaaatctggataaagagggtgatttgcgatctggatcttgatcatccgatctgacatatctgatgatgactcggttacattattctgttgaggagcttccagctgcaggtaacaacaattagccgttgatccaacacgcatctcagaagtagtagcgttcccaactctaaccacttcctcctctagacaaggcaaaagaggtttcaaccagtattttgctgtgaaggcagctaggaagaggagtgtgtgtagtgtacgctaatacgaaattacagatgatgataatgacgaggaagcagggggaagtagttggagcatgaaggtacctgcacaacgac

SEQ ID NO: 38943 - DNA, 396 bp, Glycine max
  Clone ID: LIB3065-008-Q1-N1-G11
atattctctcactctcttactctttcactctacttctctctcctattgcggctagggtttaggtttttctttcaccgtctccgttccttcaatcttcttattctctttcatctctgatggagacgttgcgggtttagttctaaggggtggttctggccttgggtttttggaacgtacggtgtcgttttggggttgggaaaacaaattctgagagatggcaaccacgaacccttttgatttgttgggtgacgacgctgaggacccttctcagctcatcgccgccgagcaactcaaggcggcggctgcggcctcggcggccaccgcggctcccaagaaggcgccggctcagcagaacaagccgggttcagttccttaccaagccgcttcttccggtta

SEQ ID NO: 38944 - DNA, 354 bp, Glycine max
  Clone ID: LIB3065-006-Q1-N1-D1
gaagtagaggtcttaagagtttgagaactgagaagagatgggtggtgttgcatggacagaagaagaagatcacttgctcaagaaatgcatacaacaatatggagaaggaaagtggcatcgtgttcctttactggctggtttaaacaggtgccggaagagttgtaggctaagatggctgaactatctccgtcctaacatcaagagaggaaattttgcggaggaagaagtggaaatgataatcaaactccataaattactaggcaacagatggtcgttgattgcaggaaggctaccaggaaggactgccaatgatgtgaaaaactattggaactgtcatctgagcaaaaaacttaa

SEQ ID NO: 38945 - DNA, 368 bp, Glycine max
  Clone ID: LIB3065-006-Q1-N1-F4
gaagtagaggtcttaagagtttgagaactgagaagagatgggtggtgttgcatggacagaagaagaagatcacttgctcaagaaatgcatacaacaatatggagaaggaaagtggcatcgtgttcctttactggctggtttaaacaggtgccggaagagttgtaggctaagatggctgaactatctccgtcctaacatcaagagaggaaattttgcggaggaagaagtggaaatgataatcaaactccataaattactaggcaacagatggtcgttgattgcaagaaggctaccaagaaagactgccaatggttgtgaaaactattggaactggcatctgagcaaaaaactaaatgtaatagaagctg

SEQ ID NO: 38946 - DNA, 383 bp, Glycine max
  Clone ID: LIB3065-006-Q1-N1-G4
cctctgtctcctcctcaatcttcattgtgctgggctttcccttggtgacaaaccaagactaacacacacagaacatagcttgtgttggtgaggtgagaagataaagaaagaatggcatttgcaggaacaacacagaagtgtatggcctgtgacaaaaccgtttatctggttgataagttgaccgcggataaccgaattttccacaaagcttgcttcagatgccatcactgcaaaggaaccctcaagctgagcaactacaactcttttgagggagttctttattgtaagccacactttgaccaactgttcaaaagaacagggagccttgacaaaagctttgaaggaacaccaaaaattgccaagccagagaaaaatttggaaga

SEQ ID NO: 38947 - DNA, 378 bp, Glycine max
  Clone ID: LIB3065-002-Q1-N1-F7
acaacgatgtacccttacacaaattcaaagacagcaatccaaaccctgaagagttcgatgcaaagggttacagcctcagcggaaaaatcatgctttcagcaataatccttcttttcttcgtcgtcgttttgatgttgtgccttcatatctacgcgcgctggtacctccggcgtgctcgccgccgacagctccggcgccaacgcgagctccgccgcacccagcttgtcttttacaacgacgacgccacccccgcagccgtgtcacgtggcctcgacgccgccatccttgccacgctccccgtcttcaccttcgacccggaaaaaaccgggccggaatgcgctgtttgcttgtcggagttcgaaccccgtgaaacgggtc

SEQ ID NO: 38948 - DNA, 362 bp, Glycine max
  Clone ID: LIB3065-014-Q1-N1-F3
aaagccaattacggatcacttaaacttaactttgacaccctgcaacaagacaacgaagccttactcaaacagataaaggaattgaaatcgaggctggtgcaagaagagaacaacaacaacactgaaagcgatgtttcggtgaaggaagagatgatagccactctgcaggatagtaacccgctctgtgaatccgccattcctggatcggactcgaaggagttgagttacgagtgtttcaacaagagtgatgaggtgggagggggttctgtgttccctgtggatttcaaagatgggtcttctgatagcgactcaagtgcgatcttgaacgaggagaacaacatccacagccccaacaacaacgc

SEQ ID NO: 38949 - DNA, 356 bp, Glycine max
  Clone ID: LIB3065-011-Q1-N1-D8
gagaatggcaactatgactggtgtgagcctttcatgccccagggtggtcttcaacgcatgagcctcaccgcataacgcgcatgctgtaaagttctcacttccacccagccaagcagtgcgaccgggtagtatcaagttgggtcgcgtgatgaggatccgacccgttcgcgctgcgcctgagcgcatatcggagaaggtggaggagagcataaagaacgcgcaggaggcgtgcgccgacgatccgacgagcggcgagtgcgtgacggcgtgggacgaggtggaggagctgagcgcggcggctagccacgccagggacacgcaaatggtaatggacttcgacccgctcgagaattact

SEQ ID NO: 38950 - DNA, 403 bp, Glycine max
  Clone ID: LIB3065-002-Q1-N1-C2
caaaaccatttgcgttgtcgcagtcgcagtcaaaggccaaggcaaaaccctaaattgtctcacactttcgtcggaatccgcttttggctttttccgtgacaagatgccggcgaaggacgacggctccgacaaggagaagtgccttgatctctttctgaaaatcggcttagacgagcgcaccgctaaaaacaccgtcgcaaacaacaaagtcaccgccaatcttactgcagtcatctacgaggccggtgttattgatggatgcagccgagcggttggaaatcttctttacacggttgcaacgaagtaccctgcaaatgccttgccacatcgcccaacattgctacagtacattgtctcgttaaggtgaaaacaactgcacagttagatgcagcattatcatttc

SEQ ID NO: 38951 - DNA, 321 bp, Glycine max
  Clone ID: LIB3065-002-Q1-N1-G8
ggaagaccttatcatctccgaatttcattttcagaagcctctttgggaatcaaatccgaagcatgatgcattgtgcgagcattgtctcggctccgtcctacgcgttcccttttctctctggctccgcttccactactccaactgcgatctcgctcactaagcgcagttggaagccacctccgagcatggcaaaaggcccagtcagagccaccgtttctatagagaaagagaccccggaggccaatcgtcccgaaacgtttctcagaggagtggacgaggcccagtcttccacttcggttcgggcccgcttcgagaagatga

SEQ ID NO: 38952 - DNA, 339 bp, Glycine max
  Clone ID: LIB3065-006-Q1-N1-F11
gggagcgtgagttcatgttctacagaaaccccagcgccgacatgctcctcaagcccgaagaactcaatctcgaactcatcagatctgcaaaagttttccattacggatcaatcagtttgatcgtggagccatgcagatcagcacacttgaaggcaatggaagtagccaaggaatctgggtgcttgctctcctatgaccccaaccttcgtctacctttgtggccttcggctgaggaagctcgtaagcaaatactgagcatttgggagaaagctgatttgatcaaggtcagtgatgcggaagctgagttcctcacaggaagtgacaagattgatgatgaat

SEQ ID NO: 38953 - DNA, 403 bp, Glycine max
  Clone ID: LIB3065-003-Q1-N1-C9
ctcacttctgatgaacatgatgatagactcactcagttgactaatcaatctcctgaataccctccaaatttcagggttataatacaagagtatattcaagagatggaaaagctgtgctttaagctgttggagcttatagctttgagcttaggcattgaagcgaataggtttgaagaatttttcatcaaaaaccaaactagctctattcgactcaaccactatcctccttgcccttaccctggccttgctcttggagttggtcgacacaaggaccctggtgccttgaccattcttgcacaggatgaggttggaggacttgaagtgaaacgtaaagctgatcaagagtggataggagtgaaacccaccctagatgcttatattatcaacgttggtgatattattc

SEQ ID NO: 38954 - DNA, 436 bp, Glycine max
  Clone ID: LIB3065-008-Q1-N1-F5
aatggcctcagccgcatcccccaccactttctctctcctgcactgggccaccccttcctcctcctccaccgccacctccgcctccccctccccctcgcgcgtgcagctcacctcctccctccgcgcccgcccgctgcgccgcctgggcttcgccgcggcggacccgctgctcgcggcgagtgtagcggcgcgcgtggcggcggtgagaggaggaggaaagggcgccaaggggtggtgtcgatggcgaagaagagcgtgggggacctgagcgcggcggacctgaaggggaagaaggtcttcgtcagggccgacctcaacgtcccgctcgacgacaaccagaacatcaccgacgacaccagaatccgcgccgccattcccaccatcaaacatctcatccaaaacggcgccaaagtcattctctccagccacttggggc

SEQ ID NO: 38955 - DNA, 394 bp, Glycine max
  Clone ID: LIB3065-010-Q1-N1-H3
cgtccatcatttttctacaacgacagaacaaggaaaagccgtgcctttaccaatgccttctcgtttttgtgttagtctttaactcatctgtcatgtcaattccattgtttttgaaaccttttcctcccccaccttgaaacaaagtatattttgtctcatgtagttttaagacaacttgattaggctgagtctgttgcgaaaattttccttgtatgatgacgatgatgtttaccatctcttccgcgtggtcaattttctaaatatattcctttccggatggttcaactttcttaatatttctttaccattttgtttttattggattgtctggttttaaaaatgtttgcaattggactaattcaattataactaaaaattaataattcaaggaatt

SEQ ID NO: 38956 - DNA, 420 bp, Glycine max
  Clone ID: LIB3065-011-Q1-N1-E4
gtctcaacttctgctcttccaactcctacaacgcttggctgtgcactcatgggcaaggtcaagatcggaatcaacggatttggaagaattggccgtttggttgccagagtcgctctgcaaagagacgatgttgaactcgttgccgttaacgaccctttcattaccaccgattacatgacatacatgtttaaatacgacagtgttcacggacactggaagcatcacgatgtcaccgttaaggacgagaagacccttctcttcggtgacaaggcagtcactgtttttggacacagaaaccctgaagagatcccatgggggtcaactggagctgacatcattgttgagtccaccggagttttcaccgataaggacaaggctgccgcacattcgaagggtggtgccaagaaggttattatttct

SEQ ID NO: 38957 - DNA, 405 bp, Glycine max
  Clone ID: LIB3065-001-Q1-N1-G1
taaattatgtgttcataaattatgcaccagcaactcacacaagttttgcatctttaccaggaatgtgggacagaactcttactgtgaatggattttccaaggcctttgcaatgactggttggcggcttggatatattgctggtccaaaacattttgttgcagcatgtggaaagatccaaagtcagttcacttcaggggccagtagtatagctcagaaagctgcagttgctgcattaggactaggccatgctggtggggaggcagtttctaccatggtgaaagcatttagggagcgaagggatttcttggtaaaaagttttagagaaatagatggtgtcaagatatctgaaccccagggagcattttatctattccttgatttcagcttctattatggaagagaag

SEQ ID NO: 38958 - DNA, 398 bp, Glycine max
  Clone ID: LIB3065-006-Q1-N1-B10
atcgcagccctgatagccgtcagcacaggtctatggtatacacatgaaattcacgccttcctccaaattcttaggcttttcaaatcacttccactcccttctcgcaccctctttctctccgaccccaaagttctcatcttccttttccgccaccatgtccactctttccactcagaacgacaccgtcacccacaaaacgcagcaacctttgcagattgcaaagcgcttagagaaatttcagacaacaatcttcactcaaatgagcttgcttgccatcaaacatggggccataaaccttggtcaaggctttcccaactttgatggtccagaatttgtaaaggaagcagcgattcaggcaatcagggatgggaaaaatcagtatgccccgggttatggag

SEQ ID NO: 38959 - DNA, 437 bp, Glycine max
  Clone ID: LIB3065-008-Q1-N1-B3
cgcacttctgctccgcaattatcatgggcaaggtcaagatcggaatcaacggatttggaagaattggccgtttggtagccagagtggctctgcagagagacgatgttgaactcgttgccgttaacgaccctttcatcaccaccgattacatgacatacatgtttaaatacgacagtgctcatggacactggaagcatcacgatgtcaccgtttaggacgagaagacccttctcttccgtgacaagccagtcactatttttggacacagaaaccctgaagagatcccattggggtcaactggagctgacatcattgttgagtccacccgagttttcaccgattaggacaaggccgtcgcacatttgtaggggggtgcaaaggaagttattatttctggccccagtaaggatgcccccatgtttgttggtgtgtcaacg

SEQ ID NO: 38960 - DNA, 300 bp, Glycine max
  Clone ID: LIB3065-025-Q1-N1-H3
ctaaatccgtgcttatactaaccgatcattgtatgagcaggatagcagaaatgattatcagtctttgtggtggtgatgaaaaattgatgcttgaaaggacacacctgctgttggcttgttgttcaaggatggcaatttgtaagaaagatgtttggagagttgaatgtggaatcccttctggatttccgttcacagttatttgtattagcatttttaatgagatgctcattagatatagctatgaaaaattactgcgccaggctaaagctccaagtatgtttttacaatccttcaaaaatt

SEQ ID NO: 38961 - DNA, 240 bp, Glycine max
  Clone ID: LIB3065-025-Q1-N1-H4
ggacgaaggtatttcacccaaatataaatagcaatggaggcatttgccttgacatattgaaggagcagtggagccctgcgctaactatttcaaaggtgttgctctcaatttgttccctgttgacggaccctaatcctgacgatcctttggtccctgaaattgccaacatgtccaggacagccaggaccacgtccaagtcaactgccagaagctggacccagaattttgcattgggttaag

SEQ ID NO: 38962 - DNA, 415 bp, Glycine max
  Clone ID: LIB3065-025-Q1-N1-H5
gaaaaaggaggatcgaactcgaacccgattgtggtcggggcagaacagagaggagaggacaacacacacaatcacagggttgagttgagttgagccgtgagaaaagaaaaaataaatggccattgctatgaaggccacgcctatcacggcttcgggcttcgtttcaacaagaaattccacactttcaccctttaaatcatcatttctcagataccgctcaggagcattggaagttcctggcatgcgggtaacctactcagatagattgaaatgtaattgtcatggtggcggtgcccttggcactcaaatgaatctttttagcagatttgctagagttatcaagtcatatgctaatgccattataagctcctttgagaccctgagaagatattagacaagctgtgctggatatgaa

SEQ ID NO: 38963 - DNA, 93 bp, Glycine max
  unsure (1)..(93): unsure at all n locations
  Clone ID: LIB3065-025-Q1-N1-H6
tatagaagatctatgacgtctcatgcaggtcgtacgtagctgngaaataacatttgagctaaatgtcagtttaaggccaggatccgtaaaaag

SEQ ID NO: 38964 - DNA, 399 bp, Glycine max
  unsure (1)..(399): unsure at all n locations
  Clone ID: LIB3065-025-Q1-N1-H7
ctactttccatgcttatattacagggctcttgattgtcgggctgactagagaagcctctgtaagtgaaaagagcagtcagaattcaacctctgtgggtttcaagttgatgttagccaagatagtgccaaagcttttcttgtcactatgtgaggttggagctgattgtgaaggaatttaagcatctgaaagatttgtagcgaagttatatggttgatacatcacttcatttctcaaattaaagccaactttggtctgctaactctgacccatagtaccatcaagtgtaaaggttctcatatagcgtcaatgttttgattcctactatttgtactcttntaatttctcttggttaaaagatcaattcacttctaggagcttgaaggaacataatttggtgg

SEQ ID NO: 38965 - DNA, 216 bp, Glycine max
  Clone ID: LIB3065-025-Q1-N1-H8
acaaaaaccttaatatatttacacaagaaaataaatatacgggatagccaaaataatactctagaaatttaaaaaacccataaattctttccacccgttactctctccttctcgtgtttcccttttaatagggcgcccccccccttttggccctcttgcccccggttttttttccggccccgtcccttttggcttcccatttttccctttttgggg

SEQ ID NO: 38966 - DNA, 144 bp, Glycine max
  Clone ID: LIB3065-025-Q1-N1-H9
tggagacaagaaaaatgagccatggcggcctaagatgcaaactcgtgaaagctagttgaagcttgcgctatcatcatatggactgcttagcacttcatgcagctgttaattttggacagtatccctatggaggtttaatcttaa

SEQ ID NO: 38967 - DNA, 275 bp, Glycine max
  Clone ID: LIB3065-026-Q1-N1-A3
gtcacacctgtcatatgtttcgtgtaatcatctggaaatgcaagatgcttatcttggcaatgtcgtacatgtgttacgcgagctgtatctgcacagtccatacgaagctcgccaactgacaaggacagctttgtctcatattgaatggctcgcaaaagctgatgtgcctaccatagcacagattgaagagttgcattcgatgcatagaatgatgaatgcttctgattcacatgattatcttgatctactgtacaacattgactagttggctttac

SEQ ID NO: 38968 - DNA, 416 bp, Glycine max
  Clone ID: LIB3065-026-Q1-N1-A5
gtcacaacttcattatgtttcgtgtaataatctgaaaatgcaagaagcttatcttgtcaatgtcgtacatgtgttacgcgagctgtatctgcacagtccataggaagctcgccaactgcgaaggaaagctctctctcgtattgaatggctgcaaaaaggtgatgtgcctaccatagcacagattgaagagttccattcgatgcaaagaatgatgaatgctcctgattcacatgataatattgatctactgatgagcattgatttgttgggtttacaaggagcacttaaagctttttcaaaatagaatgtttttgatgataagcttgtgtcggctaacacacaagaattcttttatggaaaatttccagaggatgcttggttaccaatctttgtgaattgtctttattctttaagtc

SEQ ID NO: 38969 - DNA, 229 bp, Glycine max
  Clone ID: LIB3065-026-Q1-N1-A7
actatagatatgactatgacatgcactccacccttacctaagcattcaattcgagtttagaccagccatagcatagcttgaggcggaagagtgatactatatcagcccgagagaaaggtagtacaccaatggcgcaaggccaaacatggctgcaacttcaggtattgtaacagccacaggtccagattaccctatatgtgaatgaactcaatatggtgatgtgaacaaa

SEQ ID NO: 38970 - DNA, 420 bp, Glycine max
  Clone ID: LIB3065-026-Q1-N1-B1
gttggactaaaagaacaacaacaggagcagcaacaggaagagcaacctttgcaagtgcggaaatatagagccgaattgtctgaacaagatatatttgtaatcccagcaggttatccagttgtggtcaacgctacctcaaatctgaatttctttgctattggtattaatgccgagaacaaccagaggaacttactcgcaggttcgcaagacaatgtgataagccagatacctagtcaagtgcaggagcttgcattccctgggtctgcacaagctgttgagaagctattaaagaaccaaagagaatcctacttttgggatgctcagcctaagaagaaagaggaagggaataaaggaagaaaaggtcctttgtcttcaattttgacggctttttactgaataagtatgtactaaaatgtatgc

SEQ ID NO: 38971 - DNA, 403 bp, Glycine max
  Clone ID: LIB3065-026-Q1-N1-B2
acagtacacacactagaagaataatggcttccatcctccactactttttagccctctctctttcttgctcttttcttttcttcttatccgactcagtcacccctacaaaaccaataaaccttgttgttctacccgttcaaaatgatggttccacagggctccattgggccaacctccaaaaaagaacccctctaatgcaagtaccagtcctggtggacctcaatggaaatcacttgtgggttaactgtgagcagcagtactcatccaaaacgtaccaagcacccttctgccactccacccaatgctctagagccaacacccaccaatgcctcagttgccccgcggcatcaaggccagggtgccacataaacacgtgtggcctcatgtccactaatcccatcac

SEQ ID NO: 38972 - DNA, 405 bp, Glycine max
  Clone ID: LIB3065-026-Q1-N1-B4
cgtcctactagtgaaacagtgatgtatccctactactctaagtggataaggggacatcgtgacttgcctttgaaacttaatcagtggtgcaatgttgtaagatgggagttcagcaaccccactccattcatcaggagtcgcgagtttctttggcaagaagggcacactgcttttgcaacaaaggatgaagcagatgcagaggttcttgagattctggaattatataggcgtatatacgaagagtatttggcagttcctgtcataaagggtaagaaaagtgagcttgagaagtttgctggtggactctacactaccagtgttgaggcatttattccaaacactggtcgtggtatccaaggtgcaacttctcattgtttgggccaaaattttgctaaaatgtttgag

SEQ ID NO: 38973 - DNA, 402 bp, Glycine max
  Clone ID: LIB3065-026-Q1-N1-B6
atcataaaattcttccaccaagttatgggtttccttgtgttgcttcttttctccctcttaggtctctcttctagttccagcatatcaactcatcgttccatattggaccttgacctaaccaagtttaccacacagaaacaggtgtcttcactgttccaactatggaagagtgagcatggacgtgtctaccataaccacgaagaagaggcaaagagacttgagattttcaagaataacttgaactatatcagggacatgaatgcaaacagaaaatcaccccattctcatcgtttaggattgaacaagtttgctgacatcactcctcaagagttcagcaaaaagtacttgcaagctcccaaggatgtgtcgcagcaaatcaaaatggccaacaagaaaatgaag

SEQ ID NO: 38974 - DNA, 452 bp, Glycine max
  Clone ID: LIB3065-026-Q1-N1-B7
tcactatagctataactatgacatgcactccacccttacctcagcattgcattccggtagagctcacaacacatctaaacacataatcaacaacaatggcttacgctacgcttgctcctatggctgtcttcttgcttgccacttgcacacataatgataccaacgcacatcgatacagcacgattgtcatggtgcatgttcacctttcgagatgccatcggacctatcacgtgattgtcgctgtgtacctataggactagttgctggcttgtgtatacattcaactggactatcatctgatgcgaaaacgatctacgagcatcccaacttatgtcaatctcatgatgaatgcatgaataaaggaagtagccctttttgagctcgttaccctaataagtatatcgattatggatggcgttttgactctgattctgaagcactgaaaggcttct

SEQ ID NO: 38975 - DNA, 393 bp, Glycine max
  Clone ID: LIB3065-026-Q1-N1-B8
ctcgagccgattcggctcgaggacaaaacggggaagatcgtcgatgctcgcttcaaaaccttcggttgtggatccgccattgcttcttcctccgtcgctactgaatgggtgaagggaaagcaaatggaggaagttttgaccattaaaaacactgaaattgcaaagcatctttcacttccaccagtcaagcttcactgcagcatgcttgctgaggatgctataaaagcagctgttaaagattatgaagctaagcgtgcctcagcatctgctggtggacaggcaacaactggagagaaagctgtcactgcttgagtacttcatttctagaatgatgatgaaaacaaccaatagtgtggttttctgacaggactcgatggacactgtatgaacatc

SEQ ID NO: 38976 - DNA, 381 bp, Glycine max
  Clone ID: LIB3065-026-Q1-N1-C2
gagggaacgtaggagatatagttaacatcccaattccccagtgggtgcttgacattggagaatcaaatcatgatatcttctacaccaaccgctcaggaacccggaacaaggaatatctaactgttggtgtggacaacgagcctatattccatggaagaacagccattgagatatacagtgactacatgaagagtttcagagaaaacatgtcagattttttagaatctggacttattatagacattgaagttgggcttggcccagcaggagagctcagatacccctcttatccacaaagccaaggatgggaatttcctggtattggcgaatttcagtgctatgacaaatatttgaaggcagatttcatagcagctgtagcaa

SEQ ID NO: 38977 - DNA, 216 bp, Glycine max
  Clone ID: LIB3065-026-Q1-N1-C3
acgcttccttgcctgcaacttgactttagaagatcccttcagggaacaacaatatcatattttcaagtaaataatgaggcaatggtggacacttatcaattggagcgcttagatttcttactagaactatatttgcacaatccataataagctcggcaactctcaaggaaagctctttcctcattttcaagacttcaggaagcataaatgcctacc

SEQ ID NO: 38978 - DNA, 405 bp, Glycine max
  Clone ID: LIB3065-026-Q1-N1-D1
cggctcgagctcgagccgaatcggctcgagcggctcgagcggctcgagcagggtcgcaaggttgacgagtatggcaacgttgagaagcaaaccgacgaatactgcaaccctgttcatgctgctagtgtcacctatgtagccaccagaactgctgctggtggttacagtgatgacattaataagcaacatgataccaccaatgcctactgcgtatacactggtagacagcattctagtggtggctacgatggtgacactaataaacatcatggaactactggtggctataatgatgacaccaatagacattatggaactaccggtgtctatggtatagacaccgataggcgacaacatgggactactggtggctatgccggggacactggtaagcacatgggaaca

SEQ ID NO: 38979 - DNA, 407 bp, Glycine max
  Clone ID: LIB3065-026-Q1-N1-D2
attggtccttaaacactcatcagtcatcaccatggccaagctagttttttccctttgttttctgcttttcagtggctgctgcttcgctttcagttccagagagcagcctcagcaaaacgagtgccagatccaaaaactcaatgccctcaaaccggataaccgtatagagtcagaaggagggctcattgagacatggaaccctaacaacaagccattccagtgtgccggtgttgccctctctcgctgcaccctcaaccgcaacgcccttcgtagaccttcctacaccaacggtccccaggaaatctacatccaacaaggtaagggtatttttggcatgatatacccgggttgtcctagcacatttgaagagcctcaacaacctcaacaaagaggacaaagcagcagac

SEQ ID NO: 38980 - DNA, 405 bp, Glycine max
  Clone ID: LIB3065-026-Q1-N1-D4
ctcgagccgaatcggctcgaggctatgaaaacatacttggagctttagcctggcgcagtaatttttacaatccttcaaaaattttgtttctttgtgtgtgtatggtgatgataacttaattagtgttcatgaatacgtcaagccttactttagtggttctaaattgaaaagctttctagctggtcataatatcaccattactgatggtattgacaagactagtgcaactttgcaatttagaaagttagcagattgtgattttctcaagagaaactttaagcagatgtctaatgttttgtgggtagctcctgaggacaaggcgagtttatggtcacaacttcattatgtttcgtgtaataatctggaaatgcaagaagcttatcttgtcaatctcgtaaatgtgtt

SEQ ID NO: 38981 - DNA, 395 bp, Glycine max
  Clone ID: LIB3065-026-Q1-N1-D5
tctgttcctgcaagagtttgagtcacaaattttccactcttcctcaccgattgctagaatggaatttcgatgctcagtcatctcttttaccattctcttctctcttgctctagcatgatagagccatgtccatgcatcgctacctgaggaagattattgacaagctgtctgtccaaacactcccattcccactgcactgctagagcttctaaagcctttcactgcatgtgttgaaatccatgaactgcctaagcaaattgatgattcacagtacccatagacattctgctatcaagaatacctttattcaggctaaacaatgaaagtacaattcaccaagcgttcctatgcacaacctttacgtgtatatacatggttaacggattttaaagaca

SEQ ID NO: 38982 - DNA, 405 bp, Glycine max
  Clone ID: LIB3065-026-Q1-N1-D6
atctgaatgagggagagacttctaaggaaaccagtgatatccattgggaagactgcaaggatcaaattgatgtagttgcacttgcatccaaggagcccatacttttctatgatgaggtggtgttatatgaggatgaactcgctgataatggagtatcacttcttactataaaagtgagagttatgcctagctcttggtttcttctgttgcgtttctggcttagagttgatggagtgttgattagactgagagaaacacgtatgcattgtgtatttggtggaagtacaaatcccattatacttcgagagagttgctggagagaatctacatttcaagctttgtctgcaaaagggcacccttttgattctggtgcgtatggtgatccgagtttcatcagccagaagc

SEQ ID NO: 38983 - DNA, 404 bp, Glycine max
  Clone ID: LIB3065-026-Q1-N1-E2
cagggactggtgcgacccttcatcaccattcactgatttgtgggaccctcgtcgtgtcggtgacgctgatgatatcacctcctctctcgcccatgctcacgttgactggcgtgagactgataaagctcatatcttccgtgctgatcttccaggggtgaagaaagaggatctgaaggtgcaggtggaggagaataagatcctgcagataagcggtgagagggtgaaggagaaggaggaccagaacgacaagtggcaccgcgtcgagaggcagtgcggaagcttcctccgccgcttccggctgccggaggatgccaaccccaaccagatcagctgcacgctcgaaaactgcgtgctgaacgtcaccgtgcccaaggtggagaagaagccggagaacaagaacgtga

SEQ ID NO: 38984 - DNA, 212 bp, Glycine max
  Clone ID: LIB3065-026-Q1-N1-E3
gtcaggcggggctacccgctgagtttaagcatatcaataagggaagaaagggtcctttgtcttcaattttgagggctttttactgaataagtatgtactaaaatgtatgctgtaatagctcatagtgagcgaggaaagtatcgggctatgtaactatgactagagcttcaactatgaataaataaatcgacagcatatgatgcttttgtttt

SEQ ID NO: 38985 - DNA, 99 bp, Glycine max
  Clone ID: LIB3065-026-Q1-N1-E4
aaattaggcatgaccctcttgttgagtatgctctgcctatttgaaaatttccacacctcttttaattgtcgtaatgatgtgtgaagtgtgtgttatttt

SEQ ID NO: 38986 - DNA, 401 bp, Glycine max
  Clone ID: LIB3065-026-Q1-N1-E6
gaagaagaaaagaagaacaaagatgcaatcctcaaaggagaagatgaaaaacatggcaagtgctgccaaggaacaagtcgacatctataaagccaaaatagacgagaaggcagagaaagcaacggcaagaacagaagaggagagggtgatagcccatgagcacgcaaaggcaaaggaagctggagcaaagatggagctgcatgaagctaaagcaaggcatgcagcagagaagctaagcgccaaccaatcacattatggtctccaccatggccacaacaaccctcccttagtaggaacaactcagactcactaccagcaagggcaccagcaccagccacttggggcagttcctatgcctggaaccacttatccatcttatccactaggaggaaaccctaacc

SEQ ID NO: 38987 - DNA, 333 bp, Glycine max
  Clone ID: LIB3065-026-Q1-N1-F3
aaaaaaaaaaaaaaaaaaaaaaaaaaaaaaaaaaaaaaaaagggaaaaaaaaaaaaaaaaaaagggaaaaaaaaaaaataaaaaaaaaaaaaaaaaaaaaaaaaaaaaaaaaaaaaaaaaaaaaaaaaaaaaggggcggcccccatttaggggccttttaaccccgggaataaatccgggcccggtccctgtgggggtccaaattttccttatagggggccgttttaaaccttggcaaaacaagggcaaaaactgttccctggggaaaatggttttccgttaaaaattcccaaaaatttccaacccggaaccttaaggtttaaacccgggggg

SEQ ID NO: 38988 - DNA, 155 bp, Glycine max
  Clone ID: LIB3065-026-Q1-N1-F5
attgatgttgtgccaaaaaaaaaaaaaaaaaaaaaaagaagggaaaaaaaaaaaaaaagaaaggaaaaaaaaaaaaagacggccaaatacataagagactaaaagaccagaagataaatcccggtccggttccgcgaaggcgtacctcctttccc

SEQ ID NO: 38989 - DNA, 412 bp, Glycine max
  unsure (1)..(412): unsure at all n locations
  Clone ID: LIB3065-026-Q1-N1-F6
cccagcagcagattatcatgctgcagctcgtgcaattggtggatgtcctatttatgttagtgacaagccaggcaatcacaattttgatcttcttaagaagctggttctcccggatggttcggttctccgtgctcagttacctggcaggccaactcgtgattctctatttgtggatccagccagagataggactagcttgctcaaaatatggaacctgaacaaatgctctggagttgttggtgtatttaactgccaaggtgctggatggtgcaagatagagaagaaaacccgcatccatgatacatctcctggtacactcaccgnctctgtctgcgcctctgatgttgacctcatcacacaagtagcaggtgctgaatggcttggagatacaattgtttatgcttacagatca

SEQ ID NO: 38990 - DNA, 392 bp, Glycine max
  Clone ID: LIB3065-026-Q1-N1-F8
aagcttttcatgaaaaatagaattatgtattttaacatataaatcaatcaaatcaaaataattttttttgttaatttattatgcaaataaaagatatttctatttttaaaaaaattttaaattcttttctattgatatcaacttttttttactcaatttacatatcaacttatttaattattgatatatatagttaccccaaattaaattatcttcgaagatacattcttttgtcattttttgtttccttgatcgccttctattatccaactctctttgaatcataaactagagaggataaaatacaaacacttctttacaattaattgttatttttcgtttgttgtagttgctttttttttttatatttaaaataaatttgcaacaccgac

SEQ ID NO: 38991 - DNA, 386 bp, Glycine max
  Clone ID: LIB3065-026-Q1-N1-G1
ctcgagccgctcgagccgattcggctcgagcccaattcgtgcattcaggaagaacctttcaagcagcagcagtgcttctaagccaccaccacctcctgagtctcaggctgagcagcagcacaacaaggttgctggtaaaaaacctgttgacaactatgctaataataaaggtttgtttgtcaagatcaacatggatggtgttccaatagggagaaaagtggacctcaatgcttacgacagctatgaaaacctctcttctgctgtggacgagctattcagaggtcttcttgctgctcaaagagattcctctgctggtggggttcacaacaagcaagaggaagagaaagcaattacggggttattggatggaagtggagagtttactc

SEQ ID NO: 38992 - DNA, 307 bp, Glycine max
  Clone ID: LIB3065-026-Q1-N1-G5
actatatgtagtttcaaaacttcaaaattatgtagtgggtattatgttgcactctggggttttgtgtctaaacaaacacccttagaataaagtggtcatttcttgcccttgagcaagttcaagtgttttggacttgtgatgggtgtgttaaggtcatggttgccttttttttatatatatatatatatataaatgtttggttaaaaaaaaaaattaaccttaattcttactacaaatattaaaacctttattatgcttttgaccaactatttaaaggtcttctttgcttattaaaaaaatttctata

SEQ ID NO: 38993 - DNA, 188 bp, Glycine max
  Clone ID: LIB3065-026-Q1-N1-G7
aaaaaaaaattaaaaaaaaaaaaaaaaaaaaaaaaaaggaaaaaaaaaaaaaaaaggaagaaaaaaaaaaaaaaaaaaaaaaaaaaaaaaaaaaaaaaaaaaaaaaaaaaaaaaaaaaaaaaaaaaaaaaaaaaaaaaaaaaaaaaaaaaaaaaaaaataaaaaaaaaataaaaaaaaataaaaaaaa

SEQ ID NO: 38994 - DNA, 405 bp, Glycine max
  Clone ID: LIB3065-026-Q1-N1-H3
aattgattcaatagttcttagagttcatgtgtgctttaagaacaaacgtctgtgcaagcgaaatacgaacatatatctcagattaaatgtaaaataattggtgggatatcagaagagaatgcttgcttcactgcaccctttacgaattgtgagtgctaaattggaaaagtagatcaaatgtgaaccaacggccagtactataaactcgcgagtttctaaaaatcaagacaaaacaagaaactcacaagttctgccatggtagacagagatagatgtttggaaaattgtgattccactgggtttagagcactggctattttgtcaggcacagtctacaagcttgtcatgtttatattcctcctctttagtttacaacgatcctttacattgaactttgtatacagt

SEQ ID NO: 38995 - DNA, 401 bp, Glycine max
  Clone ID: LIB3065-026-Q1-N1-H4
ctctcatttagcttctccaaaagcttgttttagtttatgcataagctaattttaactcacaggagaaccttaattcattttaccttattttcttctcctataagttcttattgaaaaatttatccaaacaggaccgaatgttcaagtctaaattggattggtgggattatgtaggtgacatgtttaccgaggaacagaatgagttaattgaatcagcagccgaaatgctttatggactgattcatgcccggtacatattgacaagcaaaggaatggctgcaatgctcgacaagtacaagaactatgattttggcagatgcccacgagtttactgctctggacaaccttgtattccagttggtcagtcagacatccctaggtctagtactgtgaaaatatac

SEQ ID NO: 38996 - DNA, 281 bp, Glycine max
  Clone ID: LIB3065-026-Q1-N1-H6
aaaaaaaattaaaaaaaataatagtttaaattatacaataggcatattaatacaaaaagggagtacctaaaataattaatcaatttttaaataaatctattataatattgtggcgtccgttttcttttcagtttctttccccgtaatttaattggggcccggtcccttttgggttcctcaccttcccttttttttgttccgtcctggaccttggggtcttcctgctttttcctttttcgggtggttaatggtttggggttattatttccctatttttttcc

SEQ ID NO: 38997 - DNA, 403 bp, Glycine max
  Clone ID: LIB3065-026-Q1-N1-H7
tatatactatgatgagagtgcggtttcctttgttggtgttgctgggaactgttttcctggcatcagtttgtgtctcattaaaggtgagagaggatgagaataaccctttctacttgagaagctctaacagcttccaaactctctttgagaaccaaaacggtcgcattcgtctcctccagagattcaacaaacgctccccacaacttgagaaccttcgagactaccggattgtccagtttcagtcaaaacccaacacaatccttctcccccaccatgctgacgccgatttcctcctctttgtccttagcgggagagccatacttaccttggtgaacaacgacgacagagactcctacaaccttcaccctggcgatgcccagagaatcccagctggaaccactta

SEQ ID NO: 38998 - DNA, 335 bp, Glycine max
  Clone ID: LIB3065-027-Q1-N1-A1
cggacacgtgtcgtccactgatttctccccaaagagtttagagaagcactgccgtccgattgaaaacattatgatggagaccgaagccaaaggaacatgatagagaggctcaatcaggtggaggatcgaatgctaaagctggaagaagagttggtagcaaagaagaaagaggaaggtgagaaaatgaatagcccaaagaaaggttttaaacagcttgtgaagcaaagtatgaaacctaggggaaaacatagtaataaagaagcatgaatgaattatgaccattgtagctgctcccatcccaactgtgccaacgttttaattttaatgtacattta

SEQ ID NO: 38999 - DNA, 419 bp, Glycine max
  unsure (1)..(419): unsure at all n locations
  Clone ID: LIB3065-027-Q1-N1-A11
caaaaagataaagggtgaataattagcagctccttctagttccggtgtcggtgtgggtgtttgaatctggtgaaggatgtcaattgttcaatcaaccagggtgatgccaacggctccaaccccttcgcttcgtggggtcaattcgtggattttcctctccctccttccatctccggcttcttccccggcttggaattcggattcggattcggatcatccgtgaacacacgtgtggactggagggagactcccagagcgcacgtgtggaagctggtgcttcccggcttctccaacgaggacgtgctggttgagctccaagacgagagggtgctccaagtcagcgtggagagcggcaacttcgtcacgaggtttaaggtccccgacaacggtaacctaaaacaactcannagccacatgcg

SEQ ID NO: 39000 - DNA, 352 bp, Glycine max
  Clone ID: LIB3065-027-Q1-N1-A2
aagaaagtcttccatagccccccaaaaatgaagagcaccatcttctttgctctctttctcttttgtgccttcaccacctcatacctaccttcagccatcgcgatttcgtgctcgataatgaaggtaaccctcttgaaaatggtggcacatattatatcttgtcagacataacagcatttggtggaataagagcagccccaacgggaaatgaaagatgccctctcactgtggtgcaatctcgcaatgagctcgacaaagggattggaacaatcatctcgtccccatatcgaatcccgtttatcgccgaaggccatcctttgagccttaagttcgattcatttgcagttataat

SEQ ID NO: 39001 - DNA, 438 bp, Glycine max
  Clone ID: LIB3065-027-Q1-N1-A5
caaaaacaaaacaaaacagtgtctttgattacgagagagagagaacaaaacaatcaacacaatggcttctgagcaaatgcctcgcagagagaacacagcaatagggtgatagagagagaggttcacgttgagacacacagaaaagagtccctccctgataagggaagggttgtgatagagagtgagaagaaggagaaagagagagagttggcttctgatagagccaggtctggaaatatagttaaggaggacaaagaggttgaagaaggaagaagaggaaaagaaagtggtggtggtggtggtgttcagcatgagaggaagtttgaaacgaaagttgaagagaagaagggttttggtgaaaaggctgaactccagggaataacaagagtcgtggtgggaagagagtgcagccaaaaggaggaacagggaagaacaaga

SEQ ID NO: 39002 - DNA, 316 bp, Glycine max
  Clone ID: LIB3065-027-Q1-N1-A8
gttcaatatcctagtacaccgtattaaagaatttaagatatactatgatgagagcgcggttcccattactgttgctgggagttgttttcctggcacagtttctgtctcatttggcattgcgtattgggaaaagcagaaccccagtcacaacaagtgcctccgaagttgcaatagcgagaaagactcctacaggaaccaagcatgccacgctcgttgcaacctccttaaggtggaggaagaagaagaatgcgaagaaggtcaaattccacgaccacgaccacaacacctcgagagggaacgtcagcaacacggtgag

SEQ ID NO: 39003 - DNA, 372 bp, Glycine max
  Clone ID: LIB3065-027-Q1-N1-B1
tagtgacactataaaagcttacgtccatgccgcgtcgtagctcggattcgctcgagaaagaaatacacattacattactaagtctttgttcatttgagtagtagtgatggctagcctcaaggttgcatgtgtggttgctgtgatgtgcatggttgggtggccatgagtgctgcacccatggcacaggccgcaatcacgtgcgggcaggtcgccggcgacatgtctccgtgcttcagttatcttcgaagcggcggaaaaccgtcgcaggcctgctgcaacggagtgaagtccctcagcagcgcggcgaagaccaccgcggaccgccagggggcgtgcagttgcctgaaaaaccttgccaataatatgggacag

SEQ ID NO: 39004 - DNA, 371 bp, Glycine max
  Clone ID: LIB3065-027-Q1-N1-B12
gtcttccatagccccccaaaaatgaagagcaccatcttctttgctctctttctcttttgtgccttcaccacctcatacctaccttcagcatcgctgatttcgtgctcgataatgaaggtaaccctcttgaaaatggtggcacatattatatcttgtcagacataacagcatttggtggaataagagcagccccaacgggaaatgaaagatgccctctcactgtggtgcaatctcgcaatgagctcgacaaagggattggaacaatcatctcgtccccatatcgaatccgttttatcgccgaaggccatcctttgagccttaagttcgattcatttgcagttataatgctgtgtgttggaatttctaccgag

SEQ ID NO: 39005 - DNA, 406 bp, Glycine max
  unsure (1)..(406): unsure at all n locations
  Clone ID: LIB3065-027-Q1-N1-B2
ctagttcaatatcctagtataccttaataaataatttaagatactatgatgagagcacggttcccattactgttgctgggacttgttttcctggcttcatttctgtctcatttggcattgcttactgggaaaaagagaaccccaaacacaacaagtgtctccagagttgcaatagcgagagagactcgtacaggaaccaagcatgccacgctcgttgcaacctccttaaggtggagaaagaagaatgtgaagaaggtgaaattccacgaccacgaccacgaccacaacacccggagagggaacctcagcaacccggtgagaaggaggaagacgaanatgagcaaccacgttcaatcccattcccacgcccacaacctcgtcaaagagaagagcacgagcagagaga

SEQ ID NO: 39006 - DNA, 371 bp, Glycine max
  Clone ID: LIB3065-027-Q1-N1-B3
ctcgcccttcacgcgctgacttctacaaccctaaagctggtcgcattagtaccctcaacagcctcaccctcccagccctccgccaatttcaactcagtcccaatatgttgtcctctacaagaatggaatttactctccacattggaatctgaatgcaaacagtgtgatctatgtgactcgaggacaaggaaaggttagagttgtgaactgccaagggaatgcagtgttcgacggtgagcttaggaggggacaattgctggtggtaccacagaacttcgtggtggcggagcaagccggagaacaaggattcgaatacatagtattcaagacacaccacaacgcagtcactagctacttgaaggatgtgttta

SEQ ID NO: 39007 - DNA, 361 bp, Glycine max
  Clone ID: LIB3065-027-Q1-N1-B6
gacgaaaggaaagaagaagaagaagcgttctttcggagagttcgaagatgtcgggcgttaccaacaacaacgaggaagacaagaagccaaccgacagggagcacacatcaaccttaaggttaaggggcaggatgggaatgaagtttttttcaggatcaagagaagcactcaattgaagaagcttatgaatgcttactgtgaccgacagtcggtggatttcaactccattgcttttctgtttgatggacgccgcctccgagctgagcagactccagatgagttggaaatggaggacggggacgagattgatgccatgcttcaccagacaggaggttctgttgtctgaaggatgtgattactt

SEQ ID NO: 39008 - DNA, 350 bp, Glycine max
  Clone ID: LIB3065-027-Q1-N1-B7
gattaatgaaggagaagcaaacattgaacttgttggcattaaagaacaacaacagaggcagcaacaggaagagcaacctttggaagtgcggaaattagagctgaattgtctgaacaagatatatttgtaatcccagcaggttatccagttgtggtcaacgctacctcagatctgaatttctttgcttttggtatcaatgccgagaacaaccagaggaacttccttgcaggttcgaaagacaatgtgataagccagatacctagtcaagtgcaagagcttgcgttccctgggtctgcaaaagatattgagaacctaataaagagccaaagtgagtcctactttgtggatgc

SEQ ID NO: 39009 - DNA, 306 bp, Glycine max
  unsure (1)..(306): unsure at all n locations
  Clone ID: LIB3065-027-Q1-N1-B9
ggctgaggaatttgtgcccccatcactaaccaatactcatggctacctacctggacctggtgccggtgctggtgccgggtttggttaccctaaaattttatactgctcaataactttggtgatgctaacggtcaaactaacagaaggaggaagaatggctataatcatgggaagcgaagagtgaatcataaaatggatatggagaagagagaagagatgattaggaggactgtttatgtgtcagacattgatcaactggttactgaagagcagttggcggngctctttcttaactgtggccaggtc

SEQ ID NO: 39010 - DNA, 440 bp, Glycine max
  unsure (1)..(440): unsure at all n locations
  Clone ID: LIB3065-027-Q1-N1-C12
cctaagtgagaaacaaagaaaggaaataattgatctttgaaaatgcagggaggaaagaaagctggagagtccatcaaggaaacagctcaaacattggtgcttctgccaaggctggcatggagaaaaccaaggccactgtccaggagaaggcagaaagaatgacggcacgtgatccgatgcaaaaggagttggcaacccagaagaaagaggcaaagatgagccaggcagagctggacaagcaggcggcgcgtcagcataacacggcggcgaagcaggctgccacggcagggcacatgggacaacccatggggacccatcagacgtcagctatgcccggtcatggaaccggacagcccacgggccatgtcaccgagggagtggtgggctcacaccctattggaaccaacagnaggcccggtgggactgctacggcccataat

SEQ ID NO: 39011 - DNA, 364 bp, Glycine max
  Clone ID: LIB3065-027-Q1-N1-C4
gtggattcttggttaccaatttttgtgaattgtctttatcctgtgagtcaattaccttcagaagctgtcgttgtaaatgtcacatgtggtagggacgtggtggtttacccaccactgcttggattagttctgcagttaacaatcgctcctcagatagtaacaaaaggattcgcacagcacttgggaaaggtaagaaaattgtttttcttactagagttgatccttttccagtagctttactggctgttctttttggtgttaagaatgaaactcttagttgtaacgccactaatcctatgctgacgcgacttcttgaaaactgtaagagtctcaaatatttggttgatgagtgttcttttgcatt

SEQ ID NO: 39012 - DNA, 421 bp, Glycine max
  Clone ID: LIB3065-027-Q1-N1-C5
gtggcgaagggaatatattggggcagatggcttctggaatgccacaagcagtaactgtcacccctgaggagcgccaagcaattgaacgtcttaagcaatgggttttgatcgtgcaatcgtattggaggtgtacttcgcttgcaacaaaaatgaggaattggctgccaactaccttttagatcacatgcatgagttcgaggaacaatagatctacttttgaatttgccaaattatttcttgtcatctttttctctcgatgggtctttgttacactctatgtttaatgaggtaatgcttgataatgtcaaatctcaagtggataagggatgttttagtctcctccatattattgcccttgtatttatcatttccagcccgtcgagggtttcttagtattcatatacatagttggttgccttgc

SEQ ID NO: 39013 - DNA, 427 bp, Glycine max
  unsure (1)..(427): unsure at all n locations
  Clone ID: LIB3065-027-Q1-N1-C7
gtcctccatggcttcctccaccgctttcttcacacccctccatgatttcactcaagccagaacaaccccatcaccccctttgcctttcatcaatcctcctttgcttcctccaagtcaaccttttttcaccctgccctttccctacaaacctcttccaactttcccaggctttttggaaagcctaagtttttctctgttcatgcaagggctgccacagaaaaaaccatttatgattttactgtcaaggatattgacagaaaggatgtttctcttagcaagtttaaggggaaggttctattgattgtcaatgttgcttcacgatgtggtttgacatcatcaaattanctcgagctgtcacgcttgtatgaaaaatataagaatcaaggtttggagattttagctttcccctgcaatcaatttggtatgc

SEQ ID NO: 39014 - DNA, 352 bp, Glycine max
  Clone ID: LIB3065-027-Q1-N1-D1
ctcaccgattgctagaatggaatttcgatgctcagtcatctcttttaccattctcttctctcttgctcttgcaagagagagccatgtccatgcatcgtacctgaggaagattattgggaagctgtttggccaaacactcccatttccactgcactgcgagagcttctaaagcctctccctgcaagtgttgaaatcgatgaactccctaagcaaattgatgatacacagtacccaaaaacattcttctataaagaagaccttcatccaggcaaaacaatgaaagtacaattcaccaagcgtccctatgcacaaccttatggtgtatatacatggttaacggatattaaagaca

SEQ ID NO: 39015 - DNA, 395 bp, Glycine max
  Clone ID: LIB3065-027-Q1-N1-D12
ttttgttcctcactgaccaagccatggcgatgagaaccaaactttctttagctatctttttcttttttcttttagccttattttcaacctagcctttggcaaatgtaaagaaaccgaggtagaagaagaagaccctgagctcgtaacatgcaaacaccaatgccaacagccacagcaatacactgagggtgacaagcgggtatgcttgcaaagatgtgacaggtatcatcgtatgaagcaagagcgagagaaacaaatccaagaggaaactcgtgagaagaaagaggaggaaagccgtgaaagggaagaagaacaacaagagcagcatgaggaacaagatgaaaatccctacatttttgaggaagataaggattttgagaccagagtcgaaactg

SEQ ID NO: 39016 - DNA, 420 bp, Glycine max
  unsure (1)..(420): unsure at all n locations
  Clone ID: LIB3065-027-Q1-N1-D2
tggatctgaaccagatctacacgccgatggtggttttggcctggtctttcatagatctgatgcatggaggctcagatctactgtacagagatactgagataatcgatgagaagaacgcagatccagccgcttccgcttgttcgatcgctacagacgcttgtatcggattattcatgattgattcataagcagcatgtcttcctccggctatagttgttgcagatctcggatgttgtaaaattagtgtatgatgtgaagctatgggctggaaaatgtggatgtaggagatttcgggacgaaaggcctcaaaacgcttcgtcgtttgtggttactgagtcctgagtgatcttgtcatccgacctttgccatgacaggtgcgcttgcttgcangtcaaaatatgttaataaaaaaagtttatt

SEQ ID NO: 39017 - DNA, 396 bp, Glycine max
  Clone ID: LIB3065-027-Q1-N1-D3
gaaatgtctgctgtagtttacaaggattgggtttttacagatcaagcattgcctgctgatcttataaaaagaggaatggcaattgaggatccatcggccctcatggcattcgccttgtgatagaggactacccttatgctgttgatggacttgagatatgggatgctatcaagacatgggtccatgaatacgttttcttgtactacaaatcagatgacacacttagagaagatcctgaactccaagcctgctggaaagaactcgtagaggtgggtcatggagacaagaaaaatgagccatggtggcctaagatgcaaactcgtgaagagctagttgaagcttgcgctatcatcatatggactgcttcagcactttatgcagctgttaattttggac

SEQ ID NO: 39018 - DNA, 381 bp, Glycine max
  Clone ID: LIB3065-027-Q1-N1-D4
aggaaatcttccgaactgatggtgaacaggcccttaagtttcctcctcctaaagtaattcaagtgagtaagtctgcatggatgactgatgaaaatttgcaagagaaatgcttgctggtgtaaatccaaacttgattcgttgtcttaaggatttccctccacgaagcaagctagatagccaagtctatggtgatcatactagtcaaataaccaaagaacacctagagcccaacttagaagggctcactgtagatgaggcaattcaaaacaagagattgttcctactagatcatcatgacccaatcatgccatatttgaggcgaataaatgcaacctccacaaaagcttatgctaccagaaccatccttttcctgaaaaatga

SEQ ID NO: 39019 - DNA, 397 bp, Glycine max
  Clone ID: LIB3065-027-Q1-N1-D5
ggaaaaagttgtattgaaattttcacaagaggaatttcttacagcttggtcaactcaggtgcgtcctgcaacaactctgttggctgatgggttccatatttgtatgctatggtgcatgatagttcagtgtctacaataccaggtgattttgtcattggtgttaagttgacaaccataaacaatatgtgtgcatatgggctcaatcctggtatttcaggttctcgtcttttgggcaccattcctcagtctatttcacagcaaactgtttggaatcaaatggcaacagtgagaacaccattgaattttgatcctagcaagcagagcttttgtcaattttctattgaccttcttggtggaggaattttagtggacaaaactggagattggatcacactta

SEQ ID NO: 39020 - DNA, 382 bp, Glycine max
  Clone ID: LIB3065-027-Q1-N1-D7
gcttcattgataccatatgttgagccagttgtgcaagctcaaagtgctgaagtttactttgacttcttccctgtggaggttgatagtcaagaggagttgctcacattggtgaattgaaatctggtgtctatgttccactgcctacaaaaactaatttggtggaaactcccaaggaatggcaactggatctaccttgtgacaaaattcctagtgtcttgaccacaactgatgagagattggtaggcacagaacatgagggatatgatccttttcttggtggaattcaaaaatatgccactcccatgatgcccctagatgaagaaattctttctaaggttgcacaagatatagttgaggaatggtttgattgtgttgatgagga

SEQ ID NO: 39021 - DNA, 384 bp, Glycine max
  Clone ID: LIB3065-027-Q1-N1-D8
ctcagacaggagcttgcctgcgttgagagaattgggtcacacccttttgggactaaacatccagcactgcaatgcaatcaacagcagtacggtgacacacttgtggagcttctctggaggtgtgacatcctctcctgagctgaaagaaaaactaatctcactgcaatttaggccaggatcacatcagcaggaagcttgttatgctcagtgttgcacagtagttttttaggtccttaacaggtcttcatcgtccagtgactcggttcctttttaccggagtgtgcagtcatttagccctcatttttgcaggttccttcaatgggaagcctgttctttttggcatccattttgcccccttttaaatggctgcatatctgagaacat

SEQ ID NO: 39022 - DNA, 394 bp, Glycine max
  Clone ID: LIB3065-027-Q1-N1-D9
aaagatgcgagcacagacgctgatgacacagtggtgcacaagagcagcaacgtgtggccaattgaggatgagcactaacaccaacacccccaacacgatggtctcgacgccattttcaaacataagcgcttacttcgaacgcaggtcagaaaaaccctaaaatccatccaaccctccctccgatctcaccaagataacaccgttcaagacatagttttgggagctccgtggttcaaatccagtcgcaggctatgcgcgtacataagctgcgctgctcttcgcgaagtcgacactttaaaaatattgtcacaaattttgcaacataacaatgctactgatggaaagaaactctatgtgccgcgcggtgaggatatgaatagtcacatgcgtatgc

SEQ ID NO: 39023 - DNA, 115 bp, Glycine max
  Clone ID: LIB3065-027-Q1-N1-E1
gaaatgtctgcttttgtttacaaggattggctttttacaaagcgagcgttgcctgctgatttttagaaaagaggattggcaattgaggatccatctgccctcatggcattcgcct

SEQ ID NO: 39024 - DNA, 401 bp, Glycine max
  Clone ID: LIB3065-027-Q1-N1-E10
cggctcgagccttatgctgttgatgggctagagatatgggctgcaattaagacatgggtccaagaatatgtgtccttgtactatgcagagatgatgatgtcaaacctgattctgaactccaacagtggtggaaagaagctgtagagaaaggtcatggtgatctgaaagacaagccatggtggcctaagttgcaaacaattgaagagcttgttgaaatttgcaccattatcatatggactgcttcagccctccatgcagccgttaactttggtcaatatccatatggaggtttcattctgaatcgcccaacttcttctagaaggttgcttcctgagaaaggcaccccagaatatgaagaaatggtgaaaagtcatcaaaaggcttatttgagaactattaca

SEQ ID NO: 39025 - DNA, 396 bp, Glycine max
  unsure (1)..(396): unsure at all n locations
  Clone ID: LIB3065-027-Q1-N1-E11
aaaattcttccaccaagttatgggtttccttgtgttgcttcttttctccctcttaggtctctcttctagttccagcatatcaactctcgttccatattggaccttgacctaaccaagtttaccacacagaaacaggtgtcttcactgttccaactatggaagagtgagcatggacgtgtctaccataaccacgaagaagaggcaaagagacttgagattttcaagaataacttgaactatatcagggacatgaatgcaaacagaaaatcaccccattctcatcgtttaggattgaacaagtttgctgacatcactcctcaagagttcagcaaaaagtacttgcaagctcccaaggatgtgtcgcagcaaatcaaaatggccaacangaaaatgaag

SEQ ID NO: 39026 - DNA, 414 bp, Glycine max
  Clone ID: LIB3065-027-Q1-N1-E3
cgggatgcttaataaccccctaatattattggcgaatttataggctggcaaattaaggatagaggttcgttttcgtaaagcatgaaaaaagctattgattaactgaacaggcgggtacaaaaggagttcaagtacaaattgcaggacgtatcgacggaaaagaaattgcacgtgttgaatggatcagagaaggtagagttcctctacaaaccattcgagcgaaaatcgattattgttgctatacagttcgaactatttatggggttttagggatcaaagtttggatattttctaaataaagaaaaatatattattctttatcttaaatgtgctatattttatcttaaatgtgctatatttttttttagaaaacaaaaaatgaaaaattactcgatttttatttctccaaaatga

SEQ ID NO: 39027 - DNA, 412 bp, Glycine max
  Clone ID: LIB3065-027-Q1-N1-E9
aatgcttataaacaccctattattattgcagaatttatatctgggcgagggaagaatagagtttcgtttcgtaaaacaatgaaaaaagctattgaattactgaacaggcgggtacaaaaggagttcaagtacaaattgcatgacgtatcgacggaaaagaaattgcacgtgttgaatggatcaaagaaaggagagttcctttatcaaccattctagcgaaaatcgattattgttgctatacagctcgaactatttatgggggtttagggatcaaagtatggatattttctaaattaaaaaaaatatattattctttatcttaaaagtgctatattttaatttaaatgtgcatatttttttttagaaaacactaaaatggaaaaaatattcgattttttttttcttccaaatg

SEQ ID NO: 39028 - DNA, 424 bp, Glycine max
  Clone ID: LIB3065-027-Q1-N1-F10
gtttggatgcttgctacttggctcttcctgccagtactaccaaaggatctgcgttgctatataatgtcatggattgccatttacacgtgagattgaggctcatcgttcaccattagctgcaatggttctttcttctaatggaatgtacatagctacagcatccgagcaagggaccataatcagagtccatttggtgtcagatgcaacaaagtcatatagctttagaagggggacatatccgtctactatattttctctttcatttggaccatcaaagcagcttccagatattcttgcagcctcaagttcttctggttctattcatctttttactctcggatttgcttcacatccaagcaggagcaagagatcaagtggttttcttggatcaataattcctggtgctgtgaatgatgttgctgat

SEQ ID NO: 39029 - DNA, 385 bp, Glycine max
  Clone ID: LIB3065-027-Q1-N1-F4
cttttaacttgagaagccgcgaccccatctactccaacaagcttggcaagttctttgagatcaccccagagaaaaacccccagcttcgggattggatatcttcctcagtattgtggatatgaacgagggagctcttcttctaccacacttcaattcaaaggcgatagtgatactggtaattaatgaaggagatgcaaacattgaacttgttggcctaaaagaacaacaacaggagcagcaacaggaagagcaacctttggaagtgcggaaatatagagccgaattgtctgaacaagatatatttgtaatcccagcaagttatccagttgtggtcaacgctacctcaaatctgaatttctttgctattggtattaatgccgagaac

SEQ ID NO: 39030 - DNA, 386 bp, Glycine max
  Clone ID: LIB3065-027-Q1-N1-F7
atctccatctcttagtttcttcttcaaatggcagaagttgaagacatagacaaccctcatcacgaccaccatcattacctttcttcttcacaacacaacctccaatgatcaatttcccgcgagatctgttaagaaccttcgtgggagtgaacaacaacagcaataaaaacaataacaacagtcagcaccacaatttgcctatgccagtggtgaagttagaggatgagaaagaagagctggaactaagtctcggcctttcgatgaatggtagatttggggtggaccctacagcgaagaagataaagagaacaacctcgataccggagtttgtgcgcgacgaggagatgggatatgctgctgcgatggggtgcacggggtctctggtg

SEQ ID NO: 39031 - DNA, 447 bp, Glycine max
  Clone ID: LIB3065-027-Q1-N1-F8
tggactgacaactgaagtcaagtctgtggagatgcaccatgaatctcttacagaggcacatcctggtgacaatgtgggattcaatgttaaaatgttgctgttaaggatttgaagcgtggttatgttgcctcaaactcaaaggatgaccctgcaaaggaggctgctaacttcacagcccaagtcatcatcatgaaccaccctggtcagattggaaatggctatgcccctgtcctcgactgccacacttctcacattgctgtcaagtttgctgaactcatgaccaagattgacaggcgatccggcaaagagcttgagaaggagcccaagtttttgaagaacggtgatgctggttttgttaagatgattccaaccaaacccatggttgttgaaactttctccgagtatcctccacttggtaggtttgcttgtagggacatgcgtcaaact

SEQ ID NO: 39032 - DNA, 393 bp, Glycine max
  Clone ID: LIB3065-027-Q1-N1-G12
gaaatataaaacatttattcattgtcaccaaattttgttccctgcaagagagagaagaagaagttgttgggttgagttgggtttggttggatttctaatctaatctatacctttctttttcctatgcttttaaggcacaaatccttctcccttctctcttctttcttcttcttctcctgacccttattattattccttgcccttaccctttaggcaagggaaggaagaaagaataactatattattatctttattgtaatctatctttttattataattataattataattattgttgttattattccttaaatatggattcgccgtgtctctccaacgattcggtttctggattcaaagacaaggagtcaatggttgacccctttttggtcg

SEQ ID NO: 39033 - DNA, 417 bp, Glycine max
  Clone ID: LIB3065-027-Q1-N1-G6
gcaaaatgaccaagttcacaatcctcctcatctctcttctcttctgcatcgcccacacttgcagcgcctccaaatggcagcaccagcaagatgctgccgcaagcagctccagggggtgaacctcacgccctgcgagaagcacatcatggagaagatccaaggccgcggcgatgacgatgatgatgatgacgacgacaatcacattctcaggaccatgcggggaagaatcaactacataaggaggaacgaaggaaaagacgaagacgaagaagaagaaggacacatgcagaagtgctgcacagaaatgagcgagctgagaagccccaaatgccagtgcaaagcgctgcagaagataatggagaaccagagcgaggaactggaggagaagcagaagaagaaaatggagaaggagctcat

SEQ ID NO: 39034 - DNA, 284 bp, Glycine max
  Clone ID: LIB3065-027-Q1-N1-G9
aaaaaagttcatgaatcctctgccgcgacacgatcgagtagggcgcaaccgtgaaatcgatccatcgagctcactcagccgccactgtcgtgttttcagcgcgcgtgttttgttccttctgtgctatgccccaatccctaatctatctatctatctatccatcttttcttcattccccttcttctcttctgaattcgaatttcgaaaatgttgggtggtctatacggagaccttccttcaccttcttccggcgaggaagacaacaagcccacccccaacgtctg

SEQ ID NO: 39035 - DNA, 368 bp, Glycine max
  Clone ID: LIB3065-027-Q1-N1-H12
ctacacaaaagtgttccacttgagtgaaaagtagtgtgttaagaactaaacaatttttcaatggcgtccaagaaacaagaggagcgactgaggcagctgcgaaagttgctgccaaagaactcgaacaagtcaacagagaaagaagagaccgtgatttcggtgttgttgctgaacaacaacaacaacatcatcaggaagatcaacaaaaacgtggtgtaatcgggtccatgtttaaggcggtgcaagacacctacgagaacgccaaggaagctgtcgttggcaagaaagaagctactaataacgcgtacagtaatacagaggttattcacgatgttaacattcagcccgatgacgtgtcggcaacgggg

SEQ ID NO: 39036 - DNA, 388 bp, Glycine max
  Clone ID: LIB3065-027-Q1-N1-H8
cattaattattttcttatgtgtttgttctgcatttattggtgtacggtcacctggtagtgtctgttattgtgtgagatcctaacaggactataagtattgggaggcactggagtttttgcggacaatttgtttgtttcatttgggtttggagaactctgatttcacaatttttttttaccaatttttaatatgaaagatatttctaggtgtttaactgtttgtgttcattcttatgcagcatgccaagtcctgatatgagatttctgttgccgattgttgaagaataaatcataaaattagaacagataacagctctggatgaattaatgtcattgatgagtttcttctttctgtattatttatttctctggatttgatcacgaaaca

SEQ ID NO: 39037 - DNA, 398 bp, Glycine max
  Clone ID: LIB3065-027-Q1-N1-H9
gcgctataccctcctagatctactctctaaccgctatacaggctggtactaagagctgtggttagtcatagatggcgctctcagcttccgggcaatgtcaaagggtgtggtggtatctgtgcctgttctggttctatctgctttagtggctactgttttcctgttcttccttttgtcctctctttcatcctgctcctgccctactccttcagaaatctctgcctccaatgttaggagtgttggtgttggtattggtgttcctgagtctagcagcggtaatgttccgttagccacaaggaaaggagtctagcagcagtaatattccgttatcaacgaggaaggaagatgttgagtgggtgaagaatcaaatccaagcaaatgggcttcatatgcatgac

SEQ ID NO: 39038 - DNA, 181 bp, Glycine max
  Clone ID: LIB3065-025-Q1-N1-G9
caagcatatatgaaggtgtggtgaggccatcttatatgaaggaatatcaaatatattttgtgtaataataaaactatggcctatgtattaccaccctccgacccagcctatgttaatatctgagtggcgtagtacctttgaatcgccttaataaaaggtcagtcgttcaagtttggtcttt

SEQ ID NO: 39039 - DNA, 346 bp, Glycine max
  unsure (1)..(346): unsure at all n locations
  Clone ID: LIB3065-022-Q1-N1-G6
tacaagacgacatttttaacatgcttgacgacacggacaatgtgcccgagcgtgactcggtgcagggtcttgactcagtgatcaaaagcttcgaggatgagataaatgctccaggttcggattctggttccggtgacccggcccaggaacccgactccggggagctacaatctaacttgggctatcttctagaagccttcgacgacgagctcgggttgccgccgacggtgggtgacggcgaggaaatgggtcgggctgccccggaaatggcggagcttgccaggttcgtgggatttgaagacgacatacccagttatgatgcattcggntttgggtcggggtttac

SEQ ID NO: 39040 - DNA, 392 bp, Glycine max
  Clone ID: LIB3065-022-Q1-N1-G7
gctgctaaggaaagatacgagagggcaaaccaagcgacaagtgaagctgccaaagagagaaacaagcaggcaaataaagaggcaacaaaagcaaaagatgtcacaagagaaatggatcaacaaggcaatcttaaaacagaaaatgagacacaggacaatgaccagaagggttatggtggagcaaagtacaccattggtagtgtggaccacattactacaccatttattgtagaggccaatcttaaatcagaaaatcaggatcaagacaatggccaaaagggttatggtggagcaaaagacacaattggtagtgtagaccacattactacaccacttgctgaaaaggccaaagctgctggtagcaccactgctcagtatgttggggagaaagc

SEQ ID NO: 39041 - DNA, 285 bp, Glycine max
  Clone ID: LIB3065-022-Q1-N1-H1
gagagggcaaaccaagcgacaagagaagcaagcaaagagagaaacaagcaggcaaataaagaagcaacaaaggcaaaagatgtcacaagagaaatggagcaacaaggcaatcttaaaacagaaaatgagacacaggacaatgaccagaaaggatataggggagcaaagaacaccattggtagcgtggaccacattactacaccattaattgcagaggccaatctgaaatcagaaaaatagatacaagacaatggccaagaaggttatggaggagcaaaggacaca

SEQ ID NO: 39042 - DNA, 347 bp, Glycine max
  Clone ID: LIB3065-022-Q1-N1-H11
gatgatgaatgtcatagggctgagtctgagtctggtgttaacttcactggcagcagcgagcaccatcgtcaaagaagggcacagagttgtcgtggttgaatacgaccaaggtggccatcagaacaccaaaatctcaatatcaccagaacaacctacgcatgctaatcttaaagatcccatttgcgacgcctatggaaaatgcaagcacaaaatcgtggatgcaatggagaagtctcaagaggtcatccatgagaagaaggacgagattgccgccaacaaggaggcagcacgccaagttgctggtaaaaccaagaagagagtgtatgataaaacccgtcatgtccacg

SEQ ID NO: 39043 - DNA, 305 bp, Glycine max
  Clone ID: LIB3065-022-Q1-N1-H3
cgtcattatcctaaaaacttgcagattttcacatcccaaacaacatgaagggaaagttcatgtttctgtcggagctcctttgtgccacttttcatgtctgcttctctattatcgaccgattagttgccaacggcaactttgagttgggtccaaagcccttcggcctaaaaggaacagtggtggtgggcgggagccactcgatcccagaatgggagatctacggctttgtagagtacataaaatccggccaaaagcaaagtgacatgttgctcgtcgtcccagagggagcctacccggtgcgccta

SEQ ID NO: 39044 - DNA, 225 bp, Glycine max
  Clone ID: LIB3065-022-Q1-N1-H4
aagaaataattgatctttgaaaatgcagggaggaaagaaagctggagagtccatcaaggaaacagctgcaaacattggtgcttctgccaaggctggcatggagaaaaccaaggccactgtccaggagaaggcagaaagaatgacggcacgtgatccgatgcaaaaggagttggcaacccagaggatagaggcaaagatgagccaggcagagctggacaagcaggc

SEQ ID NO: 39045 - DNA, 395 bp, Glycine max
  unsure (1)..(395): unsure at all n locations
  Clone ID: LIB3065-022-Q1-N1-H5
ctcgagccgctcgagccgggaagaactaacaagaggcgtaagcgtaaacttgtccgaagaataacaccgggaaagaaagagagtgaagaagggtataagcgtccttgtgaaggcactagggtgttctgaactgatcctctccctgggtctggcactgtaaaattcaacgtcaaccccataatatacttgaagaaacgcttccatcttctctctatttgtttcaacttcagttatgcgtttctctctctagccagccatcatcactatgtcatccccaaactccgtccctcagtcccacgcgccgctccttctcccgcgccccgatgccgccgcccgccttcccatcctagcgctcctcctcggccgccgcggncactccgccgtggtccgggaga

SEQ ID NO: 39046 - DNA, 354 bp, Glycine max
  Clone ID: LIB3065-022-Q1-N1-H6
gttattatcaaataattaattaaattcctcgtggaatcttgttgaagccatgtctacagctggtcaggtcatcaagtgcagagctgcggtggcatgggaagcacggaagccactatcgatagaaaccatagaagtggcaccaccccagaaaggtgaagtgcgtttgaagatcctcttcaactccctttgccgtacagatgtttactggtgggatgctaagggccagactccgctgtttcctcgtatcttaggccacgaagcttcggggattgtggagagcgtgggcaagggtgtgacacatctgaaaccaggtgaccatgctctgccaatattcactgtggagtgtggtgaatg

SEQ ID NO: 39047 - DNA, 383 bp, Glycine max
  Clone ID: LIB3065-022-Q1-N1-H7
tccggtttggttaacggacgagaaaggcaacccggtgcacctcacggctgtggcaaccaatgcacacaaatctatgcttcagaatgacaccccacaagagcttcctcactccaagagttcaagctcgtctgaagatgaagggcatggagagaggatcaggaagggactgaaggataacatagaagaaaagttaccagctggagaaggagtagtgaaggagaataaacacaccaacaattgctgcttctacttctacaacagatactagtgatgctaatcaccacccaaccactgagcatgagaagaagagtatcatagacaagattaaagaaaaattccaataaatcagcagtgaatattaatatatattcacgaattgaagc

SEQ ID NO: 39048 - DNA, 310 bp, Glycine max
  unsure (1)..(310): unsure at all n locations
  Clone ID: LIB3065-022-Q1-N1-H9
cgaaaaggagaagatgaaatgggatatgcagatggaggaaatcgaagcgattatggagaaaatttgggacctccacgataagctcagcgacgccattcactccgtctccagatcccactttctcacttccgtcaaaaccctcaaactcaacaactctccaccgcaccttcccaacgccgccgtcgccgctgccgatgaccgctcctccggtttcgttttcgtcaaggactttagaccgctcgccgtcgccgataacgacaacgatgacgatgactccgncgtccgcgaagccaagagcctcaacgccatc

SEQ ID NO: 39049 - DNA, 150 bp, Glycine max
  Clone ID: LIB3065-023-Q1-N1-A3
agactttgaggcatcttcgcttgcacttcgacaccagtacgctcacaaacgtggctgccctgcgtgagcaagcggcatacacactgttagacggcacctgcatactcagactcatcgtggcaccttccatgatcaacatctgctagcctg

SEQ ID NO: 39050 - DNA, 329 bp, Glycine max
  Clone ID: LIB3065-023-Q1-N1-A4
tgatccttctttttctccttgaactcaaacatggcagatgaggtggttctgctagatttctggccaagtccatttgggatgagggtcaggattgcacttgctgaaaagggtatcaaatatgagtacaaagaagaggacttgaggaacaagagtcctcttctcctccaaatgaacccggttcacaagaagattccggttctcatccacaatggcaaacccatttgtgaatccctcattgctgttcagtacattgaggaggttcggaatgacagaaatcccttgttgccttctgacccttaccagatagctcaggctagattctgggctga

SEQ ID NO: 39051 - DNA, 328 bp, Glycine max
  Clone ID: LIB3065-023-Q1-N1-A6
ttgtctttgaacactcatcaccatggccaagcttgttctttccctttgtttccttcttttcagtggctgcttcgctctgagagagcaggcacagcaaaatgagtgccagatccaaaagctgaaggccctaaaaccggataaccgaatagagtcggaaggtgggttcattgagacctggaaccctaacaacaagccattccagtgtgccggtgttgccctctctcgctgcacccttaaccgcaatgcccttcgtagaccttcctacaccaacggtccccaggaaatctacatacaacaaggtaatggaatttttggcatgatattcccg

SEQ ID NO: 39052 - DNA, 274 bp, Glycine max
  Clone ID: LIB3065-023-Q1-N1-B1
cagcatcgccgcttgcactacctcatcccggagatgtccctcacgggttcccaactcctagctctcctctccgtcgttcaccttggtgcaatgctgttcctcctatcacggatcgatgtcatcgacagcctcttgaagatgtcggagtgcacgtcactgttcatatactgtagcccggtgctggtgcacgccgacttatccataagaatgacggagaccgacgtggcttccggcgtagcatgcagactgtcagaactcgagtggttctcatggg

SEQ ID NO: 39053 - DNA, 357 bp, Glycine max
  Clone ID: LIB3065-023-Q1-N1-B2
aaacaaagagaaaaaaaaacccttagccaacacaaccatcatggccacctctgctattcagcaatcagcattcactggtcaaactgctctgaagcagctcaatgaggtcggaccgcagaaccggggcgcccggcaagggtggacctaccaggcccggaaccgtcaaaagggctcctaaaagcattgggaagggcccggccggtccaaggtcctggggcccatgctcgaagcaaattccatcataccggacgggagattacctggggacctccggagggaacactgctgaattatcagtggacccggaaaccttggccaggaaccgggagctggaggtgattcacagcagatgggcaa

SEQ ID NO: 39054 - DNA, 203 bp, Glycine max
  Clone ID: LIB3065-023-Q1-N1-B3
cgcgtaagcataacattgctaaagctggcacgacatcatgaacagaaccacatccccacaagcatgaatgactcagtagacaaactggtaatcttcctagcaaagagagatggcatagacaagctggtgaagacgttccagtacgtgtcaaagctcgtaaactggcacgtggaagctacgcaccccgacacatccaagaggtt

SEQ ID NO: 39055 - DNA, 188 bp, Glycine max
  Clone ID: LIB3065-023-Q1-N1-B5
ggcagcggcattctgaacctcatcccggagatgtccctcacgggttcccaactcctagctctcctcgccggcgttccccttggtgcaatgctgctcctcctctccggcatctcgctcatcgccagcctcttggggctggcggtggcgacgccgctcttcatcttcttcagcccgctgctggtccccgc

SEQ ID NO: 39056 - DNA, 408 bp, Glycine max
  Clone ID: LIB3065-023-Q1-N1-B8
ataaacgaagaagttagtaatatgtttccctctgagtcactagagaaagagagagggaaatggctttcacgatatccagatctgaatctgctttgaaagatagagagaggaaggagtgtgtaacaccagagggtatgatatcgagccagcttggcaatcgtcgaaggcatcttttcatcaaagcatggacaaacatgcaatcctccgacgcatcaggcaacgcaggtttaataccagagccaaaaccgctctggaagctctcataggcacctcagaagccaacatcaacacaaccactgggcaagaacacttgtggcttcaactgggtgactctttctcttgtccttaactgattgaatcaccctaagctacccatctataaataccatccctagatcactacttatg

SEQ ID NO: 39057 - DNA, 318 bp, Glycine max
  Clone ID: LIB3065-023-Q1-N1-C2
gagattgcaaaattctcttccgtttcaggattacggtttcaccgttacagctgagaacatggcataaccacagcgaatctctctgcgtatctttgcgctgctcctcttgatttccacctcttcgtttcagcttctccgcgcttccgatgacgccgatgatgatgcgatcttctatgattcgttcgacgaggattttgaagaccgttgggttgcgtctccgaaagatgagtacagtggcgtctggaaacatgccaggagtgaggcacatgatgactatgggcttcttgtcagcgagacagcatggaaatatgctatagt

SEQ ID NO: 39058 - DNA, 333 bp, Glycine max
  unsure (1)..(333): unsure at all n locations
  Clone ID: LIB3065-023-Q1-N1-C7
ggagacaagaaaaatgagccatggtggcctaagatgcaaactcgtgaagagctagttgaagcttgcgctatcatcatatggactgcttcagcacttcatgcagctgttaattntggacagtatccctatggaggtttaatcttaaaccgtccaactcttagtaggcgattcatgcctgagaaaggttctgctgagtatgangagctgangaagaatccccagaaggcttacttgaagactattacaccaaagtttcagacccttattgacctttctgttatagaaatcttgtcaaggcatgcatctgatgaggtgtaccttgnngagagggac

SEQ ID NO: 39059 - DNA, 328 bp, Glycine max
  Clone ID: LIB3065-023-Q1-N1-D2
gaagatcttatcatcgattgcatggcttatgggattactctgttctgaagtacgatgggcctaacttcgtcgacgctggcgcatacatagcatggagtattgcttcacactgtgcctgagcatcatgagaaatatgaagatcatgtccactctatcggcgagaaagcaagtgccgatactcagaaacggtatgcagcgctggatgcgaaggactggatcacgatgcccatagtacctctgacagataaaacgaaggattgactcgcacactagattctgacaaacatgtggtgcagagctgacaggaacccaataatctcataatgca

SEQ ID NO: 39060 - DNA, 181 bp, Glycine max
  Clone ID: LIB3065-023-Q1-N1-D3
tgaaggactaatttaaaataaactaagtatttggctacaacggggattaaaggctgaaactaaaatatagaccttgtgatacatagcatatgttgcgcttgacactgatgcatgtgcttcatgagacacatgaagatcatgtagactcttttgttgagaacgcaattatcgtaattaaaaa

SEQ ID NO: 39061 - DNA, 404 bp, Glycine max
  Clone ID: LIB3065-023-Q1-N1-D4
gagaagctagagagaaagaattgatcgatgaaaatgcacggaggaaagaaagcgggagagtccattaaggaaacagctacaaacattggtgcttctgccaaggctggcatggagaagaccaaggccactgtccaagagaaggcagaaagaatgacagcacgtgatccggtgcaaaaggagtcggcaacccaaaggaaagaggcaaagatgaaccaggcgaagctggacaagcaggcggagcgtaagcataacacggtggccaaacagtccgccaccacggatgtgcacatgggacatggacaccacaccaccgtaaccgtcactggaaccgacacgtattccaccaccggagaatatggtaaacccatggggagccaccagacgtcggcaatgcctggccatgg

SEQ ID NO: 39062 - DNA, 370 bp, Glycine max
  unsure (1)..(370): unsure at all n locations
  Clone ID: LIB3065-023-Q1-N1-D6
gtgaagctagtgatgttgcacagaacacaaaagattatgctgctcagaagaccaaggactatgccagcggtggtgcgcagaagaccaaggattatgccagcggtggtgcgcagaagaccaaggactatgcaagtgatgctgcgcagaagaccaaggactatgcaagtgatggtgctcaaaagagcaaagaatatgcggttgatgtagcactgaatgccaaagattatgctcaaaaaagcaaagattacgcaggtgatgctgcacagaatgtcaaagattatgcacgtgatgcagtgcacaagagaaaagagtattctggtgatgcttctaacangagcaaagaggcttttgattatgccagtgagacggt

SEQ ID NO: 39063 - DNA, 265 bp, Glycine max
  Clone ID: LIB3065-023-Q1-N1-D7
tgaaggactaaattaaaataaactaagtattgaaatacaattgaaaataaaggctgaaactaaaatataaataatctgaaactaaaactatgttgtgttattagatgaccatggccgttattgatgccgatgaaaatgggttgggtcgtggccagttgagcacaactatagtactagcaggcatatggtctaattaatgaaaaggaaaccttgcaatatcgctccttggaagcttgggtctataggattgtgccaggttttaatg

SEQ ID NO: 39064 - DNA, 425 bp, Glycine max
  Clone ID: LIB3065-023-Q1-N1-D8
tggagaagtgagagtgatatatgatgccaaagaagccatttcaggtctcaaaactcctattatcaaggatgtggagagtgtgtggccaaccgaatcagcccttgtttggagtgagttgagccaagccattatgaacaaagattgggaaagagcaggagaagcaaagcatgacgtggaagaaagacagaggaatatgttgagagacagagccatgaaaggagaaaactacaaaggatgctaaaggaagagaaaaagcaggaaccaaaggtcaaacaaagaagggtggtggtgaggaacatggaaaaagaagagaagaaacatagaggagaaacaaagaagttgtccaagagggaaagtagaggcagagaaagcaagaccaatggaagaaacaaactggaactaaaggagagaaaaagctgaaacca

SEQ ID NO: 39065 - DNA, 257 bp, Glycine max
  Clone ID: LIB3065-023-Q1-N1-E1
tgtagtaactagtaactctcactagagctgcaggaagttcaaaatgctgggatactctgattttatttgaaactagactcactaaggactagaaccttctaaactataacttataaccagtctagcacgatccatcttgacaactctaaaaacagagtacaggattacagtgtcatagtacgctgacgcacacaactttaagtataccattatcggaaagtccttcgcttccacggtttctctgataagaaactaga

SEQ ID NO: 39066 - DNA, 355 bp, Glycine max
  Clone ID: LIB3065-023-Q1-N1-E2
tgcaattctcacatgttcaagacatagccgaggcagccatgtgcagtatatgaattgcaattatcagtgttcttattaggcctatcctgaagccaaaggaaatgagatcggaattcctcgccgaattccaatgccacattatcacgaaataacgaggcaaacatgtccatacatgaattggagtcatacgattacttattaggcctatcctgaagccagaggaactgcgatcgatactcctcgaagagtcccagttcgaccttttcatgaaacaaggaggcaacattgttcatatctgagttgtaattatgagcttccttattgggcctctcctgaagccaacggaaatgagatc

SEQ ID NO: 39067 - DNA, 232 bp, Glycine max
  Clone ID: LIB3065-023-Q1-N1-E3
catgcagcgatgctgctcataaccgcaatatggaatcctcggggatcgaagacaggaagccggagattctgataagcgcaggaggttgattatggtcgtatgtgccggtgcctgcaaagtcgtatgcgactgcgaatactgacacatatccttccgcccgcctaattcgataagcatgctgcgcacaatctgtgacttaactgacattaattgctctgcgctaactgccagc

SEQ ID NO: 39068 - DNA, 406 bp, Glycine max
  Clone ID: LIB3065-023-Q1-N1-E4
cgacacacggaagcttcctatggacatgtaaagtgaacctacgagtgcacgaacttcagcctctgaccactcactactgctatctaccggctcaactcgtccgggactcaacggagacatagctcgcctctgaccctaagctttactagatgacaggcatacgaaccgtcagtgatcctggtgacagcacctccgatcgtctcagcaacgcgaccggcgcatcgtacatcgccgtctgctatgtcaaattcgatgaggccacaggcgcccgtgacgttacagtgatctataccgagcctccgtagaagcttgtcaggaagctcgactggtcaaatgacgttctctttactggtggatgggctaaaagtggtttatattatgaaactgtcacaaaaatatttaagaa

SEQ ID NO: 39069 - DNA, 428 bp, Glycine max
  Clone ID: LIB3065-023-Q1-N1-E5
cttaattattaacacttccttagttcaatatggggaagccctgcactctctctctttcttccctttgcttgctactctcgtcgagtgcatgctttgctattagctccagcaagctcaacgagtgccaactcaacaacctcaacgcgttggaacccgaccaccgcgttgagtccgaaggtggtttgattcaaacatggaactctcaacaccctgagctgaaatgcgccggtgtcactgtttccaaactcaccctcaaccgcaatggcctccacttgccatcttactcaccttatccccggatgatcatcatcgcccaagggaaaggagcacttggagttgcaattccaggatgtcctgagacgtttgaggagccacatgaacaatcaaacagaagaggctcaaggtcgcagaagcagcagctacaggac

SEQ ID NO: 39070 - DNA, 268 bp, Glycine max
  Clone ID: LIB3065-023-Q1-N1-E6
cttaattattaacacttccttagttcaatatggggaagccctggactctctctctttcttccttacgcttgctactcttgtcgagtgcatgctatgctattagctacagcaagctcaacgagtgccaactcaacaacctcaacgcgttggaacccgaccacctggttaagtccgaatggggattgattcaaacatggtactgtcaacaccctgagctgaaatgctccgatcggactgtttccaaacttacccttaaccgaaatggcct

SEQ ID NO: 39071 - DNA, 176 bp, Glycine max
  Clone ID: LIB3065-023-Q1-N1-E7
caagcagcgatgttgctcatagccgaaatatcgaatcctcggagatcgaagacaggaagccggagattctgaaaagcggaggaggttgtcttccgccgcctgtgccggtgcctgcgccgccgcaagcgacggcgaagacggattacatgtccttcgacccgtcggattcaatcccg

SEQ ID NO: 39072 - DNA, 292 bp, Glycine max
  Clone ID: LIB3065-023-Q1-N1-E8
gcaaaaatgaagctccctatggacttggaaagtgaaccaactagttcaggaaattcaaccactgagcagaaactacagccatcaaagagcaataattctcgtgtgttttatggcagcagagctttcttctgatctttagcttccctagttcatgggaatacgagcagtcactgtagattcttagaagaaaactgattttagtagtgaagtgaaataatcaatgtactatcctgagtggtttccccttctgcatttcataacatgttgattgaaccttacagggaatataact

SEQ ID NO: 39073 - DNA, 316 bp, Glycine max
  Clone ID: LIB3065-023-Q1-N1-F2
gcaaaaatgaagctccttatggacttggaaagagaacctacgggatcaagaaattcaacacaacatgagcagaaactacagccgtaaaagagcattaagtgaatcgagcgttatgtggtgccagagccttgcttctgatctcgtgctggtcttggtcgtgggactacgagcagtcactgttgattgttagaagaaaactgattttagtagtgaagtgaaatactcaatgtactatcctgtgtggtttccccttctgtatttcatcacatgttggttgtagcttacagggaatatagctttgtactctcacaagctt

SEQ ID NO: 39074 - DNA, 355 bp, Glycine max
  Clone ID: LIB3065-023-Q1-N1-F4
agcaagcagcaagcgagacactgaacaccacaacacaaaccgcacaagagaaaagcgcacaggcaaagaatcttgcagcacaagcaaaggacgcaacgttagagaagggtcagcaaggctatgctgtgacaaaggacaccatttcaagtgcagcgaaaaccgcttcggagaaaactgcgccagtggcagagaaggccaaagactacactcttcaggctgcggagaaggccaagagtgcgggtggcacaacggcgagttacgtcggagagaaagcggtgcaggccaaggatgtcgccgtggagagtgtgaagagtgcggctgggtatgctgccaaggtggctgctgatttgaggga

SEQ ID NO: 39075 - DNA, 344 bp, Glycine max
  Clone ID: LIB3065-023-Q1-N1-F7
cagcgtgaccgctcttagttggagttgagtgctaactgcttcgctggggtcagtttgggtctcattaaaggcgatagaggatgagacacaggcttactccttgaaatgctctaacgcatacgaacttaattcgcaaaccaaaagggacgcatttcctatcgcgcagagctccatcaaacgactggcacagctctacacccttgaggactaccggatggaccatgttcatcaaaagccaaacacaatctttctactcaagcatgctgccgccatttgcatgaggttggaccttagctggagagccatacttaccttgtggaacaacgacaactgagactactaca

SEQ ID NO: 39076 - DNA, 374 bp, Glycine max
  Clone ID: LIB3065-023-Q1-N1-G1
tcagcacgaatgtccttcgaaggagttgatgggaactgttttcctggcgatcagtttgtgtctcattaaaggtgagagaggatgagaataaccctttctacttgagaagctctaacagcttccaaactctctttgagaaccaaaacggtcgcattcgtctcctccagagattcaacaaacgctccccacaactcgagaaccttcgagactaccggattgtccagtttcagtcaaaacccagcacaatccttttccccaaccatgctgacgccgatttcctcctcttagtccttagcgggagagccatacttaccttggtgaacaacgacgacagagactcctacaaccttaacccttgcgatgcccagagaatc

SEQ ID NO: 39077 - DNA, 158 bp, Glycine max
  Clone ID: LIB3065-023-Q1-N1-G4
ctcgaacgatgacagttctagattgtctgtacgaggaagttttgatgcatgtattgatgatcaaaatcacacgatgcatgctgaagcaatatggagtgctctgaatgatgtagcctccagtagcagaagaggcactggacaatctggtggttggacgt

SEQ ID NO: 39078 - DNA, 254 bp, Glycine max
  Clone ID: LIB3065-023-Q1-N1-G8
tgcaggtcccgctcgagccgtttatcctctgtgatgataaacttgagctggctaacacacatgaattctttgctggacattctccagcggattcttggttaccaatttttgtgaattgtctttatcctgtaagtcatttaccttcagaagctgtcgctgcaaatgttgcttatccaaatgcacttgatcatgatcctgccgatgcgaacttgagttctaaagagcacagaaaggcccactatgatgactttctt

SEQ ID NO: 39079 - DNA, 177 bp, Glycine max
  Clone ID: LIB3065-023-Q1-N1-H1
tagatatcttgtagaaaccaacaaactgcaagaattcaatctgatataaaaaaaagaaaactaaaaaaattcaaaccattaaaaaaatgtatcgaaagaataaaaatggggcggccgccatttacagagctatctgaaccggcaattaacccaggtccggttcctaaaggcgtccca

SEQ ID NO: 39080 - DNA, 229 bp, Glycine max
  Clone ID: LIB3065-023-Q1-N1-H2
cggctagggatgatgatgacagttctctatcccatgtacgaggaagttttgatgcatgtattgatgatcaaaatcacacgatgcatgctgaagcaatatggagtgctctgaatgatgtagcctccagtagcagaagaggcactggacaatctggtggttggacgtcatctgaggatgagccagaggcaatggagcatgatgatgatgataggaacttgagttttaaaga

SEQ ID NO: 39081 - DNA, 352 bp, Glycine max
  Clone ID: LIB3065-023-Q1-N1-H4
ctggtcaaaagatagccgctctccattgtctttgaacactcatgaccatggccaagcttgtactttccctttgtttccttcttttcagtggctgcttcgctctgagagagcaggcacagcaaaatgagtgccagatccaaaagctgaatgccctcaaaccggataaccgtatagagtcggaaggtgggttcattgagacctggaaccctaacaacatgccattccagtgtgccggtgttgccctgtctcgctgaacccttaaccgcaatgcccttcgtagaccttcgtacaccaacggtccccaggaaatctacatacaacatggcaatgtaatctttggcatgatattccc

SEQ ID NO: 39082 - DNA, 259 bp, Glycine max
  Clone ID: LIB3065-023-Q1-N1-H5
gggagcttgggtagggatagggtgctattcagcagcaactcggggggtatgaatattatctcagaccattaaggcttcattggtttactaataggaaatggatgagaacatattgaccctcttatgcactctgctgactgatgtaataatcatgggctaatacactgtccttgcagattgatgttctacatatttgatagttcaattttggattttgatgggtagttccttgtgaacttgtggaactaatggattacaa

SEQ ID NO: 39083 - DNA, 384 bp, Glycine max
  Clone ID: LIB3065-023-Q1-N1-H6
gtctgatgatgacacagttctcgatcgtctgtgatgataaacttgagctggctaacacacatgaattctttgctggacatgctccagcggattcttggttaccaatttttgtgaattgtctttatcctgtaagtcatttaccttcagaagctgtcgctgcaaatgttacatgtcgtagtgcacgtggtggtttacctaccactgcttgcattagttctgcagttaacaatcgctcctcatatatcaacatctggattctcacagcactttggcaaaggtaagaaaatggtgattattactacagttgatccttttccagtacctgtactggctgatctttttggcgttatgaatgaaattctgagttccaacgccactaaccct

SEQ ID NO: 39084 - DNA, 297 bp, Glycine max
  Clone ID: LIB3065-023-Q1-N1-H7
gggagcttgggtagggatagggttttattcagcaacaggtcaaagactaaaaatattatctgagaccattaaggcttcattggtttactaataggaaatggatgagaacatattgaccctcttatgccctctgttgactgctgtaataatcatgggctaatacactgtccttgcaaattgttgttctagatgtttgatagttcaattttggattttgatgggtagttcctggggtacttttggaactaatgggttacaatccctggcattgtcctaatggcttgcaaaagttccttc

SEQ ID NO: 39085 - DNA, 366 bp, Glycine max
  Clone ID: LIB3065-023-Q1-N1-H8
cgtcgacaaaagatagtctttctaatggaacacaaacactctttctttcgaagccataggtctctctctgcgcttctcgaccttcgatggcgctcgacctttcttcgaattggctcaaccgtctacgggttcctatccaatctgggccttcaatttcctcattcctttttcgcgggttttgaatgggagctgcggaattgcggacaggtgccgcatgtgcagcatgagcattgacagccccgttggagggaaggattagggtttcgtggtttgtgttcggtggcgaggattttcccatgggagatggaggcgttgcgtgtatacctctgcagcagcagcagcatgttattgagcggttgccgaatg

SEQ ID NO: 39086 - DNA, 249 bp, Glycine max
  Clone ID: LIB3065-024-Q1-N1-A3
aacaaaagaagcaatgatgatgaatgtcatagggctgagtctgagtctggtgttaacttcactggcagcagcgagcaccatcgtcaaagaagggcacagagttgtcgtggttgaatacgaccaaggtggccatcagaacaccaaaatctcaatatcaccagaacaacctacgcatgctaatcttaaagatcccatttgcgacgcctatggaaaatgcaagcacaaaatcgtggatgcaatggagaagtc

SEQ ID NO: 39087 - DNA, 424 bp, Glycine max
  Clone ID: LIB3065-024-Q1-N1-A4
aacttattaacactttccttagttcaatatggggaagcccttcttcactctctctctttcttccctttgcttgctactcttgtcgagtgcatgctttgctattacctccagcaagttcaacgagtgccaactcaacaacctcaacgcgttggaacccgaccaccgcgttgagtccgaaggtggtcttattgaaacatggaactctcaacaccctgagctgcaatgcgccggtgtcactgtttccaaacgcaccctcaaccgcaacggcctacactcgccatcgtactcaccttatccgcaaatgatcattgtcgttcaagggaagggagcaattggatttgcatttccgggatgtcctgagacgtttgagaagccacaacagcaatcaagcagaagaggctcaaggtcgcagcagcaactacaa

SEQ ID NO: 39088 - DNA, 422 bp, Glycine max
  Clone ID: LIB3065-024-Q1-N1-A6
caaaaatgaagagcaccatcttctttgctctctttctcttttgtgccttcaccacctcatacctaccttcagccatcgctgatttcgtgctcgataatgaaggtaaccctcttgaaaatggtggcacatattatatcttgtcagacataacagcatttggtggaataagagcagccccaacgggaaatgaaagatgccctctcactgtggtgcaatctcgcaatgagctcgacaaagggattggaacaatcatctcgtccccatatcgaatccgttttatcgccgaaggccatcctttgagccttaagttcgattcatttgcagttataatgctgtgtgttggaattcctaccgagtggtctgttgtggaggatctaccagaaggacctgctgttaaaattggtgagaacaaagatgcaatg

SEQ ID NO: 39089 - DNA, 409 bp, Glycine max
  Clone ID: LIB3065-024-Q1-N1-A7
gaaaaagaaaagcttgctcatccagcagcataggatcaaaaagagcaatgcagagaatcggccaactgttccaaggaagtttgataaggacaagcagttcacatcagaaagaatgggaaggcaactgtcatctttggggcttgatcccagtttggcaattaagagaatgcacagcagatctgtctctagaggtcggaaaagggatagatcgcctgaaacaagaagtgctgatggtatggatactgatggtgacacacctagcaaaaaacagcgtctgagtagatcactgtcacggtccaggtcagtgtcacgcccaccacatgaagttgtgcctggagaatgcttcaaggattctgctcaaaaggtcaaggcaatcaaacttgcaaagaaatctgtcaagaagagaaac

SEQ ID NO: 39090 - DNA, 353 bp, Glycine max
  unsure (1)..(353): unsure at all n locations
  Clone ID: LIB3065-024-Q1-N1-A8
tgcggacattgtaagtaaatcttatgaagatggagatgataactgatgttaccgagtatgaggcaattgcaaaggaaaaattgccaaagatggcttatgactactatgcatcaggggcagaggatcagtggactgtgaaggagaaccgaaatgcattctcaaggattgtgctccagacgcgtattcttgttgatgtgagcangatagacttgactgccactgtattgtgctgcaaagtatcatgcctatcatgattgatccaacagccatgcatgagatggctcacgctgaaggacaattagctactgctagaagcacatgagcagctggcacaatcatgacactatgctcat

SEQ ID NO: 39091 - DNA, 276 bp, Glycine max
  Clone ID: LIB3065-024-Q1-N1-B1
cggctcgaggtaggttgaaaaggcgtgcgtgctcatccctttagggtgagagaagaatggtgctttcggaggaggaaatcggtcgtctataccgaataaggaagacggtgatgcagatgctgagggacagaaattttctggttggtgacttcgagatcaacatgtccaagcacgagttcaagtccaagtacggcgaacacatgaagcgcgaggacctcgtcatcaacagatccaagaaggacaactccggcgaccagatctacgttttcttccccg

SEQ ID NO: 39092 - DNA, 87 bp, Glycine max
  Clone ID: LIB3065-024-Q1-N1-B10
cattgaacttatctctcttctcacttctgttggtataagtaactggcctcatcttacaaaacaatcctgcacaggtttcaaaatgct

SEQ ID NO: 39093 - DNA, 177 bp, Glycine max
  Clone ID: LIB3065-024-Q1-N1-B2
atttggatctcctacgaaacttaagaataggagattgctcctgactcaaagcatcatgaccatttactatgttgctatgcattgatatgctgctcaagtttcttggttattgttatcctttatattgttgaaattctataatgatttattcaatattatattaactcttgggattgt

SEQ ID NO: 39094 - DNA, 268 bp, Glycine max
  unsure (1)..(268): unsure at all n locations
  Clone ID: LIB3065-024-Q1-N1-B3
tgacattctcttgggaatttctcaagattttgaaattgctggtaatactcttatgccagctttttctgttccacaggctactgccagatcttctgaaaatccggaatcctctgcatgatctggaatttgtgttttctttcatttgtccgtttgtttaattcaataaaggaaattaggcatgaccctcttgttgagtatgctctgcctatttgaaaatttccacacctcttttaattgtcgtaatgatgtgtgaagtgtgtgttattnt

SEQ ID NO: 39095 - DNA, 404 bp, Glycine max
  Clone ID: LIB3065-024-Q1-N1-B4
gtttatcagtttctcaatcgttagatctcatcttatactcaccggcgagtccatctcgcgccagcgtcgacgccgttccggccacggttccggccaccgcctttggttccttaactttctcgtccttcttcttctcagatagcagaaatatgccttctcagaaagttgaaacgggtcatcaagacacggtccatgatgttgcaatggattactatggtaagaggctggccacggcttcatcagatcacacaattaagataattggggtgagtaatacggcctctcagcatctcgcaacattgactggtcaccaaggacctgtttggcaagtggcgtgggctcaccctaagtttggttctctacttgcatcgtgttcctatgatggccgtgtcattgtttggaag

SEQ ID NO: 39096 - DNA, 406 bp, Glycine max
  unsure (1)..(406): unsure at all n locations
  Clone ID: LIB3065-024-Q1-N1-B5
gaaagaacctctctctctcatttggtacggtttggtcgtgcccattgtcctgtttgtttcggtttctgttttgctttgaaagcagaagaatcaaatcaaatcaatccttcaccgttcgttcgttcattaattcattcaattccctttcttcggtttttctattttttccctcanaaaataaaaatcggaactttgctttaaacgtggaaccccaccctgagatttcgcccccagaatcttgatccctttatccagaagggtacttattgnttttttttttccactgggattcttgttgttgttgttgttgtggttcattgtttgtggaagagaaatggcgacgagtatagggattatggatagcgcttactttgtcggcagaaacgaaattctcagttggatcaac

SEQ ID NO: 39097 - DNA, 371 bp, Glycine max
  Clone ID: LIB3065-024-Q1-N1-B6
gaaagaacctctctctctcattaggtacggtttggtcgtgcgcattgtcctgtttgattcggtttctgctttgctttgaaagcagaagaatcaaatcaaatcaatccttcaccgttcgttcgttcattaattcattcaattccctttcttcggtttttctatttcttacctcaaaaaataaaaatcggaactttgctttaaacgtgtaacctcaccctgagatttcgcccgcagaatcttgatccctttatccagataggtacttattgaattctggcttccactgtgattcttgatgttgttgttgacgtggctcattgtttgtggaagagaaacgtcgactagtatagggattatgcatagcgcttact

SEQ ID NO: 39098 - DNA, 363 bp, Glycine max
  unsure (1)..(363): unsure at all n locations
  Clone ID: LIB3065-024-Q1-N1-B7
ctcgagccgaatcggctcgagcggctcgaggcaagcagagcttttgtcagttttctattgaccttctcggtggaggaatcttagtggacaaaactggagattggatcacacttatacaaaattctccaattagtaacttgttgagagttgctgcttggaagaaaggctgtttaatggtcaagattgtgatgtctgggaatgcagcagtcaaaaggagtgattgggcctcattggtacaagtgtttctaacanacagcaacagtacagagcattttgatgcatgtaagtggacataatcaggaccacattcctgggaaatgatcttgcaatagaggtatgtgggcctaataatggttttgaaat

SEQ ID NO: 39099 - DNA, 399 bp, Glycine max
  Clone ID: LIB3065-024-Q1-N1-B8
tctcggtgaattccaattccacattttcaagaaatatggaggcaaaaatggtgatatatgaattggaattatttgttttcttattaggcctatcctgaagccaaaggaaatgagatcggaattcctcggggaattccaattccacattttcaagaaataaggaggcaaaaatgttcatatatgaattggaattatttgttttcttattaggcctatcctgaagccaaaggaaatgagatcggaattcctcggggaattccaattccacattttcaagaaataatgaggcacaaatgttcatatatgaattggaattatatggttgctcattaggcctatcctgaagccataggatatgtgatcggatttcctcgagggtacctagctcgaatgccctat

SEQ ID NO: 39100 - DNA, 362 bp, Glycine max
  Clone ID: LIB3065-024-Q1-N1-C10
gaggcagagggggtacatctacgactcaggagctattctagtgtcgtcttgaccgacgatggcgagtgaaaagttggtgctggcagtgatcaggccgcgaggccaaccttccgcaaccaaaacgacaaaatcgcatttgccgttcactcctccttcctcacctccggctatgtcctcaccgctacaggtccccaggccctctccgacaatgcgttttctgacccatccaatgacgaggtatccgttgatcattggaacgagctgaacgatgagtacgcgttcgtttacgcgaatccagaaaagggttcggagaaagtgcttgtcaagtgcctcgtgatgaacgacaaattgctcgttcatgc

SEQ ID NO: 39101 - DNA, 407 bp, Glycine max
  Clone ID: LIB3065-024-Q1-N1-C2
tgaaattttcacaagaggaatttcttacagcttggtcaacccaggtccgtactgcaacaactctgttggctgatgggtgtccatatttgtatgctatggtgcatgatagttcagtgtctacaataccaggtgattatgtcattggtgttaagttgacaaccataaacaatatgtgtgcatatgggctcaatcctggtatttcaggttctcgtcttttgggcaccattcctcagtccatttcacagcaaactgtttggaatcaaatggcaacagtgagaacaccattgaattttgattctagcaagcagagcttttgtcaattttctattgaccttctcggtggaggaattttagtggacaaaactggagattggatcacacttatacaaaattctccaattagtaac

SEQ ID NO: 39102 - DNA, 379 bp, Glycine max
  Clone ID: LIB3065-024-Q1-N1-C5
acccaatcatgccatatttgaggcgaataaatgcaacctccacaaaggcttatgctaccagaaccatccttttcctgaaaaatgacggaactttaaggccacttgccatagagttgagtttgccacatcctcagggagatcaatctggtgcttttagtcaagtttttctgcctgcagatgaaggtgttgaaagttctatttggctgctagcaaaggcttatgtagttgtgaatgactcgtgctatcatcaacttgtcagccattggttaaacactcatgcagttgttgagccattcatcatagcaacaaacaggcatctcagtgttgttcaccctatttataaactccttcaccctcactatcgtgacaccatgaacat

SEQ ID NO: 39103 - DNA, 378 bp, Glycine max
  Clone ID: LIB3065-024-Q1-N1-C6
acccaatcatgccatatttgaggcgaataaatgcaacctgggcaaaggcttatgctaccagaaccatccttttcctgaaaaatgacggaactttaaggccacttgccatagagttgagtttgccacatcctcagggagatcaatctggtgcttttagtcaagtttttctgcctgcagatgaaggtgttgaaagtcctatttggctgctagcacaggcttatgtagttgtgaatgactcgtgctatcatgaacttgttagccattggttaaacactcatgcaattgttgggccattcatcatagcatcaaacaggcatctcattgatgttgacactatttataagctcctttacgctcactatcgtgacattatgaaca

SEQ ID NO: 39104 - DNA, 359 bp, Glycine max
  Clone ID: LIB3065-024-Q1-N1-C7
tatatactatgatgagagtgcggtttcctttgttggtgttgctgggaactgttttcctggcatcagtttgtgtctcattaaaggtgagagaggatgagaataaccctttctacttgagaagctctaacagcttccaaactctctttgagaaccaaaacggtcgcattcgtctcctccagagattcaacaaacgctccccacaacttgagaaccttctagactaccggattgtccagtttcagtcaaaacccatcacaatccttctccccaaccatgctgacgccgatttcctcctctttgtccttaccgggagagccatacttaccttggtgaacaacgacaactgagactcctacaac

SEQ ID NO: 39105 - DNA, 245 bp, Glycine max
  Clone ID: LIB3065-024-Q1-N1-C8
tctatactatgatgcgagtgcagctcccttctgtgacggagctgatcactgctagactgacttcactctacagtttattaaaggtcctacatgaccagactggccgtggctactccagtaactatatactgttttacactctcttggagaaccacgccggtcgcaatctaattcatctagagacatcacaaactctactttcatcttcagaacctacaaacgtacctgtccttcagcttcactca

SEQ ID NO: 39106 - DNA, 401 bp, Glycine max
  Clone ID: LIB3065-024-Q1-N1-C9
ccattacgccaaacttgttctaccatcaacaccacgatgcttcctctctggtgggaggctctgtttcttgctcttgcacaatatagccatgtccatgcatgctacctgagggagattattgggaagctgttcggccagaacactcccattcccactggactgggagagcttataaagcctctccctgcaggtgttgaaatcgatgaactccctaagcaaattgatgatacacagtacccaaaaacattcttctataaagaagaccttcatccaggcaaaacaatgaaagtacaattcaccaagcgtccctatgcacaaccttatggtgtatatacatgggtaacggatattaaagacacctctaaagaaggatatagttttgaagagatatgcatcaagaa

SEQ ID NO: 39107 - DNA, 341 bp, Glycine max
  Clone ID: LIB3065-024-Q1-N1-D10
gtttggagagattcaggaaaaagttgtattgaaattttcacgggaggaatttctacagcttggtcaacccatgtgcgtcctgcaacaactctgtggctgatgggtgtccatatttgtatgctatggtgcatgatagttcagtgtctacaataccaggtgattttgtcattggtgttaagttgacaaccataaacaatatgtgtgcatatgggctcaatcctggtatttcaggttctcgtcttttgggcaccattcctcagtccatttcacagcaaactgtttggaatcaaatggcaacagtgagaacaccattgaattgtgattctagcaagcagagcttt

SEQ ID NO: 39108 - DNA, 331 bp, Glycine max
  Clone ID: LIB3065-024-Q1-N1-D11
gctaacttcaacacctttaattttctaaaagtaattcatcggctgagtaccaacggagaagatgagtcaggagcagccacggcgttccaaatgcaaaaccccatcaaatacggcgacgtttttgtcgtctgcggcgaccttgcacagaagcccgttgcaccggaagatgctgccatgatgcaaagcgcggaaactcgagtgctcggacaaacccaacccggcggagcatcttccggcatgcaatctgacgccaccagtaatgaacaagctggccttgtcggtcaccgggacgttaccgacgttaccggcgaccgtggcgtcacagtcacag

SEQ ID NO: 39109 - DNA, 409 bp, Glycine max
  unsure (1)..(409): unsure at all n locations
  Clone ID: LIB3065-024-Q1-N1-D3
gagaagaagaagagagagtgatggagtgcgtattcggattggtgggtaatgggtttgcgatcgtggtggctgattcatcggcggtgcacagcatcctcgtccacaagtccaacgaggacaagatcatgctcctcgattcccacaaactcattgccgctagcggcgagcccggagacagggttcagttcacagagtacattcagaagaacgtcgccttgtatcagttccgtaacggcatccctcttaccaccgtcgncgccgccaatttcacgcgtggcgaactcgccactgctctccgcaagaacccatactctgtgaacatccttcttgctggttatgacaaagagacgggccctgaactatactatattgactacattgcaacgcttcacaagcttgaaaagggggc

SEQ ID NO: 39110 - DNA, 295 bp, Glycine max
  Clone ID: LIB3065-024-Q1-N1-D4
tccatgtcgtgccctcacgtgagcggcttagccgcgctgatcaagtcggctcaccctgattggagcccagccgcggtccgatcggctcttatgacaacggcttacacagtttacaaaaccggtgagaagctgcaagacagcgcaacgggaaagcccttcacgccgttcgatcacggttccggacacgtggaccccgtcgctggcctcaatccaggactcgtctacgatctaacggtggatgattatttagggtttctctgggcgttaaactactcagctttcgagatcaacacat

SEQ ID NO: 39111 - DNA, 413 bp, Glycine max
  unsure (1)..(413): unsure at all n locations
  Clone ID: LIB3065-024-Q1-N1-D8
tgagggagttgatgatgcagctgttaaggttgttgacattggtgacacattcagacttcaggagcaacccgcattcgataagaagcagtttgttaccttcatgaagaggtttatcaagaatttgactcccaagctcgatgcagagcaacaggagttgtttaagaagcacatcgagggagcaactaaatacctgctctctaagattaaagatttccaattttttgttggtgagagcatgggtgatgatgcttgcttggtctttgcctactacaaggacggcgctgctgatccaacattcctgtactttgcatatgccttaaaggaggtcaagtgctaagtgacttaatgtaccgagctatctactcattgtatctangttttttttacgttctgtcctaagctacttgaaactt

SEQ ID NO: 39112 - DNA, 316 bp, Glycine max
  Clone ID: LIB3065-024-Q1-N1-D9
gctaacttcaacacctttaattttctaaaagtaattcatcgggtgggtaccaccggagaagatgagtcaggagcaaccactgcgtcccaaagccaaaaccccatcaaatacggcgacgtttttgtcgtcttcggcgaccttgcacataatcccgtagcaccggaagatgctgccatgatgcaaagcgcggtaactcgagtgctcggacaaacccaacccggcggagcagcttccgccatgcaatctgccgccaccagtaatgaacaggctggccttgtggtgcaccggaacgtcaccgactttaccggcgaccgtg

SEQ ID NO: 39113 - DNA, 409 bp, Glycine max
  Clone ID: LIB3065-024-Q1-N1-E1
gagaagaagaagagagagtgatggagtgcgtattcggatgggtgggtaatgggtttgcgatcggggtggctgattcatcggcggtgcacagcattctcgtacacaagtccaacgaggacaagatcatgctcctagattcccacaaactcattgccgctagcggcgagcccggagacagggttcagttcacagagtacattcagaagaacgtatgcttgtatcagttccgtaacggcatgcctgttaccaccgacggcgtcggcaatttcacgcgtggcgaactcgtcactgttctcccgaagaacccattactttgtgaacatacttcttgctgttgatgactaagagacgggccctgaactatactatttggactacagtgctacgctttatcagcttttataagggg

SEQ ID NO: 39114 - DNA, 354 bp, Glycine max
  Clone ID: LIB3065-024-Q1-N1-E2
gctaacttcaacacctttaattttctaaaagtaattcagcggctgaataccaagcggagaagatgagtcaggagcagccacggcgtcccaaaggccaaaaccccatcaaatacggcgacgtttttgtcgtctccggcgaccttgcacagaagcccgtcgcaccggaagatgctgccatgatgcaaagcgcggaaactcgagtgctcggacaaacccaacccggcggagcagcttccgtcatgcaatctgccgccaccaggaatgaacaggctggccttgtcggtcaccgggacgtcaccgacgttaccggcgaccgtggcgtcacagtcacagaaactaaagtccctggaagac

SEQ ID NO: 39115 - DNA, 310 bp, Glycine max
  Clone ID: LIB3065-024-Q1-N1-E3
gctaacttcaacacctttaattttctaaaagtaattcaccggggggataccaagcggagaagatgagtcaggagcagccacggcgtcccaaaggccaaaaccccatcaaatacggcgacgtttatgtcggctccggcgaccttgcacatgatcgcgtctcaccgtaagatgctgccatgatgcaaagcgcggaaactcgagtgctcggacaaacccaaccctgcggagcagctttccgtcatgcaatctgccggcaccaggaatgaacaggcttggccttgtcagtcaccggtactttaccgacgttacc

SEQ ID NO: 39116 - DNA, 410 bp, Glycine max
  unsure (1)..(410): unsure at all n locations
  Clone ID: LIB3065-024-Q1-N1-E4
acaaaaacaaaccaaaccagggcctttgattacaagagagagggaccaaaacattcaacacaatggcttctgagcaaatgcctcgcagagagaacaacagcaatagggtgatagagagagaggttcacgttgagacacacagaaaagagtccctccctgataagggaagggttgtgatagagagtgagaagaaggagaaagagagagagttggcttctgatagagccaggtctggaaatatagttaaggaggacaaagaggttgaagaaggaagaagaggaaaagaaagtggtggtggtggtggtgttcagcatgagaggaagtttgaaacgaaagttgaagagaagaaaggttttggggaaaaggctgaactcgaggggataacangagtggtggtgggaggagagtgc

SEQ ID NO: 39117 - DNA, 144 bp, Glycine max
  Clone ID: LIB3065-024-Q1-N1-E5
tcaataccatcaaaaacctggcataatctacatcaacagtgaggccaaacaaaacacagacgagaacctcatccatctattaatatcatctatatcaacaacaaatccaaccattacacaatcatacactactaatccaacaaa

SEQ ID NO: 39118 - DNA, 407 bp, Glycine max
  unsure (1)..(407): unsure at all n locations
  Clone ID: LIB3065-024-Q1-N1-E7
aaatttctttgcagccttggaatgctttcaggcctgatggagtaattatcttctcggacatccttacaccacttcctgcgtttggagttgattttgacatagaagaagtaaggggacctgttatacattcgcccattcgttctgaggaaggattaaaggttttacatccaattgacctggacaggcttaaatttgttggagattcactaaagatactgcgccaagaggttggtggtcatgcagctgttttgggttttgtgggagcaccttggacaatagcaacatatatagtggaagggggcaatagctgattacgttattttccaagtggagtctngggctcattgcatacaaatatttgattcatggngtggacaactaccacctgaaatgtgggaacgctggtc

SEQ ID NO: 39119 - DNA, 297 bp, Glycine max
  Clone ID: LIB3065-024-Q1-N1-E8
gagtcattgaactttgactatatttttcagagttcagattattcttctcttttgaattttgattttgggggtttaagtttctgagagaaaaaaaaaaatgataaaggtcgttctttttttgttctgctttgcctctgcactgaccctttcagtatcggagtccaaatctgcttctgtgcaacctcatgcagctgaatctttctctgttggatatattcagatgaagactgcagcgaactgttcttacctggtagttatatctacgagttgttcatcgcctaagttcactacggataa

SEQ ID NO: 39120 - DNA, 196 bp, Glycine max
  Clone ID: LIB3065-024-Q1-N1-E9
tccatgtcgtgccctcacgtgagcggcttagccgcgctgatgaagtcggctcccctgattggagcccagccgcggtccgatcggctcttatgcaacggcttacacagtttacaaaaccggtgagaagctgcaagacagcgcaacgggaaagccctccacgccgttcgatcacggttccggacacgtggaccccgtc

SEQ ID NO: 39121 - DNA, 425 bp, Glycine max
  Clone ID: LIB3065-024-Q1-N1-F1
tctagggtttacagagaagctaagaggcgcagccgtagcaaaagctcgtggaattgctagcaatggcgaggatcaaggtttacgagctgaggcagaagacgaaggctgatctgctgaatcaactgaaggacctgaaggcggagcttgccttgcttcgtgttgctaaggtcaccggtggtgcccctaacaagctttccaagataaaggtggtgaggttgaacattgcccaggttttgacggtgatttctcagaagcagaaggctgcgttgagggatgcctacaagaataagaagtacttgcctctcgatctccgccctaagaagaccagggctattcgcaggaggcttactaagcaccaggcatcattgaagacagagagggagaagaagaaagagttatatttcccactaaggaaatatgctatc

SEQ ID NO: 39122 - DNA, 68 bp, Glycine max
  Clone ID: LIB3065-024-Q1-N1-F10
gtgcagccgactttgttggagctagaggcaactggcttcgtggcggcagttccgtgtcattgtaggtg

SEQ ID NO: 39123 - DNA, 304 bp, Glycine max
  unsure (1)..(304): unsure at all n locations
  Clone ID: LIB3065-024-Q1-N1-F3
ggctcgagtaataaaggagcaagaggcaagaagaagacaacgaaaagaagaagaaaggaaagccttggaagcagcggctagaaaagctaaaatagacgagacatttgagaaaacagttgaagagggaaatcaaaccggaggtgatctagttgttgaaaaatctcggtttgtggcttcagatcctgatccttccatatctggagtagtaaatggtaatccattaagtaaagacttggagggaaatcagaattctacgtctatatctgagacagnnaaatatgatgngtctgctcatttcaacaat

SEQ ID NO: 39124 - DNA, 305 bp, Glycine max
  Clone ID: LIB3065-024-Q1-N1-F4
caattttctattgaccttctcggtggaggaattttagtgggcaaaactggagattggatcacacttttacaaaattctccaattagtaacttgttgaaagttgctgcttggaagaaaggctgtttaatggttaagattgtgatgtctgggaatgcagcagtcaaaaggagtgattgggcctcattggtacaagtgtttttaacaaacagcaacagtacatagcatttggatgcattaagtggacaaaatcggaaccacatttctgggaattgatcttcccaatagaggtatgtggtcctaataat

SEQ ID NO: 39125 - DNA, 229 bp, Glycine max
  Clone ID: LIB3065-024-Q1-N1-F5
aaatttcttagcagacttggaatgctcaaacgcctgagggggtaattatataggtgggcatgcttacaatcattgctacgactcgagtgcatattaacatacatgatctatggagaccagttatgcattcgaaccttcactctgacgagtgagtaaaggttatgcatccaattgacccccacaaaagcaaatcaagaggaaagtcactaaggataacattgcacaaggt

SEQ ID NO: 39126 - DNA, 297 bp, Glycine max
  Clone ID: LIB3065-024-Q1-N1-F6
tatatactatgatgagagtgcggtttcctttgttggtgttgctgggaactgttttcctggcatcagtttgtgtctcattaaaggtgagagaggatgagaataaccctttctacttgagaagctctaacagcttccaaactctctttgagaaccaaaacggtcgcattcgtctcctccagagattcaacaaacgctcccaacaacttgagaaccttcgagactaccggattgtccagtttaagtcaaaacccaacacattccttctcccccaccatgctgacgccgatttcctcctct

SEQ ID NO: 39127 - DNA, 424 bp, Glycine max
  Clone ID: LIB3065-024-Q1-N1-F7
agaaaagaagaaaggaaagaattgatcgttgaaaatgcagggaggaaagaaagcgggagagtccattaaggaaacagctacaaacattggtgcttctgccaaggctggcatggagaagaccaaggccactgtccaagagaaggcagaaagaatgacagcacgtgatccggtgcaaaaggagttggcaacccaaaagaaagaggcaaagatgaaccaggcggagctggacaagcaggcggcgcgtcagcataacacggcggccaaacagtccgacaccacggctgggcacatgggacatggccaccacaccaccggaaccgggactggaaccgtcacgtattccaccaccggcgaatatggtcagcccatgtgggcccaccagacgtcggcaatgcctggccatgaaaccgggcagcccacgggc

SEQ ID NO: 39128 - DNA, 378 bp, Glycine max
  Clone ID: LIB3065-024-Q1-N1-F8
acccaatcatgccatatttgaggcgaataaatgcaacctcgacaaaggcttatgctaccagaaccatccttttcctgaaaaatgacggaactttaaggccacttgccatagagttgagtttgccacatcctcagggagatcaatctggtgcttttagtcaagtttttctgcctgcagatgaaggtgttgaaagttctatttggctgctagcacaggcttatgtagttgagaatgactcgtgctatcatcaacttgtcagccattggttaaacactcatgcagttgatgagccattcatcatagcaacaaacaggcatctcagtgttgttgacactatttataaactccttgactctgactatcgtgacaccatgaaca

SEQ ID NO: 39129 - DNA, 281 bp, Glycine max
  Clone ID: LIB3065-024-Q1-N1-G3
tattgaacttatctctcttctcacttctgttgttataagtaacttccctcatcattacaaaacaatcctccacaggtttcaaaatgctgaaatcgggcatgggaattgaggagagaaagcaagtgaagaagccagcacaagccagctcgagaaaagggtgtatgagagggaaaggaggtcccgagaatgctagttgcacctacaaaggtgtgaggcagagaacatggggaaaatgggttgctgaaatccgtgaacccaatcgaggtgctaggctctggctc

SEQ ID NO: 39130 - DNA, 358 bp, Glycine max
  unsure (1)..(358): unsure at all n locations
  Clone ID: LIB3065-024-Q1-N1-G4
atactatgatgagagtgcggtttcctttgttggtgttgctgggaactgttttcctggcatcagtttgtgtctcattaaaggtgagagaggatgagaataaccctttctacttgagaagctctaacagcttccaaactctctttgagaaccaaaacggtcgcattcgtctcctgcagagattcaacatacgctccccacaacttgagaaccttcgagactaccggattgtccagtttcagtcaaaacccaacacaatccttctgccgcaccatgctgacgccgatttnctgctttttgtccttagcgggagagccatacttaacttggtgaacaacgacgacagagactcctacaacct

SEQ ID NO: 39131 - DNA, 401 bp, Glycine max
  Clone ID: LIB3065-024-Q1-N1-G6
acttgagatggatggaagcggtgttgccgctgggaatcatagctggaatgctctgcgtcatgggaaacgctcagtattacattcacagagctgcacatggcagacctaagcacatcggaaacgatatgtgggatgtggcgatggagcgaagggacaagaagcttatcgagcaagcctctccctccaattaacatcgatgttttgccgatgtcattgtgaagaaaataaactgctcacctggatttacggctgtgttcttgggaagcatggttaatcacaagaatcaaattccgtctgttttcttgtatgcaattcaacataggatttataaatatacctatgctacaatcacaattacttttgctaagctcggcttgttgaaaactaagcagttctgaggt

SEQ ID NO: 39132 - DNA, 375 bp, Glycine max
  unsure (1)..(375): unsure at all n locations
  Clone ID: LIB3065-024-Q1-N1-G8
atacatatatacgagagagtgagtaatcgagaaagagaagaggcatatatatcaaaatggctgcagagatcggaaaggagtcattgataactggaactactaatgcacagttactggacagagaagggtagaaatgacttaaaaaaatttttaccaaaacatacttgccaagagcattgaagctcctgatacgggtcacccaaatggacagcaggccacaggcaccacaacttatctgttcttcagcagcattgtgcttttttgatcaagatgccaatggaatcatttacccttgggaaacttacatggggctgcgttctattggatttaatgttgntgcatctggtattatggctattggtatcaatgttggat

SEQ ID NO: 39133 - DNA, 73 bp, Glycine max
  Clone ID: LIB3065-024-Q1-N1-G9
gtttatcagtttctcaatcgttagatctcatcttatactcaccggcgagtccactcgcgccagcgtcgacgcc

SEQ ID NO: 39134 - DNA, 238 bp, Glycine max
  Clone ID: LIB3065-024-Q1-N1-H3
aacttactaacactatccttagagcaatatggggaagcccggggggactctgtatcatgcttgcctttgcttgctactctagtcgagtgcatgctttgctatgaccttcagcaagttcaacgagtgccaactcaacaacctcaacgcgttggaacccgaccaccgcgtttagtcccaaggtggtcttattggaacattggaactatcaacaccatcagctgcaaaacgccggtgtcac

SEQ ID NO: 39135 - DNA, 339 bp, Glycine max
  Clone ID: LIB3065-024-Q1-N1-H5
aggttccatgttagatcttaaaatttctcaatctaaaattgcacttcccaaaaacacagttggaggaaccattctgcgtagtgatctattggcaaatttttggacagagggcaattttagagcaagtgttgatttgcagcgcaacgcatcgtattaaaggaatgattaaaatggtggccacagttggtattcctgagattcaggtatagcattggcctgtgctatgaataagtcttttggggggcgtcccagttctgatatttacaccatctgctctcaagactggtgattatggaatcctgcttgcacaaaagcaatgactatgtcatttaatccaaa

SEQ ID NO: 39136 - DNA, 180 bp, Glycine max
  Clone ID: LIB3065-024-Q1-N1-H6
aggttccatgttagatcttaaaatttctcaatctaaaaggggacttcccaaaaacacagttggaggaaccattctgcgtagtgatctattggcaaattttttgacagagggcatttttagagcaagtgttgatttgcagggcacgcttcgtattaaaggaatgattaaaatgttggccac

SEQ ID NO: 39137 - DNA, 135 bp, Glycine max
  Clone ID: LIB3065-024-Q1-N1-H8
ggctcgagaaggaaataattgatctttgaaaatgcagggaggaaagaaagctggagagtccatcaaggaaacagctgcaaacattggtgcttctgccaaggctggcatggagaaaaccaaggccactgtccagga

SEQ ID NO: 39138 - DNA, 64 bp, Glycine max
  Clone ID: LIB3065-024-Q1-N1-H9
cacaatacatataacatcacatgcactcgtaccttacctcaaacttaatctcttgataactcat

SEQ ID NO: 39139 - DNA, 338 bp, Glycine max
  Clone ID: LIB3065-025-Q1-N1-A1
tcattcacgagattgaggcggcggttgatttggaagaaacccagctaaggtaacatcatttctgtgatggtgtacttggctccggtgccaacgttttaccggatatacaaaaagaaatgcacggacggtttccactcgctgccatacttgttgtcattaatgagttctatgctttggttatactacgccttcctcaaaattcatgacggcgttgttccccttattacgatcaactcgatcggatgtgtcatagagctcatctacattctcacctacattaaatatgcgcacaaggatgcaaggaacttaacctataccctatttgcggcgatgaatat

SEQ ID NO: 39140 - DNA, 158 bp, Glycine max
  Clone ID: LIB3065-025-Q1-N1-A12
caaccttgtttcttaaggtttatattttggagtttacttagggatgatgattgttattttctgcactggctttgatacagatttcaggtgagtttgtttcgttatctcttaatgacaaccttgtttcttaaggtttatattttggagtttacgtagtg

SEQ ID NO: 39141 - DNA, 289 bp, Glycine max
  Clone ID: LIB3065-025-Q1-N1-A2
tcattcacgagattgaggcgggggttgatttggaagaaacccagctaaggtaacatcatttctgtgatggtgtacttggctccggtgccaacgttttaccggatttccaaaaggaatggcacggacggtttcaactcgctgccttcctggtggtcattaatgagttctatgctttggttatactacgccttcctaaaaattcatgacggcgttgttccccttattccgatcaactcgatcggatgtgtcatagagctcatctacattctcacctacattaaatatgcgc

SEQ ID NO: 39142 - DNA, 316 bp, Glycine max
  Clone ID: LIB3065-025-Q1-N1-A3
ggcgtttgtcccatttgtggattcgtgctgataaaagcgtggaaggaatcagcattgcagtggtgacatggaagtcatattggggggcatggcttctctggaggatgagatttcatggttcaagacagaagccaacaagtggggtatttcactttctgacgttgttcctcagcaggctaacaaaaactattgtgggttgctggaaagtttaatgagtccagacgcggaatatactgtggctattacagcattttgggctattgaaacggcgtatcaagagagctttgccaactgcattgaagaaggttccaaaacc

SEQ ID NO: 39143 - DNA, 319 bp, Glycine max
  Clone ID: LIB3065-025-Q1-N1-B3
cgctgctggaggcacatcaatgaccctgaatggggtctgtgcaagtacaggggttgcaatacacagttgcttgactgttgctgaccaatacgatttccagattaacatacataccgacaccctaaatgaagctggatttgtcgaacatagcattgcagcatttaaaggaagaactattcatacttaccacagtgaaggtgcaggtggtggtcatgctccagatttgatcaaagtttgtggtttgaagaatgtattgccttcataaccaaaccgaacacgccctttaacactcattactatatatgagcatcttgacatg

SEQ ID NO: 39144 - DNA, 252 bp, Glycine max
  Clone ID: LIB3065-025-Q1-N1-B4
ggagaagggaaggtgagtagtaatggtcatggatgttgcggatcagggccaggctatgcttccccactggaagccatttctggtcccagagagtctctcatttatgtaacctctgtctacacagggaccggaatagagaagccagactatttggcgacagtggatgtggatccaaactctccaacttattccaaagtcatccataggcttcctgttccttatttacgtgacgaattgcatcacacaggctgg

SEQ ID NO: 39145 - DNA, 287 bp, Glycine max
  Clone ID: LIB3065-025-Q1-N1-B6
cgatctagggacaagggaaggtgagtagtaatggtcatggatgttgcgaatcatggccaggctatgcttgcccactggaagccatttctggtcccagagagtctctcatgtatgcaacctgcctctacacagggaccagcctagagaagccagactatttggcgacagccgatgtggatccaaactctacaacttattccaaagtcatccataagcttactgttgcttatccaggtgaggactttcatgacacaagctgttatccatgcaaatctcgccatggagac

SEQ ID NO: 39146 - DNA, 270 bp, Glycine max
  unsure (1)..(270): unsure at all n locations
  Clone ID: LIB3065-025-Q1-N1-B7
gtcgacctctgtcaatcagcatgggaaatgcaattagggtgtctcaaaagtcggatagccaagctacctttgaccttgtctgaatcagaagcaaaagcttctctcgagtcagatattgagtgttttataagtgaaaagattatacttgccaacaaggtgatagtgaagcatgctgtcaccaaaataagagatggtgatgttcttctaacttttgggtcttcatctgctggtgaaatgatactatngcatgcacatgagttgggaagacag

SEQ ID NO: 39147 - DNA, 200 bp, Glycine max
  Clone ID: LIB3065-025-Q1-N1-B8
gtagcagaccaagctagctagctagcacgcaagcacagaggtggaggcaaagcgaggccatgccctcatgtgcttggcacgtgtttcactcttcctctgcgctctaaccctatccgctgctcacggaagcaccacggttcaagacatcgcgagaaagttgaaactcggggacaacgagcttctgcgcacggagaagaagt

SEQ ID NO: 39148 - DNA, 326 bp, Glycine max
  unsure (1)..(326): unsure at all n locations
  Clone ID: LIB3065-025-Q1-N1-B9
caaataattaattaaattcctcgtggaatcttgttgaagccatgtctacagcggtcaggtcatcaagtgcagagctgcggtggcatgggaacagggaagccactatcgatagaaaccatagaagtggcaccaccccagaaaggtgaagtgcgtttgaagatcctcttcaactccctntgccgtacagatgtttactggtgggatgctaagggccagactccgctgtttcctcgtatcttatgccacgaagcttcngngattgtggagagcgtgggcaaaggtgtgacacatctgaaaccaggtgaccatgctctcccaatattcac

SEQ ID NO: 39149 - DNA, 113 bp, Glycine max
  Clone ID: LIB3065-025-Q1-N1-C1
ttagggaaagccttaaaattgtttttcttactagagttgatcagttttacagtagctttactggcgtgcattcatcggatcttatatgatcattccaagttatcacgtctcta

SEQ ID NO: 39150 - DNA, 166 bp, Glycine max
  Clone ID: LIB3065-025-Q1-N1-C11
ttaaggaatacgcccgtgtcactgttttcaaacacaccctcaagcggaacggctccacttgccatcttactcaccttatccccaaatgatcatgtcgttcaagggaagggagcaattggatttgcatttccgggatgtcctgagacgtttgagaagccacaacagc

SEQ ID NO: 39151 - DNA, 303 bp, Glycine max
  Clone ID: LIB3065-025-Q1-N1-C2
gtggtagtggacgtggtggtttacccaccactgcttgagttagttctgcagttaacaatcgctcctcagatatcaacaaaaagattcgcacagcacttgggaaaggtaagaaaattgtttttcttaccagagttgatccttttccagtagctttactggctgttctttttggcgttaagaatgaaattctgagttctaacgccactaaccctatgctgacgcgacttcttgagaactgtaagagtctcaaatatctggttgatgagtgtccctttgcatttgtgaactagtatggtaatattt

SEQ ID NO: 39152 - DNA, 89 bp, Glycine max
  Clone ID: LIB3065-025-Q1-N1-C6
gtggtagtggacgtggtggtttacccccactgctcgaagtacttctgcacctaacactgggtcctcatatatcaacaaacagattccca

SEQ ID NO: 39153 - DNA, 219 bp, Glycine max
  Clone ID: LIB3065-025-Q1-N1-C8
cacaatggcttaactagcagctcggccgattgatcacatgcattgaataaccctaaacttgagctccttccttgaccgctcaagtgccacctcacagtgtccatgtccacacaacatcacaccgctacgaagctggcgtcgtcccccccggagcccgtttcgaaccgccgcgttatgaagccgtcgtcaaagcgccctccatttaccattccgagagag

SEQ ID NO: 39154 - DNA, 244 bp, Glycine max
  Clone ID: LIB3065-025-Q1-N1-D12
acaattccttcacttgcagcactgttgcatcatcatcttcattgcaaaacctaaacttcaccttcaaccatgaccacacaagtaccacacacagtgtccaagtccacacaacaacacaccgctacgaagctggcgtcgtcccccccggagcccgtttcgaaccgccgcgttatgaagccggcgtcaaagcgccctccatttaccattccgagagaggtccaacgacttcccaggtcctcgccgt

SEQ ID NO: 39155 - DNA, 288 bp, Glycine max
  Clone ID: LIB3065-025-Q1-N1-D2
cacaagggtcgacccaacaacttggcccattggtcacaggcccacaattcctcttttcttgtgcaccttccttccttgttcaaaagggtcttcctagaaacactcaaggtgtggctgggttaggccatgcaccaatttctcttccaaaccaactcgcttcccactttggcctacaacgccaattcaccacttgcctttctcgctaccctacttcaaagggtgctataatattcggggatgcacctaacaccatgcgacagtttcaaaaccaagatattttccacgatt

SEQ ID NO: 39156 - DNA, 312 bp, Glycine max
  Clone ID: LIB3065-025-Q1-N1-D3
acttgtgattgatgataacacaaattccctcagaactgggcatgtctattaggtgtgaaaacaacaccacgcatacagcaagatggccacttccgacagtaacatgctactaaattatgttccagtttatgtgatgctcccactcggagttgtcaatgttgacaatgtttttgaagacccaaatggccttaaagaacagctcttgcagcttcgagctgcggctgttgacggcgttatggttgatgtgtggtgggggatcatagaactgaaggggcctaagcagtatgattggagagcctacaggagtttgtt

SEQ ID NO: 39157 - DNA, 256 bp, Glycine max
  unsure (1)..(256): unsure at all n locations
  Clone ID: LIB3065-025-Q1-N1-D4
ctctagcctgatggaatctgaatctcttcatccgacctagacatattaataatacgagctggcaatccagtatgggtcaacgctacctgacatctgaagtgctttgcttttggtatcaatgcctcgaacagccagaggaactcccttgcgngctcgaaagacaccgtgataagccagatacctagtcaagtgcaggagcttgacgtccctgcgtctgcataagatattgagaacctcataaagagccatggtgagt

SEQ ID NO: 39158 - DNA, 372 bp, Glycine max
  unsure (1)..(372): unsure at all n locations
  Clone ID: LIB3065-025-Q1-N1-D5
ccttcttcatctgcaccacgaaacttacctagttcctggtcctgtgttctccttgcagctccaaaattctatgtggtggtggagatggtgatgattactgcttggatcactgaccttttcgcttgtatgggtggttgttttggatgctgtgtgaaacccacaccaattattgccgtggatgagccagcaaagggactaagaattcaggggcagacagtaagaaaccacacatatcagatggtttctggagttcaagcacttgtgatctggatacagcaacattcaatctcagagaagtatctcgtctgtcagtacatcaaatcanattctctatcatagcngtggaacttctacccaggggccaaatctgat

SEQ ID NO: 39159 - DNA, 248 bp, Glycine max
  Clone ID: LIB3065-025-Q1-N1-D6
ctcatggcgggaggcatctacactgtcttgttgcaacctggtcatggttatctattgtgttggactgctgtcatggggggaaataaaccggctcatattgggacttacctctcatagagaaccaacgatgagaaactgagaaaccgttgtggaccagctcaaatgcctaatgctctgctcttgccttctagtaaggaaggattaactttcagaggaattccaaactagttccctatctgaagaggttg

SEQ ID NO: 39160 - DNA, 249 bp, Glycine max
  Clone ID: LIB3065-025-Q1-N1-D7
actagcgatagctgataagagagataccaacaggactggggaaatatgataagttgagattccctttgaagaaaagatggcatcccataggcaaagctatgaagctggtcaaactaagggccgaactgagacgaaccagacgatgggcaatattggagagaaggctcaaggctgcaaaggagaagacccaggaaatggcccaagctgcaaaggagaagacccaaccaaacagcccaagctgccaaggac

SEQ ID NO: 39161 - DNA, 313 bp, Glycine max
  Clone ID: LIB3065-025-Q1-N1-E2
cgagcttaattattaacacttccttagttcaatatggggaaggccttcactctctctctttcttccctttgcttgctactcttgtcgagtgcatgctttgctattagctccagcaagctcaacgagtgccaactcaacaacctcaacgcgttggaacccgaccaccgcgttgagtccgaaggtggtttgattcaaacatggaactctcaacaccctgagctgaaatgcgccggtgtcactgtttccaaactcaccttcaaccgcaatggccttcacttgccatcttactaaccttatccccggatgatcatca

SEQ ID NO: 39162 - DNA, 267 bp, Glycine max
  Clone ID: LIB3065-025-Q1-N1-E3
acgtggccatccattacaccatccaaaatctcagattaggaacactcgccatacccgttaacaagcctggtagatttgagagtttcttcctatctagcactgaagctcaacaatcctacttgcaaggattcagcaggaaccattttagaggcctcctaccattcccaaattcgaggagataaacaaggttctgtttagtagagaggaagggcagcagcaaggggagcagaggctgcaagagagcgtgattgtggaaatctcgaagga

SEQ ID NO: 39163 - DNA, 186 bp, Glycine max
  Clone ID: LIB3065-025-Q1-N1-E5
acagataaaaaattaatataaacaaaaatccaaaaaataaaaagaaaatataaaaacacgagtataatatttaaaaaataaaaatgaataacactatcaatatggataaattactactaaataaaaaataggccgtcccccacctattgaccttgtatcccctgaatttaattccgaaccctttcc

SEQ ID NO: 39164 - DNA, 218 bp, Glycine max
  Clone ID: LIB3065-025-Q1-N1-E6
agagcttaactattaacacttcattagttcaatatggtgaagggattcactcctggtctacctcacctctcatgaatcgttttgatacgagacatccttgttctcaagctcatacagtatcagccagggcttacccaacaccctcatcactttgtaacctgaccaccgtttcaagccctaacgtggattgattcaaacctataactctcaacaacctg

SEQ ID NO: 39165 - DNA, 186 bp, Glycine max
  Clone ID: LIB3065-025-Q1-N1-E7
acctggctatacacgacaccatccacacactaagatgaagaacggtttccatactccactacttgctagccctatctcttacttgctctcttcttatcttcttatccgactcattcacccgtacggaacccaataaaccttgttgttctacccgttcaaaatggatgggttccacagggggctcca

SEQ ID NO: 39166 - DNA, 257 bp, Glycine max
  Clone ID: LIB3065-025-Q1-N1-E8
taggccggcgattacacttgctgataactacgtttacaatagggtatatagtttattaaataacgttgaagttgtatcaccatagatcgtcttatcaagtgtaaatctgcaccgacgattatgctgcttttgttcttttccctccttttttgggaatctccaactagctagttgtagtgctatagccaaaattccattaaatttgatggattgcacgagtaatgtgcatttctcctccatcttccactctctctatg

SEQ ID NO: 39167 - DNA, 225 bp, Glycine max
  Clone ID: LIB3065-025-Q1-N1-F1
gggattttgtcaccagttggtcctcgtggaaggctcttgaggagattgctttcttggataggacttattccacctatgccagaaacaccttttgaggttcacaatgataataacgctccttgaaccattcctaaggcctacttttttatcaaggatatcactaagtgatatatggagacctgcatcaaggaaatactgcagaaatgatacttggaaaatgttgaa

SEQ ID NO: 39168 - DNA, 194 bp, Glycine max
  Clone ID: LIB3065-025-Q1-N1-F10
agaaactcgaatccagtgctcactacagtgctgattgtgggaaagactaaagctattataaaattctgagccatggatatctagggaaacttcatgcaattaggttaactcaaacggcctgaccttaaaatgaagtggactcttttagctatgccttttattgtccgacttatgcagctccattgagagatgtt

SEQ ID NO: 39169 - DNA, 265 bp, Glycine max
  Clone ID: LIB3065-025-Q1-N1-F12
atggcctccacttgccatcttactcaccttatccccggatgatcatcatgcccaagggaaaggagcacttggagttgcaattccaggattcctgagacgtttgaggagccacatgaacaatcaaacagaagaggctcaaggtcgcagaagcagcagctacaggacagtcaccagaagattcgtcacttcaatgaaggagacgtactcgtgattcctcctggtgttccttactggacctataacactggcgatgaacccagtgttg

SEQ ID NO: 39170 - DNA, 247 bp, Glycine max
  Clone ID: LIB3065-025-Q1-N1-F3
aagaaacataccgaaggagaacatcatggtggtgctaaagcggtgtcaggtgctactgttgctcgtggtgggagcttctcgcaccgacctgagcgctgagcaaacgtgaccatgctcataggaagggatcatgatgagcacccaaaaccatgctgagacctcatgaatgtgctctcgctaatggcctcataaaagcactggcgaagttatacggcgaaattcatgcaatctacattgtaaaagctgt

SEQ ID NO: 39171 - DNA, 228 bp, Glycine max
  Clone ID: LIB3065-025-Q1-N1-F5
aagaaacataccgaatgagagcatcaaactcttcttcggggatttccattgcgaagcgttactttttcttcttctttctcttcattttcttcgctcttcgatcttccgtccggggactgctccgaataccaccaccaccactcgccgatggccacgatcggaggcttacacgactcccaaggctctcaaaacagcgtcgaaaccgaagccctagctcgattcgccgta

SEQ ID NO: 39172 - DNA, 260 bp, Glycine max
  Clone ID: LIB3065-025-Q1-N1-F6
aacgatgagtatgaagaacatcatcgtggtgctcaaggggggttagttgcttcttttccttgtgggggttacagctgcacgcatggaactgagctgcttcaaaagggatcagtcattaagttacgatgatgatgagcatccaaaaccttgctgtgatctctgcatgtgctctcgctcaatgcctcctcaatgcacttgtgaagatattaggctgaattcatgccactcagattgtaagagctgtttgtgcacacgctcac

SEQ ID NO: 39173 - DNA, 216 bp, Glycine max
  Clone ID: LIB3065-025-Q1-N1-F7
gaagaagatgggtttgaagaacaacatggtggtgctaaaggtgtgtttggtgctacttttccttgtggggggtactactagtgccaacttgaggctgagtaagcttggcctgctcatgaaaagtgatcatcatcaacactcaaatgatgatgagtcttcaaaaccatgctgtgatcaatgcgcatgcacaaagtcaaaccctcctcaatgccgctg

SEQ ID NO: 39174 - DNA, 261 bp, Glycine max
  Clone ID: LIB3065-025-Q1-N1-F8
gtttcagtatttaaaaagtgagaaaagaaaggtatgtgggcatatgttagtaattcgttggaagtaacgctagcttcagaagtcgatggtttgctttcttcgcaccgtgtccgcccgcctcttctcctcctcggtttgccactgaatgcagctgatatagtttacagaagttgtgaaggaccaacagagcacttaagagagtttaactgagagctgcagggatggctcatttggatgtttgtcatcaagtcaggttcattg

SEQ ID NO: 39175 - DNA, 165 bp, Glycine max
  Clone ID: LIB3065-025-Q1-N1-G11
taaaattcttccaccaagttatgggtttccttgtgttgctggttttctcctcttaggtctctcttctagttccagcatatcaactcatgttccatattggaccttgacctaaccaagtttaccacacagaaacaggtgtcttcactgttccaactatggaagagt

SEQ ID NO: 39176 - DNA, 269 bp, Glycine max
  Clone ID: LIB3065-025-Q1-N1-G4
caccttttcttttcccacacaagtacgtttgctctagatgcaacatattacattggaaccatttgctttcttatgaggcctatcctgaatccaatggaaatgacatcggaattccttggggaattccaattccacattttcaagaaataaggaggcaaaaatgttcatatatgaattggaattattggttttcttattaggcctatcctgatgccaaaggaaatgagatcggaattcctcggggaattccaattccaaattttcaagaa

SEQ ID NO: 39177 - DNA, 273 bp, Glycine max
  Clone ID: LIB3065-025-Q1-N1-G5
gccaccttttatcaccaccgtttgttgccaatgtcacgggcgagcaattacccaaggctcgtggaggaagtgggcgtgccttcgtgacctttcttgctgggaacggtgattacgtaaagggtgtcgtgggtttggccaaaggactgagaaaggccaaaagcatgtaccctttggtggttgctgtgttaccagatgttcctgaagaacatcgtgagattctcaaatcccaaggttgcattgtcagggagattgaacctgtgtaccttcctgaga

SEQ ID NO: 39178 - DNA, 280 bp, Glycine max
  unsure (1)..(280): unsure at all n locations
  Clone ID: LIB3065-025-Q1-N1-G6
tactacgatgcctgcacgcctactctagatgatcctctcgctcaagcacctntcctcattctacacaaatacggatgctatagaggcaaccacttacattgccaccaatggcttcttcttgtttattttgctcccataccattagcaacactgtgttagatactcagatcccccctcttttctctatgccattcccccagctgggaagggtgtactggaatcaaagtgtacctgtggggtgcaaatggattcctatcctggggttggccttttaaggatg

SEQ ID NO: 39179 - DNA, 372 bp, Glycine max
  Clone ID: LIB3065-022-Q1-N1-G3
atccttttatattactatagtttaagaaaggttcaccaattgtttcaggtgggttgaaatgatggctcctgttttctcaagagctgcttggcgttgcatttggtatatgatccaggtgcacccttctctcatttaatgttactgctgaagaattactataaacattgctttgctaagattactttatttattcaccattcatggtttactttattttacagaatgacttgatccatgcatggggtctagatatgcagctaggctactgtgctcaggcatgttaaaagctccttaatttctcgtttcagtttgatgagttccatttctacatgttgaatattcccctgatgccttaatcctcgttaatttttt

SEQ ID NO: 39180 - DNA, 445 bp, Glycine max
  unsure (1)..(445): unsure at all n locations
  Clone ID: LIB3065-019-Q1-N1-B5
actagttcaatatcctagtataccttaataaataatttaagagactatgatgagagcacggttcccattactgttgctgggacttgttttcctggcttcagtttctgtctcatttggcattgcttactgggaaaaagagaaccccaaacacaacaagtgtctccagagttgcaatagcgagagagactcgtacaggaaccaagcatgccacgctcgttgcaacctccttaaggtggagaaagaagaatgtgaagaaggtgaaattccacgaccacgaccacgaccacaacacccggagagggaacctcagcaacccggtgagaaggaggaagacgaagatgagcaaccacgtccaatcccattcccacgcccacaacctcgtcaagaagaagagcacgagcagagagaggaacaggaatggcctcgcanggaggaaaaacgcgga

SEQ ID NO: 39181 - DNA, 333 bp, Glycine max
  Clone ID: LIB3065-019-Q1-N1-B6
gagggtactaatatgaacagaatctcctctcaacacctttgccttgctgcagttcgcaactgcaactgcactcaaatataaatatatatacatatatatatatatatatatatatgtattacttcatggtcacacatagttaagtttattaattactaggtagctggttttgaatagggtagttggtagttatagttgttgtcccagatatggaagaagcaggtttaggagattgttgttcctcgaattcgacgattacgaggaagagcgataagcgaaagcagcaacaccaacaacaagagaagccatacagaggaataaggatgaggaagt

SEQ ID NO: 39182 - DNA, 422 bp, Glycine max
  Clone ID: LIB3065-019-Q1-N1-B7
atatcatgttaattttgtaaattggctatttgtgatttgtccatacgtgcttgccccaattcatttttctaatgatttgagcatacccgcaactcttagttcttgaatagcacatttatatgtattttttttcactttattttctgtacgggcaactcaatgctctaagaacttcaaagcattgtactaggaagaagctcgttatactacattatgagtttctcctttgattcctcattttaaaataataataattattataatttattttgtaaattcatttcctatgtagttccagttagttttttttttttttggaaaacattaccaggtcccctgaaggaaggttagtggaaatgttaaaaaaaacaggagaaatttgtataattgtataaaacttcagggaaattgaggtaatttac

SEQ ID NO: 39183 - DNA, 441 bp, Glycine max
  Clone ID: LIB3065-019-Q1-N1-B8
atgctctcccaatattcactggggagtgtggtgaatgcacctattgcaagtctgaagagagcaacctgtgtgagcttctcaggatcaacactgacagaggagtgatgctcagtgatggcaaaacaaggttctccaaaaatggacaacctatttaccacttcgttggaacctccactttcagtgaatacactgttctccatgaaggatgtgtcgccaagatcaaccctgctgcccctcttgacaaagttgctgttgtcagttgtggattctgcacaggttttggggctactgtgaatgttgcaaagccaaagcctaataatactgttgctgtatttggattaagagctgttggtcttgctgcctgtgaaggggcaagggtttctggtgcatctagaatcatcggcgttgatttacttaccaatcgatttgaacaagccaaac

SEQ ID NO: 39184 - DNA, 347 bp, Glycine max
  Clone ID: LIB3065-019-Q1-N1-B9
cacaacctggggtcacgtgtttgggtgttatgaatggaggaatgcaacctagagctgaaattaccttaggggcacgtcagttggaagagaacctggtggtgttcgatcttgcaaggtcaagggttgggtttagcacctcatcactgcactcgcatggagtcaaatgtgctgacctcttcaactttgccaatgcatgatgagccaagatcgcgagactttttataatatgcttatttataattaagcaagcatctactacatgttatggttaataaaagtaataatgtaagaataaagactttgaactaaataataatatgaacgattctctttcgttggtcaatgaa

SEQ ID NO: 39185 - DNA, 379 bp, Glycine max
  Clone ID: LIB3065-019-Q1-N1-C11
ctcgagccgaatcggctcgagcggctcgagaaatgaccaagttcacaatcctcctcatctctcttctcttctgcatcgcccacacttgcagcgcctccaaatggcagcaccagcaagatagctgccgcaagcagctccagggggtgaacctcacgccctgcgagaagcacatcatggagaagatccaaggccgcggcgatgacgatgatgatgatgacgacgacaatcacattctcaggaccatgcggggaagaatcaactacataaggaggaacgaaggaaaagacgaagacgaagaagaagaaggacacatgcagaagtgctgcacagaaatgagcgagctgaagagccccaaatgccagtgcaaaacgctgcagaa

SEQ ID NO: 39186 - DNA, 294 bp, Glycine max
  Clone ID: LIB3065-019-Q1-N1-C2
agttcagtgtgtcgtttaaaaatgtcgcagttgctggataaagccaagaacttcgtgtcggagaaagtaaatgatatggccaagccggaggcgagtgtcactgacgtggacttcaagcgcgtgagcaaagataatgtcgagtacttggccaaggtctctgttcgtaacccttattcaacttccatacccatttgtgagatcaactactctttcaaaagcgcatgcagggagatagcatcagggaaaattccagacccaggatcgttgaaggcaaaggacacaacaatggtggat

SEQ ID NO: 39187 - DNA, 447 bp, Glycine max
  Clone ID: LIB3065-019-Q1-N1-C3
atagcatttggaaatttggctgatgacaccatcaattttgaggcttttccccacaagctggtgcagtttggagagattcaggaaaaagttgtattgaaattttcacaagaggaatttcttacagcttggtcaactcaggtgcgtcctgcaacaactctgttggctgatgggtgtccatatttgtatgctatggtgcatgatagttcagtgtctacaataccaggtgattttgtcattggtgttaagttgacaaccataaacaatatgtgtgcatatgggctcaatcctggtatttcacgttctcgtcttttgggcaccattcctcagtctatttcacagcaaactgtttggaatcaaatggcaacagtgagaacaccattgaattttgattctagcaagcagagcttttgtcaattttctattgaccttctcggtggaggaatttta

SEQ ID NO: 39188 - DNA, 408 bp, Glycine max
  unsure (1)..(408): unsure at all n locations
  Clone ID: LIB3065-019-Q1-N1-C6
cttaattattaacacttccttagttcaatatggggaagcccttcactctctctctttcttccctttgcttgctactcttgtcgagtgcatgctttgctattagctccagcaagctcaacgagtgccaactcaacaacctcaacgcgttggaacccgaccaccgcgttgagtccgaaggtggtttgattcaaacatggaactctcaacaccctgagctgaaatgcgccggtgtcactgtttccaaactcaccctcaaccgcaatggcctccacttgccatcttactcaccttatccccggatgatcatcatcgcccaagggaaaggagcacttggagttgcaattccaggatgtcctgagacgtttgaggagccacangaacaatcaaacagaagaggctcaaggtcgc

SEQ ID NO: 39189 - DNA, 271 bp, Glycine max
  Clone ID: LIB3065-019-Q1-N1-C8
aaaggccccagctcaattattaattctataccaccgcactactgacgggcatttgactaattgtcactgaagcctgagcttgctacacccgacaagaccatgactataccattcgctcccccctgcacaactagtgctaccctatcaccctcaaaccctggcaatcaccgcatacctgtccgtcttaatgccttcggaaagcaacatgctaccttatacatcatgctctaaaaatctcaggtctcactacgtccatacttacactctaccc

SEQ ID NO: 39190 - DNA, 415 bp, Glycine max
  Clone ID: LIB3065-019-Q1-N1-D1
aggctcttcaaaagatacggcaaagttgatagagttgaaatgaaacctgttttctgtggaaacctggatttcgacgcgcgtcaatctgacgtggagaggctcttcagaagatacggcaaagttgatagagttgacatgaaatccgggtttgcttttgtctacatggaagatgaacgtgatgctgagtatgcaatcagaaggcttgatagaacagaatttggtagaaagggtcgccggattcgtgttgagtggactaagcaagaacgtgacagtagaagatcaggtggtgattccagaaaatcttcatctaattcaagaccatccaaaactttggttgttataaattttgatcctgttcatgccaggacaagggatctggaaagacattttgattcctatgggaaaatattaaata

SEQ ID NO: 39191 - DNA, 230 bp, Glycine max
  Clone ID: LIB3065-019-Q1-N1-D11
cacacaactactacaagtactttcttacaatcaaaaccaacaaccactatggcaaggtatcaaaaacacttccatgatcaaggtccccagggtgaccaattttgcaaccgttataagcaaaccgaccaataccggaacccctgttcatgctgctaagtgcacctatgtagccaccaaaactgctgctggtggttacagtgatgacattaataagcaacattgattccacc

SEQ ID NO: 39192 - DNA, 415 bp, Glycine max
  unsure (1)..(415): unsure at all n locations
  Clone ID: LIB3065-019-Q1-N1-D2
gattactatagtcaacagcagcagcaaaatcctgcaccttcatctgatgggactgcttacaattacagccagccaccttcctctggttataaccaaccgggacagggctatgctcaagatggctatggtggatatcatgcgccaccacaattagggtatggtcagccaccatcatattgatcagcagcaaggttatagcttaactccccaacttatggtagcaacccagctcaagagggccacactgccaactatggatcccagggggattcaacccaagctccacctgcccagcctccaagtcaaggttatggtacaagccaacaacctagcccaaatgctgccaactatccaccacaagctcagccaggttatggcgtgcccncaaccttccaaccagcagcttatggtagtc

SEQ ID NO: 39193 - DNA, 430 bp, Glycine max
  unsure (1)..(430): unsure at all n locations
  Clone ID: LIB3065-019-Q1-N1-D3
gtcaacggcagcctcatcctccttctccaccctcttctccttggtcctgcctccaaagccacaccctcctcccatcatcactcgcttgccactccagaagctccgtgccaagcatcaggaccaggaccaccactcgtcggcggagctgtccgccgtggcgaacccgtcccacgcgcatgcgaacacgctcttcttacggtcggcgtacaacgtgcaggtggcggtggacgagaacgagccggaggagacgctccttacccggttccggagagaggtcatgacagccggagtcattcaggagtgcangcggagacggttcttcgacatcacgcaggaggaaacgaagcgcaagaaccgcgaagctgccaagcgtaagagcagaagccggcgctctcaatcgagattgtaaccacacaacaagccggatgtt

SEQ ID NO: 39194 - DNA, 389 bp, Glycine max
  Clone ID: LIB3065-019-Q1-N1-D4
tgctagttttgatggtttgattaccaagcaagttttgagcaaaatggcagaaatgataaacagtctttgtggtggtgatgcaaaattgatgcgtgaaaggacacacctgctgttggcttgttgttcaaggatggcaatttgtaagaaagatgtttggagagttgaatgtggaatcccttctggatttccgctcacagttatttgcaatagcatttttaatgagatgctcattagatatagctatgaaaaattactgcgccaggctagagctccaagcatgtttttacaatccttcaaaaattttgtttctttgtgtgtgtatggtgatgataacttaattagtgttcatgaatatgtcaagccttactttagtggttctaaattgaaaa

SEQ ID NO: 39195 - DNA, 270 bp, Glycine max
  Clone ID: LIB3065-019-Q1-N1-D6
ctcgagccgaataagggttcctctttccttctctagcacaatttacaatctcaatggctggaatttgctgtggtgttgttggagaaggtgacactccggctccactcgagcccactcctcgccccttcaagcgccggaatttggacatcttacctttaaaatatatcgccgacatgcccatgccgacgccgagggtttacggaagcgtcccaagctcaacctcagggactgcgataacgcaattgaaaattgcgacgaatgcactggaca

SEQ ID NO: 39196 - DNA, 427 bp, Glycine max
  unsure (1)..(427): unsure at all n locations
  Clone ID: LIB3065-019-Q1-N1-D7
agttattatcaaataattaattaaattcctcgtggaatcttgttgaagccatgtctacagctggtcaggtcatcaagtgcagagctgcggtggcatgggaagcagggaagccactatcgatagaaaccatagaagtggcaccaccccagaaaggtgaagtgcgtttgaagatcctcttcaactccctttgccgtacagatgtttactggtgggatgctaagggccagactccgctgtttcctcgtatcttaagccacgaagcttcggggattgtggagagcgtgggcaagggtgtgacacatctgaaaccaggtgaccatgctctcccaatattcactggggagtgtggtgaatgcacctattgcaagtctgaagagagcaacctgtgtgagcttctcangatcaacactgacaaangagtgatgct

SEQ ID NO: 39197 - DNA, 424 bp, Glycine max
  Clone ID: LIB3065-019-Q1-N1-D8
aaagcttaagcttttgaccaaagccttttcctggatgtaacatggaaagtccccactctgtgaacagtccaagaagaaccctcagcctatcgaaaaagcagagggcaactgtatccttttttgaccccgatgacataacctctggctttggattgtctggcgatcatggccctaagccttctgaagtttatggttttgtaggttctattaccactgttgatgctacagttattttcttggtatgggcatatgctccagaatcatggctacaatctgttggcatctcttactatcctagcagatattgcgctctagcagtaccaacttatgtgatggtgaccattgtattggtgctgggattctacattggccttaacttcatttcaacaccttcccctgcatctttaaacacttgtttcgatga

SEQ ID NO: 39198 - DNA, 231 bp, Glycine max
  Clone ID: LIB3065-019-Q1-N1-E11
cggctcgagataaaaattttcttctttatatccatataaattgcatggagtccaggttatttattcataagaaccaattccattgtttaaaaatcaagaattcttaagtaatttaagttactccatactcatataaaattttcaaaatcagtgcacatactagtactgatcaaccattatatcttttattcagtttaaatctattagaattgaaaaactttaattttccta

SEQ ID NO: 39199 - DNA, 423 bp, Glycine max
  Clone ID: LIB3065-019-Q1-N1-E3
gaatgcggacagatggagaaaccaagtttgtgttgcacaaaatagaagcgattgatgaggctaacttgggatatagctatagcgtacttgggggagatgggttgccagacacagtggagaagatcacattcgaatgcaaattggctgctggcgccaacggagggtctgctgggaagctaactgtcaaataccaaaccaaaggagatgctcagcccaaccaagacgacctcaaaattggcaaagccaagtctgatgctcttttcaaggccgttgaagcttaccttttggcccatcctgattacaactgatcctcttcatcactattcagtcagcaacgaccttgctgtatattatatacaagagttttcttgccttgtgtggagctttatccaatcactgtgtgtggtgtgtgcttaagtaaaa

SEQ ID NO: 39200 - DNA, 269 bp, Glycine max
  Clone ID: LIB3065-019-Q1-N1-E6
gcaagtgttgatttgcagcgcactcatcgtattagaggaatgattaaaatggtggccacagttggtattcctgagaatacaggtatagcattggcctgtgctatgaatagttcttttagggggcgcgccagttctgatatttacaccatctgctctcaagactgtgaattgtggaatcctgcttgcacaaaagcaatgactatgtcatttaatccaaacccgtgttctgatgcatggagtttggaatttttgacgcgtaccggatttca

SEQ ID NO: 39201 - DNA, 396 bp, Glycine max
  Clone ID: LIB3065-019-Q1-N1-E7
gcatgtgtacgatttgcagcgcactcatcgtatcagaggaatgggtgaaatggcggccacagatgggattcctgagaatacacgtatagcattggcctgtgctatgaatagttcttttaggaggcgcgccagctctgatatttacaccatctgctctcaagactgcgaattgtggaatcctgcttgcacaaaagcaatgactatgtcattgaatccaaacccgtgttctcatacatggagcttggaatttttgaagcgtaccacatctcattggaatatcattggtgtcagtgcgcggactgccaccctaatgcatgacgttcatgttacaattgattggtttattgcctctgaagaatgtgtacccaagacctattgtgttttaaatacacaaaa

SEQ ID NO: 39202 - DNA, 433 bp, Glycine max
  unsure (1)..(433): unsure at all n locations
  Clone ID: LIB3065-019-Q1-N1-E8
gcacgttttgattttcagcgcactcatcgtattaggggaatgggtaaaatggtggccacagttggtattcctgacaatacacgtatagcattggcctgtgctatgaatacttcttttagggggcgcgccagttctgatatttacaccatctgctctcaagactgtgaattgtggaatcctgcttgcacaaaagcaatgactatgtcatttaatccaaacccgtgttctgatgcatggagtttgcaatttttgaagcgtaccggatttcattgtgatatcatttgtgtcactgggtgaactgccaccccaatgcangatgttcaggttacaattgattggtttatttcctctcacgaatgtgttcccaggacctattgtgttttaaatacacacaattcttttgtgttaaataggtggatgggaaaactgactt

SEQ ID NO: 39203 - DNA, 265 bp, Glycine max
  Clone ID: LIB3065-019-Q1-N1-E9
cggctcgagataaaaaaagtctcctttatatctatttaaattgcatggattccattttttttatttataagaattaattcgattgtaaaaaaatcaagaattcttaagtaaattaagtaaattcagatttatataaaaaattcaaaattagtgtcattactattactgatcaatcaaaatatctatcaaaagtaaaaagcgaagagaagggaaaaactttaatttttttatggtaaaaaattcaattatacctgttatttcacaa

SEQ ID NO: 39204 - DNA, 334 bp, Glycine max
  unsure (1)..(334): unsure at all n locations
  Clone ID: LIB3065-019-Q1-N1-F10
cttaattattaacacttccttagttcaatatggggaagcccttcactctctctctttcttccctttgcttgctactcttgtcgagtgcatgctttgctattagctccagcaagctcaacgagtgccaactcaacaacctcaacgcgttggaacccgaccaccgcgttgagtccgaaggtggtttgattcaaacatggaactctcaacaccctgagctgaaatgcgccggtgtcactgtttccaaactcaccctcaaccgcaatggcctncacttgccatcttactcaccttatccccggatgatcatcatcgcccaaaggaaaagagcactttg

SEQ ID NO: 39205 - DNA, 411 bp, Glycine max
  Clone ID: LIB3065-019-Q1-N1-F12
cagggtttccttttctcacttggagctcccaattgaaacccaatttcgtaatccctccacactttctcgttcggaaaactcgcgaattggaaagacatcgacggctccgcgtgatacgttctcttcctgtctggttatcaatgttggctattagtgcaattgcatctttgcccgtattaccaccagtcagaagaggtggccactgcattgaacagaatgttgtttccacattgagctttccaagacgactacagacaactaataattcaatatctctgagtagtacacagtttccattcggtagaagaagctcgtctacgcagcccgcaactattatatgggctggagctttgaatgccagaagtggtgcaaagcaaacccaaactggtacttggcaggcttctaccatta

SEQ ID NO: 39206 - DNA, 417 bp, Glycine max
  unsure (1)..(417): unsure at all n locations
  Clone ID: LIB3065-019-Q1-N1-F5
gttgcagaccgagctagctagctagcaagcaagcacagagatggaggcaaagcgaggccatgccctcatgtgcttggcacgtgtttcactcttcctctgcgctctaaccctatccgctgctcacggaagcaccacggttcaagacatcgcgagaaagttgaaactcggggacaacgagcttctgcgcacggagaagaagttcaaggttttcatggagaattacgggaggagctactccacagaggaggagtatttgcgccgtttggggattttcgcccagaacatggtcagagcggcggagcatcaagcgctggaccccaccgccgtccacggcgtcacgcagttctccgatctcaccgaggacgagtttgagaagctctacacntgcgtcaatggcggcttcccgtcatcgaataa

SEQ ID NO: 39207 - DNA, 109 bp, Glycine max
  Clone ID: LIB3065-019-Q1-N1-F6
tgtaaatgtaggcttgttccggttttggagcttatgtgaaatgctataaagcacaaaaatgtatagtagtatcccattttttgtgtagaatagaactttttttttcgtc

SEQ ID NO: 39208 - DNA, 444 bp, Glycine max
  Clone ID: LIB3065-019-Q1-N1-F8
gttttagaacatggtgggattgccactgatgatgattatccttacagagctaaagagggtagatgcaaagccaataagatacaagacaaggttacaattgacggatatgaaactctaataatgtcagatgagagtacagaatcagagacagagcaagcgttcttaagcgccatccttgagcaaccaattagtgtctccattgatgcaaaagattttcatttatacaccgggggaatttatgatggagaaaactgtacaagtccgtatgggattaatcactttgttttacttgtgggttatggttcagcggatggtgtagattactggatagcgaaaaattcatggggagaagattggggagaagatgggtacatttggatccaaagaaacacgggtaatttattaggagtgtgtgggatgaattatttcgcttcatacccaacc

SEQ ID NO: 39209 - DNA, 368 bp, Glycine max
  Clone ID: LIB3065-019-Q1-N1-F9
cttctctgcatccaaaatgccaggtcttaccatcggagacactattcctgatcttcaagttgaaactaaccaaggcaaaatcaagcttcatcagttctgtgctgatggctggaccatccttttctctcacccaggtgatttcaccccggtttgtaccactgagcttggtaagatggctcagtatgctaaggagttttatcaacgaggagtgaagctcttaggtttatcttgtgatgatgtgcaatcccacaatgagtggatcaaggacattgaagcctacacttcaggtgcgaaagtgaataatccaataatggctgatccgaagagaggaaatattaaagcaacttaacatggttgaccctgatgag

SEQ ID NO: 39210 - DNA, 405 bp, Glycine max
  Clone ID: LIB3065-019-Q1-N1-G10
ctcgagccgaatcggctcgagaacacactctgtgaaaaagggggagtttcttattccttctagacgcttccattgatcggcgatttctgatacatggcggagcatcacgaacacgaggaagtgaagggtgagtccttgttggagaagatttctgggaagatccacgaccacgattcctcgtcttcgtcggattccgacaacgacaaaaccagcgccactgattccttcaagtctaatgttttcaggcttttcggcagagaaaagcccattcatcatgttcttggcggtggaaaaccggctgatgtttttctatggagaaacaagaagatatccgcatcgacactcggagttgcgaccgctatatgggttccggttgaattgcttgagtaccacctcctgactttg

SEQ ID NO: 39211 - DNA, 294 bp, Glycine max
  Clone ID: LIB3065-019-Q1-N1-G3
acacaaaaaaaaaaaacaactgcaaaatgcaaaattttaaacgtgccccactccacaccttcatcctttaccactatctgatgcacagatctcttatgatatcaaaaaaaataaaatattattcacctcattatatatacatcctttaaaaaatcaatcaaaaacttttaacatctaaccttttcttttttattattccttcattactctctcaactctcaatataccctttttctctctttgacgccataaaccacccttcactcatttaaaaatcaaacccttgctatataa

SEQ ID NO: 39212 - DNA, 387 bp, Glycine max
  Clone ID: LIB3065-019-Q1-N1-G5
agaaacacaggagggacacatgtgattgttactactaggttgtgcaaagtaatgagctatgatactattcagcttcttcctttgccattatctgatgcaatgattctgatgataggaagaaaaatgaaagattatccagcagatgagatagacatccttgaaaaattcaatgagaaacttggaaggttgagctttggcttgtggatgattggttcattactgtctgaacttgcaataggcccttcttctctctttgaggccataaaccaggtgtcactcattgaagattcaaactcttgctatatgagcattgcagaagggcaatggtgcaagagcaacccttttctcatgaagaccctcctcttttgtttggagactttggaaaaa

SEQ ID NO: 39213 - DNA, 363 bp, Glycine max
  Clone ID: LIB3065-019-Q1-N1-G6
ggatctagaaaccctagtagtgaaccctctctataaaacctcttccttctttcattcggtgcctattcccattttcttcctctaaaccctaaacaactctttctcttcttccttcgctcggtggttctccctcgcgtagatcgacaatggcggagacagagacgtttgctttccaggctgagatcaaccagctcctcagtctcatcatcaacaccttctactgcaacaaggagattttccttcgtgaactcatcagcaacgcctccgatcctttggacaagattcgatttgagagtttgacagataagagcaagctcgatgctcagccagagtgttcattcatattattcagacaagactaac

SEQ ID NO: 39214 - DNA, 442 bp, Glycine max
  Clone ID: LIB3065-019-Q1-N1-G7
ggatctagaaactttagtagtgaaccctctctataaaacctctgccttctttcattcggtgcctattcccattttcttcctctaaaccctaaacaactctttctcttcttccttcgctcgttgttctccctcgcgtagatcgacaatggcggagacagagacgtttgctttccaggctgagatcaaccagctcctcagtctcatcatcaacaccttctactccaacaaggagattttccttcgtgaactcatcagcaacgcctccgatgctttggacaagattcgatttgagagtttgacagataagagcaagctcgatgctcagccagagttgttcattcatattattccagacaagactaacaatacactgaccattgttgacagtggtattggcatgaccaaagctgatttggtgaacaacttgggtacaattgctaga

SEQ ID NO: 39215 - DNA, 142 bp, Glycine max
  unsure (1)..(142): unsure at all n locations
  Clone ID: LIB3065-019-Q1-N1-G8
cgatctataaaccttactaatgaaccctctctataaggcctctgccttctttcattcggngcctattcccattttcttactctaaaccctaaacaactctttctcttcttacttccctccatattctccctctcgtaaatcc

SEQ ID NO: 39216 - DNA, 461 bp, Glycine max
  Clone ID: LIB3065-019-Q1-N1-H10
ctttcaccacttgaagattctccttttcaaatttcaacctttttcccccaaaactaacaaacccctcttcttctcaatcattgcatggctcttcactgattctataataataatttcagattcgtttttcgttttttgttaccatggagttgatttcaggtctaccagaggacgtagcccgagactgtttgattagggttccctatgatcaattcccggcggttgcttcagtctgcaaaggctggagcgcggagattcactcgccggactttcaccgtcggaggagaaccaccaaacaagcccagaaaatcctcgtcacggttcagtccaagatagactccgataaaacccgaaccggtttgctcgcgaagtccaccaccaacccggtttaccggctcagcgtattcgaaccgaagacgggttcatggtgcgagttacccctgtgacccgaactcgctttc

SEQ ID NO: 39217 - DNA, 392 bp, Glycine max
  Clone ID: LIB3065-019-Q1-N1-H11
ctttctctccttcaaaatcgttgtcaatttcgcctctttctttctcaactcccttagattctctccatcgggtcttcaaaaatgcggatgagctgcaatggatgtcgagttctcagaaaaggttgcagtgaaaattgcagcatcagaccctgtttacaatggatcaaaagcccagaatctcaagccaatgctactgtgtttcttgccaagttctacggccgtgctggtctaatgaacctggttaacgcaggccccgaacatcttcgtccagcgatctttcgttcgttgttgtacgaggcatgcggtcggatattgaacccgatttacgggtctgtcgggttgttatggtccgggagctggcagctatgtcaagccgccgtgaaaacgtcttg

SEQ ID NO: 39218 - DNA, 422 bp, Glycine max
  Clone ID: LIB3065-019-Q1-N1-H12
agaagaagaagaaaagatggtgggaccagtgagacctcagtttgtgctggtttgttcttacattgttcagcttatatactcttttcatggttgttacgctatttattcttattattattctatgtttttttatttttttttttttatttttttttttttttttctatattattttatttttattttttttttttttatattttttattttttatatttatttttatttattatttttatatttttttaatattattttttctaattttttttttttgtttatatttattttatattattattttttttaatattattttttattatttttatttatttaatatttttttttcatttatttatattttatttttttatttatttttattttttattatattttttttatttaattttttttat

SEQ ID NO: 39219 - DNA, 280 bp, Glycine max
  Clone ID: LIB3065-019-Q1-N1-H3
caaataataaactaatattatcaattaatccccaaggttcgttattattaaacgatggtatttgatttgtcaaatacatcattattgtatactcttttatatgtatggcgcaacccaatttttgttttttttttttcaatttttaatctcctatccctttttttaattttggaatcgaaatatctaatctaaataatccaaaaattcactcttaatcttgacagtgatatatgttgtatatgtaaatcctagatgtaaaaataggcagacttctgcctaa

SEQ ID NO: 39220 - DNA, 225 bp, Glycine max
  Clone ID: LIB3065-019-Q1-N1-H4
agctggcataagagtattaccagctttttctgttccacaggctactgccagatcttctgaaaatgcggaatcctctgcatgatctggaatttgtgttttctttcgcttgttcgtttgtttaattcaataaaggaaattaggcatgaccctcttgtgagtatgctcttgctatttgaaaatttcacacctctttaaattgcgtatgatgtggaaggtgtgtatttt

SEQ ID NO: 39221 - DNA, 238 bp, Glycine max
  unsure (1)..(238): unsure at all n locations
  Clone ID: LIB3065-019-Q1-N1-H5
gggccgacccgacgcgaacgannaatnaagcacacaataaacttttatgatttactaatacacaccgaaacaagggattgtggcgataatagtatgatggaaccacatacataatctaatgtatactcattttatatgcatagagcaacccaaccatagctttttttttttcaattattaatatcctaaccctctttttaattgtggaataaaaatatctaatctaaataatacaaaa

SEQ ID NO: 39222 - DNA, 402 bp, Glycine max
  unsure (1)..(402): unsure at all n locations
  Clone ID: LIB3065-019-Q1-N1-H6
ctgaggctcccctcacctctctctccgaaatccccaaattgcctgtgaatgctagaaaccctaggcacgttcgatttgatgctctcccatttgcaatcaagggcgagcgcattcggttcttgcacgcaaggctggtactaccgctgcatcggcctcgatccctgaattcatcattctttctcgcaccatctttttctattccgattcgatttgttgttgttgttgttgttgttgtgtttttgtttccttccttgacgaatcatcacgatgttgatgagcaagcagaagaagagccagatccagaacgcgaagaggttgttgataagcatcaatgtgctggggagcgcggngcccattagatttgtggtaaacgaggaggagcttgtggcgcggtgatagaca

SEQ ID NO: 39223 - DNA, 199 bp, Glycine max
  Clone ID: LIB3065-019-Q1-N1-H9
aaatgtgggacctgcaccataagctcagtgacgccattcactccgtcctcagatcccactttctcactttcgtcaaatccctcaaacactacaactctccatccgaccttcccaacgccgccgtctccactgccgatgaccgctccttcggtttccgtttcgtcaaagactttagaccggtcgccttcaacaataacca

SEQ ID NO: 39224 - DNA, 363 bp, Glycine max
  Clone ID: LIB3065-020-Q1-N1-A1
tgaggtacactacttttcgttggtgtcatgtgatcatataaagggctctcaccgtacaaaaaaaaaaaaaaaagggattgaaagtctatttgatagaccttctaatttatatatgtggaattattattagcatgtgttacatctaatttattaagcttgcctttggctattctcaactttttatgtctttttaaatttattattttttattcctactgtgtttacttttttaattcaatatcttttgttttttatttactactataaaataatttaaataaaatcaattttaagttaaaaaatatattattattattatattttattatattctactttatttttattctattttcttattat

SEQ ID NO: 39225 - DNA, 147 bp, Glycine max
  Clone ID: LIB3065-020-Q1-N1-A2
gtacactactttacgtttttgacacgtgaccatagaatgggattgtgttggacatctcgtctttgaagattctaagatgacttctccctacattaaatgtacagacacattcttcataacaattagcatgagtgtcatctaaattat

SEQ ID NO: 39226 - DNA, 319 bp, Glycine max
  Clone ID: LIB3065-020-Q1-N1-A4
gaatttgcctaatgcctgtccttcaatgtggagggattgggttatagatctcgggtttgaagtttctaagatgacttctccctacattaaatgtacagtctctttcttcatagcatttggaaatttggctgatgacaccatcaattttgaggcttttccccacaagctggtgcagtttggagagattcaggaaaaagttgtattgaaattttcacaagaagaattttcttacaacttggtcaactcatgtgcgttcttccacaacctctgtggctgatgggtgtccataattggtatgctattggtgcattgatagttc

SEQ ID NO: 39227 - DNA, 290 bp, Glycine max
  Clone ID: LIB3065-020-Q1-N1-A5
gtacactactacacgttgttgtcatgtgatcatagaaaggtctctcaccgtacaaaaaaaaaaaaaaaagtgatagaaggtctatttgatagaccttctaattaatatatgttgaattattattagcatgtgttacatctaatttattaggcgtgcctttgtcttttctcatttttttaggtctttttaaattgagtatcgtgatatcctactgtgtttactttttcatttcaatatcttttgttttttatgtactactataatataattaatataaaacaattttagtt

SEQ ID NO: 39228 - DNA, 242 bp, Glycine max
  Clone ID: LIB3065-020-Q1-N1-A6
gaatatgccaaatgctgttctttcaatgtggagatattttgttggagatctcgtctttgaagtttctaagatgacttctccctacattaaatgtacagtctctttcttcatagcatttggaaatttggctgatgacaccatcaattttgaggcttttccccacaagctggtgcagtttgaaaagattcaggaaaaagttgaattgaaattttcacagaggaatttcttacagcttggtcaac

SEQ ID NO: 39229 - DNA, 176 bp, Glycine max
  Clone ID: LIB3065-020-Q1-N1-B1
cactcttcgttttgctttttcaacttaaccttttctactggtaagggtaacaacttgctagaataagataaagaaagagtaaaagtgtgtgtgtgtgagagagagctatggctggcttgtgggcacgcctttctctgattgttctggctttgatttgctacgcgatgtttatatgc

SEQ ID NO: 39230 - DNA, 167 bp, Glycine max
  Clone ID: LIB3065-020-Q1-N1-B5
ccattttcgtttccagaagatcttggggactccaggtacaggttttacaaaaacgggatccagttactactattttaaaatactacaattaaatgtttacactttctgttattatgcttaccataccaatcttgatttttttttttttctctttaaattattttata

SEQ ID NO: 39231 - DNA, 397 bp, Glycine max
  unsure (1)..(397): unsure at all n locations
  Clone ID: LIB3065-020-Q1-N1-B7
ctcgagccgctcgagccgctcgagccgatttcatcgattctctcccttctctttctctctgcgacaccagatgatggagacgacggcgaagcgaaacgctgtcgttgcgccaatcgcggcgttgttgttggtggtgctactcgcggcgagtgtggtggtggaggctcaggagaactcggacgtgaagacgctggtgaagcacatgcacgggaagaagtactgcgacaaaggatgggaatgtaagggctggtcaatttactgttgtaacctcactattactgattatttccagacctaccagttcgagaatctcttctccaagcggaactcgccggtggcgcacgccgtcggattttgggactaccactcgttcatcgccgctgncgcgcttttcgag

SEQ ID NO: 39232 - DNA, 347 bp, Glycine max
  Clone ID: LIB3065-020-Q1-N1-C1
cgtgatccgattcaaattgagttggcaacccagaagaaaggggcggagatgagccaggcagagctggacaagcaggcggcgcgtcagcataacacggcggcgaagcaggctgccacggcagggcacatgggacaacccatggggacccatcagacgtcagctatgcccggtcatggaaccggactagtcacggtccttttctcctatggagtggtgtgctcacaccctattggaaccaacagatgcccgggtgggactgctacggcccataatacccgttcggggggaaacccaaatgattatgggtatggaactgggggtacttacaattaaataatgatgaattt

SEQ ID NO: 39233 - DNA, 325 bp, Glycine max
  Clone ID: LIB3065-020-Q1-N1-C4
gctagtctgcccgcaggacgcacgcatacgatcccttggatgaattccaaggccacattttcaagaaatagggatgcatatatgttcatatctgaattgcaatcatttgatggcttattaggcctatcctgaagccacaggaaatgagatcggaattcctgcgcgaattgcaagttcacattttcaagatataacgacgcacaaatggtcatatatgacttggaattatctgttcccttatcatgcctattctgtagccaaacgaaatgagatcggtattcctagcggaattacaattccacattgtcaagatacaaggatgcac

SEQ ID NO: 39234 - DNA, 409 bp, Glycine max
  Clone ID: LIB3065-020-Q1-N1-C5
cgcattttggagttcaactccaaacccaacacccttcttctcccccaccatgctgacgctgattacctcatcgttatccttaacgggactgccattcttaccttggtgaacaacgacgaccgagactcttacaaccttcaatctggcgatgccctaagagtccctgcaggaaccacatactatgtggttaaccctgacaacgacgagaatctcagaatgataacactcgccatacccgttaacaaacccggtagatttgagagtttcttcctatctagcactcaagctcaacagtcctacttgcaagggttcagcaagaatattctagaggcctcatacgacaccaaattcgaggagataaacaaggttctgtttggtagagaggaggtgcagcaacaaggggaggaga

SEQ ID NO: 39235 - DNA, 328 bp, Glycine max
  Clone ID: LIB3065-020-Q1-N1-C8
atcatttctttttaataccaactcgctctttattattttcagttactaatcctagttatttgatttatatactttttttatagtaaatacatgagatagaatattcaaaatggaatatttctattattttattcttcatccaatgactatacattcattatatttttgtgtaaatagaggaaaaactcgatggaaaaatggtggtttaattctatgttgtttaataggaagttagaatacaggtgtgaattaagtaaatcaatggatagtcttggtcctattgaaaataccagtctaagggaagaccctaaaattttaaccgatatag

SEQ ID NO: 39236 - DNA, 269 bp, Glycine max
  Clone ID: LIB3065-020-Q1-N1-D1
agtctaggccttaaatttgttcgcgagcatgcgactttgagggtaggaacacgacactgtcacctacaaaacttacgctccaattctcttataaacagaattatggtgttatatataacactgagttacatcaatgtctatttaaagagtatgtacattcttacaataacatttaatactatttctattcatatatcttataccaatcattctatccttatactgttatcataaataaaatatatttactatttataccattttttatt

SEQ ID NO: 39237 - DNA, 407 bp, Glycine max
  Clone ID: LIB3065-020-Q1-N1-D4
taaatacctgaagccatctgttgctggttttcttttgcaaaaggaacttgattaccttgttggggcagtatcaaaccccaaaaggccatttgctgccattgttggtggttccaaagtctcatctaaaattggagtgattgagtcacttttagaaaaagttgacatccttcttcttggtggaggaatgatcttcacattttacaaggcacaaggtctttcagtgggttcatcccttgtagaagaagataagttggatcttgctacatcactacttgcaaaagccaaggaaaagggggtgtctctcttgttaccaagtgatgtggtgattgcagacaaatttgctcctgatgctaatagcaaagtcgtgccagcatctgccatccctgatggctggatgggattggata

SEQ ID NO: 39238 - DNA, 344 bp, Glycine max
  Clone ID: LIB3065-020-Q1-N1-D6
gacatatcagttactttttgttactcatttttattattcggtggggcccaatccatttggattctagagtatcttctattttgtgcctcttgctctggaaataaataagattattaaataaaggaatgggtggatcttctattttcttcttgtacactattttaaggattaactaaacttattcttaactttctgtattgtgtaaagcatattgaccttttgatattataaatgggccttatttagaaaataaataaaaaaaaagggccggcctccactaatgagctctgttcacctcgaattaatttccgaccctgtcctttaagccttccaacttttcctat

SEQ ID NO: 39239 - DNA, 381 bp, Glycine max
  unsure (1)..(381): unsure at all n locations
  Clone ID: LIB3065-020-Q1-N1-D8
ctcgagccggctcgagcaaaaaaagcttcatcatcatcttcttcttctctgcatcatcacaatggctgaagtacgttcacaacaacaacaaccccagcatgtgcaagtccacgcaaccacaacacacaccccacaacaccatggcggggaaggtggcagcggcattctgaacctcatcccggagatgtccctcacgggttcccaactcctagctctcctcgccggcgttccccttggtgcaatgctgctcctcctctccggcatctcgctcatcgccagcctcttggggctggcggtggcgacgccgctcttcatcttcttcagcccgctgctggtccccgccgncttcgccataggaatggcggtgaccgccgtgcttgc

SEQ ID NO: 39240 - DNA, 107 bp, Glycine max
  Clone ID: LIB3065-020-Q1-N1-E4
cagagcaagatgatcacgacatatatatataactagatcatgatgccacacttgctctgttcagcaataaattataatggaaattaataaattagttatgccttttc

SEQ ID NO: 39241 - DNA, 400 bp, Glycine max
  Clone ID: LIB3065-020-Q1-N1-E5
gaaattttaagcacatttcacaatcagaccggcatagtcatgtgctcctacctcccaatgttcaccagctttaatagaacaaggggtggcttgattcaattgaaccatggcaggcctcagcctctccaatatgttgtcaatgcagcctttttggctgctctttacagtgattatctcgatgctgctgatacacctggatggtattgtggacccaatttcttctcgactgatgtccttcgagactttgcaaagacccagattgattacatccttgggaagaaccctcggaaaatgagctatattgtaggttttggtaatcattatccaaaacatgttcaccatagaggtgcgtctataccgaagaacaaggttaagtacaactgtaaaggaggatggaaat

SEQ ID NO: 39242 - DNA, 398 bp, Glycine max
  Clone ID: LIB3065-020-Q1-N1-E6
cttcgcacccttctccctccatcgaagggagatggcaacatcagctggttcgtggaagggtctggagaggatgagcgtggagcagctgaaggcggtgaaagagcaaggcgatctggaagttaatcttctccaagaaagcctctccaacattcgcaccgccaccacccgcctggagatcgcctcctccgccctcaacgatctctctctccgcccccaaggcaaccaaatcctcgtccccctcaccgcctccctctacgtccccgccactctccacgactcccaacacgtcctcgtcgacgtcggcaccggctacttcatccagaagaccatgccccaaggcaaacattactgcgaccgcaaaatcaacttgctcaaatctaactttgatcaactcctcg

SEQ ID NO: 39243 - DNA, 384 bp, Glycine max
  Clone ID: LIB3065-020-Q1-N1-E8
cgagactcaaggtccatgagtgtgcctgtgcgaccacacacatacgattattgatcaagttagcttagctaggccaaagtaagaaagaaagaaacattgaagctggaaacgcatgtgttggctccaccgtttgctttggtattttgctatgtgatgatgacgacgacgatccaacggtgcatgtgtgttgacctgttcctagtagtagtagtagcatgtgtacagctattgtagaatgtagataggtacactactacacgttgttgtcatgtgatcatagaaaggtctctcaccgtacaaaaaaaaaaaaaagtgatagaaggtctatttgatagaccttctaattaatatatgttgaattattattagcatgtgttacatcta

SEQ ID NO: 39244 - DNA, 390 bp, Glycine max
  Clone ID: LIB3065-020-Q1-N1-F1
cacgcacgcttacctcagtcccggaactcggatcgagcgccaatcctttttgttttgccatctatagcatcgaactggggcccagttcttctgtgcctgacataacacacattgcaattttccattgcacgcacaggatcatacatgctgctgattcacctattaatatcgaccgactgcccatcattgatttgccacgctactgggatctttttaagcttctccaatctcgattgcactttattacaagcttttgcagaatcacacataggcaggttctccacgcaataaaccatctgattatagacatccatttactgtgaaacgttctaatactgtactggaatttacattcacaagccttaattgactatcttacatgcgctatta

SEQ ID NO: 39245 - DNA, 397 bp, Glycine max
  unsure (1)..(397): unsure at all n locations
  Clone ID: LIB3065-020-Q1-N1-F4
gggaccctttgaaccctaatctccacccaaacccattttcccgggaaattgccttggaaaagaaagagcgaagaggaaaatgcagaatcacaggctgaagcagcagcagcagcagcaacaacaagctcttatgcagcaagctcttctccaacaacagtctctctaccaccctggcctccttgctcctcctcagattgaaccatatccaagtggaaatttgcctcctggttttgatccaagtacttgccgcagtgtgtatgttgggaacatccatacacaggtaactgagccgcttttgcaagaagttttctcgggtactggcccagttgaaggttgtaagcttatcaganaggataagtcatcctatggattcattcattactttgatcgcagatct

SEQ ID NO: 39246 - DNA, 402 bp, Glycine max
  Clone ID: LIB3065-020-Q1-N1-F5
atggatgcagtagctacggcgaaaccgcttctgtcactgtcgtttttgcttttgctaccgtcttttcttccgatcgccgtcgcttacagacccggcgacatcgttcccatgagccgcatgggtcaataccactcctcgcgaaccgtgtggcaggacctcattggccgtcactgccccatcttcgcagtgaatcgcgaggtgttgatgcccatacccaagcccacgggttacactggtgcggatgcttataaaatatcgtttcaagttggcagggaaaagtttttaatcccgtggcttcttgtggtgaatcgaaaaagcacggaggtcccaatgattgaagtagatctgaggtattcaggaagtgatttgcatggtgtcacagctaaaagttgggatatgcct

SEQ ID NO: 39247 - DNA, 293 bp, Glycine max
  Clone ID: LIB3065-020-Q1-N1-F6
gtgtctggtttttttttttttgtttccgttttttttttttattttctttttttacttttttttggccgaaaaaccgggggaaaaggggcacgcaaaaatccctgtttacccaaacccaaaactttttaaaccctggggcgggccccctggaagggaatcccctgcccctgaccctaaaacccatggggaaagggtgccccccttccattccaaaccaaagggggattttccctttgggggcccagttaataaccttggggggtccctttaaaccccccatgggaacggaaggg

SEQ ID NO: 39248 - DNA, 259 bp, Glycine max
  Clone ID: LIB3065-020-Q1-N1-F7
atgttttcattatccactgctactccccagcatgggactggtattattcgcctggcgaccgggttttaatactattggagtcttttacatgccccgcgtacatcgatgtcaacagcctcatgcgcaaataccattcgaccctaaccataaccgaagactctgtattgaccttcactctcacatcatcatagggaattcctatatcttactccgtaaacaataatactacggtgtacaccgtttccaatcctaataaaat

SEQ ID NO: 39249 - DNA, 412 bp, Glycine max
  unsure (1)..(412): unsure at all n locations
  Clone ID: LIB3065-020-Q1-N1-G2
atccttttgtgttaaataggtggatgggaaaattgactttcccccagggcacttcccgaagtgttaagagaatgcctctttctatagggggaggagctggtgcaaagaatgctattctcatgaatatgccaaatgctgttctttcaatgtggagatattttgttggagatctcgtctttgaagtttctaagatgacttctccctacattaaatgtacagtctctttcttcatagcatttggaaatttggctgatgataccatcaattttgaggcttttccccacaagctggtgcagtttggagagattcaggaaaaagttgtattgaaattttcacaagaggaatttcttacagcttggtcaactcangtgcgtnctgcaacaactctgttggctgatgggtgttcatattt

SEQ ID NO: 39250 - DNA, 397 bp, Glycine max
  Clone ID: LIB3065-020-Q1-N1-G4
attgaacttatctctcttctcacttctgttgttataagtaacttccctcatcattacaaaacaatcctccacaggtttcaaaatgctgaaatcgggcatgggaattgaggagagaaagcaagtgaagaagccagcacaagccagctcgagaaaagggtgtatgagagggaaaggaggtcccgagaatgctagttgcacctacaaaggtgtgaggcagagaacatggggaaaatgggttgctgaaatccgtgaacccaatcgaggtgctaggctctggctcgggacttttgagacctctcatgaagctgctttggcttatgatgctgctgcacgtaagctctatggctctgatgccaaactcaacttaccagagctctctatcaaatcacaatctcag

SEQ ID NO: 39251 - DNA, 325 bp, Glycine max
  Clone ID: LIB3065-020-Q1-N1-G8
acgagacccatagtgctgccaaattatagtaactctcttgctctatctgaagaagaagaagttctgaagaagcatgtgtggaggtgctatcatctcagacttcattggtgtgaagcgtggccgcaacctcgccgcgcaggaactgtggtccgagcttgaccctttctctgacctccttggcttcgataccaccaccaccaccaccaaccaaccaccccttccagacaaaaaagtggtgtcatcatgtgagaagaagaagaagaaaagtgtgagtgcagaaaagaagagtggtgggcgagctcggaagaacgtgtacagaggaatc

SEQ ID NO: 39252 - DNA, 366 bp, Glycine max
  Clone ID: LIB3065-020-Q1-N1-H4
gttcgttcgggcgtttgtcccatttgtggctagtgtgctgataaaagcgtggaaggaatcagattgcagtggtgacatggaagtcatattggggggcatggcttctctggaggatgagatttcatggttcaagacagaagccaacaagtggggtatttcactttctgacgttgttcctcagcaggctaacaaaaactattgtgggttgctggaaagtttaatgagtccagacgcggaatatactgtggctattacagcattttgggctattgaaacggtgtatcaagagagctttgcccactgcattgaagaaggctccaaaaccccaccagaactgaaggagacttgtgtaagatggggcaatga

SEQ ID NO: 39253 - DNA, 407 bp, Glycine max
  Clone ID: LIB3065-020-Q1-N1-H5
aaagattttcatttatacaccgggggaatttatgatggagaaaactgtacaagtccgtatgggattaatcactttgttttacttgtgggttatggttcagcggatggtgtagattactggatagcgaaaaattcatggggagaagattggggagaagatggttacatttggatccaaagaaacacgggtaatttattaggagtgtgtgggatgaattatttcgcttcatacccaaccaaagaggaatcagaaacactggtgtctgctcgcgttaaaggtcatcgaagagttgatcactctcctctttgagccgtaaaggttcaatacaacgagtgcttgttttcttagggacaagcattgtacttatgtatgattctgtgtaaccatgagtcttccacgttgtacta

SEQ ID NO: 39254 - DNA, 322 bp, Glycine max
  Clone ID: LIB3065-020-Q1-N1-H6
aaaaaaaaaattaaaaaaaaaaaaaaaaaaaaaaaaaaaagaaaaaaaaaaaaaaaaaaaaagaaaaaaaaaaaaaaaaaaaaaaaaaaaaaaaaaaaaaaaaaaaaaaaggaaaaaaaaaaaaaaaaaaaaaaaaaaaaaaaaaaaaaaaaaaaaaaaaaaaaaaaaaaggggggggccccaaattggaaaagggtgtccccggaaaaatatgcgagacccgggacttagggggttccaagtgttaaataggggggggcttaaaagagctgacaaaaaaggggccgaaatcatttcctgggaaaaaaggggtaccccaaaa

SEQ ID NO: 39255 - DNA, 379 bp, Glycine max
  Clone ID: LIB3065-021-Q1-N1-A1
catgcatgtgtgtggtggacactgtaaccgtgccgtcacttatgccgctctgcttggtggaaggatctgcgaacttagagcatatgactctcgggtatattaacttactatgttctatagtgcctgctctatagttgaggcttgtcactaacaacatgagaccacctgtgatgacatagtcaataaggcttggagcgattcactggcttgaacttaaaattgctttcacatttgggctcatatacacagcttatgctacttgtattgatcatcacacgggtagcgtcggctcaattatagcctgatctatcgcattctcggtcactgactacatgctctctggcggtccgcttgatcgagcatgcttaaatcactctaa

SEQ ID NO: 39256 - DNA, 271 bp, Glycine max
  unsure (1)..(271): unsure at all n locations
  Clone ID: LIB3065-021-Q1-N1-A2
gttgcgtgagaagcagtgtggaggtggctgataacggggaatgtatttagctttgagagtctttaaattttctgtatttgttgtaatgttagtagttccttaaattggccagatggagtttatgtgtttgtaaatgcagggatgctaacggaataaaatggccacttgtattgctatcccttgtgctagcataatagaaagggttgaatcgcgctncaaagctctcacatttcgtctggtgtacacagactttgctactgctattgatcct

SEQ ID NO: 39257 - DNA, 182 bp, Glycine max
  Clone ID: LIB3065-021-Q1-N1-A4
attaaaaaaaatttaaaatttaaaaacaaacaaaacacacagggaattttgtttataacaagcggggacttttgtcaattttctattgaccttctctataagaggaatattactggacaaaaactcgggattgtttcacacttattacaacactctgctatttaattactcgctgtgccctt

SEQ ID NO: 39258 - DNA, 271 bp, Glycine max
  Clone ID: LIB3065-021-Q1-N1-A6
gtttggaatcaaatggcaacagtgagaacaccattgaattttgattctagcaagcagagcttttgtcaattttctattgaccttctcggtggaggaattttagtggacaaaactggagattggatcacacttatacaaaattctccaattagtaacttgttgagagttgctgcttggaagaaaggctgtttaatggttaagattgtgatgtctgggaatgcagcagtcaaaaggagtgattgggcctcattggtacaagtgtttttaaaca

SEQ ID NO: 39259 - DNA, 284 bp, Glycine max
  Clone ID: LIB3065-021-Q1-N1-A7
aaaattcttccaccaagttatgggtttccttgtgttgcttcttttctccctcttaggtctctcttctagttccagcatatcaactcatcgttccatattggaccttgacctaaccaagtttaccacacagaaacaggtgtcttcactgttccaactatggaagagtgagcatggacgtgtctaccataaccacgaagaagaggcaaagagacttgagattttcaagaataacttgaactatatcagggacatgaatgcaaacagaaaatcaccccattctcatc

SEQ ID NO: 39260 - DNA, 431 bp, Glycine max
  unsure (1)..(431): unsure at all n locations
  Clone ID: LIB3065-021-Q1-N1-B2
ggacaagcttagttgccaagttggaatcaatccatactccatggaatggaccggtttggccaacagactactgagtaagggcaacgatattctgtgttgcgattatgctagttttgatggtttgattaccaagcaagttatgagcaagatggcagaaatgataaacagtctttgtggtggtgatgaaaaattgatgcgtgaaaggacgcacctgctgttggcttgttgttcaaggatggcaatttgtaaaaaagatgtttggagagttgaatgtggaataccttctggatttccgctcacagttatttgcaatagcatttttaatgagatgctcattagatatagctatgaaaaattactgcgtcaggctaaagctccaagtatgtttntacaatccttaaaaaatttgtttctttgagtgtgtatggtga

SEQ ID NO: 39261 - DNA, 315 bp, Glycine max
  unsure (1)..(315): unsure at all n locations
  Clone ID: LIB3065-021-Q1-N1-B3
caagaagctaaaggagatgagccttgaagaacgtaaaaacactactccacgcacggtgatgattggaggaaaggcatttgcaacatacacaaatgctataaggatagtcaggttggtgaatgatgtcggtgctgttgtcaacagtgatcctgaggtcaacggctacttgaaggttgtgtttgtcccaaattacaatgtgtctgtggcagaagtgctgattccaggaagtgagctttctcagcatattagcactgcangcatggaagcaagtggcacaagcaacatgaaatttgctttaaatgggtgccttataat

SEQ ID NO: 39262 - DNA, 420 bp, Glycine max
  Clone ID: LIB3065-021-Q1-N1-B4
cactctttgcctcgcaccttcaacttaaccttttctactcataatcttaacaacttgctagaagaagataaagaaagagaaaaagtgtgtgtgtgtgagagagagcaatggctggctcgtgggcacgccgttctctgattgttctggctatcatttccttcggatgtttatttgcaatttccattgctaaggaggaagccacaaaattggggacggtcatcgggattgatcttggaacgacctattcatgtgttggtgtttacaagaacggccatgttgaaatataacccatggatcaaggaaccggattaacccatcggggggtggtttcaacgaccgggagagactaattggagaggctggcaagaatcttgcagctggcaacccaaaaaggaccatctttgatggtaagagacttat

SEQ ID NO: 39263 - DNA, 413 bp, Glycine max
  Clone ID: LIB3065-021-Q1-N1-B6
gtagagaggaagggcagcagcaaggggagcagaggctgcaagagagcgtgattgtggaaatctcgaaggaacagattcgggcactgagcaaacgtgccaaatctagttcaaggaaaaccatttcttctgaagataaaccttttaacttgagaagccgcgaccccatctactccaacaagcttggcaagttctttgagatcaccccagagaaaaacccccagcttcgggacttggatatcttcctcagtattgtggatatgaacgagggagctcttcttctaccacacttcaattcaaaggcgatagtgatactggtaattaatgaaggagatgcaaacattgaacttgttggcctaaaagaacaacaacaggagcagcaacaggaagagcaacctttggaagtgcggaaatat

SEQ ID NO: 39264 - DNA, 390 bp, Glycine max
  unsure (1)..(390): unsure at all n locations
  Clone ID: LIB3065-021-Q1-N1-B7
cagcggctcaagtaaccagttgctccaaaagtcagatgcaagggttcaaaatctgaaaccagagacaaggattcaaaaatctgacgatcgattgtttacacttgctgctattgggcttactatagcaattgtggttcttttgctgaagaagttcattaaatctacagaatatggtgctgttttcatggatgaatcttagatgaattatttgctcgtgttagcttcaatatcaagattcttagcccaggtatagtcgataggaaaatntagaacttctctgatattttatgatctttgaattgtacgaatggcttgtaattatgggtatataaatatatactacagctatgagttcgggaagcagggtctactatgtggaagtacaagtac

SEQ ID NO: 39265 - DNA, 117 bp, Glycine max
  Clone ID: LIB3065-021-Q1-N1-B8
ccaagaccgtcaccagaagatctttgggcctggtgagggggcctttctgtagaggcaacccaaatgtgcctacaaaatgtaccacaattaaaaagctcctcgtgaatgaattggtct

SEQ ID NO: 39266 - DNA, 291 bp, Glycine max
  Clone ID: LIB3065-021-Q1-N1-C1
cctagattcagccacagttggaaaaaaaaaaaaagttgttcgagatggcacgtacgaagcaaactgctcgtaagtccacaggaggaaaggcacctaggaagcagctcgcaaccaaggctgcacgtaagtctgcaccaactactggtggtgtgaagaagccacatcgttatcgtcctggtaccgttgctcttcgtgagattaggaaataccagaagagtaccgagcttttgatcaggaagctccccttccaaaagctggttcgtgaaattgctcaagacttcaagactgatc

SEQ ID NO: 39267 - DNA, 429 bp, Glycine max
  unsure (1)..(429): unsure at all n locations
  Clone ID: LIB3065-021-Q1-N1-C4
cgtgatccgatgcaaaaggagttggcaacccagaagaaagaggcaaagatgagccaggcagagctggacaagcaggcggcgcgtcagcataacacggcggcgaagcaggctgccacggcagggcacatgggacaacccatggggacccatcagacgtcagctatgcccggtcatggaaccggacagcccacgggccatgtcaccgagggagtggtgggctcacaccctattggaaccaacagaggcccgggtgggactgctacggcccataatacccgtgcggggggaaacccaaatgattatgggtatggaactgggggtacttacaattaaataatgatgatttagaaaaagaaagctacgacccataaagaggtttagttaagagtatgacttttggtgtggntatcttctcgtttgggtatcttt

SEQ ID NO: 39268 - DNA, 89 bp, Glycine max
  Clone ID: LIB3065-021-Q1-N1-C5
tgaaaaattaaattgtgaaagaaaaataaatacaaaaggagacggacacaaacgcacgggagacagaaaataatggggcgcgctaacaa

SEQ ID NO: 39269 - DNA, 371 bp, Glycine max
  Clone ID: LIB3065-021-Q1-N1-C6
tgttggcagagttggcttaaacaatggttctggaaaatcaaaaagtctacagaacttgacaatgcaactcagaaaatgttgtaaccatccctacctctttgtgggtgactatgatatccataaacacaaggaggagattttcagagcatcaggaaagtttgaacttcttgaccgtttgcttccaaaacttcgtagagctggtcacagagtcctccttttttctcagatgactcggctcatggacattcttgaaatttatctgcgacttaatgattgtaaatgtcttagacttgatggctcaacaaaaacttgaggaagaggttccctactacgggaatttaatgcacctgattctgcatactttatgtttc

SEQ ID NO: 39270 - DNA, 52 bp, Glycine max
  Clone ID: LIB3065-021-Q1-N1-D1
aaaacttatttgatgcttttttattgaattttaacttttatgatttttgttg

SEQ ID NO: 39271 - DNA, 52 bp, Glycine max; identical to SEQ ID NO: 39270
  Clone ID: LIB3065-021-Q1-N1-D2

SEQ ID NO: 39272 - DNA, 323 bp, Glycine max
  Clone ID: LIB3065-021-Q1-N1-D3
gttccacaggctactgccagatcttctgaaaatgcggaatcctctgcatgatctggaatttgtgttttcttttgcttgttcgtttgtttaattcaataaaggaaattaggcatgaccctcttgttgagtatgctctgcctatttgaaaatttgcacacctcttttaattatcgtaatgatgtgtgaagtgtgtgttaattgaaaaaaaataaactaacatatctatacatctaattatcttaaaccttaaaatgataaaacttggaatatcaaaaaaaaaaaacggggcgccccccatttaggggcctttccaccccggaatt

SEQ ID NO: 39273 - DNA, 398 bp, Glycine max
  Clone ID: LIB3065-021-Q1-N1-D4
attttgtacaacaaaatcgtagtcgaacatgtgactttcaggttattaacacgacactctaaccaattaaactaacggtccaattatcttataaaatgaataatgttattatatataacactaagtttttttaatgtatatttaatgtgtatgtaaatttaaataataaattttttgacaattagttttgatataactcatacgaattatttaatctgtatactttttttataaataaaaaatatttactattaaaaaaataatttattaatttttttttaaaaaaaacttacggatcacgtaatccttatgagttaactcatacggattatgtgattcatatgagtcatacggattatgtgatccgtaaaaataaaaaacacttaagaatatttttg

SEQ ID NO: 39274 - DNA, 339 bp, Glycine max
  unsure (1)..(339): unsure at all n locations
  Clone ID: LIB3065-021-Q1-N1-D5
ggaatttctctgttcattgccactaatatatgtgaaaacatgatatggaaagcatttagccccaccaccattaacagtggacgtggagctgaatttgagggtgctgtcattgctctattccatttgttgataactagaacagacaaggttcgtgcccttcgtgaagcattttaccggcaaaaccttcccaatgtgacaaatctgcttgctaccgttttgatcttcctaattgtgatatacttccaaggattccgtgtggttttgcctgtgagatcaaagaatgcccgtggacagcangtgtcgtatccaatcaagtattttatacctccaacatgccca

SEQ ID NO: 39275 - DNA, 233 bp, Glycine max
  Clone ID: LIB3065-021-Q1-N1-D6
tgagaatttaacttttcaatgccactaatactatgtgtgaacggggtatgaaaagcatttaaccggaccacccttaacagtggtcgtgtaacaaaatgaaagggagcatatattgcactactccatgtgtatatatctataatatagagggtgggagcacaaatagaagcatttgtcacgataattgttattaatgtgacaaataatttagctaccgtactgctcttcttaat

SEQ ID NO: 39276 - DNA, 299 bp, Glycine max
  Clone ID: LIB3065-021-Q1-N1-E3
cccgcctcggtgatgcaatccgccgcaaccgaaaacctccgcgccggcgtcgtgggccgccaagacatctccgacgtggcgaggaacgaaggcgtgagcgtgaccgaaaccaaagtgggctgccaccgcgtcatcacggagttcgtgggaagacacgtggtggggcagttcgtggagcccgacgtcccaatgaacacccaaggcaccgcgctggaccgtgacgccataaccatcggcaaggctttcgaggcatcggcgatagccgaagcaggcgacaagccgttggatgaaagcaaccc

SEQ ID NO: 39277 - DNA, 290 bp, Glycine max
  Clone ID: LIB3065-021-Q1-N1-E5
gcgcattactatgtgcaatgagtgtgtttaaatattacatactagttcacaaatgcaaaaggacaatcgctcctcagatatcaacaaaaagattcgcacagcacttgggaaaggtaagaaaattgtttttcttactagagttgatccttttccagtagctctactggctgttctttttggcgttaaaaatgaaattctgagttccaacgccactaaccctatgctgacgcgacttcttgagaactgtaagagtctcaaatatctggtggataagtgtcctttggcattgg

SEQ ID NO: 39278 - DNA, 329 bp, Glycine max
  Clone ID: LIB3065-021-Q1-N1-F1
ctcctcacgagtacccaattctgggtctcaacctgttgagattacttgtgcagaataggattgctgaattccatactgagttggaattgctttcatctgctgctcttgagaatccttgcattaagcatgctgtggagttggaacaatcttttatggaaggggcttacaatcgtgtcttgagtgcacgacaaacagtgccacatgatacatacgtttatttaatggatcttttggcaaaaactgtcaaagatgaaatacctggttgcagggagaaggcttatgactatttttaaataaaggttgttaaccaaatgtggctgtcctctttt

SEQ ID NO: 39279 - DNA, 311 bp, Glycine max
  Clone ID: LIB3065-021-Q1-N1-F3
ttgagagcacaatttggctactagccaaagcttatgtcatcgtaaatgactcttgctaccatcaactcatgagccattggttaaatactcatgcggcgatggagccattcgtcatagcaacacaccgacatcttagcgtgcttcacccaatttacaagcttctgactcctcactatcgtaacaacatgaacatcaacgcacttgccaggcaatctttaataaatgctaatggcttaataaaaccaacctttttgccttaaaagatttttgggaaaatgttttcggcggttattaaaaatggggttttaatt

SEQ ID NO: 39280 - DNA, 374 bp, Glycine max
  unsure (1)..(374): unsure at all n locations
  Clone ID: LIB3065-021-Q1-N1-F4
cgccaattgagaaggaaagctctctctcgtattgaatggctgcaaaaagctgatgtgcctaccatagcacagattgaagagttccattcgatgcagaggatgatgaatgctcctgattcaaatgataatatcgatctactgttgagcattgatttgttgggtttacaaggagcaggtaaagcttttccaaacaagattgtttttgatgataagcttgtgttggctaacacacaggaattctttgatggaaattttccagtggattcttggttaccaatttttgtgaattgtctntatcctgtaagtcaattaccttcagacgctgtcgttgtaaatgttacatgtggtagtggacgtgtggtttacccaccact

SEQ ID NO: 39281 - DNA, 132 bp, Glycine max
  Clone ID: LIB3065-021-Q1-N1-F7
tggaatagaagtagattcaactggaaaagaaatatgccctctcactggtgtgcaatcacccaatgagctcgataaggggattggactagtctttacatctccattacatgccctttttatcgccgaaagcta

SEQ ID NO: 39282 - DNA, 407 bp, Glycine max
  unsure (1)..(407): unsure at all n locations
  Clone ID: LIB3065-021-Q1-N1-F8
acggcactgagttattagtaattgtgttgtgttgtgttgagcagagagaaggatcaagaaaggataagaagaaagagggaatagggttagggttagggttagggttaggttgaggatgccgaagaacaagggaaagggaggtaagaacaggaagaggggaaagaacgaggcggacgacgagaagcgagagctggtgttcaaggaggacgggcaggagtacgcgcaggtgctccggatgctgggtaacgggcggtgcgaggcgatgtgcatcgacgggacgaagaggctctgccacatccgcgggaagatgcacaagaaggtgtggatcgccgccggagacatcatcctggttggactcagggactaccaggacgacanggctgacgtcatcctcaagtacatgcccg

SEQ ID NO: 39283 - DNA, 330 bp, Glycine max
  Clone ID: LIB3065-021-Q1-N1-G1
ctagtgggtgctgtcagagttcaacattttctgagttcactcactttttctcgcttccaaccttccttttctctgcgagcattttccgctatggccgaagaatttgtgaagggcactgttcatcaaaacggcgtcgctgtcatcaccctcgatcgccccaaagctctcaacgccatgaacctagatatggatgtaaagtataaaagttatcttgatgaatgggaatctgatccaagggtcaaatgcgtactggttgatagtagctcgcctcgtgccttttgcgctggtatggatataaaaggggtggtggttgaaatacaaaaggagaaa

SEQ ID NO: 39284 - DNA, 344 bp, Glycine max
  Clone ID: LIB3065-021-Q1-N1-G4
caatatcctagtataccttaataaataatttaagatactatgatgagagcacggttcccattactgttgctgggacttgttttcctggcttcagtttctgtctcatttggcattgcttactgggaaaaagagaaccccaaacacaacaagtgtctccagagttgcaatagcgagagagactcgtacaggaaccaagcatgccacgctcgttgcaacctccttaaggtggagaaagaagaatgtgaagaaggtgaaattccacgaccacgaccacgaccacaacacccggagagggaacctcatcaacccggtgagaaggaggaagacgaagatgagcaaccacg

SEQ ID NO: 39285 - DNA, 262 bp, Glycine max
  Clone ID: LIB3065-021-Q1-N1-G5
gcgtcccactatctccaacggatatggtcgtttaactgaagttggtcctgacgatgatgaaaagagttggcttcaaagactcaatctcatgcttacctttaccaacatcacccagagatctatgagtactattcactacaactcacatgcaacgaagatagcactggtgatcgatggcagagggcatcttcaaatatcatgtccacacatgtcatcaaggtcgtcacactcgaagcatgataagagtagcccttcataccat

SEQ ID NO: 39286 - DNA, 422 bp, Glycine max
  unsure (1)..(422): unsure at all n locations
  Clone ID: LIB3065-021-Q1-N1-G6
aaaggatcaacttgggatgaaatagactatgaatttcttggaaatctgagtggtgatccatacatccttcacacaaacgttttcagccaaggcaagggggacagggaacaacaattctatctatggtttgacccaactgctgatttccacacttactccatcatgtggaacccccagaggattatattctcagttgatggcactcccattagagagttcaagaactcggaggctattggggttcccttcccaaagaatcagccaatgaggatatattctagtttgtggaatgctgatgactgngcaacangaggtggacttgtgaagacagattggacacaagctccgttcacagctttctacagaaacttcaatgctgangctngcatatggtcttcttgagcatcttcttgcgctaaaac

SEQ ID NO: 39287 - DNA, 384 bp, Glycine max
  unsure (1)..(384): unsure at all n locations
  Clone ID: LIB3065-021-Q1-N1-G8
acctcatcaaaaggaagaggaaaagcacgaatggcaacacaagcaggaaaagcaccaaggaaaggaaagtgaagaagaagaagaagaccaagacgaggatgaggagcaagacaaagagagccaagaaagtgaaggttctgagtctcaaagagaaccacgaagacataagaataagaacccttttcacttcaactctaaaaggttccaaactctcttcaaaaaccaatatggccacgttcgcgtcctccagaggttcaacaaacgctcccaacagcttcagaatctgcgagactaccgcatgttggagttcaactccaaacccaaacacccttcttctcccccaccatgctgacgctgattacctcatcgntatccttaacggga

SEQ ID NO: 39288 - DNA, 216 bp, Glycine max
  Clone ID: LIB3065-021-Q1-N1-H1
tcatagcagaaatcggttatgaaccttgcaaacccagtgaggatgacaaggaaaactactaatgaacaagtgttatgcatgtaagctctctctccaacggacaaagccccctttatgctttgtttgttatgtaaggaatgactaaataaacttggaataaaacttcctctcttttcgtggcccataatttgctttctgcaaatctgggtcttcttt

SEQ ID NO: 39289 - DNA, 398 bp, Glycine max
  Clone ID: LIB3065-021-Q1-N1-H2
agcatttggaaatttggctgatgacaccatcaattttgaggcttttccccacaagctggtgcagtttggagagattcaggaaaaagttgtgttgaaattttcacaagaggaatttcttacagcttggtcaactcaggtgcgtcccgcaacgactctgttggctgatgggtgcccatatttgtatgctatggtgcatgatagttcagtgtctacaataccaggtgattttgtcattggtgttaagttgacaaccataaacaatatgtgtgcatatgggctcaatcctggtatttcaggttctcgtcttttgggcaccattcctcagtccatttcacagcaaacttgttggaatcaaatggcaacagtgagaacaccattgaattttgattctagcaagc

SEQ ID NO: 39290 - DNA, 295 bp, Glycine max
  Clone ID: LIB3065-021-Q1-N1-H5
atctccgagactaccgcattttggagttcaactccaaacccaacacccttcttctcccccaccatgctgacgctgattacctcatcgttatccttaacgggactgccattcttaccttggtgaacaacgacgaccgagactcttacaaccttcaatctggcgatgccctaagagtccctgcaggaaccacatactatgtggttaaccctgacaacgacgagaatctcagaatgataacactcgccatacccgttaacaaacccggtagattgagagttctttctatctagcactc

SEQ ID NO: 39291 - DNA, 328 bp, Glycine max
  Clone ID: LIB3065-021-Q1-N1-H6
ttatcttttagacttccgcatattggcgttcaactccgaaccgggcaccctttttctgccttaccatgcttacgctgattaccttagcgttatacaaaacgggactgccattcttaccttggtgaacaacgacgactgagactcttacaacctttaatctgtcgatgccctaatagtccctgcatgaaccacatactatgtggttacccctagctacgacgagtttttcttaatgataacactcgtcatatcttttaacaaacccggtagatttgagagtttctttctatctatcactcaaactcaacatttctacatgcaagggttc

SEQ ID NO: 39292 - DNA, 229 bp, Glycine max
  Clone ID: LIB3065-021-Q1-N1-H8
ccagtgcatgaccttcaactggcttgtagtgctgttttactgctccccttatcattttcatttttttttttttaaacttctgcacacaagcacttgctttcctttttccaagcaatatatactatagtaactggaagaggtctatccgggtcagcataattttctagtatgtgatgagttaattttatagaacaacctagcctacaagttacaacaggctgtatttaat

SEQ ID NO: 39293 - DNA, 210 bp, Glycine max
  Clone ID: LIB3065-022-Q1-N1-A10
cggctcgagcggctcgagctcagcaaaaaacactgtagcttccaagctcggatacggcgacagcactgaaacaactcaaacaagccatcaagaacagaacacaggcaatgaaaaaccatcaacaatctcatcagcaaccttctgcaatcactgataaagctgtaactgccaaaaatgttgtagcttcaaagctcggatatggcgacaaca

SEQ ID NO: 39294 - DNA, 390 bp, Glycine max
  unsure (1)..(390): unsure at all n locations
  Clone ID: LIB3065-022-Q1-N1-A11
ggaaggtggtgacattaacaaacagtacacaaacatcaccttcacaccaacacaggcagatcgctttgtcttggcattccgaaattggctgaggcgacatggcaatggccaaccagaatggtttggaaacagcagcgaccagccattgccatcaactgtgttatcaaaacgtcagatgttggatagatttgaacagcacactctcaagtgttcatcatgtaaagcagcatatgagggattccaaacatggcagaaagtcctaattggggcaacagttgtgttttgtgcaacatcagggatcccatcagatttccagttgcgtgtacttttggctggactcgcagntgtcagcgcagccatagcttttgccctataccactccaaaagaat

SEQ ID NO: 39295 - DNA, 389 bp, Glycine max
  Clone ID: LIB3065-022-Q1-N1-A4
gtcccagtcttgcaccttaaaaccatccaatccaattgaattctccagagagaagaagaaacttaatcgatcatcacttcacttcactaatacatcatggcagacgagacccagaacaagtatgagagctctgaggttgaggtccaggatcgtggtgtttttgactttctcggtaagaaaaaggatgaagaagacaagcctcatcctcaggaggaggtcatcgccaccgagtttcaaaaagtcactgtctcagaccaaggagagaacaagcacagcctcttagaaaagcttcaccgatctgacagcagctctagctcttcaagtgaggaggaaggagaaaatggaaagaaaaggaggaggaggagaaaggaaaggaagggcttgaagaa

SEQ ID NO: 39296 - DNA, 336 bp, Glycine max
  Clone ID: LIB3065-022-Q1-N1-A6
gcttggagaaccagcatcgccagatgcctatgagatgctatctagctgggaaccaagagcaagagatggtaaaatatcacccagagcaaggaggtcatcaaagccggagaggaacgcatcaccaggaagaagagaacgaaggaggcagcatattgagtggcttcaacctggaatactcggaacatgcagtcatcgtggacaagcagatagcgaaaaacgtacaaggagagagcgaaagcgaagacaagggagccattgagacagagaaaggaggcctgagcgtgattaaaccacccacggacgagcagcagctgagaccccaggaagaggaagaag

SEQ ID NO: 39297 - DNA, 398 bp, Glycine max
  Clone ID: LIB3065-022-Q1-N1-A7
cggctcgagcggctcgagctcagcaaaaaacactgtagcttccaagctcggatacggcgacagcactgaaacaactcaaacaagccatcaagaacagaacacaggcaatgaaaaaccatcaacaatctcatcagcaacctctgcaatcactgataaagctgtaactgccaaaaatgttgtagcttcaaagctcggatatggcgacaacactgaaacaactcaaaccactctagcaaggaatcaagaagagaacacaggcaacgagaaaccctcaacaatctcatcagaaacctctgctttagctgataaagatgcctcggcaaaaaacagtgttgcctctaagcttggtttcggtgacacagcaggaacacatgaagagaagagaactaaccatgctg

SEQ ID NO: 39298 - DNA, 313 bp, Glycine max
  Clone ID: LIB3065-022-Q1-N1-A8
ttaggttcttgcatgatcgtgctggtgaaggtgatggtgaactgcagagcattctgtcacgttctgttcaagatttgttggctgtcactgaacagatttatgccatcactgaccgcacaaaactcgtggatgccattaagtgcttaaaggctgctatgttaaatgctgttcctattgttagagcctctgatgttgatcaagatgatcacaagcagcacataaatgcaagtctagctcattaattctcgatcccttaattgttattccttcctaattttggtgtcacataccttacgtacggttttgcagggca

SEQ ID NO: 39299 - DNA, 303 bp, Glycine max
  Clone ID: LIB3065-022-Q1-N1-B10
agaacagttggtgcaactaatgtttgaaacattcaatatatcaggattttatgcctcagaacaagcagtgttatcactctatgctgtgggacgtatctcaggctgcactgttgatattggacatggaaaaatagtggaaagaatcatgtacttaggctgctatattcggtaacataggttcctaggattaatttatcagcagtttcacagttccaccatgccagatattgcaccggtaattgagggtgctgttcaccacatcgcctcgagaagatttgagtttggaagtactgatctaactaa

SEQ ID NO: 39300 - DNA, 383 bp, Glycine max
  unsure (1)..(383): unsure at all n locations
  Clone ID: LIB3065-022-Q1-N1-B11
cagccctccaataatgttgtcagtgatggcaagcatgataatgtgactggtaaatctttagcagactctaaagtttcccctaaaaaggatgcttttcaggtgaagtctggcgtctgggctgattcactaagccgtggactgattgatctcaatataactgctcctaaaaaagtatcccttgtggatgttggaattgtgggtggattgagtgatggatccgatgaaagggagaaaggccctccaccttcattttacatggggagagctatgggttcaggatctggtcttggaatgggtaggtctggattcactccttcacagccaatagctggagacgactttntctcaaaccttggaaaccaacaacaataaatttggtgggg

SEQ ID NO: 39301 - DNA, 464 bp, Glycine max
  Clone ID: LIB3065-022-Q1-N1-B12
aaaatgcaatctatgtccctgacgctgagcaagaggctctccaattcaaagcctctcttcagaatctcttccagcctcgtcgctcacgcatcctccgccacaacctctccgccgccaccttcgccgccagtcccctctccctccgccctcaacagcctcctcaccgctccgtggtccgccactcagtcacgcggaatcacgctttccggatctgatattagagtcgggaatctcattggaaaccgaggacgcgctcacgagggttctaaaactgtaatcgccttctggaaggaccggccaaagcacttcctgaggttccgcctcaaagggtacttggtatgccaccagtgctactacaggaggatggtgccgaaaggaaagaacgaaaccgtggattgagtaaggcaacgaagaccaagagagagcagctcctaaaagctactgcaagtgcctctcttcttcta

SEQ ID NO: 39302 - DNA, 192 bp, Glycine max
  Clone ID: LIB3065-022-Q1-N1-B2
tgaagaagaagaagaagaccaagacgaggatgaggagcaaggacaagggaggccagaaaggggaaggtctgagtcttaaagaggaccacgaagaccttagaattagaacccctttcacttcaactcttaaagggttccaactttttttaaaaacccatattggcaacgttggggtcttcaaaaggtcaacca

SEQ ID NO: 39303 - DNA, 213 bp, Glycine max
  Clone ID: LIB3065-022-Q1-N1-B5
aaaaaaaaaaagaagaaaaaaaaaaaaaaaaaaaaaaaaaaaaaaggaaaaaaaacaaaaaaaaaaaaagaaaaaaaaaaaaaaaaaaaaaaaaaaaaggggggaaacaaaacaagagaacccagagaccagaaaaataaaatagggtgagaaacttgcaagcacaccatggcacacaaaagagagagactgatgccaacatagaccgaaaca

SEQ ID NO: 39304 - DNA, 381 bp, Glycine max
  Clone ID: LIB3065-022-Q1-N1-B6
gacatattcatgaacactaattaagtggttctaaattgaaaagctttctagctggtcataatatcaccattactgatggtattgacaaaactagtgcaactttgcaatttagaaagttagcagattgtgattttctcaagagaaactttaagcagatgtctaatgttttgtgggtggctcctgaggacaaggcgagtttatggtcacaacttcattatgtttcgtgtaataatctggaaatgcaagaagcttatcttgtcaatctcgtaaatgtgttacgagaattgtatttgcacagtccagaggaagctcgccaattgagaaggaaagctctctctcgtattgaatggctgcaaaaagctgatgtgcctaccatagcac

SEQ ID NO: 39305 - DNA, 316 bp, Glycine max
  Clone ID: LIB3065-022-Q1-N1-C1
aaattcacaatttttggttaaacttcatctattgaccgtactacacccgcgagaactgcaccgaactcgtggaataaatcactgcaccgtcccactccgtaaaaccctaattcgttcacacctaaacccttttccttttgttgtttttcttcacttccaaggcttcactttctcagaattaaaacaaatgcttttcttttttctttttcttttttggtttcttattcagctggttatttattctccttcatcttcacgccctgttccttgtcgaggaaaagacccattccatcacccatgtatgatgtaacaaaca

SEQ ID NO: 39306 - DNA, 226 bp, Glycine max
  unsure (1)..(226): unsure at all n locations
  Clone ID: LIB3065-022-Q1-N1-C10
ataacaatgtcgttgattccaagtttcttcggcaccgggcgaagaaccaacgtcttcgaccccttctccctcgacgtgtgggacccattccatggcttccccggcaccaccgccctctccgctccgcgctccgagacggcggccttcgccaacacgcgcatcgactggaaggagacggcggaggcgcacgtgttcaaggcagacctgccggngctgaagaaggaag

SEQ ID NO: 39307 - DNA, 317 bp, Glycine max
  Clone ID: LIB3065-022-Q1-N1-C11
caccaccagcacgctctcttccatttttccgcaaaacaaacacagttcacatacttttccctcactttctcggcggccaaacgccataaaaatggcgtcgaaggtggcgctgatggcgctgttctccgtctcgctcatgttctctccgtcgcaatccgcggacttcagcgtagatataggctacgaatccgtgaatgaggcggaggtgaacctgatgcccagccaatccctgatctccgtcatgagcaacgagatgtccaaacgcagatcgacggcgctgatctccttccatgacggcgaccgcatcctcagagagg

SEQ ID NO: 39308 - DNA, 407 bp, Glycine max
  unsure (1)..(407): unsure at all n locations
  Clone ID: LIB3065-022-Q1-N1-C12
agttgtggtcaacgctacctcaaatctgaatttctttgctattggtattaatgccgagaacaaccagaggaacttcctcgcaggttcgcaagacaatgtgataagccagatacctagtcaagtgcaggagcttgcattccctgggtctgcacaagctgttgagaagctattaaagaaccaaagagaatcctactttgtggatgctcagcctaagaagaaagaggaggggaataagggaagaaagggtcctttgtcttcaattttgagggctttttactgaattagtatgacctaaaatgtatgctgtaataacttcataatgagccanggaaggattgggctatggtacctttgactaaaccttaacctttgattaattaaatgaccggctattaagcgcttggttt

SEQ ID NO: 39309 - DNA, 290 bp, Glycine max
  Clone ID: LIB3065-022-Q1-N1-C2
tcacctcatcacatctgaatatctcacgccgaagaccgtgcgttgaaatcttgcaaggacgagatccaagcatcgttgttttccttcccagaatttacgctcttcttactatcatcaagatacaaaatggaatatcgacggaccagtggtaggcaggaaaccggtggccgtgacagaagacaatctaaaagggaacaggcatatcaggactctcttattgaggatttgtcacaggattttcgtttgccaatcaaccacaggccatcagaaaatgttgatctggacaacgt

SEQ ID NO: 39310 - DNA, 271 bp, Glycine max
  Clone ID: LIB3065-022-Q1-N1-C4
ggctcgaggaactattctgcgtagtgatctattggcaaattttctgacagagggcaattttagagcaagtgttgatttgcagcgcactcatcgtattaaaggaatgattaaaatggtggccacagttggtattcctgagaatacaggtatatcattggcctgtgctatgaatagatcttttagggggcgtgccagttctgatatttacaccatctgctctcaagactgtgaattatggaatcctgcttgcacaaaagccatgactatgtca

SEQ ID NO: 39311 - DNA, 405 bp, Glycine max
  Clone ID: LIB3065-022-Q1-N1-C8
caataccaaaatgaccaagcttacaattctcctcatcgctcttctcttcatcgcccacacctgctgcgcctccaaatggcaacagcaccagcaagagagctgccgcgagcagctcaaggggatcaacctcaacccctgtgagcacatcatggagaagatccaagctggccgccgcggcgaggacggcagcgacgaagatcacattctcatcaggaccatgccgggaagaatcaactacatcaggaagaaggaaggaaaagaagaagaagaagaaggacacatgcagaagtgctgcagcgaaatgagcgagctgaaaagccccatatgccagtgcaaagcgctacagaagataatggataaccagagcgagcaactggaggggaaagagaagaagcagatggagag

SEQ ID NO: 39312 - DNA, 386 bp, Glycine max
  Clone ID: LIB3065-022-Q1-N1-C9
attctctccattgtctttgaacactcatcaccatggccaagcttgttctttccctttgtttccttcttttcagtggctgcttcgctctgagagagcaggcacagcaaaatgagtgccagatccaaaagctgaatgccctcaaaccggataaccgtatagagtcggaaggtgggttcattgagacctggaaccctaacaacaagccattccagtgtgccggtgttgccctctctcgctgcacccttaaccgcaatgcccttcgtagaccttcctacaccaacggtccccaggaaatctacatacaacaaggtaatggtatttttggcatgatattcccgggttgtcctagcacttatcaagagccgcaagaatctcagcaacgagga

SEQ ID NO: 39313 - DNA, 316 bp, Glycine max
  Clone ID: LIB3065-022-Q1-N1-D1
catgattggtgtgcagcagtgagaaaactgttgaacctactgcttgatggaactgtaaatacaggagatcatccttccttgtatctcgcgctttcagagatgggtctccttcacaaagctgtaaggagaaacagcaagcagttagtggagtgtcttttgagatatgttcctgagaatatttctgataaactaggacctgaagacaaggcactggttgatggcgagaatcagaccttcttgtttagacctgatgttgttggtcctgctgggttgacaccactccatatagcagcccgggaaagatggttctgaggat

SEQ ID NO: 39314 - DNA, 439 bp, Glycine max
  Clone ID: LIB3065-022-Q1-N1-D11
gtgattttctcaagagaaactttaagcagatgtctaatgttttgtgggtggctcctgaggacaaggcgagtttatggtcacaacttcattatgtttcgtgtaataatctggaaatgcaagaagcttatcttgtcaatctcgtaaatgtgttacgagaattgtatttgcacagtccagaggaagctcgccaattgagaaggaaagctctctctcgtattgaatggctgcaaaaagctgatgtgcctaccatagcacagattgaagagttccattcgatgcagaggatgatgaatgctcctgattcaaatgataatattgatttactggtgagcattgatttgttgggtttacaaggaacaggtaaagcttttccaaacaaaattggttttgatgataagcctgtggtggctaacacacaagaattctttgatggaaaatt

SEQ ID NO: 39315 - DNA, 275 bp, Glycine max
  Clone ID: LIB3065-022-Q1-N1-D2
ctaattttcaaataagtcgaactatctaaatataaaactctgaaccggttaaaatagtttaaaatcaattcagttcaatttttttaccaaactaatttttgcacacccctaaccaaaatcagttgggttggttatttaagctttatgtaaaaaaaaaaaaaaaaaaaaaaaggtgtgaatgaaaacattagatagcttaaagagaagtaaagcattacatatatttgaaatatgatgtcataactcataaggcataacatgctatggcttggttc

SEQ ID NO: 39316 - DNA, 286 bp, Glycine max
  Clone ID: LIB3065-022-Q1-N1-D4
aagaaaacaattatcagcaataattaaattataggcacgattctggcatgtccaattctcaacagaatgagcttcattattcaaccgccaacggggacgagaggtcaaacccttgtttagccaacacgcgctgcagcttctgctttccctgttgcttcggttcccgtcgcgactcggccaccctcgggttcgggtggtgggagcgcgtgcgagccacgtcgtcatggtccgagtcgcgcttcgaggcgcaaccggtgaccgggagttccggtgggccgtggtggtc

SEQ ID NO: 39317 - DNA, 389 bp, Glycine max
  Clone ID: LIB3065-022-Q1-N1-D5
gatagttcagtgtctacaataccaggtgattttgtcattggtgttaagttgacaaccataaacaatatgtgtgcatatgggctcaatcctggtatttcagttctcgtcttttgggcaccattcctcagtctatttcacagcaaactgtttggaatcaaatggcaacagtgagaacaccattgaattttgatcctagcaagcaaagcttttgtcaattttctattgaccttcttggtggaggaattttagtggacaaaactggagattggatcacacttatacaaaattctccaattagtaacttgttgagagttgctgcttggaaaaaaagctgtttaatggttaagattgtgatgtctgggaatgcagcaatcaaaaagaatgattgg

SEQ ID NO: 39318 - DNA, 400 bp, Glycine max
  Clone ID: LIB3065-022-Q1-N1-D8
gcagaaagagaagcattagcaaaagcaagaagaactagtctaagcagaaatggcctcttcagtgatggcatctgtggccctcaaacctgcccctttcactgttgagaagtcctcagttagaggccttccctccctctcaaggaactcctcttcattcagagttgtggccagtggtggcaagaagatcaagactgacaagccttatggaattaatggtggcatggctttgagggaaggagttgatgcatctggcaagaaaggaaagggaaagggcgtttaccagtttgtagacaaatacggtgctaatgtcgatggttacagtcctatctacgacaccaaggactggtctccaaccggtgatgtctacgctggcggtacgactggcttggctatctgggct

SEQ ID NO: 39319 - DNA, 366 bp, Glycine max
  Clone ID: LIB3065-022-Q1-N1-D9
ctctacaatggcctcagccgcatcccccaccactttctctctcctccactccgccaccccttcctcctcctccaccgccacctccgcctccccctccccctcgcgcgtgcagctcacctcctccctccgcgcccgcccgctgcgccgcctgggcttcgccgcggcggacccgctgctcgcggcgagtgtagcggcgcgcgtggcggcggtgagaggaggaggaaagggcgcgaggggggtggtgtcgatggcgaagaagagcgtgggggacctgagcgcggcggacctgaaggggaagaaggtcttcgtcagggccgacctcaacgtcccgctcgacgacaaccagaacatcaccgacgacaccag

SEQ ID NO: 39320 - DNA, 339 bp, Glycine max
  Clone ID: LIB3065-022-Q1-N1-E1
aaatggcaacagtgagaacaccattgaattttgattctagcaagcagagcttttgtcaattttctattgaccttctcggtggaggaattttagtggacaaaactggagattggatcacacttatacaaaattctccaattagtaacttgttgagagttgctgcttggaagaaaggttgtttaatggtcaagattgtgatgtctgggaatgcagcagtcaaaaggagtgattgggcctcattggtacaagtgtttttaacaaacagcaacagtacagagcattttgatgcatgtaagtggacaaaatcagaaccacattcctggggaataatcttcccaa

SEQ ID NO: 39321 - DNA, 100 bp, Glycine max
  Clone ID: LIB3065-022-Q1-N1-E12
caactacgtagtcgaggttggaatattttgtactgaatatcctcatgttttcttcaagtttagttaaaaaataatagatactcagcatgtcatttctctg

SEQ ID NO: 39322 - DNA, 340 bp, Glycine max
  Clone ID: LIB3065-022-Q1-N1-E4
agcaaatcctaaaaagttcactgagatatatagaactatcttcaatttcacaaaatgaagaaagtgtttgtcacatttgtagctctgctagttgtatttggtcttacagtgacagcttcagagtcaaagccaccagtcacaacaaattcagcaccaaatgactacaattgttcacaagtgatgaataacttgtttggttcgtgcgtagattacctcattggtggagatgctgttccttcaggtgtttgttgccaaagtgttaatgcagtgaaagcatcaacacaaacacaaattcaacgagtggctgcatgtatgtgctattacaacgtagcaactaaac

SEQ ID NO: 39323 - DNA, 355 bp, Glycine max
  unsure (1)..(355): unsure at all n locations
  Clone ID: LIB3065-022-Q1-N1-E8
cgtgatccgatgcaaaaggagttggcaacccagaagaaagaggcaaagatgagccaggcagagctggacaagcaggcggcgcgtcagcataacacggcggcgaagcaggctgccacggcagggcacatgggacaacccatggggacccatcagacgtcagctatgcccggtcatggaaccggacagcccacgggccatgtcaccgagggagtggtgggctcacaccctattggaaccaacagaggcccgggtgggactgctacggcccataatacccgtgcggngggaaacccaaatgattatgggtatggaactgggggtacttacaattaaataatgatgatttagaaaagga

SEQ ID NO: 39324 - DNA, 251 bp, Glycine max
  Clone ID: LIB3065-022-Q1-N1-E9
cggctcgagattaaaaatttcacttttatatccatgtaaattgcatggaggccatgtgtttatttataagaactaattctattgttaaaaaatcaatacatctttagtaaattaatgtaattcacaattatatataaaattcaaaattagtgtcattactataactgttcaatcaaaatatctatcaaaagttaaaagcgaatagaatggataatcttcaatttttctatggctaaaaattcaattatacc

SEQ ID NO: 39325 - DNA, 355 bp, Glycine max
  unsure (1)..(355): unsure at all n locations
  Clone ID: LIB3065-022-Q1-N1-F1
attcaaaggccatagtggtactagtgattaatgaaggagaagcaaacattgaacttgttggcattaaagaacaacaacagaggcagcaacaggaagagcaacctttggaagtgcggaaatatagagctgaattgtctgaacaagatatatttgtaatcccagcaggttatccagttgtggtcaacgctacctcagatctgaatttctttgcttttggtatcaatgccgagaacaaccagaggaacttccttgcaggttcgaaagacaatgtgataagccagatacctagtcaagtgcangagcttgcgttccctgggtctgcaaaagatattgagaacctaataaagagccaaag

SEQ ID NO: 39326 - DNA, 424 bp, Glycine max
  Clone ID: LIB3065-022-Q1-N1-F2
gttgaagctatgggaagcagattgggaagaagagtggtgcagttggcgaacctccccataaagcttctgatgccgaacagcttcaccaacatccacgaaatcgctctcaagaccattccttcggccacgaagatcgagatcaagcgcgtccttcaatccctctacggcttcgatgtcgataaggtccgaacgctcaacatggagggcaagaagaagaagcgtggtggcttgttgattgcaaaacccgactacaaaaaagcctacgtcaccctcaaaacccctctctccatttacccggatctctacccgatccgaatcatcgatgaggacatgaagaggatcaataagcaagccaagtccagcctcgttcaggaccacgaggcccacaccgaggcccaccaccactggctccatgaccgaagga

SEQ ID NO: 39327 - DNA, 396 bp, Glycine max
  Clone ID: LIB3065-022-Q1-N1-F4
ctcaaaaaagagaagtgactgatgcaattgaaaagccaaacataaacgagtcaaatgctgttcaggataatgtttttcagcatcaccttcccttgcgtcaggaaattttggctcataaaaggaaggcagttactttgaaaagagaagggaaactaacagaagctaaggaggaacttccgcaggccaagctgttggagaagggcttggaggatggaaatatgctgccagacactgcctcttcctctgcctctgccactgtgaactatgcttcccatgcatcaaatgttgtacaaaagaaacaagaatcgtcaaatgttagtgcaaagccattgagtagtcgtgatcgatttaaattgcaacaggagtctctagggcacaaacgtcaagccctaaagc

SEQ ID NO: 39328 - DNA, 366 bp, Glycine max
  unsure (1)..(366): unsure at all n locations
  Clone ID: LIB3065-022-Q1-N1-F5
tttcctctctatgtactttgtctaaaaatataagaattaggaaatgctaaagaagcagaagaaacatatggagttcaacttgagaatatttagcaagttcgtgtagatgaaaactttaaatatttcaacttgagaaagaatgacagtccatttcccatgattgaaatgatgattttgtttgtactttgaccttatttttttaactggcttttgcttcttctgatattgggatttgggaatttgtcaccggtcctttttttctcattttgcccaacatgtatttgatcaagtatgtgggagaactgaattgaatagcaacacattactttttttatgtataaaaaaaaaaacctaacanaaaaaaga

SEQ ID NO: 39329 - DNA, 337 bp, Glycine max
  Clone ID: LIB3065-022-Q1-N1-F7
cttggtgatgctcagcatgttgaagaggcagagaagataggactggactggatggatgtagaagccttgaaaaagctaaacaaaaataagaagttggtgaagaagctagctaaaaaataccatgcttttttagcatctgaagcagtcattaagcagattcctcgtcttttgggtcctggtctcaacaaagcaggaaagttccctacacttgttactcaccaggaaactcttgagtcaaaggttaatgagtctaaggccatggttaaatttcaacttaagaaagtgctctgcatgggagtagctgtgggcaatgttagtatggaggaaaagcaaatct

SEQ ID NO: 39330 - DNA, 317 bp, Glycine max
  Clone ID: LIB3065-022-Q1-N1-F8
gggtcagttggctgggcaaaccctgtaaaaaggctaagaacagattctgggaagagaagaccaagccatacatagggtttccctttctcgggatataaggatggtaaataatggacatattgctactagtctcaggaagaattttagtggccctttcatagagtttacccccatactgttaatatagaattaggcctttaaaaaagtgcattttacggctacctaaatggttaaaatgtaagttctccaatttttttgtttggatatcttcatcgtgcagttgcagctacagctattaaaacttttctttagatgat

SEQ ID NO: 39331 - DNA, 309 bp, Glycine max
  Clone ID: LIB3065-022-Q1-N1-F9
aaatttgtttaaattgtctcttgatgatgttgaaactcctaaaggttgcatgttggatcttaaaatttctcagtctaaaattgcactgtccaagaacacagttggaggaactattctgcgtagtgatctattggcaaattttctgacagagggcaattttagagcaagtgttgatttgcagcgcactcatcgtattaaaggaatgattaaaatggtggccacagttggtattcctgagaatacaggtatatcattggcctgtgctatgaatagttcttttagggggcgtgccaggtctgatatttacac

SEQ ID NO: 39332 - DNA, 429 bp, Glycine max
  Clone ID: LIB3065-022-Q1-N1-G1
tgactcgttcttcttcgtcgttatcttcttcttttgttgtttgtgtgtttgttttttctctcacctgaaaatgtcttgctgcggtggtaactgtggttgcggaagcgcctgcaagtgcggcaacggctgcggaggctgcaagatgtacccagacttgagctacaccgagtcaaccaccaccgagaccttggtcatgggagtggcaccagttaaggctcaattcgagagtgctgaaatgggtgttcccgctgagaacgatggctgcaaatgtggagctaactgcacctgcaacccctgcacttgcaagtgaggtgttggagagctaaagcttcaagcagaaatggcccttaggaaatatgataaaaactatatgtagtttcaaactttcaaaatattgtataaggaataatgtgcacttttgtggtttgg

SEQ ID NO: 39333 - DNA, 311 bp, Glycine max
  unsure (1)..(311): unsure at all n locations
  Clone ID: LIB3065-022-Q1-N1-G2
ggggacttacgttagggaaacgccaccaaatgctgcgtcatctcatcaccatcatggaatctccaatgctcatgaaccaaatgctcgctccatataaaattaatgaagagtactgttcagtaggagaacaagacttcttggacttgattagcttaactctcagtgattggtgttagagtactgttgttgaggatggttaattttataattaagggctgggaattggggagttagtatatattcctaatcctaattatgtgcatctttaatttatggaataactntgttttttgttttaacttctgataaaa

SEQ ID NO: 39334 - DNA, 380 bp, Glycine max
  unsure (1)..(380): unsure at all n locations
  Clone ID: LIB3065-019-Q1-N1-B11
agtcgatgcccaccctatccgagctatgaagttttctgtctcacctgttgttcgtgttgctgttcaatgtaaggttgcatcagatcttcccaagcttgttgaaggtcttaagcggttggctaagtcagatcctatggttgtttgtaccattgaggagtctggtgaacacattgttgctggtgcaggagagcttcatcttgagatctgtttgaaggacttgcaggatgatttcatgggtggagctgagattatcaaatctgaccctgttgtgtcattcagggagactgttttggagagatcatgccgcaccgtgatgagcaaatcacccaacatgcacaaccgtctgtacatggaagcaagaccattggangaagtcttgc

SEQ ID NO: 39335 - DNA, 365 bp, Glycine max
  Clone ID: LIB3065-015-Q1-N1-H1
taaaattcttccaccaagttatgggtttccttgtgttgcttctgttgtccctcttaggtctctcttctagttccagcatatcaactcatcgttccatattggaccttgacctaaccaagtttaccacacagaaacaggtgtcttcactgttccaactatggaagagtgagcatggacgtgtctaccataaccacgaagaagaggcaaagagacttgagattttcaagaataacttgaactatatcagggacatgaatgcaaacagaaaatcaccccattctcatcgtttaggattgaacaagtttgctgacatcactcctcaagagttcagcaaaaagtacttgcaagctcccaaagatgtgtcg

SEQ ID NO: 39336 - DNA, 311 bp, Glycine max
  Clone ID: LIB3065-015-Q1-N1-H10
gttcaatatcctagtacaccgtattaaagaatttaagatgtacgtatgatgagagcgcggttcccattactgttgctgggagttgttttcctggcatcagtttctgtctcatttggcattgcgtattgggaaaagcagaaccccagtcacaacaagtgcctccgaagttgcaatagcgagaaagactcctacaggaaccaagcatgccacgctcgttgcaacctccttaaggtggaggaagaagaagaatgcgaagaaggtcaaattccacgaccacgaccacaacacccggagagggaacgtcagcaaca

SEQ ID NO: 39337 - DNA, 349 bp, Glycine max
  Clone ID: LIB3065-015-Q1-N1-H11
ctcaccgattgctagaatggaatttcgatgctcagtcaggtcgtttaccattctcttctctcttgctcttgcaggagagagccatgtccatgcatcgctacctgaggaagattattgggaagctgtttggccaaacactcccattcccactgcactgcgagagcttctaaagcctctccctgcaggtgttgaaatcgatgaactccctaagcaaattgatgatacacagtacccaaaaacattcttctataaagaagaccttcatccaggcaaaacaatgaaagtacaattcaccaagcgtccctatgcacaaccttatggtgtatatacatggttaacggatattaaa

SEQ ID NO: 39338 - DNA, 260 bp, Glycine max
  unsure (1)..(260): unsure at all n locations
  Clone ID: LIB3065-015-Q1-N1-H12
caaaacagtaaagctaacttcaacacctttaattttctagaaggaattcagcggctgaataccaagcggagaagatgagtcaggagcagccacggcgtcccaaaggccaaaaccccatcaaatacggcgacgtttttgtcgtctccggcgaccttgcacagaagcccgtcgcaccggaagatgctgccatgatgcaaagcgcggaaactcgagtgctcggacaaacccaacccggcggagcagcttncgtcatgcaatct

SEQ ID NO: 39339 - DNA, 186 bp, Glycine max
  Clone ID: LIB3065-015-Q1-N1-H2
gagaggccgaccgagagagcgagggagcatggaggagggaaagttgagagagctgaagcaattcatagagatatgcaagtccaatccctcacttctccacaatccatctctttcattcttcaagacttatcttctcaacctcggtgctcgcatccctccccaacccaaaacggaaccaggtgattt

SEQ ID NO: 39340 - DNA, 60 bp, Glycine max
  Clone ID: LIB3065-015-Q1-N1-H3
caagctgttgagaagctattaaagaaccaaagagaatcctacggtgtggatgctcagcct

SEQ ID NO: 39341 - DNA, 244 bp, Glycine max
  Clone ID: LIB3065-015-Q1-N1-H6
ctccgatctacagatagatgagatgaattttagacgcactgatcgattgcaccattctcttctcgtctgctctcctctaaaggaatatctcgccacatattaaatgttgcaagctcactgaagatgaggatgcacgccttttggttttgactttattattctctattcaaaagtatcctattcgtctgttacttttacataatctgtactccatgttgaactattgaatattgataatgctcct

SEQ ID NO: 39342 - DNA, 366 bp, Glycine max
  Clone ID: LIB3065-016-Q1-N1-A1
ccacaccctataaataaacactctttgtgtgtctgcattttgagtgattccctgattcttcatccatagacatggccaccgtcacttctgcagccgttgctattccctcattcactggcctcaaggcaagcgcaggcaaagtgagtgccgcagttaaagtctcagctccccaagccacaaggttgggcatcaaggcttcgctgaaagacgttggagtcgctgttgtggccactgccgcgagtgcagtgctggctagcaacgccatggccattgaagtgttgctgggtggtgatgacgggtctctggctttcgttcccaacaatttctccgtggcctctggggagaagatcgtgttcaagaacaacg

SEQ ID NO: 39343 - DNA, 222 bp, Glycine max
  Clone ID: LIB3065-016-Q1-N1-A12
tgaaatccaaaactggcggaaacggtctcactctcactctcacaaacgagacggccgtcgccgcatcggcactcgggaggtccgcggtgccggaggcgggtgcggccggcgaaggacttggccgagagccggcggctggtggccggcatcatggcgcggcggagcctccgatacttcttcctgctgccgctggtgtacatctcggggctgctgatgtgcgtg

SEQ ID NO: 39344 - DNA, 347 bp, Glycine max
  Clone ID: LIB3065-016-Q1-N1-A2
aggaaataattgatctttgaaaatgcagggaggaaagaaagctggagagtccatcaaggaaacagctgcaaacattggtgcttctgccaaggctggcatggagaaaaccaaggccactgtccaggagaaggcagaaagaatgacggcacgtgatccgatgcaaaaggagttggcaacccagaagaaagaggcaaagatgagccaggcagagctggacaagcaggcggcgcgtcagcataacacggcggcgaagcaggctgccacggcagggcacatgggacaacccatggggacccatcagacgtcagctatgcccggtcatggaacccgacagcccacgggccatg

SEQ ID NO: 39345 - DNA, 236 bp, Glycine max
  Clone ID: LIB3065-016-Q1-N1-A3
ctcgagccgttatcagtatcattcattgtcactacgattgttcgtgaagcaagtattactcttgagaagaattaaaagatcatcatcacaataacaagatgagttcaggaattagagcatggagtgtggcagctagtgttggaattgtggaggccttgaaagaccaaggcatatgcacgtggaatcatgcattaagatcaagctaacaccatcgtaaaaaccatggtgggtcattc

SEQ ID NO: 39346 - DNA, 314 bp, Glycine max
  Clone ID: LIB3065-016-Q1-N1-A5
tgatgacttgggctgtgaagttagcagcctcctgtgcagggtcagtcatcatgaaccaccctggtcagattggaaatggctatgcccctgtcctcgactgccacacttctcacattgctgtcaagtttgctgaactcatgaccaagattgacaggcgatccggcaaagagcttgagaaggagcccaagtttttgaagaacggtgatgctggttttgttaagatgattccaaccaaacccatggttggtgaaactttctccgagtatccttcacttggtaggtttgctggtagggacatgcgtcaaactgttgct

SEQ ID NO: 39347 - DNA, 333 bp, Glycine max
  Clone ID: LIB3065-016-Q1-N1-A7
ctcgagccgaatcggctcgaggattgggagagttggaagactcggctcctttcagcttgcccttcatgtttgctttcctatcacttcaatcagcactccactagtccttcaccgtctccgatttacctgttgaaggcttggcgtgttgatcaaaaaggattgctacatgatattaatgaaatcctgtgcaaccttgaacttattattcagagagtcaaagcgatgccaaccccatatggaagggtgttagacatgttctttatcactgatgggatggaattgcttcacaccaaacagaggccagattatcgttgtgaatatctgattgatgct

SEQ ID NO: 39348 - DNA, 208 bp, Glycine max
  Clone ID: LIB3065-016-Q1-N1-A8
ctcgcaccgaatcttctccacgattgccagagtgggcagactcggctcctttcagcttgcccttcatgttagctttcctatcactccaatcagcactccactactccttcaccgactgccagttacctgttcaagggttggtccgctcatcaaaaaagattgctacatgacatcaatgaaatcctcagcaaccttgaacttattattc

SEQ ID NO: 39349 - DNA, 396 bp, Glycine max
  Clone ID: LIB3065-016-Q1-N1-A9
accttacgcattccatttctctctattcgctctctttcaatcacaacaacatggccgaacgtggaggcggagaccgtgccggtttcggtcgcggctttggcggtcgtggacgcggcggcgacaggggacgagggcggcgcagggcaggagggcgccgcgacgaggaggagaagtgggtcccagtgacgaagctggggcgcctggtgaaggaggggaaaattcggagcctggagcagatctacctacactcgctcccaatcaaggagcaccaaatcattgacaccctcgtggggcccaccctgaaggacgaggtgatgaagatcatgcccgtccagaagcagacccgcgccggtcagcgaacccgcttcaagggcttcgtggtggtcggcgacaaca

SEQ ID NO: 39350 - DNA, 296 bp, Glycine max
  Clone ID: LIB3065-016-Q1-N1-B10
cctcgtgacacttcttacctccctcttctgattatcttctacttacatcatctgcactcatctctccctatcggaccctgacctaaccaactttaccacacaacaacaatcgtattcactactccaaccatagcacagtcatcatctacatgtctaccattaccacaaagaagaggcttcgacacttgcaaatttcacgcataacttgaactatcttatgtacaagaactcatactgaaaatcaccccattcatcatcgttactatctaacaatatcactgacatgactcctcaac

SEQ ID NO: 39351 - DNA, 406 bp, Glycine max
  unsure (1)..(406): unsure at all n locations
  Clone ID: LIB3065-016-Q1-N1-B12
caattttggttaagagtcttgaaaaagcaagagaaaaaaaaatggcaaccatggcaaccatttctgatcaacctagagggtcctactcctatggaacctcatatggagcaccctatggaaccacgtatgagaccaacaccagcattaacaacccaccttcacgccaaacagtgaagttcataactgctgccactattggcatcacacttttgctcctgtctgggttgaccctcacaggcactgtcataggtttgatcattgcaaccnctcttcttggtatcttcagccccatccttgtccctgctgcgtttgtgctggtcctagttgcttctggctttttgttctctgggggctgtggtgtggctgccattgctgctttgncttggattacaactatgggtctggg

SEQ ID NO: 39352 - DNA, 130 bp, Glycine max
  Clone ID: LIB3065-016-Q1-N1-B6
caataattccttcacttgcagaacttagctctctgggtccatgagaataacttgattagtgttagccctaaaatttacctttaaaccttaccacagtgccaccacacattgtacaaatgcacacacacaa

SEQ ID NO: 39353 - DNA, 414 bp, Glycine max
  Clone ID: LIB3065-016-Q1-N1-B7
ctccccgcccaaaccctaactacctaccctattcggctttctcgcatccatcatgaaaggaggaaagttcaagaccgaatctaagagagcccatgccaaacttgctgtgaataagaagggcgccgtcaccaagactaggaaaccccccggaaaggggaaggcatcgaaagatcctaacaagccaaagaggcctccaagtgctttcttcgttttcatggaggaattcaggaaggtgttcaacacggaacattcctacaacaaagcagcgtctgctgtgggcaaagctgctggagcataatggaagacgatgtctgatgctgaaaaagcaccttatgtggcaaagtctgagaaaaggaaagtggagtacgagaagaacatgatagcttataacacgaaacatgcggaaggtcctac

SEQ ID NO: 39354 - DNA, 238 bp, Glycine max
  Clone ID: LIB3065-016-Q1-N1-B8
accaagttaatgttgcaatcgcattataataaccggccaaaggtgattgatagaaatttgcaagtttgaaaagaaacattgcatctcatccaccaaacaaggccgagcctgattaaaaggcaaggccaggagaaactggtgatccgggtgggacttgtggcgagaaccttgaaggttaacaacattttggtgaaagaaagaaccagggaaggaaaaccagggaagaaccaattgggac

SEQ ID NO: 39355 - DNA, 398 bp, Glycine max
  Clone ID: LIB3065-016-Q1-N1-B9
gcacgggacagcttaaacgacgccgcgctgatcaacgactccttacgtaaaggacgacggtgtcagacaaacggtgccggttggtggtgccgccacgctattacgctaatcgtatccatcaccctcatcaaaacccctcctttctcttaatttagaaaccctaattcagaagaaaaaagtcaccttctccagaatttgcgcgaacagggtaatggcatcttcttcagactcatggatgaaggaatataatgaagctgtgaaacttgctgatgatatcactggcatgatttctgaacgtagttcattccctgcatctggaccagaaacccagcgacatgcatctgctataagaaggaagatcacgatattggggaccagacttgatagcttgcaatctc

SEQ ID NO: 39356 - DNA, 250 bp, Glycine max
  unsure (1)..(250): unsure at all n locations
  Clone ID: LIB3065-016-Q1-N1-C2
tgagagtgcggnttcctttgntggtgttgctgcgaaactgtttggctgcatgagtttgtgtctcattaaaggtgagagacgatgagtataaccatttctacttgagaagctctaacagcttccaaactctctttgagaaaccaaacggtcgcattcgactcctgcagagattcaacaaacgcttcccacaacttgagaaccttcgagactaccggattgttcagantcagtcaaaacccaacacaatcct

SEQ ID NO: 39357 - DNA, 432 bp, Glycine max
  Clone ID: LIB3065-016-Q1-N1-C3
ctcgaacccgtccaaccgcttcagccccccacttccaaaaagaagcttcctgggacccaaacccaccaccacttttgccaggttttcaaaacccttccattattcaggtcccaaaggccaccaagattgccatttttaaaagccaacctgccaattttgcaaccccggtcaatccacttatggtaactatttaaccaacaaaagtggttgttgcttccatgattacccttattaaccaccatgatataactggtgccaatccagagaaaagacaccggtagacatcattttggtcgtggttacgacggtgacactaacaagcaacatgatgctactggtgtttatcccggaatagacattggtagagatcatgggactacccgtggttatggcctatacaccgacagacatcatggaactttctgggtgaat

SEQ ID NO: 39358 - DNA, 225 bp, Glycine max
  Clone ID: LIB3065-016-Q1-N1-C4
gtttagcctttctatcacctgaaaatgtcttgctgcagtggtagactgcgttgccgaagcgcctgcacgtgctgtaacagctgcagaagctgctagatgtatccagacttgagcgacaccgagtctagcaccaccgagaccttgatcatcggagtggcaccagctaatgctgaatttgagagtgctgatataggcgttcccgctgagaacgattgctgcaaatgc

SEQ ID NO: 39359 - DNA, 91 bp, Glycine max
  Clone ID: LIB3065-016-Q1-N1-C6
attttcaaatctgtatctagtcaccatcaatttagaggattctgaccaaatgctggtacattttgtagagattcaggataatgtagtattg

SEQ ID NO: 39360 - DNA, 263 bp, Glycine max
  Clone ID: LIB3065-016-Q1-N1-C8
caatttcatactatctctacaccgtgaagagaaggctaattccggtctattcctacaccataaacctttactcttaatgccctattacttgaatcatcttcatttaccttaacaaccaccaacaacacgcaccttatggtaacccggaacccttatcaaattccataaattacattccgggcaaaaaccctaccttcttgttcgggttcaaaagaaccacctggtccttcaaaccccgaaaatagacctttttatgccaccca

SEQ ID NO: 39361 - DNA, 366 bp, Glycine max
  Clone ID: LIB3065-016-Q1-N1-C9
gtgaacaagtcctcaagtttccaccacctcatgtcattcaagtgagtaagtgtgcatggatgaccgatgaagaatttgcaagagagatggttgcgggtgtaaatccatgcgtaattcgtggtcttcaagagtttcctccaaaaagcaatctggatcctacaatctatggtgagcaaaccagtaagataacagcagatgcccttgatctagatggatacacagtggacgaggcactagcaagtcggaggttatttatgttagattaccatgatgtattcatgccatatataaggcggataaatcagacatatgccaaggcttatgcgacaaggactatcctttttctgagagaaaatggaaccttaa

SEQ ID NO: 39362 - DNA, 308 bp, Glycine max
  Clone ID: LIB3065-016-Q1-N1-D1
gcagaccgagctagctagctagcacgcaagcacagacatggaggcaaagcgaggccatgccctcatgtgcttggcacgtgtttcactcttcctgtgcgctctaaccctatccgctgctcacggaagcaccacggttcaagacatcgcgagaaagttgaaactcggggacaacgagcttctgcgcacggagaagaagttcaaggttttcatggagaattacgggaggagctactccacagaagatgagtatttgcgcctgttggggattttcgcccagaacatggtcaaagcggcagagcatcaggcgc

SEQ ID NO: 39363 - DNA, 299 bp, Glycine max
  Clone ID: LIB3065-016-Q1-N1-D2
gcagaccgagctagctagctagcaagcaagcacagagatggagggaaagcgaggccatgccctcatgtgcttggcacgtgtttcactcttcctctgcgctctaaccctatccgctgctcacggaagcaccacggttcaagacatcgcgagaaagttgaaactcggggacaacgagcttctgcgcacggagaagaagttcaaggttttcatggagaattacgggaggagctactccacagaggaggagtatttgcgccgtttggggattttcgcccagaacatggtcagagcggcggagc

SEQ ID NO: 39364 - DNA, 336 bp, Glycine max
  Clone ID: LIB3065-016-Q1-N1-D4
acagaacgaagccacgcatgataataacaatacccttcttcgtggcttccctgtccactcggcactcacaattctcaacccaaccaccccctattaaccctcaccgcaatctctgattcgatcttcttcaatttcggggtttcccatataccacaaggcataggcctgtgtgaatttgcgatatgctgggtaattgtcgccaagacccaatctcttgggtactcctttaccaacccccaccgccgcattaatcgtttttctattggaatcggacaaaggttccactgcgactgacactttcaaaggccaaaaaaatgctcgattcggtccttctgg

SEQ ID NO: 39365 - DNA, 247 bp, Glycine max
  Clone ID: LIB3065-016-Q1-N1-D6
gaaagcacaacaagaacgatcagcagctattctctcacgggcattgaaaatgtgccatgataagctggtgaaaggagagagtattattcttcatggagacgcaagggaaatgatttgtgaagccgcagagcaaatgcaaattaatctactagtcttgggtagccgtggccttggcacgctcaaaaggacatttcttggaaatgtaagcgactattgcgcacatcatgcaaaaacaccgatccttatt

SEQ ID NO: 39366 - DNA, 268 bp, Glycine max
  Clone ID: LIB3065-016-Q1-N1-D7
cgctgctgactaaaacacttctgaacctttaagtgggtttgtggtgattaattccgaatggaggataatgactagggatcaaatggaggattcagatacacctaaagccaatgatatacctagacgtgcttgtcatgtctggtcatcttacacagaagctcctcaaactattagatactttcataatgccattcactgaaacatgagtactcttacttacacagcctatctgaacatctaccgttatgcattctgccagctccaggaa

SEQ ID NO: 39367 - DNA, 375 bp, Glycine max
  unsure (1)..(375): unsure at all n locations
  Clone ID: LIB3065-016-Q1-N1-D9
tttcaatttctgatactgtgaagagtgaaaaaatgccgcaagagttggcatgggatttggaggagcttcgccacctccacagcatcgtcaaaagacctcgaactctctctctactctcctccgaaattcgcatcctcgaaaagttatcgtcatcagaggagccttctgcgcaggcttcgcagattccggcgccgattacgaccggaactaaggtggcgccttcagttgcactgaattatgccgcactcgcttcgttcagttgggatcaggatagcgacaaagttaagatatatgtgttaatggagggaattgatgaagacaaggttgaatctgagtttaagtcaatgtcatntgatgttaagttccatgatgttc

SEQ ID NO: 39368 - DNA, 343 bp, Glycine max
  unsure (1)..(343): unsure at all n locations
  Clone ID: LIB3065-016-Q1-N1-E1
ccaaaacagtaaagctaacttcaacacctttaattttctaaaagtgattcagcggctgaataccaagcggagaagatgagtcaggagcagccacggcgtcccaaaggccaaaaccccatcaaatacggcgacgtttttgtcgtctccggcgaccttgcacagaagcccgtcgcaccggaagatgctgccatgatgcaaagcgcggaaactcgagtgctcggacaaacccaacccggcggagcagcttccgtcatgcaatctgccgncaccaggaatgaacaggctggccttgtcggtcacccggacgtcaccgacgttaccggcgaccgtggcgtcacagtca

SEQ ID NO: 39369 - DNA, 296 bp, Glycine max
  unsure (1)..(296): unsure at all n locations
  Clone ID: LIB3065-016-Q1-N1-E10
ttcaggtactgcgtttcggaagcagacacagatggctcgtacgaagcaaagcgctcgtaagtccacaggaggaaaggctcctaggaagcagcttgcaaccaaggctgcacgtaagtctgcaccaactactggtggtgtgaagaagccccaccgttatcgtcctggtaccgttgctcttcgtgagattaggaaataccagaagagtaccgagcttttgatccggaagctcccctttcagaagctggttcgtgaaattgctcangacttcaagactgatctgcgtttccagagccacg

SEQ ID NO: 39370 - DNA, 284 bp, Glycine max
  Clone ID: LIB3065-016-Q1-N1-E12
ttcatgtactgcgtttcggaatcagacacagatttatcgtactgagcaaagcgctcataagttcacaggatgaaaggctcctacgaagcatcttgcaaccaaggctgcacgtaagtctgcaccaactactggtgttgtgaataagccccatcgtattcgtcctggtaccgttgctcttcgtgagattaggaaataccataagagtaccgagcttttgatccgtaagctccccttccacaggctgattcgtgaaattgctcatgacttcaagactgatctgcatt

SEQ ID NO: 39371 - DNA, 370 bp, Glycine max
  Clone ID: LIB3065-016-Q1-N1-E6
atttggaaatttggctgatgacaccatcaattttgaggctttggcccacaagctggtgcagtttggagagattcaggtaaaagttgtattgaaattttcacaagacgaatttcttacagcttggtcaactcacgtgcgtcctgctacaactctgttggctgatgggtgtccatatgtgtatgctatggtgcatgatagttcagtgtctacaataccaggtgattttgtcattggtgttaagttgacaaccatgaacaatatgtgtgcatatgggctcaatcccgggaagtcacgttcctggctttgggcaccattcctaagtctatttcacagcatactgtttggaatcaaatggcaacagtgagaacac

SEQ ID NO: 39372 - DNA, 193 bp, Glycine max
  Clone ID: LIB3065-016-Q1-N1-E8
cttctaaatggtttggtgaaaattagaaaaatggtcccgcctggttcacactttgaagccaagggttcccaactattatattccgggattaaggttattggcttgcttggccaacggaccaaatttggggaccttgaacccttgaggaaattaaggaaggaattattgacccattgggatggacttttgacaa

SEQ ID NO: 39373 - DNA, 277 bp, Glycine max
  Clone ID: LIB3065-016-Q1-N1-F10
gctaatgctgatcatataaccttagactatgatattatacatctggcacacggcattaatctatgctcatgatgctgatcagaaatcaaattgcttatcttgagatgctttacagattaccatactatatgttataagctgcatcatataagacatatgaatatgctaataactctgcacataatactaaacataatcctactcagtacaccatggactatctaagtaatgcatctaatgctactaattacactaaactcactgctccttataaaac

SEQ ID NO: 39374 - DNA, 346 bp, Glycine max
  Clone ID: LIB3065-016-Q1-N1-F12
acaaaggcaaaagatgtcacaagagagaagggtcaacaaggcagtcttaaagcaggaaatgagacacaagacattggccaaaagggttatggtggagcaaaggataccattggtagagtggacaacattactacaccacttgctaaaaaggctcaagttgctggtagcaccactgttcagtatgctggagagaaatcagcacaagccaaagatgctacggtaggatcaatggagaaaactacaaaggatgctaaaggaagagaaaaagcaggaaccaaaggtcaaacaaagaagggtggtggtgaggaacaaggaaaaagaagagaagaaacaggagaagaaaaac

SEQ ID NO: 39375 - DNA, 340 bp, Glycine max
  Clone ID: LIB3065-016-Q1-N1-F2
gtccttaaacactcatcagtcatcaccatggccaagctagtttgttccctttgttttctgcttttcagtggctgctgcttcgctttcagttccagagagcagcctcagcaaaacgagtgccagatccaaaaactcaatgccctcaaaccggataaccgtatagagtcagaaggagggctcattgagacatggaaccctaacaacaagccattccagtgtgccggtgttgccctctctcgctgcaccctcaaccgcaacgcccttcgtagaccttcctacaccaacggtccccaggaaatctacatccaacaaggtaaggggatttttggcatgatatacc

SEQ ID NO: 39376 - DNA, 320 bp, Glycine max
  Clone ID: LIB3065-016-Q1-N1-F8
cgctgctgccgaaacccttccggaaccctaaggtaagtgagtgatcagtggttgagaatggtggagaaggcgaagggtagaaaggaggaggtggttacacgtgagtacaccattaacctgcacaagcgcctccatggctgcacatttaagaagaaagctcctaaagctattaaggagataaggaaatttgcccaaaaagccatggggaccaatgatgtgagggtggatgtcaagttgaacaagtttgactggagccagggaatcaggagtgttccaaggaggattagagtaagaattgctcgcaagagaaatgatgatga

SEQ ID NO: 39377 - DNA, 350 bp, Glycine max
  Clone ID: LIB3065-016-Q1-N1-F9
ggtgatgctgctcagaaaaccaaagactatgccagtgacactgcacagacatcaaaggactatgctggtgatgctgctcagaaatcaaagggctatgttggtgatgctgcacaaaagaccaaagaatatgttggtgatgcagcacagaagacaaaggattatgccactgacgcagcacagaagaccaaagattatgctactcagaagaccaaggactatgcaagtgatgcaactgatgctgcaaagaagactaaagattatgctgctcagaagactaaggactatgcaagtgaagctagtgatgttgcacagaacacataagattatgctgctcagaagaccaaggacta

SEQ ID NO: 39378 - DNA, 307 bp, Glycine max
  unsure (1)..(307): unsure at all n locations
  Clone ID: LIB3065-016-Q1-N1-G11
ttggtccttanacactcatcagtcatcaccatggccaagctagtgctttccctttgttttctgcttttcagtggctgctgcttcgctttcagttccagagagcaggctcagcaaaacgagtgccagatccaaaaactcaatgccctcaaaccggataaccgtatagagtcagaaggagggctcattgagacatggaaccctaacaacaagccattccagtgtgccggtgttgccctctctcgctgcaccctcaaccgcaacgcccttcgtagaccttcctacaccaacggtccccaggaaatctaca

SEQ ID NO: 39379 - DNA, 222 bp, Glycine max
  Clone ID: LIB3065-016-Q1-N1-G12
atcctagtacaccgtattaaagaatttaagatatactatgatgggagcgcgggtcccattactgttgctgggagttgctatcctggcatcagtttctgactgatttggcattgcgtattgagaaaagcataaccccactcacaacaagtgcctacgaagttgcaatagccagaaagactcctacaggaaccaagcatgccacgctcgttgcaacctccttaa

SEQ ID NO: 39380 - DNA, 419 bp, Glycine max
  unsure (1)..(419): unsure at all n locations
  Clone ID: LIB3065-016-Q1-N1-G4
tcgaggaaattacactcttcacattgatgaaggaatggccattaaatgacctctctatgatgagcctgaccatatacctgtgcatactgaagataagatattttacactgaagacgatttccgtgattttctgacccgccggggttggatatgtctaagagaatttgacagctacagaaatattgacaacatggatgatcttcgacctggtgccatatatcgtggtgtgagttgaaagcaggtacatggtgtggtcaatgttcagctaccataaaatgtctggagaactgtggtggngactgttcagatctttgatgtatgtgcggcactaacctggaatngtatttgttttaagttttgataatgcttgttataagtttatataagaaaaggaactaggtcctttgcacaaattccgg

SEQ ID NO: 39381 - DNA, 414 bp, Glycine max
  unsure (1)..(414): unsure at all n locations
  Clone ID: LIB3065-016-Q1-N1-G5
gtcgcaatcgcagtcgcagtcgcagtgtgtcacgctctccttgcaattcccgcagaagaaggtactctccatcccctgtgtctcatcgccactcgagaactttcaggcgccgctcttctttccacaagcgccgtcgaaagcacagaacctcttccttcccctctctttcacgcagacccacttccaaacccaagaaagatcaaaacaaaagcgagcgttaacacgaggaagagttgaaactattggaagaagagactgcaagaagactggaagaaagcaattccgaaaaatgttgaggagaagcttatcacagaggaagtcaagttagaaatagaaaagcgcgtagcagagggagtgaagaaantgtttgatgatgttgaagctcaacttgaaaaagaaaaggaagatgctctt

SEQ ID NO: 39382 - DNA, 128 bp, Glycine max
  Clone ID: LIB3065-016-Q1-N1-G6
atttgttgactatttcaattgagataaaaaagtgtaatttagggtcccagctgatccaactctccctccccttattcttgcttgtatatactgagttttttttttctcgtaaaaattaaataattctt

SEQ ID NO: 39383 - DNA, 286 bp, Glycine max
  Clone ID: LIB3065-016-Q1-N1-G8
tgacaccaatagacatcatggaactaccggtgtctatggtatagacaccgataggcaacaacatgggactactggtggctatgccggtgacactggtaggcaacatgggaacatcggtggcccttactatggaaccaacaccgcagacaccggtactggtcccagaagtggaaccacgggcggcaccggttatggaggcactggtggcactgattatggaacaactggtggcactggttatggaaatggaactgggtatggagtcaacacttggggtgcgcacact

SEQ ID NO: 39384 - DNA, 387 bp, Glycine max
  Clone ID: LIB3065-016-Q1-N1-G9
cccaattctaattctcttaatttcctttccccaaaaaacaaaggcaaaaacggaaacatggctctttctttcaattccctcacactctccccattattctcctcttcttccacttttgctcttcccaccaccgctgcttcaagagtacacgtgattctgcccccgaagcccttgaacggtgttcgattctccgcacccaaaaggaggactgacgcggtggtcgtctccgccgccgccgaggactcgatttcgccgccggttcctccggcggagagcgagaaagagaatgtttccgtggagaagcttccgttggagtcgaagttgaaggagagagaggagcagaagctgaggatgaagctggcgaaaaaaataaggttgagacggaaa

SEQ ID NO: 39385 - DNA, 390 bp, Glycine max
  Clone ID: LIB3065-016-Q1-N1-H1
cggctcgaggctcatcatcaggtgaaggaatttctttaccagaacatatgcagtttaagacatgcacaaatgatgattatgaaaaaggaagaatttctgctatgcacctaatgaaagataagttttgctctatctatgaccaatctgatacacgttctgtatttgatgatttgaacctccccactccacaagccagggtaaatcaggaacatcagaaaaattacattgaacaatccaggttcaaaagcaggtgcatacattttgaggagttaccctactactctgggaagaatgtttctgatttactcttcccgcaagagcagttttctcaacactatttttctggttgtgggaatggggttgacaacacttgtttgcaagatgtgacag

SEQ ID NO: 39386 - DNA, 374 bp, Glycine max
  unsure (1)..(374): unsure at all n locations
  Clone ID: LIB3065-016-Q1-N1-H10
gcaccagtttcaccgcacgaatatcttgttgtttggagcgatcgcgagaaaagctctgtaaacatgttggtttaccaggacctccttacaggtgatgagcttctctctgactccttccgttacaaggaaattgagaatggaatgctgtgggaagttgaggggaagtgggttgttaaaggagcagttgatgtagacattggtgcaaacccttctgctgagggtggaggagaagatgagggagttgatgatgcacctgttaaggttgttgacattgttgacacattcagacttcaggagcaacccgcattcgataagaagcagtttgttaccttcatgaagaggtttatcaagaatttgactnccaagctcgatgc

SEQ ID NO: 39387 - DNA, 210 bp, Glycine max
  Clone ID: LIB3065-016-Q1-N1-H11
ttagaattagaaacaaagaaccgaagaaagccaagaggacatcgatgacaacgcattacggaaagatagcggtatagtccattcaggaaacagctacaaacattgatgcttctgccaaggctggcatggacaagaccaaggccactgtccaagagaaggcagaaagaatgacagcacgtgatccggtgcaaaaggagttggcaacccaaa

SEQ ID NO: 39388 - DNA, 446 bp, Glycine max
  Clone ID: LIB3065-016-Q1-N1-H2
cggctcgaggctcatcatcaggtgaaggaatttctttaccagagcatatgcagtttaagacatgcacaaatgatgattatgaaaaaggaagaatttctgctatgcacctaatgaaagataagttttgctctatctatgaccaatctgatacacgttctgtatttgatgatttgaacctccccactccacaagccagggtaaatcaggaacatcagaaaaattacattgaacaatccaggttcaaaagcaggtgcatacattttgaggagttaccctactactctgggaagaatgtttctgatttactcttcccgcaggagcagttttctcaacactatttttctggttgtgggaatggggttgacaacactgttttgcaagatgtgacagatacaggtggtgacttccctcttgatgaatcatatggacaagatcctgataatgat

SEQ ID NO: 39389 - DNA, 370 bp, Glycine max
  Clone ID: LIB3065-016-Q1-N1-H3
cggctcgaggctcatcatcaggtgaaggaatttctttaccagagcatatgcagtttaagacatgcacaaatgatgattatgaaaaaggaagaatttctgctatgcacctaatgaaagataagttttgctctatctatgaccaatctgatacacgttctgtatttgatgatttgaacctccccactccacaagccagggtaaatcaggaacatcagaaaaattacattgaacaatccaggttcaaaagcaggtgcatacattttgaggagttaccctactactctgggaagaatgtttctgatttactctttccgcaggagcagttttctcaacactatttttctgtttgggggaatggggttgacaacac

SEQ ID NO: 39390 - DNA, 351 bp, Glycine max
  Clone ID: LIB3065-016-Q1-N1-H4
acacaactacaagaaagaacttccttataaccaaaaccaacaacaactatggcaagttatcagaagcactacgatgatcagggtcgcaaggtcgacgagtatggcaatgttgagaggcaaactgacgaatatggcaacccggttcatgccactagtgtcacttatgtagccaccaaaagtgttggtggctacaatgatgacgctaataagcaacatgatattactggtgtctatcccgagaaagacaccggtagacatcattttggtcgtggttacgacggtgacactaacaagcaacatgatgctactggtgtttatcccggaatagacattggtagagatcatgggact

SEQ ID NO: 39391 - DNA, 114 bp, Glycine max
  Clone ID: LIB3065-016-Q1-N1-H5
ctcaaaactcttgtctttcattttgataattcccacactatggctgagcttcactaccaacaacaacaccaatacccttaccgataccctaatgatccatacgaacaacaaact

SEQ ID NO: 39392 - DNA, 286 bp, Glycine max
  Clone ID: LIB3065-016-Q1-N1-H6
ctcaaaactcttgtctttcatcatgataattccgacactatggctgagcttcactaccaacaacaacaccaataccctcaccgataccctaatgatccatacgaacaacaaactagctactccactcaggtcgtcaaggcggccaccgtcgtcaccgaaggcggctccctcttgatcctcgcctagttgatccttgccggcaccatcatcgccctcaccatcgtcacaccaccgatcgtcatcttcagtccggttctcgtccccacggtgatcaccgtcgcgctgc

SEQ ID NO: 39393 - DNA, 239 bp, Glycine max
  Clone ID: LIB3065-016-Q1-N1-H7
ctcataactctagtctttcattatgataattcccgcactatgggtgagcttcactaccaacaacaacaccaataccctcaccgataccctaatgatccatacgaacaacatactagctactccactcaggtcgtcaaggcggccaccgacgtcaccgacgtcggctccctctagatcctcgcctaattgatccttgccggcaccatcatagccctcaccatgctcacaccaccgatcgt

SEQ ID NO: 39394 - DNA, 420 bp, Glycine max
  unsure (1)..(420): unsure at all n locations
  Clone ID: LIB3065-017-Q1-N1-A1
caccgcattaaagaatttaagatatactatgatgagagcgcggtggccattactgttgctgggagttgttttcctggcatcagtttctgtctcatttggcattgcgtattgngaaaagcagaaccccagtcacaacaagtgcctccgaagttgcaatagcgagaaagactcctacaggaaccaagcatgccacgctcgttgcaacctccttaaggtggaggaagaagaagaatgcgaagaangtcaaattccacgaccacgaccacaacacccggagagggaacgtcagcaacacggtgagaaggaggaagacgaangtgagcagccacgtccattcccattcccacgcccacgccaacctcatcaagaggaagagcacgagcagaaggaggaacacgaatggcatcgcagggaggaaaa

SEQ ID NO: 39395 - DNA, 357 bp, Glycine max
  unsure (1)..(357): unsure at all n locations
  Clone ID: LIB3065-017-Q1-N1-A2
ggacgaccttcttcatctcatcaaagttgactttttgagcgaattgaatcaggcttgagaaggtatcctantgttgtttgttcaccttcatctccatgatggaatactgtaaagatgtcctcagctgtcttgattcggatacctctcttaagatattcatgtgtctggatgatctggctgatcttgntccggttacttgtgtctcgcgatcttggagacactttgtgatagcaaatggtctttgcaagcagctatgcttgagaatgtttcctcagttatctagagttgcttttgttggtgaactgaatcaaaatggaacgaaggaacatgcaaaggttggatctagctattctatgg

SEQ ID NO: 39396 - DNA, 385 bp, Glycine max
  unsure (1)..(385): unsure at all n locations
  Clone ID: LIB3065-017-Q1-N1-A4
agcacngttcccattactgttgctgggacttgttttcctggctggagtttctgtctcatttggcattgcttactgggaaaaagagaaccccaaacacaacaagtgtctccagagttgcaatagcgagagagactcgtacaggaaccaagcatgccacgctcgttgcaacctccttaaggtggagaaagaagaatgtgaagaaggtgaaattccacgaccacgaccacgaccacaacacccggagagggaacctcagcaacccggtgagaaggaggaagacgaagatgagcaaccacgtccaatcccattcccacgcccacaacctcgtcaagaagaagagcacgagcagagagaggaacaggaatggcctcgcaaggaggaaaaa

SEQ ID NO: 39397 - DNA, 388 bp, Glycine max
  unsure (1)..(388): unsure at all n locations
  Clone ID: LIB3065-017-Q1-N1-A5
gcttcctcgaatcgtgttgatgcggcagcagtcccctaccctgccgcacccacaagcttggcggtgttcnacatcaacaccatcnaggagccatggctgaagcacctcaacaacaccatcgaggagccatggctgaagcacctcaacaacaccacccctctcccccaagacaataataaaccctccctccccgcccctattctccacaaactcaacttgctcgacgccaccgatgccccccaatcctgggatgagattagcaaaacactccaagacctcaaatccccctccacctcaccccaacaacaacctcaacctccacaaaagaccaagtccttccacacggtggaagagctagacgccaagctcaaccccaagcccgaaccca

SEQ ID NO: 39398 - DNA, 342 bp, Glycine max
  Clone ID: LIB3065-017-Q1-N1-A7
caccgcattaaagaatttaacatatactatgatgagagcgcgggtgccattactgtagctgggagttgcaaacctaccctatgccaaatgtaaaaaaaccgaggtagaagaagaagaccctgagctcgtaacatgcaaacaccaatgccaacagccacagcaatacactgagggtgacaaagcggtatgcttgcaaagatgtgacaggtatcatcgtatgaagcaagagcgagagaaacaaatccaagaggaaactcgtgagaagaaagaggaggaaagccgtgaaagggaagaagaacaacaagagcaacatgaagaacaagatgaaaatccctacatttt

SEQ ID NO: 39399 - DNA, 494 bp, Glycine max
  Clone ID: LIB3065-017-Q1-N1-A9
acaacgcacgcgcgcgtacgtctggacttaaagtccaggcctttacaacggcctttttgtggagataaacaaggttctctggggtgcagaggaggggcagcaacaagggcagtaaaggctgcaagagagtgtgattgtggaaatctcaaagaaacaaattcgggaactgagcaaacatgccaaatctagttcaaggaaaaccatttcttctgaagataaacctttcaacttgagaagccgcgaccccatctattccaacaagcttggcaagttgtttgagattaacccagagaaaaaccctcagcttcgggacttggatgtcttcctcagtgttgtggatatgaacgagggagctctttttctgccacacttcaattcaaaggccatagtggtactagtgattaatgaaggagaagcaaacattgaacttgttggcattaaagaacaacaacagaggcagcaacaggaagagcaaccttttgaagtgcggaaat

SEQ ID NO: 39400 - DNA, 272 bp, Glycine max
  unsure (1)..(272): unsure at all n locations
  Clone ID: LIB3065-017-Q1-N1-B12
ctttatcactatatccatannnctgccaaattatactaactcgctttctctatataaagaagagcaccctctaaaaaancatntnttnacttcctatcatctcacacttcatttttctgaaccataacctcaacctcccctcacattaacttttttcctatcttgaccctttctcttacctccttctcttccataccaccaccaccaccaccaaccaaccaccccttccatacaaaaaaatcccctcatcatcttataacaacaataacaaa

SEQ ID NO: 39401 - DNA, 428 bp, Glycine max
  unsure (1)..(428): unsure at all n locations
  Clone ID: LIB3065-017-Q1-N1-B8
ttcactataacagtgctgttatagtgaaagatttaaatttnaagggaacgcatgttaatagtagagaagagggggaaccacggcaaattattaagattgaaggtcctatccacagctcaaatgtgatgctctactccaaagatcagaaggtagcaagccgtgtggggcataaagtccttgataatggtaaaaaagtccgctaccttataaaaactggtgaaataattgatagtgcacagaactggaagaaactgaaggaggctactaagcaaactgaagaagctactgctgctgctgcctagttttacctacgtaattcattcattcactactaatgtaactctagcagtacttgttgtgatctctcttccattttgttatctaatgtatatttttggtcttgctattgatctccatataatgaaacc

SEQ ID NO: 39402 - DNA, 190 bp, Glycine max
  Clone ID: LIB3065-017-Q1-N1-C10
aagaatcaaagaaaggggtggtggctgcttcaaaagcttagtaagttttttatttccagaacatcatagttttcgcagcagcaaactaacaaattactcatatcatataataagatggcccgttctctctcgcaagccaaacgtattggtgtcctttgtgctcaatctatctccctaattcccgttcatc

SEQ ID NO: 39403 - DNA, 363 bp, Glycine max
  unsure (1)..(363): unsure at all n locations
  Clone ID: LIB3065-017-Q1-N1-C2
gtttnnatatattcatgaaaaagttgtattnaaattttcggaccggtatattttttacagcttggtcaactcaaatacntcctgcaacaactctgttggctgatgggtgcccatatttgtatgctatggtgcatgatagttcagtgtctacaataccacgtgattttgtcattggtgttaacttgacaaccataaacaatatgcgtgcatatggcctcaatcctgctatttcaggttctcgtcttttgggcaccattcctcagtccatttcacaccaaactgtttggaatcaaatggcaacagtgagaacaccatttaatctttattctaccacgcagagcttttctcaattctctattaatc

SEQ ID NO: 39404 - DNA, 256 bp, Glycine max
  unsure (1)..(256): unsure at all n locations
  Clone ID: LIB3065-017-Q1-N1-C3
gtttanaaatattttttaaaaacccnnactnaaattcccgcgcccgcctttttataacacattggtcacctcaaaaacctcctncaacaattttttcctctaataatttcccatatttctatactattccccattatccttcacatactacaattccacttgattttatcattactcttaatcctacacaccattaacaatatatatccatatactctcaatccttctatttcatcttctcatcctttcttcacca

SEQ ID NO: 39405 - DNA, 450 bp, Glycine max
  unsure (1)..(450): unsure at all n locations
  Clone ID: LIB3065-017-Q1-N1-C9
gaaaatttgaagagtttgtttattgtgaaaaaaagaaaaatgcaggcggcaaagaaagccatagagacctttaangaaaccgcagccaacattggcgcctctgccaagtctggcttggagaaaaccaaggccactatccaagagaagaatgagaagatgaatgcagaagatcaaactcaaatggatatggctaccaagaggaaagaagagaagatcaaccaggctgagatggagaagcagcaggcccgtaagtactacgccgctgcaaaacaatacgccatggctgagcacatggcaaagggcaaccacgacaccgccgggcctagaatcgagactgccacacacatcaccagtgggcccgggactgacaatgctatgtactctaacactgggcctgggactgagactgccacgtacaccactagtgggcttgggcatgacaatgctata

SEQ ID NO: 39406 - DNA, 327 bp, Glycine max
  Clone ID: LIB3065-017-Q1-N1-D1
ccccattacatttttctgtatttcagggttaaaaattcacacgtttattttataatttggaaatcgtgacaccaaccctacaccaccatggcctccttacacaaattttttgcttttgccctcgctcttctcctccttgcctcccctctccttcaatttgctagatctcactcagactcctaagatttaatggaggctgctgaaaaatcaaatcatatcgacattgttaatcatcatgtccaaaacttttctgatggtaccttcccttctgctccagtaattcaaacaataagtgttttttcaaaaaatattgctatatttataaca

SEQ ID NO: 39407 - DNA, 400 bp, Glycine max
  unsure (1)..(400): unsure at all n locations
  Clone ID: LIB3065-017-Q1-N1-D7
actcnagcttcaaaacggtattacatactatatgtcaccaattataanagcagccgtctttttaataaaactagattcacctctaaaaaaaatatgccctctcactctattccaatcacccaattatctctataacacgattgcactattctttacatctccattacataccctttttatcgccaaacgctatcctttgagcattaactttggttcatttacacttataacgctgtgtgccaacattcctacttacttcgctattgtacaaatacattttctacaaacttttaaactttcttcacgcgatacaatataatctttctttaatattcaaatattttccccctaatacaatttctttaacctttatttcttttcacaacaacctttaaataac

SEQ ID NO: 39408 - DNA, 313 bp, Glycine max
  Clone ID: LIB3065-017-Q1-N1-E10
atttttaaaaaaactaacacaaatgggcaggtttaatgaaatcatctcacacaatcaacctaatctcacaactaaaaaattataccgtaatactctcaaattcccaacctcatcttctaaaaataaaaaatcaaatacgatcatatattaatcacaatccattataatcttattcaacctaacctaaagccaatctataatataactgaattcctaaagcaaatccacctccacattctcaaaataaaaagatccaaaaatattcatataataatagaaactatttctcatattataatacctatcctacaac

SEQ ID NO: 39409 - DNA, 345 bp, Glycine max
  unsure (1)..(345): unsure at all n locations
  Clone ID: LIB3065-017-Q1-N1-E7
gaaaaaaaaanaatattaataaaaaaaaaaaaaaaaaaaaaaaaagggcgggtttttaaaaaatatattgccaactaaaaaaaaaaaaaaaaaaaataaaataaaatcaaaataaaaaataaaaaaaaaaaaaaaataaaaaaaaaaaatctgccccccccctcctaatataattctttcccccccctaattatatcccacccctcccccttatacttccccatttttttttttataaaacctataaaaatctttctaaaaatattcaaaaattttttctttttaaaaaaattttttcccttaaaaatcccccaaaaataaatcccccaaaataaaatattaaaa

SEQ ID NO: 39410 - DNA, 162 bp, Glycine max
  unsure (1)..(162): unsure at all n locations
  Clone ID: LIB3065-017-Q1-N1-F1
aaaatatcagcagcagcagcaaggaggttcccaaagccagaaaggaaagcaacaagaagaagaaaacgaangaagcaacatattgagtggcttcgcccctgaattcttgaaaagaacgttcggcgtgaacatgcaaatagtgagaaacctacaaggtgagaa

SEQ ID NO: 39411 - DNA, 218 bp, Glycine max
  Clone ID: LIB3065-017-Q1-N1-F10
caccaccacactaacaccgggttgggggcatccgacgaatattgcacctacaatacccgacaattaattgcaggacccagactctgaagtcgtaccacctatcacctatagagagtttgcctcacagcttgtcgtacacacggtcataaatgttatctatgtgaaatatttattctttcacattttcccacaacttaccagccgcatgcataaactgt

SEQ ID NO: 39412 - DNA, 182 bp, Glycine max
  Clone ID: LIB3065-017-Q1-N1-F7
actatgcatattggtaccttgccgataaggcaagggatgggacgagagggcaaaggattatggaagttatgctcaaggtagaattaatgaggccacacaaggagcttattagtcatgcctgcttatatatgcatgagtgtatgaggttgaattgaaggtggtgatggtggtggatctctttt

SEQ ID NO: 39413 - DNA, 404 bp, Glycine max
  Clone ID: LIB3065-017-Q1-N1-F9
attcttcgtttcttctctgaccattttcaattcttcacacaacaggcattcatataatcatatctgacaatttgtcacacactttaactttactacttacttgcccaattaactatttcatcgtcatatgctaaaaagctttcaactttaaagttaaccataaagaaaagctctctgtgaaagaaaaaagcaacaaccaaattgatcttcggttctgggttacaattgaaatgctgaagctctctgaggtcgttcatgacatataagcagttcagaatttatcgctacttgctaagcatttagtttagcactacccttctgcttctgccacaacgtaaaaagatggcagctctggtcaatgctgcaacaagtgagaaacttgcttgaactgactggatgaaaaa

SEQ ID NO: 39414 - DNA, 407 bp, Glycine max
  Clone ID: LIB3065-017-Q1-N1-G1
caaagaattgatatttttttacatccacttttctatatggcaaagggtgaggcgttatgtttacggtacagaccccatttatttattacaacgcttgaagcaaagaaactcttggtgagcacctaccatggccgaacaaggagctttacttcccatgaccctgttgtttcctcatatggaaaaactcagttcatttattgacaactgagtgacgatatctatccttggtatggaggattgaatgtttttttggtacaatgaggatttaatgttaattgattatctttcacggacttcggttaccgcatattttagcttaatttcttatttaaatatttctatagatgatggtaaaaaaaatatattttttcactatttattatgacatataagtaaaataaaatata

SEQ ID NO: 39415 - DNA, 367 bp, Glycine max
  Clone ID: LIB3065-017-Q1-N1-G10
gaagggggtctttcttttccatgttgccaacttgctaataataagaggatcaagttgttttgttttgttgctttttgttcaagaaacgaggtcgcatgttcatgcacctggggaagaagagaaggtgatgtagcacagaatgccaaagattatgctcaaaagagcaaagattatgcgggtgatgctgtacagaatatcaaagattatgcaaatgatgcagcgcacaagagcaaagattatgctggtgatgcttctcacaagagcaaagaagcttctgattatgccagtgagacggctcagaagaccaaagactatgttggtgatgctgctcaaaaaagcaaagaggcttctgaatatgctaatgatg

SEQ ID NO: 39416 - DNA, 284 bp, Glycine max
  Clone ID: LIB3065-017-Q1-N1-G11
ccgtaatggaaggcctgatgctgaatatgttaaatggaggtggcggccaaatgggtgcataattccaagtttgaatgcaactgattttctggagaggttgcgtgggcagaggctagtttttgttggggattcactgaacaggaacatgtgggagtcacttgtatgcattctccgtcaaagcatcaataaaaagaaacgggtttttgaaatttctggaagaagggaatttaagaagaaaggtgtctatgcttttagatttgaagtgagttttctaatcacttcta

SEQ ID NO: 39417 - DNA, 342 bp, Glycine max
  Clone ID: LIB3065-017-Q1-N1-G12
ccgcagtgtatggactgatgctaaatatgttaaatggatgcggcggactgatggttacataattccaagatggaatgtaactgatgttctggagaggttgcgtgggcagaggctagtttttgttggggattcactgaacaggaacatgtgggagtcacttgtatgcattctccgtcaaagcatcaataaaaagaaacgggtttttgaaatttctggaagaagggaatttaagaagaaaggtgtctatgcttttagatttgaggtgagttttctaatcacttctatgatgtttgtgtatgtgtagtgtgaaaagtgaatcttgcatgggtatggggctgacta

SEQ ID NO: 39418 - DNA, 396 bp, Glycine max
  Clone ID: LIB3065-017-Q1-N1-G3
gacgaaaacggcaccccaaaaccctcgtctcttgggcgcgccctggactggacccccatccacatttgggacaaagaaaccggtagcgttgccagcttcgccgcttccttcaacttcaccttctatgcccctgacacaaaaaggcttgcagatgggcttgccttctttctcgcaccaattgacactaagccacaaacacatgcaggttatcttggtcttttcaacgaaaacgagtctggtgatcaagtcgtcgctgttgagtttgacactttccggaactcttgggatccaccaaatccacacatcggaattaacgtcaattctatcagatccatcaaaacgacgtcttgtgatttggccaacaataaagtagccaaggttctcattacctatgat

SEQ ID NO: 39419 - DNA, 298 bp, Glycine max
  Clone ID: LIB3065-017-Q1-N1-G6
ccgtaatggaaggcctgatgctgaatatgttaaatggaggtggcggccaaatgggtgcataattccaagtttgaatgcaactgattttctggagaggttgcgtgggcagaggctagtttttgttggggattcactgaacaggaacatgtgggagtcacttgtatgcattctccgtcaaagcatcaataaaaagaaacgggtttttgaaatttctggaagaagggaatttaagaagaaaggtgtctatgcttttagatttgaggtgagttttctaatcacttctatgatgtttgtgtat

SEQ ID NO: 39420 - DNA, 125 bp, Glycine max
  Clone ID: LIB3065-017-Q1-N1-H10
ctggcggctatagaatcctttataacctgaacgacgagtgctacacttgtatgtttgtttacaccaacagaagaaggctcctacaagaggccatggctgatatcacagcaacagaggtatcaatc

SEQ ID NO: 39421 - DNA, 167 bp, Glycine max
  Clone ID: LIB3065-017-Q1-N1-H11
aatcgaggcaacaggcagagcaacctttgtaagtgcggaaatatagagctgaattgtgtgaacaagatatatttgtaatcccagcaggttatccagttgtggtcaacgctacctcagatctgaatttctttgcttttggtatcaatgccgagaacaaccagaggaac

SEQ ID NO: 39422 - DNA, 368 bp, Glycine max
  Clone ID: LIB3065-017-Q1-N1-H12
atcatgttgacatgtctgaggaagggagggtgactgtgtttttggccaagccactcaagtgcaagcctgttccgcgtttcactccgttcgctgcctgaagactgtgaatggaatggtttctctagttgtgtgtgctttacctactctatatttttaccttatttttgcttactttgtggcactagtatttgttttgggaagtagcgttgcttctgtaaacttggtggcaggggtatattatttatggaaataagtggtggcttggtaggtattcccgtccatttttttaatgctggctaataatttaaaggagttaatcaagccaatgaatacagaatggctgctactatttctttttggtttttatt

SEQ ID NO: 39423 - DNA, 350 bp, Glycine max
  Clone ID: LIB3065-017-Q1-N1-H2
tgggaatgcatcaatcaaaatgagtgattcgggcctcattggtacgggtgtgtgtaacaaacagcaacagtacagaccattttgatgcatgtaagtggacaaaatcagaaccacattcctgggaattgatcttcccaatagaggtatgtggtcctaataatggctttgaaatgtggagtcctgagtgggcaaatcaaacttcatgccatttgagtttccttaatgacaatcccaaacagtctacagtttttgatattatcttgcgaatctctcaacattttgaaattgctggtaatacttttatgccagctttttctgtttcacaagctacttgccaatattttgaaaat

SEQ ID NO: 39424 - DNA, 373 bp, Glycine max
  unsure (1)..(373): unsure at all n locations
  Clone ID: LIB3065-017-Q1-N1-H3
gaaataattgatctttgaaaatgcanggaggaaagaaagctggagaggtccatcaaggaaacagctgcaaacattggtgcttctgccaaggctggcatggagaaaaccaaggccactgtccaggagaaggcagaaagaatgacggcacgtgatccgatgcaaaaggagttggcaacccagaagaaagaggcaaagatgagccaggcagagctggacaagcaggcggcgcgtcagcataacacggcggcgaagcaggctgccacggcagggcacatgggacaacccatggggacccatcagacgtcagctatgctccgtcatggaaccggacagcccacgggccatgtcaccgagggagtggtgggctcacacc

SEQ ID NO: 39425 - DNA, 258 bp, Glycine max
  Clone ID: LIB3065-017-Q1-N1-H4
cggctggctataaaatcctcttaaccagttgttgctgctgcgttgcacttcagtttacagctcccgaaaatggctcctccaagaggtcgtggtggttttggtggtggcggtgggttcaggggtggtggtaggggtgacagaggcagaggatggggcggtggaagaagtatgagagacaggggcacattcttcaaagcttgccgaaggtgcttacggggcttgggcgcgaaagccggcacgggtgttggccccaaatac

SEQ ID NO: 39426 - DNA, 220 bp, Glycine max
  Clone ID: LIB3065-017-Q1-N1-H5
gcaacaggaagagcaacctttggaagtgcggaaatatagagctgaattgtctgaacaagatatatttgtaatcccagcaggttatccagctgtggtcaacgctacctcagatctgaatttctttgctgttggtatcaatgccgagaacaaccagaggaacttccttgcaggttcgaaagacaatgtgataagccagatacctagtcaagtgcaggagctt

SEQ ID NO: 39427 - DNA, 435 bp, Glycine max
  unsure (1)..(435): unsure at all n locations
  Clone ID: LIB3065-018-Q1-N1-A11
cttgcaagaggctcatgatattggggaatcattgcaagagaaggttgagcttttgcctgagattgagcgtgcttttgttcatcttgattatgagtatagtcacaaacctgagcatgctcaagcacactcttagcagcaatcaggaaaagcaatgcctttgttgttcatttccttttccctttcatctcccgttagttgtatatgcgaaccatttctggttgttcggaatctgaacttaagggcaagtcactgagaagttggctatcaatcccaaatttctggcagccctgataatatcccaaatgtatatcacgataggtttatcaagcaagaccctttcangttccatttanggtaaatagaatcttactactntcttttccattccccctttntgtacagtgcactctttcggccttaattcatgatgtaagg

SEQ ID NO: 39428 - DNA, 315 bp, Glycine max
  Clone ID: LIB3065-018-Q1-N1-A12
gtttggggtcaagcatggacttggatgttaccatttcaaaaagggagataggtatgctggaaagtactttggagataaaatacatggctatgatgattaccactttgccaatggtcactattaccaatgttcatggcacgaatgtcgtacgcaaggttatggcatgaatatgtttcgaaatggtgatggaagatgtggtgaatgggatgctggcaacctgaaactatatctaccaccacagaatgatgctatcatacgcacagttcaagctgctaggaaaacagctgataatgctataaatcttgcccggaagga

SEQ ID NO: 39429 - DNA, 340 bp, Glycine max
  Clone ID: LIB3065-018-Q1-N1-A6
cttttggggaagaggtcgagtttcacagcagcaatggtgtacgtgaaggctgagaaatcaaaagcctacttcaagagatatcaagtcaagttcaagagaagaagagagggaaaaaccgattaccgtgccaggattcggttgattaatcaggacaagaacaaatataacactccgaaataccgatttgttgttcgctttagcaacaaggacattgttgcacaaataatatctgctagcattgctggcgatattgttcttgctgcagcatatgcacatgagctgccacaatatggtcttgaagtagggcttacaaattatgctgcagcttattgcactggtc

SEQ ID NO: 39430 - DNA, 373 bp, Glycine max
  Clone ID: LIB3065-018-Q1-N1-A7
aaaagaaagcacgttgaagattgtaacttgtaacaacaactatggctagcgagggcagcgaagagttcaggctagtgtcaccggcgttcaaaaacggggggaagttaccgaggcactacaccgacgatggtcagggtacgaagaagaacatatcccctccattggagtggtataacctcccggaggggacgaagactcttgccctcgtggtggaggatattgatgcgaccgattctggtgggcccatggtgccatggactcactgggtcgtcgcaaacatcttggccacggtgaagggcttgccggagggattttccggcaagtcggccgagatggggggcgactacgcggcgatcaaggaggggaacaatga

SEQ ID NO: 39431 - DNA, 351 bp, Glycine max
  unsure (1)..(351): unsure at all n locations
  Clone ID: LIB3065-018-Q1-N1-A9
cccagaaactacgtgtttagtcgccacgactccaatcgtagcgcgtcgggactctgtcgctttctgcgccgtctgccgatctnccgacaatggctgacccaaatgagcaagaagagaaagttcgtagctgatggagtgttcttcgctgaactgaacgaggttctgacacgagagttggccgaggacggttactccggcgtggaagttagggttacgccgatgcgcaccgaaatcataactagagccaccagaacccaagctgttctcggtgagaacgggagggagaatacgggaacttacctctgcggctcacaagaggttcaagtttcccgagaacagtgctgaacttta

SEQ ID NO: 39432 - DNA, 280 bp, Glycine max
  Clone ID: LIB3065-018-Q1-N1-B1
atctggtgttagaatggatagttcctctcatcagcgcctccccgtcaacgaaaacgacccagaagacatgcttctctatggcatcatcacttcatgccaagaaaaaaaagtgaccatcaaccaagagcaagtgaataagaagaggagcagcttccgcggcgtgcggaggcggccgtgggggaagttcgcggcggagataagagactccacgcggcatggcgtgagggtgtggcttgcgacattcgacaacctcaaggccgccgcgctggcttatgaccaa

SEQ ID NO: 39433 - DNA, 361 bp, Glycine max
  Clone ID: LIB3065-018-Q1-N1-B11
gttatttgtaatagcatttttaatgagatgctcattagatatgggtatgaaaaattactgcgccaggctaaagctccaagtatgtttttacaatccttcaaaaattttgtttctttgtgtgtgtatggtgatgataacttaattagtgctcatgaatatgtcaagccttactttagtggttctaaattgaaaagctttctagctggtcataatatcaccattactgatggtattgacaaaactagtgcaactttgcaatttagaaagttagcagattgtgattttctcaagagaaactttaagcagatgtctaatgttctgtgggtggcttctgaagacaaggcgagtttatggtcacaac

SEQ ID NO: 39434 - DNA, 311 bp, Glycine max
  Clone ID: LIB3065-018-Q1-N1-B3
taaaattctcaattctaacgccactaatcctatacttactctacttcttcacaactgtcaaattggtaaatatctgatttattagtgtccttttgcattactgaactagcatgtaatatcttattcacttaaataaaacgcattactatttgcaatcagtctgtttaaatataaaacaaataaaaatataattcaactacaacatcaacaattacactttatcaccaaatttaataaaaaaaaaaaataaaattgtctaccacccactaataaacttctttaccacacaattaattcctaacctatacctt

SEQ ID NO: 39435 - DNA, 403 bp, Glycine max
  Clone ID: LIB3065-018-Q1-N1-B4
ttcaaaggccatagtggtactagtgattaatgaaggagaagcagacattgaacttgttggcattaaagaacaacaacagaggcagcaacaggaagagcaacctttggaagtgcggaaatatagagctgaattgtctgaacaagatatatttgtaatcccagcaggttatccagttgtggtcaacgctacctcagatctgaatttctttgcttttggtatcaatgccgagaacaaccagaggaacttccttgcaggttcgaaagacaatgtgataagccagatacctagtcaagtgcaggagcttgcgttccctgggtctgcaaaagatattgagaacctaataaagagccaaagtgagtcctactttgtggatgctcagcctcagcagaaagaagaagggaac

SEQ ID NO: 39436 - DNA, 432 bp, Glycine max
  unsure (1)..(432): unsure at all n locations
  Clone ID: LIB3065-018-Q1-N1-C11
gttgctgtacttgttggagtgccaaacaaagatgatgcattcggaactcatccagtgaatttcttgaacgagagaactctaaagggtaccttctacggaaactacaaaccccgcactgatcttccttctgttgtggagaagtacatgaatggggaattggaactggagaaattcatcactcacacagttccattctcagagattaacaaggcttttgattacatgctgaaaggggagtccatcagatgcatcattcgaatgggggagtaaatctatatcagaccaatgatgacatgacatggtccctgttggaggactgagttctctttctggttgtgaaaagaagaaaataaatttcatatatgatatatatccctttaggattatngaatttgtgaaaacttgggagtttgaatgtagagaatgataggg

SEQ ID NO: 39437 - DNA, 319 bp, Glycine max
  Clone ID: LIB3065-018-Q1-N1-C12
gtcagtcttagtgaacaacagctccttgactgtgacaaccagggggacataacagaaaagacttcatgtgacaatgggtgtaatggaggtcttatgacaaatgcctacaattatttgctcgagtctggtgggttggaggaggagtcttcatatccctacactggggagagaggtgaatgcaagtttgatccagagaaaatagcagttaagatcacaaatttcaccaatatccctgctgatgagaaccaaatttgccgataattagtaaaaaatggtccacttgctatgggcgtgaatgcaattttcatgcaaacataca

SEQ ID NO: 39438 - DNA, 391 bp, Glycine max
  Clone ID: LIB3065-018-Q1-N1-C2
ggtggatacctaggcacccagagacgaggaagggcgtagtaatgtacgaaatgcttcggggaggcatggtccgagtagtatgtggaagcagcaatgaagatgagacagaatgccaaaacatgaggtttaaggttaaggaaggtgatgcttttctggtgcctaggtttcatccaatggctcagatgtcattcaatgatggaccatttgtttttctcggcttcagcacttcagcaaagaaaaaccatcctcaatttttggcgggaaaggggtcagtgcttcatattctagacaaaaggatactggctacctctttcggtgtgagtaacataaccattgaccagcttctgcgttcttccgaggattccattatttttgggtgcagtttcctgtt

SEQ ID NO: 39439 - DNA, 405 bp, Glycine max
  Clone ID: LIB3065-018-Q1-N1-C4
aaaaattacattgaacaatccaggttcaaaagcaggtgcatacggtttgaggagttaccctactactctgggaagaatgtttctgatttactcttcccgcaagagcagttttctcaacactatttttctgtttgtgggaatggggttgacaacactgttttgcaagatgtgacagatacaggtggtgacttccctcttgatgaatcatatggacaagatcctgataatgatattggaggatatccaaacaccagtgaaagccatctgccttgtacttcaacagaagatactaaatttgtcaatggattgaattctttagacacaccatgttcagacatcaatgttgaaaaaatagagtctgttaaaaatgacacatcaagcaacaatttctgtcaaaatgatgat

SEQ ID NO: 39440 - DNA, 327 bp, Glycine max
  Clone ID: LIB3065-018-Q1-N1-C5
gaaagacaatgtgataagccatatacctagtcaagttcatgaggttgctttgcctagttctgcagaagatattgagaacctaataaagagccaaagtgagtcctactttgtggatgctcatcctcagcagaaagaggaggggaacaagggaagaaagggtcctttgtcttcaattttgagggctttttactgaataagtatgtactactaaaatgtatgctgtaatagctcatattgagcgaggaaagtatctttctatttaactataacttgagctccatctattaataaataaatcagcatatgatgcttttgttttgtgtaaaa

SEQ ID NO: 39441 - DNA, 150 bp, Glycine max
  Clone ID: LIB3065-018-Q1-N1-C6
gggtttacaccgagcagccacacctcccgcagcagccatggttctcaaaacggaactatgccgattcagtggtgccaagatctacccaggaaagggcatcagatttgttcgtggtgattctcaggttttcctgtttgcaaactcaaaaat

SEQ ID NO: 39442 - DNA, 413 bp, Glycine max
  Clone ID: LIB3065-018-Q1-N1-C8
gaaattattgttattattgtaataatttcatgaatcccatgcaggtggcatagcttaaccaaccaattgtggccactgcagacaacatgtttctgtggccactgcagacaaaatcttaatttgttcaccacagaaacatgttgtctgcagtggacaaattaagattttgtgctagtgtgttgttctgttgggagttgcgtcacggtggaatcattcatgagtgatggtaaggtaaatattagtggtacctactactagggtgaggcaatgtttattaagaattgggttttgttaattggtgttcttagctgattgattaagaatattatattattggagtgtgagaagaacttgcttgctacatatgatatgattaaatagtggaatcaaatcacatagtggcatctatgcat

SEQ ID NO: 39443 - DNA, 408 bp, Glycine max
  Clone ID: LIB3065-018-Q1-N1-D4
gtgatcacacaacataagcatatatatagaaagatgtcaggggcgcaaggagcacaaccaaaggagtcaaaaacagcaacaacatatgagtcagtagaaggaggagagaaccgaacaaggactgacttgctttcaagggaggatcaaggctgcattcaagtggaaaaacttcaggagaaggtccatgatcctgctggcaaaggtggtcctgtctttggtgctggcaaagatgaagacaaacaagaccttggagttactggcacaggctaattaacctactatatatattactactatatactatatagtgtatgagtatagtatatacccaaaaagtactagtctctcttgtgatcatggtgctgcttcaaaatctttggtttgggtttgagtttatgtaaattaatg

SEQ ID NO: 39444 - DNA, 391 bp, Glycine max
  Clone ID: LIB3065-018-Q1-N1-D6
accagctcgaccagatgcctaggagattctatcttgctgggaacgaatatcgagagtttctaaaatatcagcaagagcaaggaggtcatcaaagccagaaaggaaagcatcagcaagaagaagaaaacgaaggaggcagcatattgagtggcttcaccctggaattcttggaacatgcattcagcgtggacaagcagatagcgaaaaacctacaaggagagaacgaaggggaagacaagggagccattgtgacagtgaaaggaggtctgagcgtgataaaaccacccacggacgagcagcaacaaagaccccaggaagaggaagaagaagaagaggatgagaagccacagtgcaagggtaaagacaaacactgtcaacgcccccgaggaag

SEQ ID NO: 39445 - DNA, 404 bp, Glycine max
  unsure (1)..(404): unsure at all n locations
  Clone ID: LIB3065-018-Q1-N1-D7
acacgttatctttactttttctcttcatcacagttcaatctttactcaaagagtatagaagatgaggaagaattgcaacttggagcttcgccttttccctccttccctctccgatcttcgccccatgatggaagcagaagttagtgagagaccccaacaacaggtcggccaccatcaacagcaacagcaaccacaaccacaacatccgctgaccattttctatgatggcaagatttcagtttcagatgtcacagagcttcaggtatatacatatatgctccttttgtttatcaactgntcttatttatttctttaatttttcatttaattaaaggaatctctttctctatattttttggaaaaaatataaaccttgaattggtgggggaaacacccgggaaaaa

SEQ ID NO: 39446 - DNA, 295 bp, Glycine max
  Clone ID: LIB3065-018-Q1-N1-D8
acactttatcttttttttctcttttcatcacaattcaatctttgctcaaatagtatatatttaccaccaataattacaacttcaatcttctccttttcccttcttccctatcccatctttcccccatgattgaatcacatattagttatataccccaacatcatttcttccaccatcaacatcaacagcaaccacaaccacaacattctcttaccattttctatgatcgcaatatttcattttcatatctcacatatctttaactatatacatatattctccttttctttatcac

SEQ ID NO: 39447 - DNA, 227 bp, Glycine max
  Clone ID: LIB3065-018-Q1-N1-E1
taccaagcaagttatgagcaagatggcagaaatgagcaacagtggttgtggtgatgatgaaaaactgatgcttgaaacgtcacacttgctgttggcttgtctttcatggatggcacattgtaggagcgatatttggagagataaatgtgcaacacgttgtgcatcatcgatagcagctgtttccactagcacatcatacgatgtccatattctatgatggcatgatt

SEQ ID NO: 39448 - DNA, 161 bp, Glycine max
  Clone ID: LIB3065-018-Q1-N1-E10
cggatcaaacgaaactttattccacacgatgaaagcctcctaataagcaactttcaaccaaaacctcacataaatctgcaccaactactcaacagtctaacaaaccccaccataattaatctcatacctcatctcatccccagattataaaataccattat

SEQ ID NO: 39449 - DNA, 345 bp, Glycine max
  Clone ID: LIB3065-018-Q1-N1-E12
caaacttattaacactttccttagttcaatatggggaagcccgtgttcactctctctctttcttccctttgcttgctactcttgtcgagtgcatgctttgctattacctccagcaagttcaacgagtgccaactcaacaacctcaacgcgttggaacccgaccaccgcgttgagtccgaaggtggtcttattgaaacatggaactctcaacaccctgagctgcaatgcgccggtgtcactgtttccaaacgcaccctcaaccgcaacggcctccacttgccatcttactcaccttatccccaaatgatcattgtcgttcaagggaagggagcaattggatttgca

SEQ ID NO: 39450 - DNA, 399 bp, Glycine max
  Clone ID: LIB3065-018-Q1-N1-E7
cgaccaccatcattacctttcttcttctacaacacaacctccaatgatcaatttcccgcgagatctgttaagaaccttcgtgggagtgaacaacaacagcaataaaaacaataacaacagtcagcaccacaatttgcctatgccagtggtgaagttagaggatgagaaagaagagctggaactaagtctcggcctttcgatgaatggtagatttggggtggaccctacagcgaagaagataaagagaacaacctcgataccggagtttgtgcgcgacgaggagatgggatatgctgctgcgatggggtgcacggggtctctggtgaggacgtgttcgcttccgacggagacggaagaggagtggcggaagaggaaggagttgcagacgctgcggcgggt

SEQ ID NO: 39451 - DNA, 149 bp, Glycine max
  Clone ID: LIB3065-018-Q1-N1-E8
ggtctcagggctgcaacatgcatattctacacatgtgcttagtgttgagtgggtgattttttcatttattaatatcaaagttttattattgtagctcactctaccaaatatttggagcaaaaaaaatcaacaacaactgatagcccaac

SEQ ID NO: 39452 - DNA, 298 bp, Glycine max
  Clone ID: LIB3065-018-Q1-N1-F1
agctggtcaaactaagggccgaactgaggaatagacgaaccatgggatgggcaatattggagagaaggctcaagctgcaaaggagaagacccaggaaatggcccaagctgcaaaggagaagacccaacaaacagcccaagctgccaaggacaagacttgcgacactatccaagcggcatacgagaagacccaacacaatacaggagctgctcaacaaaagacctcagagatgggccagtccacgaaggaatcggtccagtcagggaaggacaacacccaatggttcctgcagcaaaca

SEQ ID NO: 39453 - DNA, 400 bp, Glycine max
  unsure (1)..(400): unsure at all n locations
  Clone ID: LIB3065-018-Q1-N1-F3
ggagactctcatagaatgaatacaggtcttaatggtcacagcaggttatcagagcgcacaccatatagctcaagggaggatcatgtttcaagatatggtactgataggtcttcagggccatctgcttatgatcaatcaagtgctccagagcataatgtaaaccatggcaacagaggcttgaggagtgaagatcggaatcttgaacctcttgctcatttgcaagggtcaatagtctctcagaatgcttcttcagagaagatttggacagaagaacgactgacggacatgtccttgtcagcaataagggaatactacagtgctagagatgagaacgaacttgctttatgtgtcaaagatttgaactcttcgagcttncatccttncatggcttctctatggg

SEQ ID NO: 39454 - DNA, 320 bp, Glycine max
  Clone ID: LIB3065-018-Q1-N1-G11
aattcccagctcatgtggtgtttcagtcacaacacatctcttacaggcacacgatcatcatcatagtagatccaccatcccctccaccaccaccaccgctgtggacaaccttacgtatcaaaccacaatcataaacatctaaataccggccacctcctactacacactctcctcaaccctgatacaaattcctgaccggtaactttaattttaccaccatttcctatacccacttgtatcatatgatcgaccaaaccatcaacataactcattacatgtcaccaaattacattccgttacaatataacacaacttaccat

SEQ ID NO: 39455 - DNA, 224 bp, Glycine max
  unsure (1)..(224): unsure at all n locations
  Clone ID: LIB3065-018-Q1-N1-G12
aattcccaaccttttttctgtttcttccacaccattaancatagcaccatttgatcattttcatagcgcatccaccacaccctccaccaccaccaccgctctgtccaaccttacgcatcataccccaatcatcaacaattaatcgcccaccacctactattccacacctcttataccccaatacaaattccacatcgttccttccactcctaccctcttttcct

SEQ ID NO: 39456 - DNA, 392 bp, Glycine max
  Clone ID: LIB3065-018-Q1-N1-G2
ctcgagccgctgaaaactgatcaaaaccctgttggagatgcaaaggttaagaagacatcgaagttcgaggattttaagattgagaaccgaacatcatcatcctcggcgttgtcggatgaatattcttcttcttcttcttcgcccgaatccgatattactttcttggatttctcggattcttgtgaaacaacatgcaatcttgggttggacttggaaaagtatccttccgtggagattgattgggcagctttatctgagtcatgaatgatgttagtggttttgtctttgttgaacggtttaatgatttgatgtgttttaggtttttttttcatgtgtcttgggcagcaactgcaacgaaattttttaccgttgaagcaggtgctatgctgagt

SEQ ID NO: 39457 - DNA, 351 bp, Glycine max
  Clone ID: LIB3065-018-Q1-N1-G5
tgtatagagctctttcaatagcgcattcagggagatagcattatggaaaatgcgagacccaggatcgctgaatgcaaatgacacaacaatggtagatgtgccagttaatgatccatacagcatattgatgagctagacaaatgacatttgacgctgactgggacatatactatcaattggatcttggtctggatattgatgttcctgacattggcatcttcaccatttctctgtctcacaatggatagatcatgctaccaaccctatctaccatgttcagctaatcgcatgcacaaaacttaggataaaatgaatgcattgcacactccatgatcgatgtgcatgttttac

SEQ ID NO: 39458 - DNA, 222 bp, Glycine max
  Clone ID: LIB3065-018-Q1-N1-G7
ggaaaaagatgttgtaatggaaaatcaagattgcaagagtgtgggagatacagatgtcaacaaatccactcattcttgaaaagctaaaactggagaatattttgaggtacctattgaagaagaaaaatccaatgcttcttattgagaactacctgcattgaaagataaaattgatgacaaagtttttctgagaaaggatttaagaaaagattgagcaaccac

SEQ ID NO: 39459 - DNA, 394 bp, Glycine max
  Clone ID: LIB3065-018-Q1-N1-H1
cctccactgctgcatctcagaatcgggacgccgtcgtcctcactacatcgtccctattagcacactagattttgccaaaaagatcaaattttgaagcaattgtttttgtgggcaacattcattctttcctatccctcgaaaaatcaattttcggcttcgggcatcggaaatggagaaggtgatgaacattctgaagccgaagccaaatccgcagcaactattgagggattggcagcgcaggcttcgccaagagtgtcgcaacattgagcgccaaattcgcgatatacagagagaagaaaaaaatgtgcagaaggctattagagaagctgcaaagaggaatgacatgggctctgcaaaggcacttgccaaggaacttgtgagatctaggcaaact

SEQ ID NO: 39460 - DNA, 282 bp, Glycine max
  Clone ID: LIB3065-018-Q1-N1-H10
ttagtattagaatcaaagaaaagaatatatgaaaggattgatggttgaaaatgcaaggaggaaagaaagcggcagagtccattaaggaaacagctacaaacattggtgcttctgccaaggctggcatggataagaccaaggccactgtccatgagaaggcagaaagaatgacagcacgtgatccggtgcaaaaggagttggcaacccaaaagaaagatgcaaagattaaccaggctgatctggacaagcatgcggctcgtcagcataacacggcagccaaac

SEQ ID NO: 39461 - DNA, 334 bp, Glycine max
  Clone ID: LIB3065-018-Q1-N1-H11
aaatgaccaagttcacaatactgctgataggtctgaatttatgggtgacccagacttgcagagcgtccaaatggcagctccagcaagatacgatgtcgaagattggtacatgtggtcatagctgacgtcctgagagaaccacatcatggataagatacacgcgacaagaatctacaccatgatgatcatgacgacaacaattagattctcatgaccatgcggggaagactcaactacctaaggtggaactgcagacaagacgacgacgtaacacaagaaggacacatgccgaaatgatggacagacacgagcgacatgagaagcacaacatgcc

SEQ ID NO: 39462 - DNA, 397 bp, Glycine max
  unsure (1)..(397): unsure at all n locations
  Clone ID: LIB3065-018-Q1-N1-H3
gaaagtcttccatagccccccaaaaatgaagagcacgatcttctgggctctctttctcttttgtgccttcaccacctcatacctaccttcagccatcgctgatttcgtgctcgataatgaaggtaaccctcttgaaaatggtggcacatattatatcttgtcagacataacagcatttggtggaataagagcagccccaacgggaaatgaaagatgccctctcactgtggtgcaatctcgcaatgagctcgacaaagggattggaacaatcatctcgtccccatatcgaatccgttttatcgccgaaggccatcctttgagccttaagttcgattcatttgcagttataatgctgtgtgttggaattcctaccgagtggtcntgtgtggaggatcta

SEQ ID NO: 39463 - DNA, 320 bp, Glycine max
  unsure (1)..(320): unsure at all n locations
  Clone ID: LIB3065-018-Q1-N1-H4
gtaaaggggcagatgacctcgatcatctctgtgagccaacagacgtggtcctctcgaaggcaaaagactctgacagtctttgaaaggtaaaaggcagatgttgttgatagtctctgcatgacaaaagactctgatagtccttgaaaagtaaaggagcagatgaccttgattgtcttcgcaagacaaaagactctaatagtctttgaaaagtaaagggcatatgaccttgattgtctctgcatgacanaagactctgatagtctttaaaaagtaaaaagcagatgaccttgattgtctctgcatgacaaaagactctgata

SEQ ID NO: 39464 - DNA, 255 bp, Glycine max
  Clone ID: LIB3065-018-Q1-N1-H8
gtaaaggggcagatgacctcgatcatctctgtgagccaacagacgtggtcctctcgaaagcaaaagactctgacagtctttgaaaggtaaaaggcacatgttgttgatagtctctgcatgacaaaagactctgatagtccttgaaaagtaaaggagcatatgaccttgattgtcttctcaagacataagactctaatagtctttgaaaagtaaagggcatatgaccttgattgtctctgcatgacaaaagactct

SEQ ID NO: 39465 - DNA, 361 bp, Glycine max
  Clone ID: LIB3065-019-Q1-N1-A10
gcaggccaagcgctaaaacgctcccgcatcaccacgaagaaacccggatccgcgaccgcaggcccacccatgtcgcgtgagcgccaagaacgtgagcgcctctacgaacaatgccttcaagccccaacccctctccgccacctcacccaaaaggagcgcgaacgcgaagcggagcgcgagaaattgggcctcatcagcaaggatcggcagcgagaaatcgacatgatgaagcgaaaagacgacaaatttaaggtttcggagaagcccacgattattgggacacctgggttggatacgtgagttaggtttggtgatgtggacaagtgccgaatatgatttgacggtggaggatggagaggtg

SEQ ID NO: 39466 - DNA, 362 bp, Glycine max
  Clone ID: LIB3065-019-Q1-N1-A11
cgggactgtaactagccgcagcacgaggagcagcctcaggaggagaaggatgtctcacaggaagttcgagcacccaaggcacggttcactgggatttcttcccaggaagcgtgctgctcgtcacaggggaaaagtgaaggcattccccaaggatgacccatccaaggcacccaagctcactgcattcttgggttacaaggccggtatgactcacattgttagagaggtcgagaagccaggatcaaagcttcacaagaaggaaacttgtgagcctgttacaattattgagacccctccaatggttattgttggtgttgtgggttatgtgaaaactccacgtggtctccgaacattgaacactg

SEQ ID NO: 39467 - DNA, 185 bp, Glycine max
  Clone ID: LIB3065-019-Q1-N1-A3
aaaaaaaaaaaaaaaaatcgcaaacgtgcaaaatttaaaacggccatccccaacaaaaaaaaaaaaaaaaaaatctccctccctcccactataaaactcatctccccctaaaaaaattcccaccccttccctcaaatctacccaccttcccctaatataactctcattaaatcttcccttatatc

SEQ ID NO: 39468 - DNA, 318 bp, Glycine max
  unsure (1)..(318): unsure at all n locations
  Clone ID: LIB3065-019-Q1-N1-A4
gtctttgaacactcatcaccatggccaagcttgttctttccctttgtttccttcttttcagnggctgcttcgctctgagagagcaagcacagcaaaatgagtgccagatccaaaagctgaatgccctcaaaccggataaccgtatagagtcggaaggtgggttcattgagacctggaaccctaacaacaagccattccagtgtgccggtgttgccctctctcgctgcacccttaaccgcaatgcccttcgtagaccttcctacaccaacggtccccaggaaatctacatacaacaagggtatggtatttttgcatgat

SEQ ID NO: 39469 - DNA, 352 bp, Glycine max
  unsure (1)..(352): unsure at all n locations
  Clone ID: LIB3065-019-Q1-N1-A8
gccgatgagtcgcatgctgtcgtttacgaggatgctcggcagggaaaagaaggggaacgtgtcgccgtcgtcgtgcggcggcggcgattgtagctccgccgcggagcgaggtgagcgagaggagactcagtgagtcggtgactcgggtgctgacgtggcacttgttggaagcggaaaaacttgggttgttggcgcgtggcggtgtgtaatagtgacgtttctggattttaatgtangcggtgagcggcgcgtgagttaggtggcgcgagatactgacgtagaatggttttgggatgaacataaatgatgtacttattcgntgatatatatattgtttctttatttgtttctt

SEQ ID NO: 39470 - DNA, 342 bp, Glycine max
  Clone ID: LIB3065-019-Q1-N1-B10
cttcttcacatttcattttctttacttctttaatggcccaggatttctccaaagctgttgatgacggcctcaagctctccaaacgcatatacttcgggaaggacagggcggtggcacctcctaaacctccgccgccgatgacgcgctccgccaccgcgtttctcccctcggcgccgatggtctacgcggtgatctccgatccagggatcgtggacaaccccgacatcccgagctaccaaccgcacgtgtacggaaggtgtgatcctccagcgttgattccgcttcagatgaacgctattcagatggaagctgattgctaccacgaaacccgggttatcacag

SEQ ID NO: 39471 - DNA, 134 bp, Glycine max
  Clone ID: LIB3065-015-Q1-N1-G9
taggctttataataactcagtaaagccactttcttcgttgcgtgaaaaatagcttgatcccgtgctaccacgccagcagcatctgctttttttgttattccttttggttctggggtggaatctacgtataaaag

SEQ ID NO: 39472 - DNA, 216 bp, Glycine max
  Clone ID: LIB3065-013-Q1-N1-A9
tcatcgtcatataaacaaattccaacttaattaaaaaaaaaaaaaaatacttcctcccactacaaaactaatcaacccaataactaatctcccaactcatccccctctaaacacaccagctttacctcataaccaatacattaaaacttaccataatcatctacatacattcttcctatatcaaatcctaatccactcacaatttcacacaacata

SEQ ID NO: 39473 - DNA, 457 bp, Glycine max
  unsure (1)..(457): unsure at all n locations
  Clone ID: LIB3065-013-Q1-N1-B12
tccccccttccttagcccggaattccgcttcaagttaaaaaagttccttgccattggttgaaggaagaaggaatgggtttggcagtccgaaccttccggttttcaacttccccaaacaccttcccttcaaaacttcctggcttcgagaaattggccagagtacggtgcacgcccctgcttgatcaatgcccncacgggagacgtctacagctacgaggaggtggaaagcaccgccagaaaggtggcgcggnggctgaagaaagagggcgtggaacagggccaggtcatcatgatcctnctncccaattgccccgaattcgtcttctcgtttcttggcgcatcccaccgcggtgccatggccactgctgccaaccctntcttcacccccgccgagattgcaaagcaagcccatgcctccaatgccaagctcctcatcacccaggcctcttactacgac

SEQ ID NO: 39474 - DNA, 313 bp, Glycine max
  Clone ID: LIB3065-013-Q1-N1-B2
cacacaacaaacatatctcttcctcttctgtccctcaatggaaggatcaggatccggtgtggttacagtctacggcaacggcgccatcaccgagaccaagaagtcccccttctccgtcaaagtcggcctagcccagatgctccgcggcggcgtcatcatggacgtcgtcgacgccgagcaggcccgcatcgcggaggaggccggtgcctgcgcggtgatggccctggagcgtgtccccgccgacatccgggcccagggcggcgtggcccgcatgagcgatccgcagctcatcaaggatatcaagccggccgtc

SEQ ID NO: 39475 - DNA, 166 bp, Glycine max
  Clone ID: LIB3065-013-Q1-N1-B3
attccattctctctgtgtatttccctacctctcccttcaggatgcatatcttcgtcaagaccctcaccggcaagaccatcacccttgaggtggaaagctctgacaccatcgacaacgtcaaggccaagatccaggacagggaaggaatccccccgcaccagaaacg

SEQ ID NO: 39476 - DNA, 390 bp, Glycine max
  Clone ID: LIB3065-013-Q1-N1-B4
tctcggtgaattccaattccacattttcaagaaataaggaggcaaaaatgtgcatatatgaattggaattatttgttttcttattaggcctatcctgaagccaaaggaaatgagatcggaattcctcggggaattccaattccacattttcaagaaataaggaggcaaaaatgttcatatatgaattggaattatttgttttcttattaggcctatcctgaagccaaaggaaatgagatcggaattcctcggggaattccaattccacattttcaagaaataaggaggcaaaaatgttcatatatgaattggaatcatttgttttcttattaggcctatcctgaagccaaaggaaatgagatcggaattcctcgggggtaccgagctcga

SEQ ID NO: 39477 - DNA, 87 bp, Glycine max
  Clone ID: LIB3065-013-Q1-N1-B6
gaggccccaccaccctttgtgcctgcaatcttaactttgggggatcctgctgtggttgtagggaccaatgcctattttccaaccctt

SEQ ID NO: 39478 - DNA, 222 bp, Glycine max
  Clone ID: LIB3065-013-Q1-N1-B7
tttacattacactaataattgggctcctagtaaacaccctagtactctataaatagcatttgcatgcaccttagtcttcaccaaaatactcctcttggcatcttgtgttgtgtccctcttttaagctatttccttctcttaacacaattggttgtgccaattgccatagtcaccaaccaataacaaaggtatatatatcatcatatcatcaccaaatgaaaa

SEQ ID NO: 39479 - DNA, 228 bp, Glycine max
  Clone ID: LIB3065-013-Q1-N1-C1
cctggttacaccaagggtgatggtcttggtgctgagattgtgggcactcacatcctagcaaacactgcgttgatctctaccgatgccaaacgtagcgtcagagactccgatgttcacattgcttcacccttcacaattggaatcgctgatctcttggaaaagtcggtaaccatgcttgattgtcaaaaccggcatcgatgctgcccgcaaatacagcgcgattaagcc

SEQ ID NO: 39480 - DNA, 276 bp, Glycine max
  Clone ID: LIB3065-013-Q1-N1-C11
tcttaatgttatccgttacccttaattcattggcaccccaggtgcagtcttagcgcgcaggcgctctgaccatagttccaacacttactgatctatccattgatttccctgtggttacagtgtgtaaccagccaacagtgtggaggctcaacatggtacggtccaggtccatgtatgtgagcaccagttgtgtccttaatgatatcactagcctgtccaggattgagagtcttgattatgatcatgcttatcagctctacagcttctagatctgtc

SEQ ID NO: 39481 - DNA, 323 bp, Glycine max
  Clone ID: LIB3065-013-Q1-N1-C2
agtggggggacacataagcagcaatgtcaatgacaaaggagatatcttttcagttccttcgaaccaatatgcagaattcaatatgttcctggatcctttagcagccaagatagtgtttgaatcagaagttaacatcacactcatcccactcaacacacagcgcagagtaagatcattttcaaccattataggcgagttgcgtagaacaccaagaacacccgaggctgtattttctgagcgtctgctgtcaaggctataccgtttaaagcaaacccataacagatatcagcatatggacacattcttgggggaaattctaaggc

SEQ ID NO: 39482 - DNA, 426 bp, Glycine max
  Clone ID: LIB3065-013-Q1-N1-C3
ggagagtttgatcctcttgacttcgaaatctgacggttctggtgcatcagaagaggaaatagtagacctgactgagcctaggtttgaatcattttgcatcacaaatggcaatgccccatgaaaaatatacacccggcacgggcagagagatgcagatggcagaagcctgaggagtttatgttgtgtgaactggtggtacacctctgttgcttgttctaccacccgtcactgtgcatggctctatgagatatcataagagatgctgcaattattctgttttaattatcttggtctacatgtttttttcatgttttgaaaggaaaagctcacaggtgttgtttgatgagcactgaaaagtattcgtttgtttcttgtacagaaaatcataggatgataggaaattctggttcttctttatttggagag

SEQ ID NO: 39483 - DNA, 387 bp, Glycine max
  Clone ID: LIB3065-013-Q1-N1-C4
ggagattgttatcctcttgacttctaaatctgacggttctgttgcatcagaagaggaaatagtacacctgactgagcctaggtttgaatcattttgcatcacaaatggcaatgccccatgaaaaatatacacccggcacggtcagagagatgcagatggcacaagcctgaagagtttatgtcgtgtgaactggtggtacacctctgatgcttgatctaccacccgtcactgtgcatggctctatgagatatcataatagatgctgcaattattctgttctaattatcttggtctacatgtttttttcatgttctgaatggaacagctcacaggtgttgattgatgagcactgaaaagtattcgtttgattcttgtacagaaaatcat

SEQ ID NO: 39484 - DNA, 280 bp, Glycine max
  unsure (1)..(280): unsure at all n locations
  Clone ID: LIB3065-013-Q1-N1-C5
tctgcttcgcgttgaccaaccagaagtgtaaggtttcattcaatgggcaacgcttaacttctaacaatatcttccgccgtccttaccgcggtcgttgaaaggccttgaactttaggcgttcaagttggtttcccgggcagaatcagaattggcaatctatgccaaaagtcttttccgggcttggctggcaaaagccgcaacgcttgtggccccaaatacaccgngaattaacctctgggagacagagtgctgattaaaattaaaggagccnaagggaaaa

SEQ ID NO: 39485 - DNA, 116 bp, Glycine max
  Clone ID: LIB3065-013-Q1-N1-C6
atcaaaggtgcctagttcccaaacacccaaactttttttttgcggggaccaggccctaacctttttggaacttccctttcggaacacagatattctttccggcggttctttcggtt

SEQ ID NO: 39486 - DNA, 192 bp, Glycine max
  Clone ID: LIB3065-013-Q1-N1-C7
caagaacgcaccatatatatataatatacttaaggggtgcatggttttcttctctacattggcagaatagctagcactccatgaaaaatgtgtatggttcgggcattgacttcctgtgaagggacttgattattattaatattcataatttattggtgttcaccttttggtggaataaatctatattttatc

SEQ ID NO: 39487 - DNA, 237 bp, Glycine max
  unsure (1)..(237): unsure at all n locations
  Clone ID: LIB3065-013-Q1-N1-C8
gcggtgtactgaaggaatgtcttctgcagcgttacttcagcagagaacttaagtgcagtgttcagggagcagaatcagatttaatactaacttgccgaaagcttttggatgaaaggcaaggtttgaatgtcatccgatttcttcaagcaattaatgcacggcacgacctcactganggtctgaaggacttgcaatgtaaaacacttatatttgcaggtgagagtagtccattccatg

SEQ ID NO: 39488 - DNA, 411 bp, Glycine max
  Clone ID: LIB3065-013-Q1-N1-C9
attgttaaaagtttctttatttcaagtgaagttagttagttgtatttatatacacaatcatgtcaatgagatcaattggtacaagccttagccttatggtatggcttgtaattgcaacatcagcattagcaaaatctgataaccccccagtcctagacacacaaggcaaccctcttgagcctggcaaagattactacatcaaacctgccataaccgacgttggaggccgcgtcactttgttaagcagaaacaatccatgccctctatatgtaggtcaagagaattctgatgcagcagagggcttaccccttttcttcaccccttttgcagaagaagatgatgttgtgaaggtgaagggacttcaaggtgacattctcagctgcctcaatatgtgtgcagggcacaaattgg

SEQ ID NO: 39489 - DNA, 423 bp, Glycine max
  Clone ID: LIB3065-013-Q1-N1-D12
ttcaggcttaaagagagaacctggcagtcgaaaacatgtcttccttggatgccttcgccgacaacttgaccgtcaactcttcttccactaaccaccacgacgaaaacgaggacaacttctccggttacggcggctactcctccttcaccggaggattctccgccgacggcgatgtcgccgtcgaccactccgccgccgcgtcgccggagatctacggcttcactgatccgaatcccgcttactctcagtctcccttcgaatcggccaccgtagagaacggaaacgaaaacggaaacggctatggccaaggcgacggcgacggcgacggcgtttttatctccgatggtccggtgcttccgcctcctacggaaatggagcccgaggaaggttacgctcttcgcgagtggcgccgtcagaatgcca

SEQ ID NO: 39490 - DNA, 349 bp, Glycine max
  unsure (1)..(349): unsure at all n locations
  Clone ID: LIB3065-013-Q1-N1-D2
cacaactacaagaaagaacttccttataaccaaaaccaacgacaactatggcaagttatcagaagcactacgatgatcagggtcgcaaggtcgacgagtatggcaatgttgagaggcaaactgacgaatatggcaacccggttcatgccactagtgtcacttatgtagccaccaaaagtgttggtggctacaatgatgacgctaataagcaacatgatattactggtgtctatcccgagaaagacaccggtagacatcattttggtcgtggttacgacggtgacactaacaagcaacatgatgctactggtgtntatccccgaatagacattggtagagatcatgggac

SEQ ID NO: 39491 - DNA, 357 bp, Glycine max
  unsure (1)..(357): unsure at all n locations
  Clone ID: LIB3065-013-Q1-N1-D3
cccaaattcattttaatcctaattctgcacttcttgatcattcgatttttctcctcaagatgcagatattcgtaaaaactttgaccggcaagaccatcacccttgaggtggaatcctncgacaccattgacaacgtaaaagctaagattcaagacaaggaaaggatcccaccttgaccagcagaaaattaattttggcgggtaaacaacttgaggatggtcgcacccttgccgattacaacatccaaaaggaatcaaccctccatctcgtgcttcgcctcaggggtggcatgcaaatctttgtcaagactttgaccgggaagaaccataacccttgaggtggaatccttggacacca

SEQ ID NO: 39492 - DNA, 336 bp, Glycine max
  Clone ID: LIB3065-013-Q1-N1-D4
gccctctatgtatgattatcaccgcagcattgggttcccttgtcttagccgaacaagttcatctaggaagtatatttggggccattctcattgtgtgcggactttacactgtggtgtggggcaaaagcaaagaccgtaagagcacaacagaaatagagaaaggcgaaagccaagaattgccaataaagaacggtacaaaatcagcgtcagacatatttgatggcattgaaatcaatgttccttctgaggtgttgaagaaaggaggaaggaaaaatgtcccaccagcaacaacaacaactacaacatcatgaaggtgcttttataggactagcacta

SEQ ID NO: 39493 - DNA, 334 bp, Glycine max
  unsure (1)..(334): unsure at all n locations
  Clone ID: LIB3065-013-Q1-N1-D7
gtgcaatcctatttcagcttgttacaggaagaacgcctttcgctggaaacaatcaaatacagttactacaaaatattatgaaatcaacagaattgcagtttccgtctgatagccaaagtctgagttttgaatgcaaagatttgtgtcagaaattgctacgtcggaatccagtggaacgtctaacttttgaagaattctttaaccatccattcctttctcagaagcaaacagaacaggatgagccattgagggatcgaagttctccaaggctggttggtgggttttggtctacagggtctgaccctttgagaagaactgangaaaattatcaaga

SEQ ID NO: 39494 - DNA, 324 bp, Glycine max
  unsure (1)..(324): unsure at all n locations
  Clone ID: LIB3065-013-Q1-N1-D8
tgtangtgtgtgtgttggtgcacactctacacacttacacggatagaaaagagagagacagaaaaggatcaaatagttaaaacctttggttctttccctccatagttgcatttttccattcaacaacacaacacctcagacagacatcatggaggcaggttacaatcctcgtaccgtcgaagaggtctgtagggatntcaagggtcgcagagctgctttgattaaagccctcaccaccgatgctgaagaggtctaccagcagtgcgatcccgagaaggaaaatctttgcctctatggatttccaagtgagcaggtgcgaagtca

SEQ ID NO: 39495 - DNA, 402 bp, Glycine max
  Clone ID: LIB3065-013-Q1-N1-E1
aaaaaaaaaaaaaaaaaaaaaaaaaaaaaaaaaaaagaaaagaaaaaaaaaaaaaagaaaaaaaaaaaaaaaaaaaaaaaaaaaaaaaaaaaaaacccaaaaaaaaaaaaaaaaaaaaaaaaaaaaaaaaaaaaaaaaaaaaaaaaagggggccccccaatataggaccttttccccccggaataaaatccggacccgtcccctgaggggtcccaattttcccataagggagggcctttaaaaccttgggaaaaaaagggaaaaaccttttcccggggaaaaattttttccccttcaaattcccccaaaaaatacaacccggaacctaaaaggtaaaacccggggggcccaaaaggggggcccacccccaaataatggggtggccccaattgccccttttcc

SEQ ID NO: 39496 - DNA, 393 bp, Glycine max
  Clone ID: LIB3065-013-Q1-N1-E10
gtataggcgtgccaaggtcttgttaattttgagcgttaagtgctgcagctaatcagatcccaagaccttggcctaccttgccatacagaaaaaaaaaaagcaaaaaaaaagccaaggtttggagccaacaaaaataaacacaaagcacaagtcatggaaagaataatggttggaagtgcaacaaaggttgctttcaccctcttggccactttcgccattgtcattccatgccttgaggctggcattgctgagtttgacgattttctcaaagcccaagctgatgaagcccataaaattgctcttgattcctatgtcccagagccccacgatgtctcccatgaactcaatttccatgttcatatggcactggaaaactccacatggagggaacta

SEQ ID NO: 39497 - DNA, 422 bp, Glycine max
  unsure (1)..(422): unsure at all n locations
  Clone ID: LIB3065-013-Q1-N1-E12
ttcaaatccaaatggccctttacattacactaataattggggtcctagtaaacaccctagtactctataaatagcatttgcatgcaccttaatcttcaccaaaatactcctcttggcatcttgtgttgtgtccctcttttaagctatttccttctcttaacacaattggttgtgccaattgccatagtcaccaaccaattaacaaaggtatatatatcatcatatcatcaccaaatgaaaaatattgggttgttttttcttgtggtggtggctactnttgtggtggcagccacagctggtagcttttaccaagactttgaaataacgtgnggtggtgagcgtgccaaaatctatgagaatggaaaccttctcacactctcccttgacagagcctctggctctggctttcgttccaaaaaaga

SEQ ID NO: 39498 - DNA, 298 bp, Glycine max
  Clone ID: LIB3065-013-Q1-N1-E2
caaaacactcataacacaaagcacaaagcaaagctcatccttgagttaaaaaatggcagcagcttcttccatggctctctcatccccatccttggctggcaaggccgtgaagctgggcccatcagccccagaagtgggaagggtgagcatgaggaagaccgtcaccaagcaagtctcctcaggaagcccatggtacggcccagaccgagtcaagtacttgggcccattctctggcgagcccccgtcctacctaaccggtgagttcccaggcgactacggctgggacactgctgggctt

SEQ ID NO: 39499 - DNA, 422 bp, Glycine max
  Clone ID: LIB3065-013-Q1-N1-E3
cgaaaaccctaaattgaattcgaatacacaacatgcagcaggggggaggatctgagacggaagtaacatgggaagaccagcagaacatcaacaaattcggaaggttgaataatcgctttcacgagcttgaggatgagatcaaaatcgcaaaggaaacaaatgataatttggaggatgcaagcaacgagttgattctcacagatgaagaggtcattcggtttcaaataggagaggtttttgctcatgtgccataggatgaagttgagaacaggatagaacagataaaagaggtgacaagccagaaattagcaaaacttgaagaggagaaagaatctattcttgctcagatggctgaactcaagaaaattttgtatgcgaagttcaatgactcgatcaatcttgaggaggattagtaactttct

SEQ ID NO: 39500 - DNA, 401 bp, Glycine max
  Clone ID: LIB3065-013-Q1-N1-E4
ccaaaaacttaaatggaagagagatccacagcatgcagcagggcagaggatctgatgacagaagtaacatgatgaagaccagcgaaacatcaacaaattcggaaggttgaataatcgctttcacgagcttgaggatgagatcaaaatcgcaaaggaaacaaatgataatttggaggatgcaagcaacgagttgattctcacagatgaagaggtcattcggtttcaaataggagaggtttttgctcatgtgccaaaggatgaagttgagaacaggatagaacagataaaagaggtgacaagccagaaattagcaaaacttgaagaggagaaagaatctattcttgctcagatggctgaactcaagaaaattttgtatgcgaagttcaatgactcgatcaatc

SEQ ID NO: 39501 - DNA, 98 bp, Glycine max
  Clone ID: LIB3065-013-Q1-N1-E5
ggctggccaaaccaacacgcttgtcaaatggaacctggtgaaggtggtccgcggcacttgacacttgacccctgattcctaactccttaatggcccct

SEQ ID NO: 39502 - DNA, 209 bp, Glycine max
  Clone ID: LIB3065-013-Q1-N1-E7
agtaggagcagcagcacattcctcgggactcgtgaagttcggtactagcgtgtggggattttaaatcaagggcgacgcggtgtaaaaagtggccgtggtgtcgccgtggccgaagtgagaatgactctggaccgagcaacgtcggcggcgacttaccggaggaagccgtcttgggaggagagggagaacaaccggaggagagagagaag

SEQ ID NO: 39503 - DNA, 190 bp, Glycine max
  Clone ID: LIB3065-013-Q1-N1-F1
aaaactttaggagtcttttggtttcagttttgttttagctgtttatcatcattccttcttagcagtgaattcgaaggggacttagatgttgtatttttattttttttcaacttctagcaaatgagagtttgaataaattgaaaagctagaaagaaaggttttcttggtaaaatggaagttggggattagt

SEQ ID NO: 39504 - DNA, 417 bp, Glycine max
  Clone ID: LIB3065-013-Q1-N1-F10
attaattacttgtgagtgtttccaaaacacatagagcatatggtaagatccggggactaccgcacccacgtttcaaaagttgagagggagtctagtaccgttgaataccctaatgctcacgtttccctcaacaagaaggttgtttacgaggaaagtgagatagagggttcccaccaccaccaccaccacctcttccataggcaccaccacccagagactcgtgagagtgttaaggtggtagagtatgagcaagttcctgagaggcgcgtcgctgaagttgtctacgaagagaacaggacagtgtggccttgaatggcttactagctagggttgaacttcttatggtgtttggctactttgctaagcaggccacctagtatatcaaaattaatcaccagtgtgcttatattaaataaa

SEQ ID NO: 39505 - DNA, 372 bp, Glycine max
  Clone ID: LIB3065-013-Q1-N1-F3
agtaagactgctaaagacaactataatatgagaatctacatagaaacagagtgaaaatgtaaacttcaagctagcactattacaaaagggccccaaaaaataatacaaatctccttgcctttgtagagtcctcaatcaaaattacatatggttcttctctctttagaattaagatttctggcacgagatgaaccactaagtaaaagaaatgccacctcttagaactcaaagcaaggatatcatcgaattgctgaagatttctcgtgatgaacaaagcacatttagttccatgaggacatttagagatgtttctgatgcctctttatggaatcaatccagatattatgcctttgaccgtctaaattcaaacca

SEQ ID NO: 39506 - DNA, 226 bp, Glycine max
  Clone ID: LIB3065-013-Q1-N1-F5
ggaatcccgaggtgggtgtctctagaacagtgagaaattggcagttatggtggaccgaggaattccgatactactattcttattctactactagtcttccaaggaaggggatcactattcaaaacattcttaatttgtccctttaatggcactcttttttccttatctttgagagactggacacaaatttttactgtgttcacagcgacaattggtcccgggggca

SEQ ID NO: 39507 - DNA, 382 bp, Glycine max
  Clone ID: LIB3065-013-Q1-N1-G1
atccccccctagctacagagcagccaaaggggaggaataataataagcctatattctaaggccggaaaaataaaaaaggaataacaaaaatgtctggaaaggtaattatctcggctgtttctctcatcctggtggttggagtggccataggtgtggtggtggccgtcaacaagaagggcgaggatcccacacttcaatctcaacaaaaatcagtaggggttatctgccaaaacactgatgaccagaagctctgccacgaaaccctaagctccgtgaagggcatggacaccgctgatccaaaggcttacatcgccaaagcggtgaaagccaccatggacagcgtgaccagtgccttcaacatgagtgataggctcagtaccga

SEQ ID NO: 39508 - DNA, 418 bp, Glycine max
  Clone ID: LIB3065-013-Q1-N1-G10
tagctgacaagtctgttgtttaaagtgcatccggctaaactggaaagtttcaggtgttgcattctatataaccccttttatatgaagtagataggatttacttcttaaaataagcagaaatagtttagacaaaacacactaaaaaatcaaaaaaacttcttattattaaaacaagcgcttatttcaacaaataagtttaaacaaattggcccttaatcttaaaagaaaaaggggttataggatatagcttgtttttaagacccttaattctcagaagtttttttccatataaattgctgagaaaaactctgaaacactttttatttttgagtgtttttttcttctgaaaacttaataattataaattttattaaacatatattttgattaaaaagcatttttttcataaagacaacac

SEQ ID NO: 39509 - DNA, 408 bp, Glycine max
  Clone ID: LIB3065-013-Q1-N1-G11
tccttccggcctaaggatgatcgtttaatgggcaagacactgcgaagatctgaagtcaaggtccttctaagaatgcttccagactatcatcatcatgtgaagtcatatgaaaatacacttatcacaaaattttttggtctgcacaggattaaaccttcaagtggtcaaaagtttcgctttgttgtaatgggaaatatgttctgcacagacttaaggatccatcggaggtttgatttaaaaggttcttcccttggaagatcatcagacaagatagaaattgatgagagtactacgctcaaagatttggatctgaactacagcttctacctggaaccatcttggcgagagtctttactaaagcagattgaaatagacagcaaatttttggaagcacagcacattatggat

SEQ ID NO: 39510 - DNA, 390 bp, Glycine max
  Clone ID: LIB3065-013-Q1-N1-G3
caatcggccagcaccaacagcatcggcggcgacagtcactgtccgacaacaacacttccgcggcgaaaaatgtctctggtggcgaacgaggatttccagcacattctgcgtgtgctgaacaccaacgtggatgggaagcagaagataatgttcgctatgacctccatcaagggtattggaaggagattcgccaacatcgcttgcaagaaggccgatgttgacatgaacaaaagggctggtgagttgagtgctgcagagttggatagtgtgatgactgtggtggcgaaccctaggcaattcaagatcccggattggtttttgaacaggaagaaggattacaaggatggaaagtactctcaggttgtgtctaatgctcttgatatgaagctc

SEQ ID NO: 39511 - DNA, 166 bp, Glycine max
  Clone ID: LIB3065-013-Q1-N1-G7
aagcaggattagttgacaccagtgtaacatagaaggaaaaacatagttacagttggagtgattagatccagattcccaataacgacacaaccaatgcataagaaagcaagtaaaaagggagcaacatgggggtcaatggcatcttcaactttaaaggagttcaaaa

SEQ ID NO: 39512 - DNA, 420 bp, Glycine max
  Clone ID: LIB3065-013-Q1-N1-G9
ctttgcgatggccatttgtttagggtgaatttgtttaaactaagtaactttaaaataagtgttttttatataagcgcttttttatgaagtagataggatttacttcttaaaataagcagaaatagtttagacaaaacacactaaaaaatcaaaaaaacttcttattattaaaacaagcgcttatttcaacaaataagtttaaacaaattggcccttaatcttaaaagaaaaaggggttataggatatagcttgtttttaagacccttaattctcagaagtttttttccatataaattgctgagaaaaactctgaaacactttttatttttgagtgtttttttcttctgaaaacttaataattataaattttattaaacatatattttgattaaaaagcatttttttcataaagacaacac

SEQ ID NO: 39513 - DNA, 411 bp, Glycine max
  Clone ID: LIB3065-013-Q1-N1-H1
aaaaaaagtcttaatttgcttcttgttcttcttcttgtctctgtcgtttgttctcttgatctttgatctctgtgttatatgttgtagcataagaagtaaacaacacacacatatataaatatttgtaagatatatatatatatatatatgatcatgggttttcttcacaagctttgggacgaaacgctggcgggtacggcaccggaaacgggtctggggaagctccgaaagtacaattcgttctccggcggaatctccgtccggtcaacggtggcagaggcagttccgataagtcgcagcatcaccattgttcggtcccagtctggtttcggaagcaccaccacctctgcttcttcttctccttctggatctaccacccctcgcttcgccttaactcgtaacacttctatg

SEQ ID NO: 39514 - DNA, 416 bp, Glycine max
  unsure (1)..(416): unsure at all n locations
  Clone ID: LIB3065-013-Q1-N1-H11
gttccaaaatgtgtccaaggagggtttgaaacttgggaaagattcaaaagacaaggaactgaaggaatcttttaaggatcttaccaagtggtggaaaactgctctttccaaagacaatgttgatgatgtgaagatttccaaccgattagataacactccttgtgtagtggtgacatcaaaatttggttggagtgctaacatggagagaatcatgcagtctcaaactttgtcagatgctagcaagcaagcatacatgcgcggcaagagggttcttgagatcaatcctaggcaccctattatcaaggagctccgagagagagtagtaaagaaccctgaggattgaggtgtgaagcatacagcacagctgatgtaccagactgcactctntgaaagcggcttcctgcttgatgatccca

SEQ ID NO: 39515 - DNA, 291 bp, Glycine max
  Clone ID: LIB3065-013-Q1-N1-H12
tttctgcttcggttgcatcttctgctgcgtaaagttgattcttttcttattcttttcggagatttcatctcttgaactaggtctaatactttatctaccgatctctatattctaggtgaaggtttgcttttgatccggcttgggagttttgatagacttgattttaactctttaagagccatatgctcacagtggtcggatatagtacatcagaagttcacacaagagatatatataattaaccttgggtaccacctgcagaatgtcattccgcaacatagttcgtgatgt

SEQ ID NO: 39516 - DNA, 347 bp, Glycine max
  unsure (1)..(347): unsure at all n locations
  Clone ID: LIB3065-013-Q1-N1-H3
cccaattcttcccccttcacccacccaacatatctgtctagtgccaattaataagccccccttcacattaaccctggggtcacccaactactntgaactccttaccataccattacaataattatcaaacctaaccagtaaaaatggtgaccgtggaggaaatccgcaacgctcagcgttcccatggacccgncaccatcttggccttcggcaccgncacgccgtccaactgcgtctcccaagccgattaccctgactactacttccgcattaccaacagcgaacacatgactgatctcaaagaaaagttcaagcgcatgtgtgaaaagtccatgataaagaagcga

SEQ ID NO: 39517 - DNA, 123 bp, Glycine max
  Clone ID: LIB3065-013-Q1-N1-H5
tgaaaggggaatggacttaattggcttcaaaggaaggaaatgccagggccaaaaggtggggctggaaccaaatttctttaaggggaaaggcaaaggtgttggccaaaaatgcccggttgaaat

SEQ ID NO: 39518 - DNA, 129 bp, Glycine max
  Clone ID: LIB3065-013-Q1-N1-H7
gaaaaccctacctaaccgtttcaagatgcaaatcttcgttaagaccctaactggtaagaccatcactctcgaagtcgagagttcagataccatagacaatgtaaaggccaaaattcaagacaaggaagg

SEQ ID NO: 39519 - DNA, 333 bp, Glycine max
  Clone ID: LIB3065-013-Q1-N1-H9
actcggaattcaactcgagagtatttattctttggttcaacaatttcagattgtgtctatggtaaaatgtacatatacataacaatcccagattattaactacaccaccttataatatcaccaaatactcaatataaccaccaactacatcctcacaccttctcgtattatctacaacaatattcacatcctcaaaaaacagttgcagaaaaccaatttcaatttccaatcctacaaagacaaaatcaatgataatcattataatattaacttcaataagcatataccctaccttattataaacatcacttacatatttcaaatgaacccata

SEQ ID NO: 39520 - DNA, 415 bp, Glycine max
  Clone ID: LIB3065-014-Q1-N1-A10
agcagaatgaattgagtgacacaaagcacactgaagggggatacaacaacatggaaaatcagaacaacaacaacaacaactacttctacaacagcaaggatgctttcggtaagcaaaatgaattgagtgacacaaagtacactgaaggaggatacaactccatggagaatcagaacaacaacaaatattactacaacaacgacaatgctgccaatgggaagtacttctacaacaacaatgatgctgccaacaacaggtactacaaaaccaaagctgtcaacaacaattacaatgatgagaggcagggtttgagtgacacgaggtttatggagggtggaaaatacttctatgacgttaactctgagaagtacaaccatccaacacaatatggaggctcaaccagaggaatgaactc

SEQ ID NO: 39521 - DNA, 415 bp, Glycine max
  Clone ID: LIB3065-014-Q1-N1-A11
gtttgattgtcctagctttgagcaacatcatgaagatctccattctctttatcacaatcttttcttgtggttttcttggaaatgttgtttcaaatgctagtcctcttccatatgaagctatttttaactttggtgactctataagtgatactggaaatgctgctcataaccacccacctatgcctggcaatagtccttatggttcaacatactttaaacatccttctggacgtatgtcaaatggacgactaatcatagattttatagccgaggcatatgggatgccaatgttgccagcctatttgaatctcaccaaaggacaagacattaagaaaggagtgaattttgcatacgctggttcaactgcacttgataaggattttttagtacaaaaaagaatcaatatagaggaagc

SEQ ID NO: 39522 - DNA, 226 bp, Glycine max
  Clone ID: LIB3065-014-Q1-N1-A2
agctgagaagcgcttggccgagtatggggaggatcggccgagtatggtcgacgtcttgtggaatcttgaatatgctttgcagcttcaggagacctgatcatcactcatggaacctgaagatgacagcacaaaccacattactggaattgaattagcacgtattgagccttttgataacactgttagtatgatgagatggcggcatctattccacagatgatgatgc

SEQ ID NO: 39523 - DNA, 366 bp, Glycine max
  unsure (1)..(366): unsure at all n locations
  Clone ID: LIB3065-014-Q1-N1-A3
cactctataagagctatgacgcacgctgacctaagcccgggattcgggttcgggatgggccccaacgagccttctgagctgtctatccatgagaacgcctatggcttggctagatacgctgtcatatgccatgagaatggcctggttcccattgttgagcctgagatccttgttgatggacctcatgacattcacaagtgtgccgncgtcaccgagcgtgtccttgcagcatgctacaaggctttgaatgatcaccatgtccttcttgagggtaccctattgaagccaaacatggtcacccctggatcccaatctgctaaggttttccctcatgtggttgccgagcacactgtcagagcccttcag

SEQ ID NO: 39524 - DNA, 260 bp, Glycine max
  Clone ID: LIB3065-014-Q1-N1-A4
agaaaacaaagcatatgtggtctgaaatgctcaaatggacggaggaattcggagctgacacgatcacggaggacttcgaattcaaagaacttgatgaagtcttgcactattatcctcaaggccatgatggactggaccaagatggaagacctgtgtacatagagagattatgccaattcgatgccacgaatatgatgcatgtcacatccatggatcgctacgtcacataccacgcaaaggagcttgagaggacatttgat

SEQ ID NO: 39525 - DNA, 386 bp, Glycine max
  Clone ID: LIB3065-014-Q1-N1-A5
caaattcaggtaatgctattctggcattagcatcaaatgccattcacctgctctggaaatggcagcgaaatgagcgtaactcatctggcaaggccactgctaccttgcaacctcagttgtggcaaccatcgagtggcatcctgatgacaaatgacattgctgatagcaatcctgaggatgctgtaccctgctttgcgttgtccaaaaatgactcgtatgtaatgtctgcatcacgagggaagatatctctgttcaatatgatgacttttaagactatgacaactttcatgcctccgacacctgcggcaacctttctagctttccatcctcaggattacaatattatcgctataggcatggatgattcctctattcaaatatataat

SEQ ID NO: 39526 - DNA, 278 bp, Glycine max
  Clone ID: LIB3065-014-Q1-N1-A6
tcttgacatccgcttcaacttctattctcttttgaaacacttagaagagaaaaaaaaaatgtctgcgttccttttgcttttcctaggtgtttcttctcagttgatcgggggactcaatacacctttaccatcttcaatctattgaaacctcggaaccattctcagcatagatggaggtgggataaggggtatcattccagctgtagttcttgaccacttcgataaggctcttcaagcatgggataaaagtgcatcactagcaaagtatttggatgtca

SEQ ID NO: 39527 - DNA, 338 bp, Glycine max
  Clone ID: LIB3065-014-Q1-N1-A7
caagcttagtgacactatagccaatacaagagtcaatgttgcagatgccattagagaccccattgtttttcccccttggttagataaatccgttgctggtttctagaacgctcttcttcaaggcgtgccgcaaacttttgcatccgaatccccgtttgttttggcagaagccatggccgatgacttcgacttcgcagataaagttcctccttcgttcgatcgcgtgggaaatgtgatcaaggattctggatccaaagcgttcaatccgggtttaattgtcctcctggttgttggtgggttgcttttgacattcctcattggaaattatgtgctctaca

SEQ ID NO: 39528 - DNA, 254 bp, Glycine max
  Clone ID: LIB3065-014-Q1-N1-A8
gttgcagtgttatgcatccctttggatgccacttgttccaatgcttgggaatatgtcttttgggatagttatcatccaacagaaggagtttacagaaagctcgtaaattatgttcttgaaaagtacatagatcgattgttttgagctcgattaagtttgcctacgggaagtaatatcaattattagttatgttgatgtcaacgaagacaatgaatattttgatttgtctagttttggtgtgattgttcggtact

SEQ ID NO: 39529 - DNA, 83 bp, Glycine max
  Clone ID: LIB3065-014-Q1-N1-A9
atttgcttggtctcctaacaaggaacttcttattgcgatagttgtattatgtccattgtcatatagttgggtttgtttttggt

SEQ ID NO: 39530 - DNA, 99 bp, Glycine max
  Clone ID: LIB3065-014-Q1-N1-B1
caatgcttagtgacactatagccaatacaagagtcagggttgcagatgccattagagaccccattgtttataccccttggttagatatatccttttctt

SEQ ID NO: 39531 - DNA, 405 bp, Glycine max
  Clone ID: LIB3065-014-Q1-N1-B10
ctctcactcacatacacacactgaactaaaaaacaggaaaagagacatggctgagcaaaccttcatcatgatcaagcctgatggcgtccaaagaggccttattggcgagatcattaacagatttgacaagaaaggtttctacttgaaaggtttgaaacttgttactgtggaccgtccttttgctgagaagcactatgctgatttgtctgccaagcctttctttagtggtttggtggattacattatctctggccctgttgttgccatgatctgggagggcaagaatgttgttacaactggccgaaagattatcggagccacaaacccagctcaatctgagcctggaactatccgtggtgactgtgccattgacattggaaggaatgttatccatggaagcgatgc

SEQ ID NO: 39532 - DNA, 418 bp, Glycine max
  Clone ID: LIB3065-014-Q1-N1-B11
ctctaagccactaaccctcgctggtctgaaaggcagtaaaagagacactgctgagcaagccttcatcatgatcaagcctgatggcgtccaaagaggccttattggcgagatcattagcagatttgacaagaaaggtttctacttgaaaggtttgaaacttgttactgtggaccgtccttttgctgagaagcactatgctgatttgtctgccaagcctttctttactggtttggtggattacattatctctggccctgttgttgccatgatctggcagggcaagaatgttgttacaactggcctaaagattatcggagccacaaacccagctcaatctgagcctggaactatccgtggtgactttgccattgacattggaaggaatgttatccatggaagtgatgcaattgaaagtgct

SEQ ID NO: 39533 - DNA, 413 bp, Glycine max
  Clone ID: LIB3065-014-Q1-N1-B12
catggcttcctcgtgtgcttcctctgccattgcaggtgttggcatctccacaccaagttcccagaagaatggatcactcttgggaagcacaaaagcttcttttcttagtgggaggaaactgaaggtgaacaactttacagcaccagttggagcacgatccagcactacagtttgcgcagttgctgagcctgataggcctctgtggttcccaggcagcacccctcctccatggctagatggcagtttgccaggagattttggctttgatcctctaggtcttgcatctgatcctgagagcctgagatggaatgtccaagcagagcttgtgcactgcagatgggccatgttgggagctgctggcattttcatcccagaattcctcacaaagattggtatcctgaacaccccttcat

SEQ ID NO: 39534 - DNA, 259 bp, Glycine max
  Clone ID: LIB3065-014-Q1-N1-B3
gaaggcgtcttcataaacgcctttcttctccgtttgcgttgcctcgttcgaattcgctgtttgatctgcgaaaatgagagagcgcatctcgatccacattggtcacgctggtatccaggtcggaaatgctcgctgtgagctctactgcctcgagcacggcatccgtcccgatgggcaaatgcctagtgacaagactgttcgcagccttgatgatgccgacatgacttccgacagcctgactgaatccggattgcacgtt

SEQ ID NO: 39535 - DNA, 110 bp, Glycine max
  Clone ID: LIB3065-014-Q1-N1-B4
ggaagaaactcatgcatgcggttcagtatgatagctacagtggaggacctgctgacttaaagcatgttgaagttcccatacctactccctgcaaagattagtgtttgatt

SEQ ID NO: 39536 - DNA, 268 bp, Glycine max
  Clone ID: LIB3065-014-Q1-N1-B5
tctgaatcgaaactaatggcttcagagacagaggtgttaaatattatgtcctctgttttcgaacgcttcgagagaaacatgtctctgtttctgcccttcatcttcggcttctctgacgccacctcaggacgagatagcgacgacccagatcacgaaactgctcacacagaaggttcactgcgtcaaagaataatcttggggaaccccttgactcatggcatggtggtgatcgacggcggtttgagcctcgaagctctgcttcgcgaac

SEQ ID NO: 39537 - DNA, 196 bp, Glycine max
  Clone ID: LIB3065-014-Q1-N1-B7
tgggttgaggctgctttggagatttttcttcccctttaagatgaacccgggcctaggtccaattttccaatgattcctaatccttttggaccaatccacttggggaagggctcttaatagaaggttaatagaattcttttcaaaattaaagaatcctttaaatcctaaggctgaaaaactaaaatcaaaggtttta

SEQ ID NO: 39538 - DNA, 215 bp, Glycine max
  Clone ID: LIB3065-014-Q1-N1-B8
tgcaaagcacaatgcaaagctcatccttgagttaaaaaacggcgacaggttcttccatggctctctcatccccatccttggctggcaaggccgtgaagctgggcccttcagccccagaagtgggaagggtgagcatgaggaagaccggcaccaagcaggtctcctcaagaagcccttggttcgggccataccgagtcaagtgcttgggcccattc

SEQ ID NO: 39539 - DNA, 419 bp, Glycine max
  Clone ID: LIB3065-014-Q1-N1-B9
ctctcactcacaaacacacactgaactaaaaaacatcaaaagagacatggctgagcaaaccttcatcatgatcaagcctgatggcgtccaaagaggccttattggcgagatcattagcagatttgagaagaaaggtttctacttgaaaggtttgaaacttgttactgtggaccgtccttttgctgagaagcactatgctgatttgtctgccaagcctttctttagtggtttggtggattacattatctctggccctgttgttgccatgatctgggagggcaagaatgttgttacaactggccgaaagattatcggagccacaaacccagctcaatctgagcctggaactatccgtggtgactttgccattgacattggaaggaatgttatccattggaagtgatgcagttgaaagtgct

SEQ ID NO: 39540 - DNA, 406 bp, Glycine max
  Clone ID: LIB3065-014-Q1-N1-C10
ctcgagccgtgctgccaaagtgacaggcatgcttcttgagagggaccagactgaagttctgcatttgcttgagtcgccagaagccctgaaagcaaaggtggctgaggcaatggacgtcctaaggaatgttgctcagcagcaggctggcggtactgctgatcagctggcttccttatctcttaatgacaaccttgcttcttaaggtttatatcttggagtttactgaccgatgatgaattgttacactgtgcactggcttggatacagattacatgtcgagcgtgaaaagggaaacttgaatgcttctcattaccattaacacatttggaattgttgtggagtcaattgacctctctatctctctaattcatgccccatggaagccaacgcttacaaccatgaagct

SEQ ID NO: 39541 - DNA, 416 bp, Glycine max
  Clone ID: LIB3065-014-Q1-N1-C11
tccaacaacaatcatcacatgtttgcaagggaggaaggtcaatttgaccggttcaaagctttgaatgcaccaccctttgagaccaatcacaacaacaacaacttccatttgatgtttggttccccttgtgatttggcatcctttgatttcaaggaggatatgcaaggaggagtagtagggatggatgctcttcagaaacagcctgatatctctatttggtaccagtgaaaatgacagcttaaagcttgaaacctcctcatcatcttcatctatcatggactcttttattttccttctaaaagggttggcacccccctaatcatgtgaagttcctttggccgaaaaagggtttcactgcaattttcttcacatgtaatcctgtaggcccagtagaactaaataatattttaagcttg

SEQ ID NO: 39542 - DNA, 414 bp, Glycine max
  Clone ID: LIB3065-014-Q1-N1-C12
aaaatgagaaggatcaagatacctgtaccaccagctgatgaaagaaaaaaggtaattgaagatgttgacaaagatcggagatatgccattgatgcagcaattgtgcgcattatgaagagtaggaaaattttgggtcatcaacaactagttttggagtgtgttgagcagttgggccgcatgttcaagcctgatatcaaagcaatcaagaagaggatcgaagatctcatcactcgggactacctggaaagggacaaagataacccaaacaccttcaggtatctggcataaatggaagttactaatgtatagagtggccagtgttatggcctgcaaaaagcactggggtttgcctgaatttaatttctagggaagtacagttgaaaatgcttaaagttacacaattctgtaaatgat

SEQ ID NO: 39543 - DNA, 144 bp, Glycine max
  Clone ID: LIB3065-014-Q1-N1-C2
agcaaatctgcatagcgatggctccttcgaagctcttcgtatttgcgctttcagttaccctgatttttgccatcgttggggccgaagccgatgtttccgtcgaatgagccactccagatcctgataccttcgtcatcaatatcc

SEQ ID NO: 39544 - DNA, 259 bp, Glycine max
  Clone ID: LIB3065-014-Q1-N1-C5
caaagggactcgttgttcttctcccaggttattcagaaaagcagagtggtgaagatttgctgcattggtgctggatatgtggggagtcctactatggcagtcattgcacttaagtgcccatccatcgaagacgcatgtggtgatatctataaatcccagattgcaaactggaacagtgaccagatttgtatctatgaacctggccttgaaggtgttgtgaaggaatgccaagtcaagaacctctttttcatcactgatg

SEQ ID NO: 39545 - DNA, 308 bp, Glycine max
  Clone ID: LIB3065-014-Q1-N1-C9
cagaaatagatagagaacttcaagtgaggctgagggtgacaggtatctagagagagcactagtactctaaaagtctattatattcttcaaaatatgaccatgcatcgcgagtcttgggcttttgtcttcggcgttatgggcaacatcatctcctttggagtgttccttgctccattgccaaccttttaccaaatctacaagaagaaatccactgaaggtttccagtcacttccttatgttgttgcactgttcagtgcaatgctttggatttactatgctttcgtgaaaaggtaaactgccctccttct

SEQ ID NO: 39546 - DNA, 110 bp, Glycine max
  Clone ID: LIB3065-014-Q1-N1-D1
atgaaaagaaaggcttgttagtagtgctacgagttaggtgccatagaatgccaggctcagactaccataatttcctttcctaattaaatctgggataggtgtacaataca

SEQ ID NO: 39547 - DNA, 412 bp, Glycine max
  Clone ID: LIB3065-014-Q1-N1-D10
gtagacatcttcatctgcatacaagtatttataaggtgcatgtaccaagcacttgctggaatactctcttgccagtgaccacctcatcgaatgctcatacaatttcttcaattactgctgctacttctactttaccagaggacactacaccgacagcgatgtcgccgtcgaccactgccgccccgcgtctactgagatctacgacttcactgatccgaatgccgcttactctgaatgtgtattagaatcggccaccgtaaataacgtaaacgctaaccgaaaccgctatcgtcaatgcgacctggacggcaacggcgtttttatctacgatggtccggtgcttacgcctgctacataaatggagcccgatgaaggttacactgtgtgcgagtagcgccgtcagaatgccatt

SEQ ID NO: 39548 - DNA, 414 bp, Glycine max
  Clone ID: LIB3065-014-Q1-N1-D11
aggagcacatgattatgcttgtctgattgtgaaaggtcctagctaccagttttcacaagctttaacagaaccaaaggtggcttgattcaattaaaccatggtaggcctcagcctctccaatatgtggtcaatgcggcctttttggctgccctatatagtgattatcttgatgctgctgatacacctggatggtattgtggacctaatttcttttcaaccgacgtgctccgtagctttgccaagtcccagattgattacatccttggaaataacccaaggaaaatgagttatgtcgtaggttttggtaatcattacccaaaacacgtccaccatagaggagcatctgtaccgaagaacaagatcaagtatagctgtaaaggtggatggaaatggaaggacacttctaagccaaac

SEQ ID NO: 39549 - DNA, 152 bp, Glycine max
  Clone ID: LIB3065-014-Q1-N1-D12
ggaaaaactgccaatagtcaaacgtccttatttgatttggagtgctctgcagtttttttaatcagggaatggtatttttatatgtaaatttgtgaaaataatatattaacttttgtttggatacatcatacatagattaatatttttgtttt

SEQ ID NO: 39550 - DNA, 317 bp, Glycine max
  Clone ID: LIB3065-014-Q1-N1-D3
gctaatctcatgaaattgctcctaccaagactaggattagcgccataccttcctccagttgaggagggtgcatattctgcgtcgaagagagcatttgaggccttgaacactcatcttgcctccaatacttaccttgttggccattctgttacccttgctgacatcatatcaacatgctacttgtatttaggattcatccatctcttagttaagagcttcacctctgagttccctcacgttgtacgatacttttggaccttggtcaaccagccttacttcagaaagattctaggccatggtaagctatctgaggctgt

SEQ ID NO: 39551 - DNA, 323 bp, Glycine max
  Clone ID: LIB3065-014-Q1-N1-D5
cgcacaaagcggcgctcgaagcctttgtctccttgagctgcggtcggtgctaccactatcaccaccaccaccactgctatcaccgctatcaccaccgtcatgacatctagctgttcaagtgcttctgccggtggcggtggatcgtcttcatccaccacctttgaggacgaagaggaagacatggctaattgtttgattctgctagcacaaggaagagtaggacgggaccctcctcatcatcacaaggacctatgtggtgatgtcaagacagagaacggtagcaccaaaattgatcatgtatatggtcatgaatgcaaaacatg

SEQ ID NO: 39552 - DNA, 172 bp, Glycine max
  Clone ID: LIB3065-014-Q1-N1-D7
gtcactgacctatcttggaagagttttgaagttaaaaccttgaaaccgctttgcctttagattctgattctgagtctctgctgctatatatggcgccacgcgtatttcttgtgttggggatgttgctgatggtgtgccttgttaaggtttcgtctgatccacagagagaaga

SEQ ID NO: 39553 - DNA, 154 bp, Glycine max
  Clone ID: LIB3065-014-Q1-N1-D9
gtagacatcttgatctgcatattatgatttagaacctgaacgttagtaggcttctcctgaaataaacacttgtttgtgttcaaataattgaatgatcatttcattgtctcaatttgtgctgttttatcaattctaaaagttgacattatattgc

SEQ ID NO: 39554 - DNA, 311 bp, Glycine max
  Clone ID: LIB3065-014-Q1-N1-E1
tggttatctagctccagagtatatgcaaagtggcagagcaactgagaagtctgatgtgtatagctttggtgtgttgacactcgaagtgctgagtggaaagcgaccaacagacgcagcattcattgaaaagggcctcaatattgttggttggttgaattttctaattacagaaaataggccgagggaaattgtcgaccctctatgtgaaggggtgcaaatggagagccttgatgccttgctctctgtggctattcagagtgtatcctcaagtccagatgatcgacccactatgcaccgagtggtgcaattgc

SEQ ID NO: 39555 - DNA, 405 bp, Glycine max
  Clone ID: LIB3065-014-Q1-N1-E10
agattattccttagctcctactactcttgttcatcgttctggctcgaattcacgcttgcacgacgatgctgctccgatgattattacgcactctgtgttctcgagccgaaagcaacatcagcaacatcagagttataatgttccacagcgtcatcaagtgttcgtggttgaagccaatggcaaaaagggaatgatgtctcgtcaatttcagcgcaatgctcctactcctttacccaagattgaagacgatggcaatcccaaattcgtcatcttcattcgcatggccaatgtatacctttggtaccctcttagtatcgtatcatgcggcaccactgctaaaataatggttgcagctaaagataatattctcggcaagtatatctacaaagacactcttgatagaaa

SEQ ID NO: 39556 - DNA, 372 bp, Glycine max
  Clone ID: LIB3065-014-Q1-N1-E11
ctctctcacaagtctcaccaacttccactctcatgggtgacgctcaccaatgctttcctcgctccttccttcgccgttcacggtggtagggtttccgatccgcgctccattcctcttttctctcttccctccgacgccttcttccgctccccaacctccctctccagggacaagaacattctatatgcttctgcttatgatttgaatgcagttggttcagcttcactgcaatctggtgacaatcctgatagtcttcctatgccaatagttctaatagatcaagaatcagattctgaagcaacaattgtgcagcttagctttgggaatcgccttggagctcttcttgacacgatgaaagcatttaatgatttg

SEQ ID NO: 39557 - DNA, 403 bp, Glycine max
  Clone ID: LIB3065-014-Q1-N1-E12
accgcggagcatttgcaaactgttccagatgatgagtctcgtgtcacctgcatcaaaacttcttctcccaacggcaagaggatctcctctcctaattgtgacgtgggatcatcacctactactcgcagaggtgggaggaagttgatattacaatctatctcttcatttccttctctcacccctcaccattagaatgaagatcttcttcttcggcttaagttagcctacccccacccctcttcccttggttcacgttttcagtttgttgcagttggagctgtatgcttagggtgaatgtacatgattgagtttcgttttactttcgtaatatgtttgttccgttcatttcataatgtacaacttcagttcagttgtataatatctatcttaactgatggttatc

SEQ ID NO: 39558 - DNA, 341 bp, Glycine max
  Clone ID: LIB3065-014-Q1-N1-E3
tccctcgttgaaatgaaaatgggttcttctttgtggactttgtgtctaattttggcttcactagcctcttctgcattctgtgcctttccacggatgccagtggatgttccattcggcagaaactacgttcccacttgggcttttgatcacatcaaatacttcaatggaggttctgagattcaacttcatcttgacaagtacactggtactggcttccagtccaaagggtcatacttgtttggtcacttcagcatgaacataaagatggttcctggcgattcagctggcacagtcactgctttttatttatcttctcaaaatgcggatcacgatgagataga

SEQ ID NO: 39559 - DNA, 256 bp, Glycine max
  unsure (1)..(256): unsure at all n locations
  Clone ID: LIB3065-014-Q1-N1-E5
ggatgtcagactagaaatggggttagaggaaaatatttgcacgctggaggctcacgagatcattgctcgcccttcacgtgctgacttctacaacccaaaagctggtcgcattagcaccctcaacagtctcacccttccagcccttcgncaattcggactcagtgcccaatatgttgtcctctacaggaatggaatttactctccacattggaacttgaacgcgaacagtgtgatctatgtgactcgagggaaagga

SEQ ID NO: 39560 - DNA, 166 bp, Glycine max
  Clone ID: LIB3065-014-Q1-N1-E7
ggcggtggtcatccatttagggccaatgctctggcttaccttgccaggttttgcagaaacctgaaagtcctaaatctttggggatgtgttaaagctgcttccgatactgctttacaggcttttggacaatactgcattcagctacaatctttgaaccttggatggt

SEQ ID NO: 39561 - DNA, 415 bp, Glycine max
  Clone ID: LIB3065-014-Q1-N1-E9
ggaagtaggaatgtctctgaacgcgctggttcgtggtcctggctcgaattcacgcttccacgacgatgctgctccgatgattattaggcactctctgttttcgagccgaaagcaacagcagcagcagcagagttataaggttccacagcgtcatcaagtgttcgtggttgaagccaagggcaaaaagggaatgatgtctcgtcaatttcagcgcaatgctcctcctcctttacccaagattgaagacgatggcaatcccaaattcgtcatcttcattcgcatggccaatgtatacctttggtaccctcttagtatcgtatcaggcggcaccactgctaaaataatggttgcagctaaagataattttctcggcaagtatatctacaaagacactcttgatagaaatctcgctgct

SEQ ID NO: 39562 - DNA, 282 bp, Glycine max
  Clone ID: LIB3065-014-Q1-N1-F1
gacatttcagtgatagagatatagtcaaggcatgcgtttgatgaggtctaccttggccaaatggataatccaaattggactacagattcaaaggcattggaagctttcaaaaagtttggaaacaaactggcagatattgagggaaaaatcacacataggatcaatgatccaagtctgataagccgacatgggccagttcagcttccatactcattgctccatcgttcaagtgaggaagggatgtggttcaaagggattcccaacagtatcttcatctaaaat

SEQ ID NO: 39563 - DNA, 416 bp, Glycine max
  unsure (1)..(416): unsure at all n locations
  Clone ID: LIB3065-014-Q1-N1-F11
aaaggaactcctgtgtttcctaaggtaaagttctcatacatgtcttgcattattactttatattgttatttatcttatgctaaatttaattttaattcctctgtaattctcaatattcgagtttagtccttctattttttccatgattttaacttttagattttaaaaaattcacaattttagttcaatctttaattttacatgcatgtctatctttcttttactttttatattttaatcaaataaattattttttaattgtgaaatgttaatttcaacctcaccataatactaggtgatacatcatcatcaaccttaaacggtaaacatgcaaaattaaggattggaaaaaaattgtgaattttctaaaatttacgactaanattgcagaaaaaataagaaattaaaattataaa

SEQ ID NO: 39564 - DNA, 272 bp, Glycine max
  unsure (1)..(272): unsure at all n locations
  Clone ID: LIB3065-014-Q1-N1-F5
gtctgtctttttttctctttctctctctagattntctttcggcttcttctttatgagccctaactcggggccccatagtcgtcgctgctagctagccatgtcgctgaggaaggtcttccgctcccgcaagttctccaaatcgttcaaagaggtgctgccggcggatggcgccgccgtcgaaggcggagtcgccggcaccgtcgaggaggcggcgaatgggaataataatgggtggtctagcatgctgccggagatcctcggcgagatcgtgc

SEQ ID NO: 39565 - DNA, 170 bp, Glycine max
  Clone ID: LIB3065-014-Q1-N1-F7
catctgcatctgtttgtgttcgacagaacagggaccttaaagctttgggtcgagaatcctaaccctgggtaacaaccggttgaggtacgaaatcgcacaaaccgcttacatcaaattcatccttcactccctcaaacacccaaccttcggcgtcaacggggtcttgatcg

SEQ ID NO: 39566 - DNA, 415 bp, Glycine max
  Clone ID: LIB3065-014-Q1-N1-F9
gaggatgagaaaaagatggaactggaacatgtgaccagcttgtcaagaagagatcatgaaagaccaaatcccttttttcgagtgagagcagttagcttgggtggttggttggttactgaaggttggatcaaaccttctctcttcgatggcattccaaacaaagacttattggatggaactagtcttcggttcaagtctgtgtcaacagggaaatatctatgtgccaagtctggagggggaaatgtcctacttgcgaacggcacaggtgcttcaacggcttgggaaacaattacattgtggaggataaacgaagatactttcagactaagggtgttcaacaaacagtttgtggggttagatgggattaacgttgttgctgtttccgatactcccatccattctgacacgtttcgaa

SEQ ID NO: 39567 - DNA, 332 bp, Glycine max
  Clone ID: LIB3065-014-Q1-N1-G1
gggaagggaactttgccctaagcacactttactatggtgagtacaacaacaatggggctggttctagcaccactgctagggttaattggcctggccgcaaagtcatcaatagggatgaggctaccaggtacacggttgatgctttcttgcaagggacatggatcaatggcacaggtgtaccagctcaactaggcctgtacagttaaaaggctctaattaacatcatcatgtttaataaatatgtataccagttgagttgaatgctccatctaatttaatgtattctaatgttatttatttgaaagggattaataatactattatttatgatt

SEQ ID NO: 39568 - DNA, 403 bp, Glycine max
  Clone ID: LIB3065-014-Q1-N1-G10
atagatctgattggagagcgaggtggtgtccattggacttgtgtaattaaaacatctaaatagacacctgttaagatggaggacaactatggtgctgccgctatttactgctatcattctcttcgcttttattccgaatggattgttagcagttccttccaccgtcccggcattcctttggtcatcacattatgaactggcctctgaaaatctattgaaggaatctgtaaattaccaagtcatttctccgaaggatctagcacaatctattttatctgaagcaggctggtcaaattttctgcgcataggaaagaaattccatgagcctctgaatctggcactcttattcgctggtatacagttacaaccgacagatttaagcatgaacaaacattcaaactca

SEQ ID NO: 39569 - DNA, 408 bp, Glycine max
  Clone ID: LIB3065-014-Q1-N1-G11
tctctctattcccttcttcaacatttttagcttcttctcttgctcaaatccccctatcttcaaaatttcaaggttatcactctaaagacagatttttttcttaaatgactgtggctatcgctgtttggagtgctggtcttcacttcagtgctgctacgaagcctcatagtagcttgaggcctttggagaaaatcatttgcactgcccctttcttcaaggcctcatctgggtttgctgctactaagccattctgcatccttaacacaacacgattgtcatattctggaactactattatccctcgagcagcacctgtcactgatgtggaggacgggaatcatggtgagactgataccattccaactcccgtagttataattgaccaagactctgatcctgatgctaccg

SEQ ID NO: 39570 - DNA, 400 bp, Glycine max
  Clone ID: LIB3065-014-Q1-N1-G12
tctctctattcccttcttcaacatttttagcttcgtctctttctcaaatccccctatcttcaaaatttcaaggttatcactctaaagacagatttttttcttaaatgactgtggctatggctgtttggagtgctggtcttcacttcagtgctgctacgaatcctcatagtatcttgaggcctttggagaaaatcatttgcactgcccctttcttcaaggcctcatctgtgtttgctgctactaagccattctgcatccttaacacaacatgattgtcatattctggaactacaattatccctcgatcagcacctgttactgatgttgaagacgggaatcatggtgagactgataccattccaacttcagtagttataattgacctagactcttatcctta

SEQ ID NO: 39571 - DNA, 311 bp, Glycine max
  Clone ID: LIB3065-014-Q1-N1-G3
agctgctgttcctgcgcgtgaacaagcctcatgttagccatagccatggttaagcataacaatgttatccccaacggacacttccgtaagcactggcagatctatgtgaagacctggttcaatcagccagcacggaagacaagaatacggttgtctcgtcagaagaaagctgtgaagatcttccccaaacctacatctggacctattagacccattgtacatggtcaaactttgaaatacaacatgaaagtgagagctggaaggggattttcccttgaagaactcaaggcagctgggattcccaaaaagct

SEQ ID NO: 39572 - DNA, 407 bp, Glycine max
  Clone ID: LIB3065-014-Q1-N1-G9
atagatctgaatggagagcgaggtggtgtccattgcagttgtctaatgaaaacaacaaaatagacacctgttaagaaggaggacaacgatggtgctgccgctatttactgctttcattctctttgcttttattccgaatggattgttagcagttccttccaccgtcccggcattcctttggtcatcacattatgaactggcctctgaaaatatattgaaggaatctgtaaattaccaagtcatttctccgaaggatctagcacaatctattttatctgaagcaggctgatcaaattttctgcgcataggaaagaaatttcatgagcctctggatctggcactcttattcgttggtagagagttacaatcttcagatctaagcatgaacaaacatgcagactcagctc

SEQ ID NO: 39573 - DNA, 390 bp, Glycine max
  Clone ID: LIB3065-014-Q1-N1-H10
agctcagtcaatagcagctgcagatgctattcctttgctgcagtacttaatccagtctggcccacctcgctttcaggagaaggcagaatttttattgcagtgtttgccaggaacgttggtggtgatcatcaagtgtggtaacaatatgaagcaatctgttggaaacccaagtgtttttttgcaagcttacactaggaaacactcctccaaggcaaaccaaggtggtctcaactggccctaatccggagtgggatgagagctttacatggtcgtttgagagtcctccaaaaggtcagaagcttcacatttcttgcaaaaacaagagcaaaatgggaaagagttcatttgggaaagtgacgatccaagattgatcgggtagtaatgcttgga

SEQ ID NO: 39574 - DNA, 408 bp, Glycine max
  Clone ID: LIB3065-014-Q1-N1-H11
gagagtatttgtatccaaaaaatggtgaaccacgtctcaaactattctcctttattcatcatcttggttttgcttgtcaaaggtcaaatagaagtgcaaggagatttatgtgtaaaagctttgaattattgtgaaacccaagatgattgtaaactaaagtgtatagccccgcgcaaggatgggtttgcgtattgcgataacacacacacgtgttcctgttttttctattgttaattaggcaagctttgaaaagtgctattttccaccttctcgctaaaccaatctggaaggcttagtaagcatccgctaagcgcatcactcatgggctaagcgtgaggaagactctggaagaagatgagttgtacaggttcactaagcgcaccgcttcagttcatccgctaagcgaga

SEQ ID NO: 39575 - DNA, 252 bp, Glycine max
  Clone ID: LIB3065-014-Q1-N1-H12
tgttaagaaactgctaacagaagctggtggtcttgttgccattcgaatctaaagctagtgtctttctgcttcgtttgcatcttctgctgcgtaaagttgattcttttctgattcttccgtagatttcatctctgaaactagttctaatactttatctacagatctctatattctacgtgaaggtttgcttttgatccggcttgagagtttcgatagactttgattttaactctttaagagccatatgctcac

SEQ ID NO: 39576 - DNA, 189 bp, Glycine max
  Clone ID: LIB3065-014-Q1-N1-H3
gtttgtggtctgtcttatgtggacacaattcctagcagttacaacataatgtcatttgagtggtctttggccccctagcaagttatctgtaccgttacaaattaatggtccacacatacaggatttatgtacttttaggttattagcataatagttgaacaattgaattaataaattaattatgttatg

SEQ ID NO: 39577 - DNA, 342 bp, Glycine max
  Clone ID: LIB3065-014-Q1-N1-H5
ggcaacctcatctttgtcttcaattttcattggaacatcagctattcagattacagagttggctgttcaacccctgggaaatataagattgtcttggattcagatgatgccttgttcggtggcttcagtcggctcaatcacactgctgagtacttcacctcagaaggatggtatgatgaccgacctcgatcctttcttatctatgcaccttctagaacagcagtggtttatgcccttgcagatgatgttgaacctaccctagcagatgaagctgaacctgccctaacagatgaagctgaaccagatccagttgatccttgatgacaattttctgggatgctg

SEQ ID NO: 39578 - DNA, 186 bp, Glycine max
  Clone ID: LIB3065-014-Q1-N1-H7
ttccattccttttttctgcttactttacgagagaaaggaaaggcaatagtgtatgtgtatataaacaaaagtttatagcataaataattgatcttggttaaaagcaaaatatattataaacaataaagaatgaaaatttttctggtgttgaaaaagagaacagaggaaatgagagaaagatcaacg

SEQ ID NO: 39579 - DNA, 413 bp, Glycine max
  Clone ID: LIB3065-014-Q1-N1-H9
agagttggttctttctttccccaatttgtgagtgttactattgaatcgattggattgacatggcgagcgcgatggttgaggacgccaacttcgaagatgaccagctcgccaatatgaccaccgacgacgtcgtcagagcttctcgtcttctcgacaacgagattcgcatcctcaaagaagagttgcagaggaccaatttggagttggaatcgtacaaggacaagatcaaggagaatcaggagaagattaagctcaataagcagttgccctacctcgttgggaacatcgttgagatattggaaatgaacccagaagacgaagctgaagaagatggtgccaatattgatcttgactcacaaaggaagggaaagtgtgttgtgctaaagacttctactcgacagacaatctttcta

SEQ ID NO: 39580 - DNA, 368 bp, Glycine max
  Clone ID: LIB3065-015-Q1-N1-A1
tgatgaggaggattcctttgaggaagtttctttgagtgcagcggtcagtggtgttgagggtttggactatatggaaagaattcctcttgccacatctgagggttttccccatgtgctttcacgcaaaaatggtgaaaaaggcaaaaggagatttgtttctggggatggtgaagagatgacattgattccgggaaccagtgttgaagaggcttacaataagctaatagttgaacttgagaaaagtgttcctacattggttggcattgaatgtcccaaggatgagaaacttcctcgtcgcaaaatttttgacaaacctaagacgcgctgcttcactattctccctattgagtttaatcttgtggttcgtc

SEQ ID NO: 39581 - DNA, 305 bp, Glycine max
  Clone ID: LIB3065-015-Q1-N1-A10
gtataccttaataaataatttaagatactatgatgagagcgcggttcccattactgttgctgggacttgttttcctggcttcagtttctgtctcatttggcattgcttactgggaaaaagagaaccccaaacacaacaagtgtctccagagttgcaatagcgagagagactcgtacaggaaccaagcatgccacgctcgttgcaacctccttaaggtggagaaagaagaatgtgaagaaggtgaaattccacgaccacgaccacgaccacaacacccggagagggaacctcaacaacccggtgag

SEQ ID NO: 39582 - DNA, 321 bp, Glycine max
  Clone ID: LIB3065-015-Q1-N1-A11
ctccaaagtcccagcacacccatttccgttctttgtcctggaggggtttagtctttggaaaaataaccgttgagacagcaaaatatgaagtgatcaaatccacaagtgagtacgaaatccgtaagtatgcaccatcagtagtggctgaagtcacatatgacccttcacagttcaagggaaacaaagatggtggctttatgattttggccaattacattggcgctgtggggaagccccagaacaccaagcctgaaaagattgccatgactgcaccggtcataacaaaggacagtgttggtggtggtggcagtgatggtgaga

SEQ ID NO: 39583 - DNA, 388 bp, Glycine max
  unsure (1)..(388): unsure at all n locations
  Clone ID: LIB3065-015-Q1-N1-A12
cacaatcacatgcacagtttttgcattgtattttggatcgttgctaaatgttctccaaagacgagttggagaggaagaaagacttttgaaagataaagttgcaaacaaagcagtgttccttcgtcgagtactatctaaactatctgccaagcttagaggcagatcgttggaattgactccaccagctccctcgtggtcatcatcatcgtcctttgttactccaaaattgattcttagagtactagtggttgcaagaattgcctttgcatggcaatactattcacaatgatatctgccaactaagtagttttacttgtactattgcatgtattttcatgtacaatacaaactttncactgcccgatgtgcctgcgtgcattcatgactt

SEQ ID NO: 39584 - DNA, 291 bp, Glycine max
  Clone ID: LIB3065-015-Q1-N1-A7
ctgtacatcatatatttaccatcctcagaattttcgcagaagtgaaaaccctaactctagcaatcaatataacaacacaagcatacaaaaatgactcacaatgcgaattttttcaagggtaaatcatacaacaaattaattcttcacaattgtcactacaaagtttctgttactcgcaaacgaaatagattcctgaagccattcaatgatacaaaggatatggatactgatcgcgatgatagtaaattcattaaccactacaattatatcaaagcacctactctaacaact

SEQ ID NO: 39585 - DNA, 236 bp, Glycine max
  Clone ID: LIB3065-015-Q1-N1-A8
atttctctatcattatgacaatgattcgttcaaacccacgacgcgtttttcacctttctcttcttctcctattcctctattcttcctcaaccgaatccctcagatttctaatccaatccaaccacaccaaatgcatcttccaggatatctacagcaattacatgaccgttatctagtaccaaattgttagccccaactaaagtcaacctctaccagatacccacacattcaccgtc

SEQ ID NO: 39586 - DNA, 337 bp, Glycine max
  Clone ID: LIB3065-015-Q1-N1-B1
aaacaacactctggctctccctccaccgccccaggccatggcgggcgagcctctgctccgccccccgccccgcaggcgccgaggccaaagcggcctcggcctccgtcggggcgcaccaacctagcctcctgcgtggtggccaccatcttcctaatcttcatcatcatcgttatcctcattgtatactacaccgtcttcaaaccccaggaccccaaaatcgccgtcaacgccgtccagctcccctccttctccgtcgctaacggcaccgtcaacttcactttctcccagtacgcctccgttagaaaccctaaccgtgccgcgttcacccactacgaca

SEQ ID NO: 39587 - DNA, 331 bp, Glycine max
  Clone ID: LIB3065-015-Q1-N1-B11
accactactactcactcactgcagatctcaattgcatcggggtgcatggctaccatcgttagcatcaaggcccgccagatcttcgacagtcgtggcaatccaactgtcgaggtggatatgacttgctactatggtacttttaccagatctgctgttccaagtggtgcatccactgggatttatgaggcccttgaattgagagatggaggatctgactaccttggaaaggctgtatcaaacgctcgtgacaatgtgaacaccgacattggccctgctttgattggcaaggacccaactgagcagactgctattgacaacttaatggatcaac

SEQ ID NO: 39588 - DNA, 353 bp, Glycine max
  unsure (1)..(353): unsure at all n locations
  Clone ID: LIB3065-015-Q1-N1-B2
ggctcgaggacgtttggtattgcttcatggagcctgccatgnnggttggttttagtacaaggtggctgctttnttgaaatccaatggacaccaagtcacatctctagacatggctgcatcaggcatccatccaaagcaggtacacgacctcaattcaatttcagaatattttgagccattaatgtactttctagggtctttgccaacagaggagcgtgtaatccttgtgggtcacagctttggtggggcatgcatatctgtagctatcgaaatgctccctaccaagattgctgctgcggtatttgttgccgcttggatgccttctcctgacctaagcttttccactctccttc

SEQ ID NO: 39589 - DNA, 343 bp, Glycine max
  unsure (1)..(343): unsure at all n locations
  Clone ID: LIB3065-015-Q1-N1-B5
ccccaccttccttaacacccccattacaaatctctgtatttcaggcnttttttattcacacattggattgaagtttggaaatttgacacctaccccacaccatcatggcctgcatcgacaaattttgggttttcgccctcgctcttctcctcctcgcttcccctctcctccaagttgctaggtgccagtcagactctgatgatgtaatggaggctgctgaagaatcatgtgatattggcattgttggtgatgatgtccaagactttggtgatgggactttcccttctgctccaagaattgaaacaataagtgtatctccgaaaaatagtgcaagattgataac

SEQ ID NO: 39590 - DNA, 263 bp, Glycine max
  Clone ID: LIB3065-015-Q1-N1-B7
ctcaatcctatttaaaaaatataaaccgaaatttcaatcgcagatatattttatatttctactcacaagaatatacactaccattattaacaagcatctcataaaatctaactctcaataattacttcccaacaactcatactccaactatcttataacaatccttcctaaatctagcttctatcttaacttataaacacaataccataattatatataatcaatacttcactccttactttaccgtcactaaaaccaaaacc

SEQ ID NO: 39591 - DNA, 288 bp, Glycine max
  unsure (1)..(288): unsure at all n locations
  Clone ID: LIB3065-015-Q1-N1-B8
ctcnagccactttagccgaaaaaaaaaaccctaaaaagtcgtcaaaattttcaaatatcatgaaaccaaaaaaccttcaaacaaacaaactcaagcggcatccaaaccactagtaatcttgtcaccccttcaattaattcatactatgtacctgcatgccaaccatattaacatatangatatcctttaaatcttggacaaaataccaacatatatgttacctatgcgaaatatttttcctatcaaatttctcaacaacatacacacctaagatataaattttaaaac

SEQ ID NO: 39592 - DNA, 388 bp, Glycine max
  Clone ID: LIB3065-015-Q1-N1-B9
ctccaactccattgttggaatctggtttgcaaaaagacggagggttaattgtggaatattttggaaggatgtcttacgttgctcataacgttaatcagccccaagagaaagatttgttggagggaaatttttcctttgatattaaatctcgctctagattggaaaaagtttcctctacaaaagcacaatttgttagtggaaaaaccttcaaatatgatataattggtgctggttcacattcttcagatgattttcctgaaaaggaagatcaagaaaaacccaaaaagattgatgccagattgagacaaagaatagatcctcaatacaatgaggttcaggctcaaatggaaaccaaattgtttaaattgtctcttgatgatgttgaaac

SEQ ID NO: 39593 - DNA, 386 bp, Glycine max
  Clone ID: LIB3065-015-Q1-N1-C1
cgaaaaagatttcttgttcttattagaagatcgtgattggatgccggtatgtttggtaaaaagaaagaaaaatattcttctttgagaataataaaaaaggaaagtgttcaattggaacatgaaaacgtgacagaattggtcctagttactcttcggaacggaatagaagaaggggagagattctcgaaccgaactaggaaacggatccaatgacttcaaaagaattgaacgaggagccatatgaagtgaaaatctcatgtacggttctgtagagtggcagtaagggtgacttatctgtcaacttttccactattacacccaaaaaaccaaactctgctttacgtaaagttgccagagtacgcttaacctctggatttgaaattact

SEQ ID NO: 39594 - DNA, 321 bp, Glycine max
  Clone ID: LIB3065-015-Q1-N1-C10
ggagtttccaaggctagtaagggtgagagctcaggcttcgggggataacaaagacaactctgtggaagtacaacatgttaacaagggtgaccatggaaccgcggttgagaagaagccacgcagaacttccatggacatttcaccatttggtctcttggacccgtggtcacccatgaggagcatgcgccagattttggacacgatggaccgaattttcgaagataccatgacattcccaggaagaaacgtgggaacaggggagatccttgccccttgggacatcaaagatgaagaacatgaaatcagaatgaggtttgacat

SEQ ID NO: 39595 - DNA, 292 bp, Glycine max
  Clone ID: LIB3065-015-Q1-N1-C12
agagctcataagctgatatctcgaggggaaatgcatgggggtgatagaccatattcaatgtttgaagggctagggggcatggcttacctctttttggatatgagtgatccttccttgtctaaatttccagcttatgaactctgagaatctacatgttttggaaaggagactatgtataaccgtatctcatatgaccaatgtaaatgttgtcaaaataaaatgagtcagtcttggtagggatatatatatactttttatgaagtttgagttatgtgagaaccttgtgcttttt

SEQ ID NO: 39596 - DNA, 353 bp, Glycine max
  Clone ID: LIB3065-015-Q1-N1-C7
aagaggaagagtcaaaagagagaaacagaactttgcaggggagaaaaaaaattatatatataaaagcgagaagagaacgtgcagtgagtcacagtcatataaaaaaagcaaaggcaccattatcgttttccaacaacctctaccctaactccgtcataacagtttgtgcttactcgacgcgacacttcaactgtgaaacgcacgcgacgtagtttatataaacgcgcctgcctttccgattgtgcagtcagcaagacgatgacctgatccaaattattttccatctcttatatcactgtctaatttccgataggaagaaacttaatgattcttgcttgaaatcgaggtggctt

SEQ ID NO: 39597 - DNA, 123 bp, Glycine max
  Clone ID: LIB3065-015-Q1-N1-C8
cccaatactatttacttgatatatttcaccctttcaacttcgcagatttttcaaattttaagcgtccataaactttaaaacttccagtatcaggcctatccaaatgtctaaattgctattact

SEQ ID NO: 39598 - DNA, 348 bp, Glycine max
  Clone ID: LIB3065-015-Q1-N1-C9
gtgagaaacaaagaaaggaaataattgatctttgaaaatgcggggaggaaagaaagctggagagtccatcaaggaaacagctgcaaacattggtgcttctgccaaggctggcatggagaaaaccaaggccactgtccaggacaaggcagaaagaatgacggcacgtgatccgatgcaaaaggagttggcaacccagaagaaagaggcaaagatgagccaagcagagctggacaagcaagcggcgcgtcaacataacacggcagcgaatcaggctgccactgcagggcacatgggacaacccatggggacccatcagacgtcagctatgcccggtcatggaacccgaca

SEQ ID NO: 39599 - DNA, 323 bp, Glycine max
  Clone ID: LIB3065-015-Q1-N1-D10
caaataagacattgtttggtctggatacttgctcgaatttggtggaatcatttaaattgtatttgattaactaaaccgcaacgcgcaatcacttttactacgaactggctaactctcaggcaagtggttcggacgctgattccagcaacaagccgctggtgctcgcactgtatgacgctctaaactccggcgactccgacgccgtcgtgaagatcgtcacccctgactctccgtgagggtttcatggtccgccctcacaccagaaattgatgcgcatgctcaccggcgacttcgcttcccacaactcacatcgcttactttcg

SEQ ID NO: 39600 - DNA, 387 bp, Glycine max
  unsure (1)..(387): unsure at all n locations
  Clone ID: LIB3065-015-Q1-N1-D6
tctttgggttcctgtaggaggcggtggatgggaggtctgaggtggggccctatgaggcgggagtaggtgaccaccaggaaagcggcggcgacgacgacgaccattgcaatcaagggcggactgaagtcaaccgccggcgagtttgacggtgggggaaagaaagacttgtggaggattggtgttggtgttagagatggagatggggcccaatgaggtggctgagaaggagccatcatgatgatgagaaaatggtaagaataaacaaaaaagagatgaatagggttttagtgctacaaacaaagcanagagagagagagagtgcagttgggtttaatgcagatagatacaaacgttgacttgtggtgtgtgcttctttttttttatttt

SEQ ID NO: 39601 - DNA, 387 bp, Glycine max
  unsure (1)..(387): unsure at all n locations
  Clone ID: LIB3065-015-Q1-N1-D7
caacaatgaagacactcctgttgttgccgtttctattatggacaccaacagcttggagaaccagctcgaccagatgcctaggagattctatcttgctgggaaccaagagcaagagtttctaaaatatcagcaagagcaaggaggtcatcaaagccagaaaggaaagcatcagcaagaagaagaaaacgaaggaggcagcatattgagtggcttcaccctggaattcttggaacatgcattcagcgtggacaagcagatagcgaanaacctacaatgagagaacgaaagggaagacaagggagccattgtgacagtgaaaggaggtctgagcgtgataaaaccacccacggacgagcagcaacaaagacctcaggaagaggaagaaga

SEQ ID NO: 39602 - DNA, 377 bp, Glycine max
  Clone ID: LIB3065-015-Q1-N1-D9
gctgaactcatgaccaagattgacaggcgatccggcaaatgtcgtgataaggagcccaagtttttgaagaacggtgatgctggttttgttaagatgattccaaccaaacccatggttgttgaaactttctccgagtatcctccacttggtaggtttgctgttagggacatgcgtcaaactgttgctgtgggagtcatcaagaacgttgagaagaaggatcctaccggagccaaggtcaccaaggctgcccagaagaagaagtgaatcgtgcgggctggttcatcaggggatgttggttacaataaatgttggtttcttttctgtactcttgtgtcttcttttctagggagcttgtttttccgacaaaagttgaagtc

SEQ ID NO: 39603 - DNA, 396 bp, Glycine max
  unsure (1)..(396): unsure at all n locations
  Clone ID: LIB3065-015-Q1-N1-E12
cggggctacccgctgagtttaagcatatcaataagcggaggagaagaaactaacaaggattcccttagtaacggcgagcgaaccgggaaaagcccaccatgaaaatcggtcgccctcggcgtccgaattgtagtctggagaagcgtcctcagtggcggaccgggcccaagtcccctggaagggggcgccagagagggtgagagccccgtcgtgcccggaccctgtcgcaccacgaggcgctgtcggcgagtcgggttgtttgggaatgcagccccaatcgggcggtaaattccgtccaaagctaaatactggcgagagaccgatagcgaacaagtaccgcgagggaaagatgaaaaagactttgaaaagagagtcaaagagnagaaaaatggaaaa

SEQ ID NO: 39604 - DNA, 370 bp, Glycine max
  Clone ID: LIB3065-015-Q1-N1-E4
cacaaaaggatattgatgtcagcccaatctctcgccgtttaggtgtaactgtgctcattggtgctgctgctgttggctccaaagtccaacctgctgatgcagcctatggtgaagctgccaatgtgtttggaaagccaaagacagacacagatttcctgccatacaatggagatggattcaaactatctattccctcaaagtggaacccaagcaaagaagttgagtacacgggtcaggttgttagatatgaagataactttgactcaaccaccaacgtggttgtcaccatcactccaactgataagaagtccatcactgactatggttcacccgaagagttcctctctaaggtggattatttactaggaaa

SEQ ID NO: 39605 - DNA, 322 bp, Glycine max
  Clone ID: LIB3065-015-Q1-N1-E5
tttgagtatgtgtcattcaagaccaatgatagaccctcgatgggagaccttgcaggggcaaactcattgttgaacgcattgccagaggaagtgattcagcacacttttaacctaaagagccagcaggccaggcaggtgaagaacaacaaccctttcagcttcctggttccacctcaggagtctcagaggagagctgtggcttagagagccctttttgcatgtgctaccacacttttgtccttttgggctctagctagtgctggtagcagtaaataagaatgaataaaagaaacaaaagcttagatgccctttgttaagtgta

SEQ ID NO: 39606 - DNA, 378 bp, Glycine max
  Clone ID: LIB3065-015-Q1-N1-E6
tatatcaatcctggtaattgaagatggattaatattatcagtcgcagttggatgttggtattttcaaattctggaacgctgtgaacagtgactgtatgatttgaaaatgtgaaggactgtatctaactcaaaacttaagtctcaaaataaataatgcacgagaggtttgcatcttttcatgttagattgttgtagtcatattgcaatagtgcttctccttttcatgtacatcatcattggtggagattggatacaaagatcaatagcatgggcttgttttcaatcttaaccgagaggattaagactcttatttccagctgatcttgtcgacaatacattttttttaatcaagaaaacctgctttatttacttgctttt

SEQ ID NO: 39607 - DNA, 306 bp, Glycine max
  Clone ID: LIB3065-015-Q1-N1-E7
gagtttctgatgatgaattcaataactataagcttgtgttcgctccacagcaagctgaggatgacaaatgtggggatattgggattagtattgatcatgatgatggaaccaggcgtttggtggtgtctaagaacaaaccgttagtggttcagtttcaaaaacttgataaagaatcactggccaagaaaaatcatggcctttctcgcagtgagtgagacacatgtgtgagagtactaaataaatgctttggttgcacgaaatcattacactaaataaaataatcaaagcttatatatggccttccgc

SEQ ID NO: 39608 - DNA, 109 bp, Glycine max
  Clone ID: LIB3065-015-Q1-N1-E9
tccaataacatcatctattaacaccacaccacttctacctccgctgtattttcaaaattaaatcggcacaaccaaccaccactcctcttccatctttaccctaattcca

SEQ ID NO: 39609 - DNA, 339 bp, Glycine max
  Clone ID: LIB3065-015-Q1-N1-F1
atgtcatcttcattcttgtttttaactacaggaaggtgtacaacaacttgttcttggtttatacatcatcaggggtgacaacatgtatgtcccttactctatcatttttaaatttgtgcatcatttagatttcattttgtggcactatttatatacactaaaaaatgtatggtttccgtttggtcattgcagaagtgttgttggtgaactagatgaagaactggattctagtctggatttgtcaaaactcagagctcatcccttgaaacctgttatccattgaggtgaaatactatgtgatggatttaatgaatgcatgcctactgggtggaaagagtc

SEQ ID NO: 39610 - DNA, 144 bp, Glycine max
  Clone ID: LIB3065-015-Q1-N1-F10
cttactatcgagactaaatacccttctattaactaaacactggaactaataggcgtacaatatttctgtatactgagctgtattatactttggtttaatcatatgcattacttcatgctgtgtaaaattgttatccgcatataa

SEQ ID NO: 39611 - DNA, 377 bp, Glycine max
  Clone ID: LIB3065-015-Q1-N1-F12
cctgagatttattcaagtttcttgtttaggtgcatctcgtgtgtctccatctaggatgctcagaactaaatcagctgctgaggaaatgattttaagggaactacctgaggccacaatcttgaaacctgctgtaatgattggtacagaggatcggattttgaatccatgggctcattttgctaaaaagtatggctttcttccgttgtttggagatgggagcacaaagatccaacctgtttatgttattgatgttgctgctgcactcacttcactcttgaaggatgatggcactagcatgggaaaaatttatgaactgggtggtccagagatctttactgtgcatgaattggcagacgttatgtttgatacaattcgag

SEQ ID NO: 39612 - DNA, 331 bp, Glycine max
  Clone ID: LIB3065-015-Q1-N1-F4
cggtactgccttttttacctagttaaacaacgccgaccgagccgcttacaaccttcaatctggcgatgccttaagagtccctgcaggaaccacatactatgtgcttaaccctgacaactactagaatctcataatgatcacactcgtcatacccgttaacaaacccggttgatttgagagtttcttcctatctagcactcaagctcaacagtcctacttgcaagggttcagcaagaatattctagaggcctcatacgacaccaaattccaggagataaacaaggttctgtttggtaaataggaagggcagcaacaatgggaggagaggctt

SEQ ID NO: 39613 - DNA, 377 bp, Glycine max
  unsure (1)..(377): unsure at all n locations
  Clone ID: LIB3065-015-Q1-N1-F6
gttatgggtttccttgtgttgcttcttttctccctcttaggtgtncgcttctagttccagcatatcaactcatcgttccatattggaccttgacctaaccaagtttaccacacagaaacaggtgtcttcactgttccaactatggaagagtgagcatggacgtgtctaccataaccacgaagaagaggcaaagagacttgagattttcaagaataacttgaactatatcagggacatgaatgcaaacagaaaatcaccccattctcatcgtttaggattgaacaagtttgctgacatcactcctcaagagttcagcaaaaagtacttgcaagctcccaaggatgtgtcgcaacaaatcaaaatggccaacaagaaaa

SEQ ID NO: 39614 - DNA, 325 bp, Glycine max
  Clone ID: LIB3065-015-Q1-N1-F7
tatatcaatcctggtaattgaagatggattaatattatcgggctgaattggatgttggtattttcaaattctggaaggctgtgaacagtgactgtatgatttgaaaatgtgaaggactgtatctaactcaaaacttaagtctcaaaataaataatgcacgagaggtttgcatcttttcatgttagattgttgtagtcatattgcaatagtgcttctccttttcatgtacatcatcattggtggagattggatacaaagatcaatagcatgggcttgttttcaatcttaaccgagaggattaagactcttatttccagctgatctt

SEQ ID NO: 39615 - DNA, 343 bp, Glycine max
  unsure (1)..(343): unsure at all n locations
  Clone ID: LIB3065-015-Q1-N1-G1
ctcagggatagcgaaaattcatgggagaagatgggagaagagggggatttggatccaaagaaacacgggtaatttattaggagtgtacagaatcagagacagagcaagcgttcttaagcgccatccttgagcaaccaattagtgtctccattgatgcaaaagattttcatttatacaccgggggaatttatgatggagaaaactgtacaagtccgtatgggattaatcactttgttttacttgtgggttatggttcagcggatggtgtagattactggatagcgaanaattcatggggagaagattggggagaagatggttacattttggatccaaagaaaca

SEQ ID NO: 39616 - DNA, 396 bp, Glycine max
  unsure (1)..(396): unsure at all n locations
  Clone ID: LIB3065-015-Q1-N1-G11
tgcttgcaagcatggcgaagagcaaggaagacataaccgatggaacatcacaagcaaggctttcagaagatgaagcagtgagagtggcctacgagcatggctcaccccttgaaggaggaaagattgctgactctcaaccagttgacttgttttcaagtgcacacaatatgccaaagagtggccaaacaacaatggattcaaacactagtgatcaatctcagatgcaacgtgatacacaagaagggggttctaaagaattcaccactggagctcctggatagccccaaaaggggctcctccagcaatgggtcataaattttgaaggcaataatatagacaaccttattaaatatngttacttttgtgtggtttggtctgccctttggttctttttta

SEQ ID NO: 39617 - DNA, 372 bp, Glycine max
  Clone ID: LIB3065-015-Q1-N1-G12
caaaacagtaaagctaacttcaacacctttaattttctggaaggaattcagcggctgaataccaagcggagaagatgagtcaggagcagccacggcgtcccaaaggccaaaaccccatcaaatacggcgacgtttttgtcgtctccggcgaccttgcacagaagcccgtcgcaccggaagatgctgccatgatgcaaagcgcggaaactcgagtgctcggacaaacccaacccggcggagcagcttccgtcatgcaatctgccgccaccaggaatgaacaggctggccttgtcggtcaccgggacgtcaccgacgttaccggcgaccgtggcgtcacagtcacagaaactaaagtccctggaagacgcatta

SEQ ID NO: 39618 - DNA, 105 bp, Glycine max
  Clone ID: LIB3065-015-Q1-N1-G3
tccccccttccttaacctcggattccgcttcgagcatttccaagattcattttaagctaaccaaaccaaactcgacttggttgatcctctagttttgccaaacac

SEQ ID NO: 39619 - DNA, 183 bp, Glycine max
  Clone ID: LIB3065-015-Q1-N1-G4
aaattctgagttctaacgccactaatcctatgctgacccggctgcttgaaaactgtaagagtctcaaatatctggttgatgagtgtccttttgcatttgtgaactagtatgtaatattttattcacttaaataaagcgcattactatgtgcaatgagtgtgtttaaatgtaataaaagagaca

SEQ ID NO: 39620 - DNA, 336 bp, Glycine max
  Clone ID: LIB3065-015-Q1-N1-G5
taaaattcttccaccaagttatgggtttccttgggttgcttcgttgctccctcttaggtctctcttctagttccagcatatcaactcatcgttccatattggaccttgacctaaccaagtttaccacacagaaacaggtgtcttcactgttccaactatggaagagtgagcatggacgtgtctaccataaccacgaagaagaggcaaagagacttgagattttcaagaataacttgaactatatcagggacatgaatgcaaacagaaaatcaccccattctcatcgtttaggattgaacaagtttgctgacatcactcctcaagagttcagcaaaa

SEQ ID NO: 39621 - DNA, 310 bp, Glycine max
  Clone ID: LIB3065-015-Q1-N1-G7
gtctttctatatcctcagcaacacactcggaaaaatgtagggggactagaatcttttgttccaaacaaaaacgtatgaattggtcggtttttctccggagtcgtcttcacttttctccgagtttttattatcatcatctctctcgtgtccctgtctccatctccatctcttagtttcttcttcaaatggcagaagttgaagacatagacaaccctcatcacgaccaccatcattacctttcttcttctacaacacaacctccaatgatcaatttcccgcgagatctgttaagaaccttcgtgggagtgaa

SEQ ID NO: 39622 - DNA, 135 bp, Glycine max
  Clone ID: LIB3065-015-Q1-N1-G8
ctctcaagccatttctttctataatctaaaccaccctaataacactcacgttattttatcctcatgtaatagccaacacaatatgacacggctcttacaataccatacttgactttacaataccaatcattaaca

SEQ ID NO: 39623 - DNA, 296 bp, Glycine max
  Clone ID: LIB3065-013-Q1-N1-A7
gcaagtttcgtcacgccggaacgatgaccggcggcggatccacggggaggttgccgacgtggaaggagagagagaacaacaagaggagagagagaagacgaagagcgattgcagctaagatctacactggccttcgagcccaggggaactacaagcttccaaagcactgcgacaacaacgaggtcctgaaagctctctgcgccgaagctggctggatcgtggaagaagatggcacaacttatcgaaagggatgtaagagacccacgagtgagattggaggaacagcattgaactta

SEQ ID NO: 39624 - DNA, 392 bp, Glycine max
  Clone ID: LIB3065-011-Q1-N1-A9
catgtgtagagaattgtgaaggttttggagcttgcaggaggagtcatggatgagcttgcaagccctgttggtcctaggaaggatgtggtccaaaaccactgccttgagttcatgcaattaatcaaggtccttgtctcccagaaatcaatttattcttttgtctattcatgtatataaaagaaggtggcattatgggtgcaagtcccaaaaagagcacacactaccaaaactgcactagtcttatttaagtggtctcatttaaataattaacgttatataaaattaacagcaggaattatgtaagaatattttatttactttacattaatcgtttgttaggtactggttcagaaattagcaaaataatgaaagaaaagataggattttattga

SEQ ID NO: 39625 - DNA, 414 bp, Glycine max
  unsure (1)..(414): unsure at all n locations
  Clone ID: LIB3065-011-Q1-N1-B10
ctagccgcttgaccaaagttgaaaattttcagaaaccaaaacctcggcctccttttcttttttccttcttcgccactctctccattccttcgatgatttccgaaccggcgagttccctgagaaagagcaactttcaagaccggcgcctcagcatcatcgacgtttcctccgacgacgattcgcttctcgatggaaaccctctcagccaccaacggtcagagaaccaagaacaggccgatgtgttgtacacgccgaactcgaagaagttcgaagacgccgtcaccaaactccaacaatgggaccacgagcctcactccaacgactcatccggtatcggnaaacctaagagaaacagcaaatgcaatctgcgcaagagtttagcctgggacagtgcctntttcaccagcgccgggg

SEQ ID NO: 39626 - DNA, 393 bp, Glycine max
  unsure (1)..(393): unsure at all n locations
  Clone ID: LIB3065-011-Q1-N1-B11
gtgagttaaaagaaccgataatagttgttccttcactctncgctcgctctgccactgagccaagaagatggcctcacaggtttgcaaatctgcttccagagccgcgaggtcccttctatcctctcggtttcactctcaaggacgtgcgcttggggctgctgcggctgtttcattgagcagcaaagtgcctctttttttacggaaagaacggttcttgaaatggatccgcttcttcatcatcatcatcatcatggatttcaggagctcttgctcttcctgccgcagcttacatgttccaagatcaggaggtgcatgcagctgagcttgagcgcactttcattgccattaagcctgatggagtgcagagaggcctgatttctgagattatatctc

SEQ ID NO: 39627 - DNA, 394 bp, Glycine max
  unsure (1)..(394): unsure at all n locations
  Clone ID: LIB3065-011-Q1-N1-B12
gaagaggagaaaaagactatggagggtttgaagaagagaaagctggagctggacgaagcaggcaacggtgaattggcttccaaggaagagcttcgcttcctcattgaacctctcgctaaaccccagctcgtcgatcttcttgctaaactagggtcccaatatccttcaattgcagaagaaataaaaagtattgcaagtgcagatcctgcccatcgaaagctttttgttcgtggcttggcctggaataccacttcagaaacattgcgtgctgcatttcaagagcacggagaaattgaggaaggagctgtgatctttgataaagtgacaggaaaatcccgtggctatggatttataactttcanaaatatggaatcaactcagcaagcattgagag

SEQ ID NO: 39628 - DNA, 397 bp, Glycine max
  Clone ID: LIB3065-011-Q1-N1-B4
tagcatagtagctatgacatgcacatcgctcccttagctcggctcgcaattcgagtcgaggagagtatgaggcatgcgagaactcggagtaggaaattgatacagtatcaaggaccaaagcgcaaactctaaaggataaaaactgcggttacagctcatgactgtttcattatttaataacgatactgatactgaatccgcaagactactttcaacttacgaagctccgctggtaacgtcgcctcaataagaccgtctgtgaagtgactccattgtctcggactcaacatccatacccggcaggatacggagggtcaccagaagacaacaggcggctcatcgacggaaacgttggcagcaacaccttgaccatagcaataaccatgaccggcctcgt

SEQ ID NO: 39629 - DNA, 393 bp, Glycine max
  Clone ID: LIB3065-011-Q1-N1-B6
cgggtattgcttatcatatgaacaaggaaactagtgctcatgcacccagtaccatgatgattaaggtggtcgctcctcctgagagaaagcacagtctctctattggtggttatatcttggaatcacttatcaccttccaacagatgttgatctacacgggtgaatatgatgaatatgtgccacatatccgttatcacaagtgcttctaaagttgcataaacgtcgagctggatggtgaacaagctcttaatgcacccaatcctagaccatattatactctagtacgtctgacttatttactgtttgaacattcaccatcctaatatatctatctagctgacactatgataccataccgcgaatagtttataaccattctacggtagtgaacct

SEQ ID NO: 39630 - DNA, 349 bp, Glycine max
  Clone ID: LIB3065-011-Q1-N1-B7
aacaaccaaagcaagcgccatttacggctgttcatgaacgcgggcgccggcggaggaacacggtggagatccgttccgtttactcatccggcgacgtttgaaacgatggcgatggagaaggatctcaagaacaagatcaaatcatatctcgaatcgtttctcaaggcgaagcagtattaccggaaactcggccgcgcgtggaagaggagctatctcttgtatggtgcctcctgcaccggaaaatcgagcttcgtcgcctcgatggcgaacttcctctgctacgacgtgtacgacgtggatctttgcaagattcgcggcgttacggatctgtagtttctgatgactgaaa

SEQ ID NO: 39631 - DNA, 308 bp, Glycine max
  unsure (1)..(308): unsure at all n locations
  Clone ID: LIB3065-011-Q1-N1-B8
attctcttcacttttaagttaaatagtttttcattgtttcatggaatctacaatggctgcttcaacaatggctctctcttcatcatcattggctggccaagctatcaagcttgccccctccacccctcagcttggtgttggaagggttagcatgaagaaaacagcctccaagactggttcttctggaagcccatggtacggcccagaccgtgtcaagtacttgggcccattctctggtgagcccncatcctacctcactggtgaattcccaggtgactatggttgngacactgctgggctttctgctg

SEQ ID NO: 39632 - DNA, 407 bp, Glycine max
  Clone ID: LIB3065-011-Q1-N1-C1
caactggggtggttttctgacatgaacaagtacaaccttatgggtgatcttcctaagaagtcttggcccaagaaactgaaacagatgaagcagttctggcttggtcagagactcaaggcctcaagggcttacctgaaaactttattcaacaaatctggttgctcagacaagttctgcgccagtgctgcagcaagcaacaacattggagcggagaagaagtcatcaaggtgcaaagagtgtcagaacaagtacatgaaggttgcaaggagaaacccttttgagagtttctatgatggcaagcaccaggtaacttgttctatcatgaagagcatcaaaagagagatgcttgaagttgaagatgatttctgtgaccacaggaggtctttctctggggttggtcaacgaca

SEQ ID NO: 39633 - DNA, 405 bp, Glycine max
  unsure (1)..(405): unsure at all n locations
  Clone ID: LIB3065-011-Q1-N1-C10
ggctcgaggaagcagaagccatggaaaccaacacactcccaaaccagcagacaccaaaaaccaaaaggcaaatcttcatactctcaggtcaaagcaacatggcccgtcgtggcggggttatcagggacgctaacaaccgtaagcggtgggacggcgtggtttcgccggagagccgctccgatccattcatccttcgccttccgncacccttcaatgggaacccgggaacgagccccttcacgtcgacattgactccagaaaggcttgcggcgtgggccccggcatggtcttcgcgaacgcgctgctgcggcggagcgtggtggtgggcgagctgggtctggtccnctgcgccgtgagcggcaccgncatgaangagtgggcgcgtgtggaggaactgtacgagaa

SEQ ID NO: 39634 - DNA, 298 bp, Glycine max
  Clone ID: LIB3065-011-Q1-N1-C11
aaaaaaaggaatcaaaagccatggaaaccaacacactccgaggccggcagacaccaaaagccaaaaggcaaatcttcatactctcaggtcaaagcaacatggccggtcgtggcacgggttatcagggacgctaacaaccgtaagcagtaggacggggtggctcctacggagagccgataccaggcattaattctgggactgtccgtcacagtgcaatgggttcccctctaacgagcccctttacgacgacagggactccagaaaggctagcggcgtcggcccaaacatggtcttcgcg

SEQ ID NO: 39635 - DNA, 339 bp, Glycine max
  unsure (1)..(339): unsure at all n locations
  Clone ID: LIB3065-011-Q1-N1-C12
gaaaagcagaaatggcggcggctacggcgatttctcagctaggctgtttttccgccgtccaccgcagctcacacctncggcgccgctcgtttctgttcccttcccctcgctccaagttatcggttgttatgagtctggagaggcatgacacggatactgctgggtctgataccaaaaatacactaagttatgcagttgatgtgtcaaagctacatgttgaagaaaagaagaactcatattcaacaaaagatggccatgatgctgaaaaaatagggtttggagaggcaacacaggaaagtgtcgatcaaccgaaaaggactgcatagattcatgacttct

SEQ ID NO: 39636 - DNA, 326 bp, Glycine max
  Clone ID: LIB3065-011-Q1-N1-C3
gcccggtgcacatagaattgccttatacaatcaagaatacactgacactaaccagtctaggaatgcagttaagtgaccgatgtcggacatgtacgactatgagaacgatatatggctctgaaactcatttccacggtcaatgctagaacttcactgcattatgaccgtctattaatactttgaaagaagtgcatgcgttcttgactgataatccaactgacattgagaccatcataactgaagactatgcgcacactcactaggagttgactaatgtgttcacatgtgcatatactggatcagtattagttccctgtgaccaagac

SEQ ID NO: 39637 - DNA, 439 bp, Glycine max
  Clone ID: LIB3065-011-Q1-N1-C4
cttcacttgttgctcgtcttagtttctgtgttgtgtcagttgtattgctatatcctaattaaacttcaccctcaaaatgagtgatcccacactagcacaaccacacctagtcgaagtccacacaacactcgaaaccgttgttaccacacacaaccataaccatagaccctcaataaatgcctcaggtgaaaagaagaaaattgtgggggtgttctacaaagggaatgagtatgctaaattgaaccccaatttcgtggggtgtgttgaaggagcattgggtatacgtgagtggctggaatcacagggtcatcagtacattgtcactgatgacaaagaaggaccagattctgaacttgagaaacacattccagatgcccatgtcatcatatctactccatttcaccccgcctatgtcaccgcggaaagaataaagaaagcg

SEQ ID NO: 39638 - DNA, 430 bp, Glycine max
  Clone ID: LIB3065-011-Q1-N1-C5
gagacatgctagcatgcctgcacgtctactctagagtgatcccctcggtgaattccaattccacattttcaagaaataaggaggcaaaaatgttggtatatgaattggaattatttgttttcttattaggcctatcctgaagccaaaggaaatgagatcggaattcctcggggaattccaattccacattttcaagaaataaggaggcaaaaatgttcatatatgaattggaattatttgttttcttattaggcctatcctgaagccaaaggaaatgagatcggaattcctcggggaattccaattccacattttcaagaaataacgaggcaaaaatgttcatatatgaattggaattatttgatttcttattaggcctatcctgaagccaaaggaaatgagatcggaattcctcggaggtaccgagctc

SEQ ID NO: 39639 - DNA, 350 bp, Glycine max
  Clone ID: LIB3065-011-Q1-N1-C6
caaaacaccaccaccaccacctcgctctcttcttccctgcttgacaatttttattttaatgatactattttgttattgttaagacggcatcatcagggaaatggatcgggtgaagggtccatggagcccagaagaggacgaggctttgcggaggctggttcaagcccacgggcctcgaaactggtcggtgataagcaagtccgttccgggacgatccgggaaatcgtgccgcttacggtggtgcaaccagctctcgccgcatgtggcccatcgtcccttctcgccggacgaggacgaagccatcgtcagggctcacgccaggttcggcaacaagtgggccaccatagctc

SEQ ID NO: 39640 - DNA, 418 bp, Glycine max
  unsure (1)..(418): unsure at all n locations
  Clone ID: LIB3065-011-Q1-N1-C8
aacaacttctaacacatacactactctctctctctctcttattgtatggccgccaattccagtagccgagggatcaccgccttagggaagcgagtcgccaaccggatctggacttccaacgcacctcctctcacttcaaggaggggagcatacagtagcggctcagtgtacgacaagaaccctgatgatgagatccagtctgggcaggtcccagacgatgtgatccaggcggcaacacaatccggcaaatactgggccccacatccacagactggggtatttgggccccccggaggaggtgaccaaactgcttctgccattcactctgatgcgctggaggagaaagcctggtttcgccccaccagtctcgaggatttcgagaagcctcacacncttccttaacaaccatgggaggaca

SEQ ID NO: 39641 - DNA, 408 bp, Glycine max
  unsure (1)..(408): unsure at all n locations
  Clone ID: LIB3065-011-Q1-N1-C9
cttcttctncaccatctcttcgcccataacctaattagtgctcaagcacaaaacatcaatttctctatgatcatgatgatgatgatgggttcaaacacaaaaccccttgtgcacctttctcttctaattttggttctcttttcttcttcaaccgaatccctcagattcgaactccaatctgggcacaccaaatgcatctccgaggacatcaagagcaattccatgaccgtgggcaagtaccaaattgttaactccaacgagggtcagcctcttcccgattcccacagagtcaccgtcagggtgacttcgtcttatgggaacaactatcactacggggatcgcgttcagacggggcattttgcgtttgcggcagtggaggctggagattacatgacttgcttttgggct

SEQ ID NO: 39642 - DNA, 406 bp, Glycine max
  Clone ID: LIB3065-011-Q1-N1-D10
ggggttggcagtctgcctgttgcacaactactctgtcaatggatacacttcctgcagtggccaacaagagacatgctcgggtaggcggccgaaacatgagtgggagtgctttcaacaagctgcttaatccacttgcagcagaaagtcatgatctgtcaaaccctgttgacctcaaggaccattgggcaaaacatggaacgaaccgatgcatcacaataaagtagagggcgagacattgtttctggggcagcattacacgaatagaaactgcttttagtgatcaattatggattctcaagtcgaatgagaaaaataatgttaagtgtaaaggccatccgggagagctaatgatttagagtatgcccttgcttatatctaggatgcataagcctggtggaggctggct

SEQ ID NO: 39643 - DNA, 369 bp, Glycine max
  unsure (1)..(369): unsure at all n locations
  Clone ID: LIB3065-011-Q1-N1-D11
gagagagcaactgcacgcactgtaactcctaacttcccagatcggcttcttcctcttttctcttcggtgattgttggaactcagagagcttctttgatggaacagttccagaaggttgagaagataggccaatggacctaccgcgtcctttaccagggtcgcgaccgggttaccaacaagaccattccgtttaagaagattccccttgaaccagaaggataagggggtcccaagaacggccattcgcaagattcctctctggaaggaattgcaccacaggaacattgttaggttgcaggatgtantgcacgatgagaagagtttgtatctggtttttgagtaccttgacttagatctaaagaagcacat

SEQ ID NO: 39644 - DNA, 413 bp, Glycine max
  Clone ID: LIB3065-011-Q1-N1-D12
ggaagaggtaatgatgcaggatatggtggaagaggcagtgattctaattatggagggagggggactgctgcttctggcagaggtggaggccgtgggtttgaccatgactcccagaggaatgataggggtcggagcccagacaagggatctagttggagtgatcgcttcaaaagcgtcaaccgggatcgcagtcgtagtcctgacagggctgcactacctcaacattcccaaggtggcagctttcacaaggcaatgatggaacgtggtggtggtggtggtgatcgcaataagagctttaaccgggaccgaagccgcagtcctagccctcatagacaggagaagtgcccagcggttcgagatcgttccccaagttacagttttcatcaatcaatgatgggacgaggtcagtcatc

SEQ ID NO: 39645 - DNA, 442 bp, Glycine max
  Clone ID: LIB3065-011-Q1-N1-D2
ctcaatagagagaaagagagagaaatggctttcacgatttcgagatctcaatctgctttgacagatagagagaaggagaatcttgacaacttagttgacaaggagtgtgcaaccacagagggtatgatatcgagccagctcaagttgaagtcttctttgtcatccaaagcgtcttctcatcaaagcatggacaaacatgcaatccttcgacgtatcaggcaacgcaggtttaataacaaagccaaaaccgctctggaagctctcataggcacctcagaagccaacaataccggcactgcccaagaacagaagtggcttcaactgggtgactctttctcatctccttaactggaaacacaatctccccccagtttgcaacccatctataaataccctctttagtttccttcacccaacaaagtcatcttttccatacgcttgc

SEQ ID NO: 39646 - DNA, 426 bp, Glycine max
  Clone ID: LIB3065-011-Q1-N1-D3
gttggaaagagccatttaattacttttttcagtactgagtggacattggcaccaaacaagcatggatacaatcaagtccttcaagggctacggcaaaatagacgagttggagcaacaagcctatcagaagaagacacgtaagcgcctgataatcatcgcagtctcttccatcgttctatttgcggtgatcatcgccgcggtcgcaagggttgtgatacacaagcgcaacacctcatcatcgccctcctctgactcgcccccgcaaactgagttaaccccggccgcgtcactcaaagcggtttgccacgtgactcagtaccctaacctcgtgcttctccgcaatctactcgttaccggaatccaacaccactgattccgagctcctcttcaagctctctctccgcgtcgccattgacgagctctcga

SEQ ID NO: 39647 - DNA, 430 bp, Glycine max
  Clone ID: LIB3065-011-Q1-N1-D4
agcaaattcactgaaataatttcaccaatcaaagctgtggcactctctagggagagggacaaagatgctgccaacatcaagaagttgcttgaggaaggggatttggtgatttgccctgaaggcaccacttgtagagagcaattcctcttgaggttcagtgccctctttgctgagctaaccgatagaattgtcccggtcgccatcaacaccaagcaaagcgtgttctacgggacatccgttcgcggccacaagctgttggatccttattttgtattcatgaatcccatgccaacttatgagatcactttcttgaaccagttgcctgcagaactcacctgcaagggagggaaatctgcgatcgaggtcgcaaattatattcagagggttcttgcagggactctcgggtttgagtgcaccaatttgactagga

SEQ ID NO: 39648 - DNA, 422 bp, Glycine max
  unsure (1)..(422): unsure at all n locations
  Clone ID: LIB3065-011-Q1-N1-D5
tagagatcttaaaactagtaatattttactggatgcaaattgggatcccaaaatatcagactttgggttggcgcgatcatttttgggagatcaagttgaggcaaacacaaatagggtggctggaacatatggttacatgcctcctgagtatgctgcacgggggcatttctcagttaaatcggatgtctttagttacggcgtgatagtactagagattgtaagtgggaagaaaaacagggatttttcggacccagaacactacaataatctacttggacatgcgtggaggttatggactgaaaaaaaggccttgggaactattgaataaactgtcaggagaatgctcgccctctgaagtcgtacgatgcatacaagtaggcctattatgtgtgcaacaaagaccacangataggccacacatg

SEQ ID NO: 39649 - DNA, 363 bp, Glycine max
  Clone ID: LIB3065-011-Q1-N1-D6
aattgtttaaacctaattctcatttcttcatcgttcgattctgctcctcctaaagatgcagatcttcgtgaaaactttgaccggtaagaccatcacccttgaggtggagtcctccgacaccatcgataacgtgaaagctaagattcaagacaaggaagggatcccacctgaccagcagagacttatctttgcgggtaaacagcttgaggatggtcgaacccttgccgactacaacatccaaaaggaatccactctccacctcgtgcttcgcctcaggggtggcatgcaaatctttgtcaagactttgactggcaagaccatcaccctcgaggtcgaatcctcggacaccattgataatgtcaa

SEQ ID NO: 39650 - DNA, 261 bp, Glycine max
  Clone ID: LIB3065-011-Q1-N1-D7
ctcaattcatttaaatagtgagaaaagtctttcacgagctggtgatcctaacaagtttggactgatatattaacgtagaattctgcctcatcatataactagtagcacacatccacttattgatgataatacgtacatgcctgattactatccaactcatctacatcgctctattcgatcttatcatagtcattaccgcaagaataccctttctcactcgactctagtcaaaactttgcacctgactctctaagtatacta

SEQ ID NO: 39651 - DNA, 337 bp, Glycine max
  Clone ID: LIB3065-011-Q1-N1-D9
attgcaacatagttggtgcaatgcttttggttgatacttatgataccaatcctgaaaatgcagttcgtagtatttttgttgcgcctttcagaggcggaaggcccattcgggtggttacatttccgaataccattgtgcagattgaaccagacatgaattcaaggtttcagcttttgagtaccactaccaatggtgattttgttcaagggaaagatctcgcaatggttaaagttaatgtagcatgtgctgctgttggcttgacatcaagttacactccaactccattggtggaatctggtttgcaaaaagacagagggttaattgtggagtattttgg

SEQ ID NO: 39652 - DNA, 374 bp, Glycine max
  Clone ID: LIB3065-011-Q1-N1-E10
aggaaaatggagaaacattagattagattgttgtcatccacgtttggctttgcattgctgtctgtgtagatctttaattatttggagagaggaaagaagagttctactccacatgttccctgtccccttctggatccttcctttctttcctgtatacttttcgttgcttgttctgccgagccattgagtgggtgttaacgctcttttttctcctcaaccaagacatttgacgtgttgtattgtaattcttttcccctatataatatgcttagcatatctatcattgtcttttcttgtagccgaatgagttgatgaatgttctcttcatgtccgctagtgcccatcaatttaacttgaccgtgtctttttcatta

SEQ ID NO: 39653 - DNA, 409 bp, Glycine max
  unsure (1)..(409): unsure at all n locations
  Clone ID: LIB3065-011-Q1-N1-E11
tgaatttgtgaaagagaccaaagatagaggcatgttggcaagttggtgtccccaagaggaggttttggctcacccagcggttgggggattcttgacacattgtggttggaattcaacgttggagagtgtgtgtgaaggggttccaatgttgtgttggcctttctttgcggagcaacaaaccaattgtcgattttgttgcaaggagtgggggattgggttggagatagaggatgttaagagggagaaagttgaagcacttgtgagggagttgatggatggggaaaagggtaaggagatgaacgcatgagctttggagtggaagaaattggcacacgaggctgcttcgagtccacatgggtnctccgttgtgaacatggacaacgtggttcgtcaagttcttaataacaaa

SEQ ID NO: 39654 - DNA, 394 bp, Glycine max
  Clone ID: LIB3065-011-Q1-N1-E12
gaagaagtcagtaaccatcgtcgtgagcgaagatccataatgatgcagttaccaattgcaataacacactcattgtggttatcgaaatttgatcgcagcgtcgagaagaatgggaagtttgggagcgattctgaaacattcagatgacttttaccctctgctgaagctgaaaatggcggcgaagaacgccgagaagcagaacccggcggagccggacttggcggtctgctacacaatgctccacagggtttctcgaagtttcgccctcgtcattcagcaactcggcaccgagcttcgcaacgccgtttgcataatttatttggttctgcgagctctcgacaccgttgaggatgatactagcatagaaacagatgtcaaggtgccaatactgata

SEQ ID NO: 39655 - DNA, 430 bp, Glycine max
  Clone ID: LIB3065-011-Q1-N1-E2
attaactaagcatatatagcgtgtaagacagtgagaaaaaaagtgttgtgtagagagaaatggctaggtggtgcatcttggtggttcttgcccttgtcgtggttgcaagtgccagaaacatgcccaatgacgcaggtttggaggaccagaagaacttcctcgggtatgggttctctggagttggcaacaatgggcttccctttggaggagtgggttctgggtttgatggtaatatgggtgggccttctgggctcggtggatttggaggattcggtgggcctagcgggctcggaggtcttggtaacggtgaagggcccaaccttcctctcccttgagagttgagaccacacaccttcgtgtttcttattttcggtcgctattatcatagcctatatagtgtttcttttagtgtttagttcaagaaaataat

SEQ ID NO: 39656 - DNA, 435 bp, Glycine max
  unsure (1)..(435): unsure at all n locations
  Clone ID: LIB3065-011-Q1-N1-E3
ctctctttctctctctagaattctcagatttgcggggcgagatgatgcagcagccaggacccggcatggcacctcccaccatgggccagcagccgccgcaacagtaccagcagcctccgccgcagcagcagcaaccctacgtcatgatgccgccgcaggcccaggccccgcaggccatgtgggccccctccgcccagcctccgcctcagcagcagcccgccagcgccgacgaggtccgaaccctctggatcggggatctgcagtactggatggacgagaactatctctatacctgctttgctcacaccggcgaggttacatcggttaaagtaattcgaaacaagcaaactagtcaatctgaaggttatgggtttattgagtttaatagtcgtgctggagctgagagaattcttcanacatataatggggcaataa

SEQ ID NO: 39657 - DNA, 413 bp, Glycine max
  Clone ID: LIB3065-011-Q1-N1-E5
tgccatttcaatccccagtttcttcttcaacgtcctcttacgagcagatcccaattctgcttcccagtttcaaaccctaattccctcattcccatggcctcagaagagcccactgtcgcggtggaacccgctcccgaacctgccaccgccgagcctcccccggaggagaaggaggagcccaaacctgaagccaaggctaagaaaaccaaggaacccaaacctaaaaaggtttccagaccacgcaaccctgccactcatccttcctacgaggagatgattaaagacgcaattacctcgctgaaggagaaaaccggttcgagccaacacgcgattgcgaagttcatcgaggagaagcacaagcagcttccaccgaacttcatgaagcttcttctctaccatttgaagaaacttgt

SEQ ID NO: 39658 - DNA, 387 bp, Glycine max
  unsure (1)..(387): unsure at all n locations
  Clone ID: LIB3065-011-Q1-N1-E7
ctcgagccgaatcggctcgagccatggtacggcccagaccgcgtcaagtacttgggcccattctctggcgagcccccgtcctacctcactggcgagttcccaggtgactacggctgggacactgctgggctttcggccgacccagaaaccttcgccagaaaccgtgagctcgaagtgatccactccaggtgggccatgctcggggccttgggctgcgtcttccccgaactgttgtcccgcaacggggtcaagtttggagaagctgtgtggttcaaggccgggtcccagatcttcagcgagggtgggctggactacttgggcaacccaagccttgtccacgcccagagcatnctcgccatctgggccacccaagttatcctaatgggt

SEQ ID NO: 39659 - DNA, 413 bp, Glycine max
  Clone ID: LIB3065-011-Q1-N1-E8
ggggaccccaaggcacaccatcacatggggttgctgacactgcaaatgggccacacacacatttataaaatgacaggttgtgaataggtcctacccatgtgagtgatgccagtgccactttctctttcatagatatttctctctctaccctttagattctctttcatgacaggaaaggacatgcacagatctaaaagtagggtagatgcccacacgtatgacaaaagtggccagttactcgaatcttttggggtctgtggccttgtgactgagttactgtgctatacttttttttgtattttttttttaactttccctctttgaagttttcaagaacccctaggtgtttgtggaaaaccaaatatgttaagtgagaaaaaaggtttaaaatttaaaatcagagtggcatatcg

SEQ ID NO: 39660 - DNA, 278 bp, Glycine max
  Clone ID: LIB3065-011-Q1-N1-E9
ctcgagccgattcggctcgagatttcattccccatcaaatctcttgcttctctctcctcatttccaaagttcccaactttcctaacccgagatctggtgaattgaattgaaattgaaattgttgtcgtggttgctgctgctgcagctgcaaggaatgccgctgatattagcgaaaagcgattcgatccagattcgcgaggtgtggaacgataacctggaagaggagttcgcgttgattcgcgaaattgtggacaactacccttacatcgccatggaca

SEQ ID NO: 39661 - DNA, 434 bp, Glycine max
  Clone ID: LIB3065-011-Q1-N1-F1
cttttccttcactttcccgagaaaaaaaaaacactctttcactttcttgactacggtctcacttcgacatggctcgtactaagcaaactgctcgcaagtccaccggcggcaaggcgccacgtaagcagttggcgaccaaggccgcccggaagtccgctcccgcgaccggaggagtgaagaagccccaccgcttcaggccgggaaccgtggcgctgagggaaatcagaaagtatcagaagagcaccgagcttctcatcaggaagcttccgtttcagagactcgtgagggaaatcgcgcaggacttcaagaccgatttgcgttttcagagtaacgccgtttctgcgcttcaagaagctgctgaggcctacctcgttgggttgttcgaggacactaaaccttgcgcgattcatgcatagagggttaccattatgcct

SEQ ID NO: 39662 - DNA, 412 bp, Glycine max
  Clone ID: LIB3065-011-Q1-N1-F10
ctcgagccgaatcggctcgagagcatttccacgacattcttcgagagataaaagaaaattgagaacagcaagccactcaagtattctattctgtgctgtaatctacaccgttgaagatttgatgtatgcaaaactctcacggatacaacagagggactgatgagttacaacttacaacaactttaaagtagtagacttgtatgaagaattattccatgtggtgaaattggtgtgtcatagtaaattcaggcattgatagaaacttcacctttgtagtttgtccaaagggttagttgtgaaatggcagcttgtctatttgagttggacactatgttaggttaggggaggacaaatactagcagaaaccttgaaatgggacatatcagttcctgttgcatataagctagtccac

SEQ ID NO: 39663 - DNA, 350 bp, Glycine max
  Clone ID: LIB3065-011-Q1-N1-F11
cattagtattccttctatcaacattctatctattctatccatgtgctcaattatatgctgaccattctttcttcttctattgcttatgttatttgactgccacacaggatggttcaatcaacaatgaagaggaaacgaaggaagggttgactagaatgaaccaatcggataacagaactcgttcacattcatcctcaccatcaactcataaccgtcacagaaaattgaggaaaccagctactactacttgtgcaaggaaactgcagaaatccataatctgcagaacacttggcgagctagaacttgacgaagtaaatggtcttatggatcttggtttcacgttcaagaaa

SEQ ID NO: 39664 - DNA, 288 bp, Glycine max
  Clone ID: LIB3065-011-Q1-N1-F12
cattagtactacttctatcaacattctatctattctattcatgagctcaattttatgctgaccattctttcttcatcttttgcttatgttatttgactgccacacaggatggttcaatcaacactgacgaggataccaaggaagggtttactagaatgaaccaatcagataacagaactcgttcacattcattctcaccatcaactctgaacctatacagaaaattgaggaaaccatctactactacttgcgctaggaaactgcataaatccataatctgcagaacac

SEQ ID NO: 39665 - DNA, 437 bp, Glycine max
  unsure (1)..(437): unsure at all n locations
  Clone ID: LIB3065-011-Q1-N1-F2
gggaaaccaactaaggaataccctttcaaaatggcttgttctgtgtcatccatggtttctaccaccctcctcctaattaccatctgcacactgtcctcacttctgtcagttgcatctgcagcaacagaggagggacgaacaaggccattcaaaagggtctatgcctttggagactctttcacagacactggcaacacccaaaatgcagaaggtccaagtggctttggccatgtttcaaactctccctatggaaccactttctttaaccactccaccaataggtactcagatggtaggcttgtgattgattttgtggctgaagcactttcactgccttacttgcccccctaccgtcatagcaaaggcaatgacacttttggtgttaactttgctgttgctggttccacagccataaaccatttgntctttgtcaagca

SEQ ID NO: 39666 - DNA, 436 bp, Glycine max
  unsure (1)..(436): unsure at all n locations
  Clone ID: LIB3065-011-Q1-N1-F3
atttgcgtttactgatctcaagtcttccacctcactgtcgtagcgtagtgattgtggggtttctcttctcagttctcatcgtgacgatcttgctgctccgaaaaagggttttcctaacatcgcccattcaatttccgggctgttcagttcgtgaatagactgttgtttgttctaaaaagtagtggatagtaaaaattatcgaacttttttaagagaaaaatgcagagtaaagaagcagttgtggaagatggggaaataaagagtgtgactgctgtacggtctgaaattgatgggtggaccaattttggggatgatgacataatgcaacagcagtatacaattcangctgaggaagccaagaaggttccatttgtgggtgacaaggaaccactgagtagcttagctgctgaatataaattaggcagtcctatcttgc

SEQ ID NO: 39667 - DNA, 431 bp, Glycine max
  Clone ID: LIB3065-011-Q1-N1-F4
tctagagagagaaactcgcagtcgcagacatgtcttggttcgatgccttcgccgacgacttgaacgtcaactcttcttgcactcaccaccacgacgaagacgaggacaacttctccggttacggcggctactcctccttcaccggaggattctacgccgacggcgatgtcgccgtcgaccactccggcgacgcgtcgccggagatctacggcttcactgatccgaatcccggttactctcagtctcccttcgaatcggccaccgtcgagaacggtaacgaaaacggcaacggctatggccaaggcgacggcgacggcgacggcgtttttatctacgatggtccggtgcttccgcctcctacggaaatggagcccgaggaaggttacgctcttcgcgagtggcgccgtccgaatgccattcagctagaggag

SEQ ID NO: 39668 - DNA, 433 bp, Glycine max
  Clone ID: LIB3065-011-Q1-N1-F5
agaaaaatgaaggaaatgataactctaattctggaggaaagcaacttgagaatggagataaaactgaacaaattgatgaacaggccaagaagccagatgtagatatggaagaaaatgatctgaatgatacaaacaataaattagaaaatgattcagatgaaattaagaacagtcatgtgaacggcgaaaatgtgattgctgaaaggcctgaaggtgaagaagctcaaaagcaagaagttgaaccagcagagaaagttgccgaagaagctgctaatactgcggagactgaaaaatccctactgactgaattagaaaaagaaaagaatgaggagaaaacagatactgcgactctagaggctaatgggggaggcgagaaagagaatcctaatgctgcacaaatgtaatatggttatttggagctgtgcacagtgaa

SEQ ID NO: 39669 - DNA, 429 bp, Glycine max
  unsure (1)..(429): unsure at all n locations
  Clone ID: LIB3065-011-Q1-N1-F6
catcactacacgagcaagacgctgtgtatatacgttctgttcattcattcagaagcagcgtgggtgtgtgttttgcttcagagaatctttctcctaatggaacagctgaagccaagcgctcctaactcatcccctctcactccactcgccttcttggacagagcagccaccgtctacgcccacgtcccttccctagtctacaaccacaccaccttcacctggtccctcacgcgccgccgatgcctacagctcgcctactccctctcctccctcggcatccgccgcggcagcgtcgtctacgtcctcgccccgaacgtacccgccatgtacgagctccacttcgccgtccctttcggcggcgcaattctcaacaacatcaacacccggctcgacgcccgcaccgtctgcgtcatccttcgncacgcgaac

SEQ ID NO: 39670 - DNA, 398 bp, Glycine max
  Clone ID: LIB3065-011-Q1-N1-F7
ctcctacaatttcctaaaatggccactctttcctcctacgacgacttcatcttcactgccttagctttcttcatatctggcctaattatattgctcaaacagaaatccaaatccaaaaagttcaacctccctgcaggaccccccgggtggcctattgttgggaacctcttacaagttgctcgttctgggaaacctttctttgagtatgtgaacgatgtgagactcaaatatggctcaatcttcaccctcaagatgggaacaaggaccatgatcatcctcaccgacgcaaaactggtccacgaggccatgatccaaaatggtgcaacctacgccaccaggccccccgagaaccccatcagaaccatcttcagcgaaaacaagttcaccgtgaatgcagc

SEQ ID NO: 39671 - DNA, 441 bp, Glycine max
  Clone ID: LIB3065-011-Q1-N1-F8
gtgttggaagccaaagatggaactatttctgttgcttcatctggcaaggtatgattgatactttctgcttcatctgcaactgtccagcatagagaccacaagatccacacaaggccagtgttggggagacttgaggggagtaaacaccggatagatttatccctgtggagggaccacgtaaagaaacctgatattacactttaatcaaaaaccttatgactcaaatttataagttttcttcttacttatatggtgttcaatcttttcacttctattcgatgcgggaaaaattgacttacattatgtatgaaatatcaagtttaatttattgttttatgtattgtgatgacggaattttcgtaggctagtttttggtggtttgtctacaaagtcgtacaaggagccacggactctataaaaatttccacatttatgggttta

SEQ ID NO: 39672 - DNA, 388 bp, Glycine max
  unsure (1)..(388): unsure at all n locations
  Clone ID: LIB3065-011-Q1-N1-F9
gaagaagccaaaaagaacttcgccggagctctaacggcgaggcccaactccgatgagccgaaaccggcaccggtgccagctgttcccccgaagaaggtcatcatcaagagcgctgatatgatccccgacatgcagaaggaggccgttgatatcgccgtcgccgcgtttgagaagtacaatgtggagaaagacgttgcggagcagataaagaaggagttcgataagaggcatggccccacgtggcattgtatcgttggacgtaattttggctcatatgtgactcatgaaacaaaccactttggttatttctacttggatcagaaagcggttntactctntaaatctggctagccttattgtggtagcaaagaagttgagatctatggga

SEQ ID NO: 39673 - DNA, 427 bp, Glycine max
  Clone ID: LIB3065-011-Q1-N1-G1
gagagagagagagagaaagagagagagagagaggttaggctatggctgatgagagcgtcgttgagtccccagtgaagaggcagagagatgatgatgaagaaaatgaggtctctgtttccatggatgtggagggtggcaaagaccctcttagtaacggtttatcatctgtgattcctgggtggttctctgaaattagttcaatgtggcctggagaggctcactccttgaaggtggaaaagattttgtttcaaggaaagtctgaataccagaatgtcatggtcttccagtcatcaacatatggcaaggttcttgttttagatggagtaattcagctaacagaaagggatgaatgtgcctaccaagaaatgatcactcatcttcctctttgctctattccaaaccccaaaaaggttttggttatcggtgg

SEQ ID NO: 39674 - DNA, 404 bp, Glycine max
  Clone ID: LIB3065-011-Q1-N1-G10
cagcaataaaagacattataccactgatggagaaaaccactgcattgagagctccttagcttatcattgccgaggatgtcactggtgaggctttggccacccttgtcgtgaataagctgcgtggtatccttaacgttgctgccattaaagctcctggctttggtgagcggcgaaaggccctgcttcaagacatcgctatattgactggtgctgagttccaagctagcgatctgggtctgcttgatgaaaacacctcagtggagcagcttggcttggctaggaaaattaccatctgcaaggattctaccactgtcattgctgatgctgcgacacaggatgagttgcaagccatggttgctcatgtaaaagaggagctgtctcagacagactcagtatatgatact

SEQ ID NO: 39675 - DNA, 403 bp, Glycine max
  Clone ID: LIB3065-011-Q1-N1-G11
ctcgagccgaatcggctcgagcggctcgagcggctcgagctcgagccgaatcggctcgagcaaacactagcaaagggaaggaaaagtaccttccccaataacccttctcttcgaattggcttctctcatcggagggaaacaatcaataaaagaaaaacaaaacccacaaaaagattataaccaaaaaaggatgaaaggaaaaggactagggtccgcaagttctctcatcctagtggtgggtgtgggaaatggcgtggatgctgaagttcaaaagcccaaagggcgtgaacaacatcaacaatggaggagaattgaaaccagcaacaaggccgtgacagcgtagtgccaaggctcagacgaccagaaactgtgccacgaggttctgtcatcttcgaacagcaca

SEQ ID NO: 39676 - DNA, 282 bp, Glycine max
  Clone ID: LIB3065-011-Q1-N1-G12
ctgccgcccgtcgtcgccgattcttcatttgcatcaaaaccctcattctctaatgccgccgcgttccgcgcctcttcgcctgtgttccacccgcaacaacgccttggcaatagcaccttccgattcttctcattcaatttcgacaaaggctttgcgcagaaggtatttgataaaccggccgccgcggtgacctcgggcttctcgcgttaccgcgaggcaattgggctgcaaatcgaggcggtcctcaagagggatactccctttctggggggcccccgttgc

SEQ ID NO: 39677 - DNA, 252 bp, Glycine max
  Clone ID: LIB3065-011-Q1-N1-G2
gtgaaatttctgtctaatgatgaacttgcttatgcatgaacggataatacactgggattatgggatgtgaaggaaaacttgtcagttcgtactttcaaaggccatgcaaatgacaataactttgttgtccttacagttatcactgaatacattacgtgtgtcacttgaaactaatgaagtatacgtgttctacaaagtaataatgcgacctatgactcgcctctaactcctctcctcttcatatgaatgacc

SEQ ID NO: 39678 - DNA, 441 bp, Glycine max
  Clone ID: LIB3065-011-Q1-N1-G4
gtgaaagtgagaaaaaataaaaatcaaagagcataatgtcagggatcattcacaagattggggagacccttcatgtgggagggcacaagaaggaggaggagcataagggtgagcaccatgctggagaatacaaaggggagcaccatggtgaacacagtagtgagtacaaaggagagcatcatggtgaacacaaagctggagagtaccatggtgagcacaagccagagcacaaagaggggttcctagacaaagtcaaggacaagatccatggtgagggcggcgccgccgagggcgagaagaagaagaaggagaagaagaagaaggagcatggccatgagcatggccatgacagcagcagcagcagtgacagtgattaaactgctgcatcacctatatatttaaaaggtttatgggaccatagtagcgagggctgtgccttaa

SEQ ID NO: 39679 - DNA, 415 bp, Glycine max
  Clone ID: LIB3065-011-Q1-N1-G5
gtctcttctctctcagaaaccctaatggcagagcgcggaggtggcgaacgtggcggcgaccgtggcggtttcggacgcggcttcggcgggcgagggcgcggaggcgacaggggccgcggccggcgtagaggtccccgccgcgaggaggaggagaagtgggtcccggtgactaagctgggacgcctggtgaaggaaggaagaatccgaagcctggagcagatctacctccactcgctgcccatcaaagagcaccagatcatcgacacgctggtgggccccaccctgaaggacgaggtgatgaagatcacgccggttcagaagcagacccgggccgggcagagaacccgtttcaaggccttcgtggtcgtcggcgacaacaacggccacgtgggtctaggcgtgaagtgcagcaagg

SEQ ID NO: 39680 - DNA, 440 bp, Glycine max
  Clone ID: LIB3065-011-Q1-N1-G6
tgctcctgatgatctagaaggtttggatgcttctgctgcacgtgttgcaaatttgctgtctacagaacctgcagacattaagcttggtgttggagggttcagtatgggagcagctactgccctgtactccgtgtcctgctttactgctggaaaatatgggaatggcaatccttatccggccaacctaagtgcagctgttggtttaagtggctggcttccatgctcaaagaccttgagtaacaagttacaaggggtagatgaagctacaaggcgtgctcagtcctttcctgttttgctgtgtcatggaaaagttgacgatgttgatccttataagtttggtgagaaatcatcgaagtgcttaagttcaactggatttcatgatgtaacttttaaagcttataatgggcttggacactacacaattccagaagagatggatg

SEQ ID NO: 39681 - DNA, 433 bp, Glycine max
  Clone ID: LIB3065-011-Q1-N1-G7
ccacatgcaagatggatcggaacgtgtgggtgagggacactgggagggcccggaagacttggcctacgacgctgcggcacgtgtcgtttataccgggtgtgaggatgggtggatcaagcgagtcacggtgaatgactcggtggttgactcggcggttgaagattgggtcaacacaggaggaaggccacttggactagttttgaagccgaatggagaactcatagttgctgatgcggaaaagggactgctgagagtgtcaagtgagaaggagattgagttgctggtagatgagtttgaggggttaaaattcaaactcacagatggtgttgatatagcagatgatggtacaatttatttcacagatgcatcacacaaataccccgtgaaggatgctgtgtttgacgtcttagaagggaagccaaatggaagattc

SEQ ID NO: 39682 - DNA, 445 bp, Glycine max
  Clone ID: LIB3065-011-Q1-N1-G8
ctctgctcgtgcctctagggttatcatatctccatttccatggcctggctctcagtttccaagaatcttaagctatgggaaagtctgacccaaccgggagcgctgcataccggagagcaccatgctggacaatacaaaggggagcaccatggtgaacacagtagtgagtacaaaggagagcatcatggtgaacacaaagctggagagtaccatggtgagcacaagccagagcacaaagaggggttcctagacaaagtcaaggacaagatccatggtgagggcggcgccgccgagggcgagaagaagaagaaggagaagaagaagaaggagcatggccatgagcatggccatgacagcagcagcagcagtgacagtgattaaactgctgcatcacctatatatttaaaaggtttatgggaccatagtagcgagggctgtgccttaa

SEQ ID NO: 39683 - DNA, 371 bp, Glycine max
  Clone ID: LIB3065-011-Q1-N1-H1
gggtcgagaaaagaagtatggcaggcatgttcatggaataagggaagatgtggatgagagagctttcttcccagaagcatcaggatcagctaggagctatacagactcgtaccaacaactatcaatgagctcctacaagtcctattcaaactccaactttcagaacattaataatgatgccaccaccaacccaagacagcaagagcagcaactacaacaacaacaacactgttttgttttaaggacagacttcaaatcaacaaggccaagcaaagagaaagaagctgagacaacaacaggtcagagaccccttcaaccgttctttggggaagggccaccaaagaacacaacagcagattcctggctagatc

SEQ ID NO: 39684 - DNA, 411 bp, Glycine max
  unsure (1)..(411): unsure at all n locations
  Clone ID: LIB3065-011-Q1-N1-H10
ggaagagcaacctttggaagtgcggaaatatagagccgaattgtctgaacaagatatatttgtaatcccagcaggttatccagttgtggtcaacgctacctcaaatctgaatttctttgctattggtattaatgccgagaacaaccagaggaacttcctcgcaggttcgcaagacaatgtgataagccagatacctagtcaagtgcaagagcttgcattccctgggtctgcacaagctgttgagaagctattaaagaaccaaagagaatcctactttgtggatgctcagcctaagaagaaagaggacgggaataagggaagaaagggtcctttgtcttcaattntgagggctntntactgaataagtatgtactaaaatgtatgctgtaatagctcatagtgagcgaggaa

SEQ ID NO: 39685 - DNA, 303 bp, Glycine max
  Clone ID: LIB3065-011-Q1-N1-H11
gattgtcaggcctattttaagaattggctacaaagtgtccccgaactcccctcgtcatcatctttataatgctattcctccggttcactggaagtgatgccaactcaatctgttgctaaatcaattattttgatcctgagcaatttggttgctccggtatgcatgccatttctccattattatcatcgggcaataaagacatctcaacagtgttatataattgaatgagagcttaatttctggaatctaacaagtaataacatgccactcatttttagattaatatagtagcaattcttagtc

SEQ ID NO: 39686 - DNA, 371 bp, Glycine max
  unsure (1)..(371): unsure at all n locations
  Clone ID: LIB3065-011-Q1-N1-H12
cgcacctgctgctaatcgctgtttgtctgttcacctcttcgtccgcttccaagatcggagaaaatggggggtaaaccaccaattccaagcttgacttaactggccaacatgttctgccaatggaaatacccgaccaagatgttcgcggacacaacctttgagccccaccttcaaggtgaaaggcttagcgtttaaccggtattcatggctgacgactcataactcttatgctctggcgggggcgagatcggccaccgggtctgtcattgaggcccctatgaaccaagaagacaaagttgatgaacaactcanaaacggagttagaggatgtatgttggatatgtatgattgtcaaaacgacatctggttgt

SEQ ID NO: 39687 - DNA, 378 bp, Glycine max
  Clone ID: LIB3065-011-Q1-N1-H2
ctctgctcgtgcctctagggttatcatatctccatttccatttcctctctctcagtttccaagaatcttaagctatgggaaagtcttacccaaccgtgagcgctgattaccagaaggccgttgagaaggcgaagaagaagctcagaggcttcatcgctgagaagagatgcgctcctctaatgctccgtttggcatggcactctgctggaacttacgacgtgagctcgaagaccggtggtcccttcggaaccataaagcacccctccgaactcgctcacggcgctaacaacggtcttgacatcgctgttaggcttttggagccactcaaagcggagtttcctattttgagctacgccgatttctaccagttggctggcg

SEQ ID NO: 39688 - DNA, 416 bp, Glycine max
  Clone ID: LIB3065-011-Q1-N1-H3
gctgcaaataacaagatcttcatgatgaacctttctgctccctttatatgtgagttctttaagggtgcactggacaaagttctgccatatatggattatgtttttggaaatgaaactgaagcaagaacattttctaaagctcaaggctgggagactgataatgttgaagaaatagctttaaagatttctcaattgccaaatgcatcagaaaaacatacaaggattactgttatcacccaaggtgcagatcctgtttgtgtcgctgaggatggaaaagtaaaattgtatcctgtgatactattacctatagagaaattaattgatacaaatggagcatgagatgcttttgcgggaagatttctttcgcaattggttaagcagaagcccattgaagaatgtgtgagagctgggtgtta

SEQ ID NO: 39689 - DNA, 356 bp, Glycine max
  Clone ID: LIB3065-011-Q1-N1-H4
gagaagaaaagcataacaagcagagcacattgtttagtgctagcattgccaggtcaaggccatatcaatcccatgcttcaattctccaagctattggagcgtcaaggggtgagaataacacttgttactactcgtttctattccaagaatttgcacaacgtgccttcttccattgctcttgaaaccatttctgatgggtttgatgaagttgggccccaagaggctgggagccccaagcctatatagatcgcttgtgccaagttgatcaagaaacctttcatgagcttcttgagaaacttggcaaatcaggaaaccatgttgattgagttatttatgattcattcttcccttgggca

SEQ ID NO: 39690 - DNA, 147 bp, Glycine max
  Clone ID: LIB3065-011-Q1-N1-H5
ggaatttgtgttttcttttgcttgttcgtttgtttaattcagtaaaggaaattaggcatgaccctcttgttgagtatgctctgcctatttgaaaatttccacacctcttttaattatcgtaatgatgtgtgaagtgtgtgttatttt

SEQ ID NO: 39691 - DNA, 408 bp, Glycine max
  Clone ID: LIB3065-011-Q1-N1-H6
gtgttccatcattttgaaagaagcaaatttcgctgcggttaggattactattgggggtgggtattcaatgtggaatatactgaccccacctctggtcatacacacgttgcatccgctgagactgccaatgagaccctcacacgctatatcactcctaagagatgcgctcctctgatgacacattatacatgcaactctaatgagacttacgacgtgagctacacgaccggcggtcccttcgtaaccatacagcacaatatgctactcgatcactggtctaactactgtcttgacttaactgttatgctatcacagtcactcacatcatactatcctattttgtgctacgccaattccttccagcctaatggcattgctaccttacatttcatgtgttgaccttaattt

SEQ ID NO: 39692 - DNA, 422 bp, Glycine max
  Clone ID: LIB3065-011-Q1-N1-H7
aaagaaggtgagaagaagatcaaggagcagtttcataccgagaccttggacaatgttcagaaactcactggcatcacccttgacattgtgagtggtttgtccaacatcctcgagaagttcgggttgaagtttaatcttaaacccgcgtctcgccgtcttctcggcaaggatgggttgcccacttggttctctgctgctgatcgtaagcttttgggtcgtggatggagatcacgtgtcaagcccaatgttgtggttgcccaggatggcactggtcagttcaaaaccgttgccgatgctattgcttcctacccaaaggataacaaaagtagatacattatctacgttaaggctggtgtctatgacgagtacatcaccgttcccaagagttcaaagaacattctcatgtacggtgatggccctgc

SEQ ID NO: 39693 - DNA, 267 bp, Glycine max
  Clone ID: LIB3065-011-Q1-N1-H8
ctcgagccgattcggctcgagcttctccaaagagaaagaacggcaagcaaagcatagtagcctaattcactttacacctaccaccctgcttctaactcaattccatttttcttccttattcctctctcaaaccataatatgcagactctttcgccgcctacttccaacgctctcaatttgaagcacgttcttcgcccgcgtcgagtcgcgcctagccgaatctttgtcaaatgcgccttcgcgtctgagcccgccagctacggggtc

SEQ ID NO: 39694 - DNA, 377 bp, Glycine max
  unsure (1)..(377): unsure at all n locations
  Clone ID: LIB3065-011-Q1-N1-H9
aaccactactactcactcactgcagatctcaattgcatcgctgtccatggctaccatcgttagcatcaaggcccgccagatcttcgacagtcgtggcaatccaactgtcgaggtggatttgacttgctccgatggtacttttgccagagctgctgttccaagtggtgcatctactgggatttatgaggcccttgaattgagagatggaggatctgactaccttggaaagggtgtatcaaaggctgttgacaatgtgaacaccgtcattggccctgctntgattggcaaggacccaactgagcagactgctattgacaacttaatggttcaacagcttgatggaactgttaacgaatggngttggtgcaagcaaaagc

SEQ ID NO: 39695 - DNA, 186 bp, Glycine max
  unsure (1)..(186): unsure at all n locations
  Clone ID: LIB3065-012-Q1-N1-A1
ggatgaaaaggggttcttctttggggactttgtgtctaaatgtggcttgactagcctcttctgcattctgtgcctttccacggaggccaatngatgttccattcggcagaaactacgttcccacttgggcttttgatcacatcaaatacttcaatggaggttctgagattcaacttcatcttgaca

SEQ ID NO: 39696 - DNA, 344 bp, Glycine max
  unsure (1)..(344): unsure at all n locations
  Clone ID: LIB3065-012-Q1-N1-A10
caaccctctttttctcttaatttctcatcatatcatatctatgtaatcttacacatatattaagacatagatataatttttttcgttttatttttccttgcatgggctgttaagataagatgtctcgcacgtgctcacagtgcggcaacaacggccacaactcgcggacatgcaccgacggtggcgccgccgcttcctgcggcgggtctcccagggagaacggcatcatgctgttcggcgtaagagttatgaccgaagctaactcctccttccggaagagcgccagcatgaacaacctctcacagtacgacgcggaatccaacgccgncgacgccggctacgcc

SEQ ID NO: 39697 - DNA, 402 bp, Glycine max
  unsure (1)..(402): unsure at all n locations
  Clone ID: LIB3065-012-Q1-N1-A11
ctcgattattcccgtgggcctncctcatcagcatgttggagaggctaatccttcagatgacttgactctttttgtggctttagatgaacatgggaaagctgaaggtgttctatttgaggatgatggtgatggatatgaattcactaaaggcagttatttattaacacattatgtggctgaacttaaatcatcagttgttacagtgagtgtccacaaaactgatggatcatgggaaagacctaaacgccgcttgcatattcaattattgctgggtgggggtgcaatgcttgatacatggggaactgatggagaagttctgcaactaattttgccttcggaagatgaggtgttgaagctagtatctactagtgagaagaattacaaggaccgtttggaaaatgc

SEQ ID NO: 39698 - DNA, 315 bp, Glycine max
  Clone ID: LIB3065-012-Q1-N1-A12
ctttgggagcacaagacattgatgagacccttcgtggataaattgactgccacagttgatccacatgggtgtaaaatgtacgtgctgaagccactggcttgagttttctgaaacaaatttttggattgcagcttttggagtaactgatgtcaatatttgtttttcttgctgagtgataacttgtacacgagcttcacttcaataaaccttttcatttgcttctattgatagaagcttgatacgttatttagtgtaccagctcaatggaatcagtcacttagatgatataataaaatgaagctgtttgcatgcaaa

SEQ ID NO: 39699 - DNA, 358 bp, Glycine max
  unsure (1)..(358): unsure at all n locations
  Clone ID: LIB3065-012-Q1-N1-A3
attaaggatttccttctcactgccagaaggaaggatgcgaggtcagtgaagatcaagaggagcagagatgtggttaagttcaaggtcagatgctccaagtacctctacacactttgtgtgtttgacccagagaaagctgataaattgaagcaatctcttcctccaggtttgagtgttcaagacctgtaaaggtactgggcgagagatcaagaagaagcaattcattgattcttctgaagtttgattctctgtagttgaagcttgagatttttgtcagttggtcttttattatagattattgctaagacatggttgattntatctgttttggaaaatgaaacttgaatttatgtctaaa

SEQ ID NO: 39700 - DNA, 271 bp, Glycine max
  Clone ID: LIB3065-012-Q1-N1-A4
agaaggtactttggcctatagtgatgattaaggaaggcgaggagcctgtttacttttgggatgcttgttcagattttctgcccttaatggacctatctggcacatttcgcacttatgattgaagatcgaaaactatctgtttagtctggtcagacgcttgcatctgcattcaatgttcaataccatagttggttcttagcgatagatcaagcataagcaactccttgattcttattaaatttgattctttccaatttgatcttcgaatttt

SEQ ID NO: 39701 - DNA, 402 bp, Glycine max
  Clone ID: LIB3065-012-Q1-N1-A5
agaaaatgaaagtccttgttttctttgttgctataggtctagcagcatggcattgccatggctcagaccatgaccatgaccatggccacacctaccaaattttccctctgagaatgaaaactggccatggtggccactacattccggaggtatcatgccaaagttggaggcttggtgtggaagcacacaacgtcattgactggaaaaccgttcctcaagattgcgagggatatattgggaactacatgcttggcgaacaatatagatcagactccaaaatagttaaccaacaagctttctatgctaaaaccctcaatatcactgccaaaaccgcatgggtgttcgacatagatgagactacactctctaatcttccttactatgctgaccatggatttgggg

SEQ ID NO: 39702 - DNA, 402 bp, Glycine max
  Clone ID: LIB3065-012-Q1-N1-A8
gtgattcaattgaagagatagtgtcttcaacagaggaaggggatgaatcagatgagaatgagataatatttcagcagctcaattgtttggtacttgaacatttaggaaagctgagaaggttctacaaagggagtttaagtttcccgtccttggaggaattcacagtaaagtattgcaagaggatggaaagtttgtgtgcaggtaaagtcaaaacagacaagctgttacaagtgacattccattggtcagaaggtgttatcccattggaaactgatctgaactctgccatgcaaaagcgataggcatttctggcaagggtatgtctttttattcaactgttgttataatacaccgtgtcagaaatttagtttttactagtatgttacgtgacaagattaattt

SEQ ID NO: 39703 - DNA, 292 bp, Glycine max
  Clone ID: LIB3065-012-Q1-N1-A9
gagccttctttctttttctggtttcatggcatcaaggaacggcaacattcaggcaatatctcgcagccgaaaacatcaaaactcagccgtgacgatcgcccttggccgcaggagggggacccacaagaaacactctggtggtggtgatggcaattgcagttccccagttgtgaattcttgggaaggtggttccaagaaaagtgaggtttctgcgaggaagctcgctgctgggttgtggcagatgcagtatattcaagtctcaagggatcatcatgctgctgcttttggacac

SEQ ID NO: 39704 - DNA, 310 bp, Glycine max
  Clone ID: LIB3065-012-Q1-N1-B1
gccaatggtatcttgaatgtctctgccgaggacaagaccacaaggcatgaagaacaaagatcaccatcaccaacgacaagggtagactatcgaaggatgagattgagaagatggtccaagaggcggagaagtacaaggccgaagatgacgagcacaagaagaaggtcgacgcaaagaatgctttggagaactatgcctacaacatgaggaacaccattaaggatgagaagattgcatcaaagctttctgatgacgacaagaagaaaatcgaagatgccatcgagagtgctattcagtggttggatggaaa

SEQ ID NO: 39705 - DNA, 404 bp, Glycine max
  Clone ID: LIB3065-012-Q1-N1-B10
gttagtacaaaaaagggttacttcagcttccacatatcttgaagaattgatcaatgggcaagtctgtagttgagaagctactttggatggcaattgtgtgcttggtgctgggtgtaatttccattactcccaaggcccaagcagcagtgacatgcaaccaggtggtgagcaacctcaccccatgcatttcttatgtgctcaatggtggcaaaaccgtgcctggcccttgctgcaatgggatcaagaccctctttaacctcgctcactccacaccagaccgtcaaaccgtttgcaagtgcataaagaacgctgttagtgcgttccattatggcaagtccaatgtggaccgtgctgctgctcttcctaagcagtgtggggttaacattccttaccagatcagccct

SEQ ID NO: 39706 - DNA, 387 bp, Glycine max
  Clone ID: LIB3065-012-Q1-N1-B12
ctctcaaacacacaagccaaacccaaacacaacaacacaaagaaaaaaagagcacaaacagaccaattccaacggttgaattttttggctgaagacaccccaccgacgttagtcaaataaaacatgtcttgctccgtcgcggtttccaattcgccggtgttctctccttcttcttccctcttctgctcgaagccctccatcatctcttcttcgccggaatccctctcgctctctctctcgcatctcaaaccttccaactcttctacgacgtcgtcttgttcttcaccctctgctgctgcttcttcatcttcttctccttcttctccgtttcggcttcgccttcccaagccttccaccgtgttctctgcttcttcttctgcttcgtct

SEQ ID NO: 39707 - DNA, 402 bp, Glycine max
  unsure (1)..(402): unsure at all n locations
  Clone ID: LIB3065-012-Q1-N1-B2
caaaactatagactataatgatccaacaagggtttgttcttacgaggctggccagcaagtcttncttggccaaccagaagtatacttgtatataangtgttgagggagaatacatatatttgagatcacatgcaggcttgcagccaattctttactgtgacgaaaatggcagcaatgcagtatgtccagtatagtgtttgcaaatggaaccgaaaagccacgagttactagaggaggactgcaaggagcaaaacttactaacaaattttatagtttaaatattatagttatttgccttatgatgatagaaattgatgttatagcatgcatgtcaaatattcaaagatagaatatatgattcttgttctgatctcaagcatttatagtctcatggataatgta

SEQ ID NO: 39708 - DNA, 246 bp, Glycine max
  Clone ID: LIB3065-012-Q1-N1-B3
cagtattgttgattaggtgtgacagaccagcagaagggaagaagatggacttactggggttatgggcaattttcggcccgcgtcccggcgctgtcttcggcgccggatggtggatctggcttgacgcggtcgtctgcagcttggtcaccgttccctttcttcactaccttaccggaattgtcgcatcttttgcggctctgatgttcaattgcgttagaaaagaagacatcgattattctccatatg

SEQ ID NO: 39709 - DNA, 314 bp, Glycine max
  Clone ID: LIB3065-012-Q1-N1-B4
attgagtcaagaatgagattctcagcggtgtgttttgtcatactattgctgctggtggtagaactagaagcaaccacatgtttcactttcaacaaagagaaaaagctgtcagaattcaagaccaaacttcatcaaaagattcaaaagttagctactcctcctttatcagccttggcatcaccacctgcttcctcttcagaaacaaacaagagtgggagggtgttgtacgtgagtgaatatggtgcagacccaacagggtctgaagaaagcagtgatggcattttgaaagctgttgaagatgcttttgagttgca

SEQ ID NO: 39710 - DNA, 380 bp, Glycine max
  Clone ID: LIB3065-012-Q1-N1-B7
ggattccacctcttcccgtccttcgagacggttgttgtgctgcttgctcttcaggttgacctgggattgaatctaaagaatcttgatttacattttgagatatggagggagtttgtttctggacaaattgctaccagtatcggttttttgcattccaagaagtgcttgattggcgagttttcatccttggagattttcttcgggtttcctttgttaattgcacttagggttctgctccgctttaatgatcagcacagggtacgtgatgctacattcttctgatacaggtgctgcatcttaagtgcacttgtacaatgcattgctgacccaacattcagttaaaacttttggaagtgctgctttgtgttccacgggaacaa

SEQ ID NO: 39711 - DNA, 277 bp, Glycine max
  Clone ID: LIB3065-012-Q1-N1-B8
ttccccagctagggttgatgatgatgctctagaggctggtgagattaattctcctgagctttcaagtgatgattagaatgatgagggtgacttggtaaaagaagctggttattggtctgaccaggtgattgatggcaacgaaccaattttaacttaaagcgatccagtggctgaacctgttgcgagttagactggtactttgacaagcactgtttcaaagagatgctcctttaaagtggacttaactgttccaaagcaagggacccctaatgccccc

SEQ ID NO: 39712 - DNA, 411 bp, Glycine max
  Clone ID: LIB3065-012-Q1-N1-B9
ctttgagttcttgggaaacagaaccgggcaaccttatattgtgcaaacaaatgtgttcaccggtggcaagggtgacagagaacaaagaatctacctctggtttgaccctacaagagaatatcacagatactcagtgctatggaacatgtaccagattgttttctatgtggatgactacccaataagggtgttcaagaacagcaatgacttgggagtgaagttcccatttaaccaaccaatgaagatatacaacagtttgtggaatgctgatgactgggccacaaggggtggtttggagaaaacagattggtccaaagcccccttcatagcctcctacaagggcttccacattgatggttgtgaggcctcagtgaatgccaagttctgtgacacacaaggcaagaagtggtg

SEQ ID NO: 39713 - DNA, 370 bp, Glycine max
  unsure (1)..(370): unsure at all n locations
  Clone ID: LIB3065-012-Q1-N1-C10
atttatcgtccattctctctcactccataattgcttcttgctttggtcgatccattcggtgatcactgatcagtggtttggtgttgttgatagagaaaatgcattccagccctttgcttcttgaggaacccattaggatggcatccatccttgagccatccaagcctactttttttccggctatgacgaaaattgttggcacacttggtccaaagtcacgatcagttgatataatttcccattgccttgatgcaggaatgtctgtggcaaggtttgacttttcatggggtgatccagaataccatcaagagacattggnaaatttgagagttgctatcaaaagtaccaagaaactctgtgcggttatgct

SEQ ID NO: 39714 - DNA, 319 bp, Glycine max
  Clone ID: LIB3065-012-Q1-N1-C11
cacatattcaatggcttcctctcttctctctccatcattcacttccttcccccgcataaagaaggatgtctctctctctgctttcacttctcagcgatgcttcaaagcgcttccaaggagaataatccgttgtgctgtggcggcgcctcagcgccaaccttccaccactggatcagtgaggactgcaatgaccatgactgagaagatactggccagagcttctgagaaggtacagctgacccctggcgataatgtttgggtcaatgttgatattttgatgacacatgatgtgtgtggccctggttctattgggattttc

SEQ ID NO: 39715 - DNA, 337 bp, Glycine max
  Clone ID: LIB3065-012-Q1-N1-C12
gaacgctgcttcacgtcttagggtcatcagtgcccgttcgtgcagcatcagcaggatacctgccaatgccagatttgcaagttccgttgccacacaacaatcctcttctggtttgggtggattatttggatggctcactggagaccgatccagttctttaccatctctggatttaccgcttacgggcgttacacttaccgcttcattgcctgattttgctgcgcccggaaaaactattattactacacttccaaatggactcaaagtggcctctgaaacatcaccgactgccactgcgtctgttggcttatatgtagattgaggttcaatatacgag

SEQ ID NO: 39716 - DNA, 395 bp, Glycine max
  Clone ID: LIB3065-012-Q1-N1-C2
gtgattgtctttgtatcacgaaaactatacgattcgattcgttggtttcaatggacaccttcttcaattctcaatcttcttcttcttcgagaagccgctggagttacgatactctcaagaatttccgtgagatctctccgctggttcagaatcacatcaaacgggtttattttacgttatgttgcgctgtggtggctgcttgctgtggagcttttcttcatgttctgtggaacattgggggttttctcaccacgttggcttccattggaagcatgggttggttgctatctacaccccctggtgaagagcaaaagaggttgtctctggtgatggcttcggccttgtttcaaggcgcttccattggacctctgattgatttggctattgccattgat

SEQ ID NO: 39717 - DNA, 347 bp, Glycine max
  Clone ID: LIB3065-012-Q1-N1-C3
attgagtcaagaatggaaatcttaacgggggggtttggcatactattgctgctggtgggagaacctaaaacaaccccctggttcacttttcaccaagagaaaaagctgtcacaattcaagaacaaacttcatcaaaagattcaaaagttagctactcctcctttatcagccttggcatcaccacctgcttcctcttcagaaacaaacaagagtgggagggtgttgtacgtgagtgaatatggtgcagacccaacagggtctgaagaaagcagtgatggcattttgaaagctgctgaagatgcttttgagttgcagaagggtgttgagttggttggaggagtgaatga

SEQ ID NO: 39718 - DNA, 231 bp, Glycine max
  Clone ID: LIB3065-012-Q1-N1-C4
ctttgttttcctttgttattttttgtttcccctctcatcacgtctgcaattctctgtctccaaacatgccattttctagtcttggatttgagttattataattataaatgttctgtttattattttgtgttaagtaagctggtttcccaaatttagacattgaaagtggcatatgctttcatactgtataaataaaagtagcattctttaattctctcatttccttcttag

SEQ ID NO: 39719 - DNA, 404 bp, Glycine max
  Clone ID: LIB3065-012-Q1-N1-C5
tcataacacaaagcacaaagcaaagctcatccttgagttaaaaaatggcagcagcttcttccatggctctctcatccccatccttggctggcaaggccgtgaagctgggcccatcagccccagaagtgggaagggtgagcatgaggaagaccgtcaccaagcaggtctcctcaggaagcccatggtacggcccagaccgagtcaagtacttgggcccattctctggcgagcccccgtcctacctaaccggtgagttcccaggcgactacggctgggacactgctgggctttccgcagacccagaaaccttcgccaagaaccgtgaactcgaagtgatccactccaggtgggccatgctcggagccttgggctgcgtcttcccggagttgctgtcccgcaacggg

SEQ ID NO: 39720 - DNA, 401 bp, Glycine max
  Clone ID: LIB3065-012-Q1-N1-C6
ccataacacatagcacaaagcaaagctcatccttgagttagaaaatggcagcaggttcgtacatggctctctcatccacatccttggctggcaaggccgagaagctgctcccatcagccccagaagtaggaagggtcagcatgaggaagaccgtcaccaagcatgtctcctcaggaagcccatggtacagcccagaccgagtcaagtacttgggcccattctctggcgagcccccgtcctacctaaccggtgagttcccaggcgactacggctgggacactgctgggctttccgcagacccagaaaccttcaccaagaaccgggaactcgaagtgatccactccaagtgggccatgctcggagccttgggctgcgtcatcccggaattgctggcccgcaac

SEQ ID NO: 39721 - DNA, 344 bp, Glycine max
  Clone ID: LIB3065-012-Q1-N1-C7
aaaaaaaaaaaaaaaaaaaaaaaaaaaaaaaaaaaaaaaaagaaaaaaaaaaaaaaaaaaaaaaaaaaaaaaaaaaaaaaaaaaaaaaaaaaaaaaaaaaaaaaaaaaaaaaaaaaaaaaaaaaaaaaaaaaaaaaaaaataaaaaaaaaaataaaaaataatgggtcagccttgatatgaaaacctactaccctgtaaaaaaacaaacaacagttccagggtgttgaacatgattgaatataggggagatctctaaagattgtgaagaaaacagcgatagcatttttacaggtgaaaaagatgctcccgaaaaatttaaccaagattagttacctggaagatt

SEQ ID NO: 39722 - DNA, 227 bp, Glycine max
  Clone ID: LIB3065-012-Q1-N1-C8
cctctctctgtctccgcctttcgcattgcaagcgctctctgtctttgcttttccttccccctttcagtttcttcaacgctgcaactatccatggcaaaccgctggctcagacccgaggtgtatccactgttcgctgcggttggtgccgctgttgggatctgtggattccaattggttcgtaatatctgcatcaaccctgaagtcagggtgaacaaagaaggaagaaa

SEQ ID NO: 39723 - DNA, 380 bp, Glycine max
  Clone ID: LIB3065-012-Q1-N1-C9
gatctttcttctctttttctctctctatcctcatggctgagaatttggacgacggcgagttctggctgccgccgcagttcctcgtcgacgacgacgtcgtcgtatttccgacaccctttgaagcaaagtttccgcctttgtccgacgacgccgttttgttcccgtacggttctcccgttgattccaccgttggtggctccagcgagaccgagagcgacgaggaagagcaactcgttgccgagttaactcgccacttaactcgctcctctcttcaacctgacaccgagtctgtgggtcggtttgtgtctggttctcctcaatccacgctttgcgcgtttggaagtgggtgtagttgcggcaaagggtcgagccagggtagc

SEQ ID NO: 39724 - DNA, 208 bp, Glycine max
  unsure (1)..(208): unsure at all n locations
  Clone ID: LIB3065-012-Q1-N1-D1
gagttctacttctccctatgcattgnttgagttcttcatcggcttgctacaagtccaggcgattctggaccctgccgatttcctcgctctgcaaaacattcgtaaggctctggaagacatgccaggttccgatttcttttccacttgggatttcaccgcagacccatgcaacttcgccggcgtttactgcgactccgaccagatcatt

SEQ ID NO: 39725 - DNA, 406 bp, Glycine max
  unsure (1)..(406): unsure at all n locations
  Clone ID: LIB3065-012-Q1-N1-D10
cgccaccgtcgagtacgagaccgagaaccgccactacgccgacgtggactgccccggccacgccgactacgtcaagaacatgatcaccggcgccgcccagatggacggcgccatccttgtcgtctccggcgccgacggccccatgccccaaaccaaagaacacatcctcttagccaagcaagtcggtgtccccaacatggtcgtcttcctcaacaagcaagaccaagtcgacgacgaagagcttctccaactagtcgaactcgaagttcgcgaccttcttacctnctacgaattccccggtgacgatacccccatcgtctccggctccgcactcttagccctagaagcccttatggcgaaccctgccatcaaacgcggcgacaacgagtgggtcgacaaaatctac

SEQ ID NO: 39726 - DNA, 389 bp, Glycine max
  Clone ID: LIB3065-012-Q1-N1-D11
aatcaatcaaagaattctgtgttttcaaatgctttgtcaagtccagtacgtcgaagccttcaacattatcaaattggtgagggaggatgctacaccaatgttctctccatggggaatggaaaccggaacactgaacctggctttcttaatcagcaaagcagggattcaaatgcagtgagctccaatgattctgccatggatatgcatgcagactagttctgtctattggtttattaattgggaattcttaactcaccagcctttgcaacagctacaaaagaagctaacaaccttcggaattccgtatctgggtttgctcattggatcctgcaagaaacgacaggaggatggaacccaatctgttaaccttttactatgcttacgtcaac

SEQ ID NO: 39727 - DNA, 348 bp, Glycine max
  Clone ID: LIB3065-012-Q1-N1-D12
atcttcttctcttcgcgtagcgcgtcgtcccccgcaacgacgtcgtttcatggtcgcgttggtgttgtgctggttctctatgcgaaaatcttctgagggcttctcggcgatgagtggagtaattcattctctggtgtttgattccgcatttccatttttaaatttctctgtctcccatgtaagaaatgtttgattggaacgacgaagagcttggtaacatagtatggggtgaaggtggtgagggtgatgatcatattgtgccttatccggaggcaagtgaagatcttaatgacaagaaagaatggagtcaggaagcttctgctactaaactgattgactagaagagaa

SEQ ID NO: 39728 - DNA, 277 bp, Glycine max
  Clone ID: LIB3065-012-Q1-N1-D2
tgggacttcaggagagaaggggaagtttgggctgaccaccggtcagattcttagggttgcgaagaacctggacctcgcgggcatgctggattgcctgcaactgctggattttcatattgggtctcagattccctcaacagcgatgcttgctgatggtgtgggagaagctgcgcagatctactgcgagttggatcggctcggggcgaacatgcgagtcatcgatattggaggtggactgggcatagattacgacggttccaaatcgtgtgactctgat

SEQ ID NO: 39729 - DNA, 394 bp, Glycine max
  unsure (1)..(394): unsure at all n locations
  Clone ID: LIB3065-012-Q1-N1-D3
cttcgcttccgatttcattggtttatttatttatctgtggggcaattttttactacacaggttcgcaattctcaatctttgctttatttattgcctattcatgtagaattaattttctgccatcgtaacttttgaaactcccttttaatcggtttgaatgttaattgtttcttttttgaatttaacgacttggatggtgtaataatcgatgagatactcaaactgagatgtattaaattaaatgatttgttcttggtgtatttatgctgcttattatgatatgggctatgataatatatggctaataattgttctggtttgagctacagcacanattgtgagaggtcatcgtgacaaactccagcagttcttaacaataactggagccagcgag

SEQ ID NO: 39730 - DNA, 270 bp, Glycine max
  Clone ID: LIB3065-012-Q1-N1-D4
ctacgacgtggcgtccaaactaagccacacggctaataaagacggccggcacactttcactgcatcaagaaaggaagaaacataccgaatgagagcatcaaactcttcttcttcgatttccattgcgaagcgttactttttcttcttctttctcttcattgtcttcgctcttcgatcttcgtccggggactgctccgaataccaccaccaccactcgccgatggccacgatcggaggcttacacgactcccaaggctctcaaaacagcgt

SEQ ID NO: 39731 - DNA, 278 bp, Glycine max
  Clone ID: LIB3065-012-Q1-N1-D6
ctcttctctctcagaaaccctaatggcagagcgcggaggtggcgaacgtggcggcgaccgtggcggtttcggacgcggcttcggcgggcgagggcgcggaggcgacaggggccgcggccggcgtagaggtccccgccgcgaggaggaggagaagtgggtcccggtgactaagctgggacgcctggtgaaggaaggaagaatccgaagcctggagcagatctacctacactcgctgcccatcaaagagcaccagatcatcgacatgctggtgggcccca

SEQ ID NO: 39732 - DNA, 401 bp, Glycine max
  Clone ID: LIB3065-012-Q1-N1-D7
cacaaacaaagaagagagcaaaatgaagagtgcgatttgtgggagaatcctctctcccaaccacgtcttcaaaccaggggacacacattcaatttgtaaaggaccatactccaatctttgtgtacccatggttgtattggcaacagggcctggtataggaggtggggtgctggaaaagccagttattgaaaaagtcacccctggccgtgagtctgaatttgatttaaagaaatcacggaaatcggcaccgccctatcgtgtaatattgcacaacgacaactttaataaacgggaatacgtggtccaagtgctgatgaaggtcatccctggaatgacccttgataatgcagttaatatcatgcaagaagcacactacaatggattgtcagtggtgatcatct

SEQ ID NO: 39733 - DNA, 320 bp, Glycine max
  Clone ID: LIB3065-012-Q1-N1-D8
gtttctttccttctctctctctggagctagcgcgagtgacgcggacggcgaagatagagtcagatcggaagcggaagaaggcgtcgacctcggcggcggagaaggagaaccggaataagcataagaagtcgaagatgtcgtcgtcgtcgtcgaagggtggtggcggtattgaggttagggcttcgcacatattgataaagcacgaaggttctagaaagaaggcctcgtggaaggatcctgaaagtcgcatcatcaagagcacaaccagagaaaacgcggtttctcagctcaaggccctccgcgacgacatcgtttcgggc

SEQ ID NO: 39734 - DNA, 315 bp, Glycine max
  Clone ID: LIB3065-012-Q1-N1-D9
ctctgcgctctttctctccgtctcctacaattcgagttgcggcttttgttgccctaatgtcaaccatgcctcgccgtagctcctgtggaagatctgcccatactgctcatcgggctgctcctacgaatgctccaattcaccatgctccttctacagccactgctcatattggtggtggatctatgctagttggcattggttcaaccatagctcaaggtatggcttgtggcaccatacgtgcagtggcactcttgtctgcacatgcagacatggctccgcttatcagctcacgtgcatcagttactacataggctg

SEQ ID NO: 39735 - DNA, 402 bp, Glycine max
  unsure (1)..(402): unsure at all n locations
  Clone ID: LIB3065-012-Q1-N1-E1
gttcttgcaggttctctgcttggcttcttagggcaaatggggtcccttgctagagcaagccactttcaggaaccgtcaacgtctctaactttccgaacagactgatggcagtggtcccaatactctttgtaaacccaaggttgctgcaaagttaatggagaagctcgctcttcctttttcaaaaggtcaaactgtatacattctgcnaggtgaatagaatcagggagtttcagcaaaacagtaagatagtagctactcacacggattgtcctgaagtacttatatgggatgttgaaactcaacctaatcgtcatgctgttctgggggctaccacttctcgtccagacttggtattaactggtcataaggataatgctgaatttgctctggctatgtgcccaa

SEQ ID NO: 39736 - DNA, 376 bp, Glycine max
  Clone ID: LIB3065-012-Q1-N1-E10
accatggccaagcttgctctttccctttggttccttctttggagtggctgcttcgctctgagagagcaggcacagcaaaatgagtgccagatccaaaagctgaatgccctcaaaccggataaccgtatagagtcggaaggtgggttcattgagacctggaaccctaacaacaagccattccagtgtgccggtgttgccctctctcgctgcacccttaaccgcaatgcccttcgtagaccttcctacaccaacggtccccaggaaatctacatacaacaaggtaatggtatttttggcatgatattcccgggttgtcctagcacttatcaagagccgcaagaatctcagcaacgaggacgaagccagaggccccaag

SEQ ID NO: 39737 - DNA, 403 bp, Glycine max
  Clone ID: LIB3065-012-Q1-N1-E11
gaaatttaagtgaggagctagagaatgatgatgaagtctgctatgtgtgcagtggtggttgtagcacttcttcttctggcggaggtggggcccatggctgaggctgtgacatgcaccccaacagagttgagtccgtgtcttccagcaatcacttccggtgctaaaccttccaatgcttgttgcacgaagctgaagcagcaaaaaccatgcttatgtggctacctcaaaaacgctagcttgaagcagtatgttaactctcctaatgcccgaaaaaccgttgcttcttgtgggattccctttccaacttgttaattaattaagccttcttataattaaagtgtgggatatatatatatatatagataaacagtttaatttatacacactttgatcctacaaagca

SEQ ID NO: 39738 - DNA, 390 bp, Glycine max
  Clone ID: LIB3065-012-Q1-N1-E12
cttcagatccaaccaattccatcgtcaccaggaacacacccgttttgcctattcagctttacctctcactcttcaactgtgtctctgataaggttcaaccctttttttgctctctatgccattccaacagattttgatgattctgcatgctctatgtagcttactctgcagttgggaagggcataccagaacaagagtgtaattgcagtgcacggatttattaatagtcttgtagatctgttggctttttcaggatgggcaagtgcaagggttgtggaaagttaggaagaatgaggccaagtcatatgagtgcttatgaattttctctgatgctggctcctgttgtttctgtttgggattgcatagttcgcaaaatgaggtactcctaca

SEQ ID NO: 39739 - DNA, 250 bp, Glycine max
  Clone ID: LIB3065-012-Q1-N1-E2
ggtggattcaacttcgatgcgaaattgcggagagagagcacagatgttgaagacttgttcatagcccacattgttggaatggataccctggcccgtggcctgaggaatgctgccaagttgattgaggatggttctcttgctgagcttgttcgtaagcgttatcagagttttgacactgaaattggggctcaaatagaggctggtaaggctgactttgaactgcttgagaagaaggtcaaggaatggggag

SEQ ID NO: 39740 - DNA, 315 bp, Glycine max
  unsure (1)..(315): unsure at all n locations
  Clone ID: LIB3065-012-Q1-N1-E3
gtcattgcctttaccatctcagtctcaactctctccaacaaccacaatggctctcttgggcgccgnctnctnctncgctcgcatcattccctccgtctcactctcttcctcttctcgctccttcttctcactctcatcctcttcttccaaactccaatgcttgcgctcctctcctcgtatttcgcacctctttctcaatcagcgaagagcggaggttcgcgtttcgagtggaagatacggaactgtgtcggcaccgaagtcagttgcgtctgatcctgatcagttgaagagcgccagagaagatatcaaggagct

SEQ ID NO: 39741 - DNA, 258 bp, Glycine max
  Clone ID: LIB3065-012-Q1-N1-E4
gaaccattctgcgtagtgatctattggcaaattttttgacagaaggcaattttagagcaagtgttgatttgcagcgcactcattgtattaaaggaatgattaaaatggcggccacagttggtattcctgagaatacaggtatcgcattggcctgtgctatgaatagttcttttagggggcgtgccagttctgatatttacaccatctgctctcaagactgtgaaatatgggaatcctgctgcacaaatgcaatgacta

SEQ ID NO: 39742 - DNA, 325 bp, Glycine max
  unsure (1)..(325): unsure at all n locations
  Clone ID: LIB3065-012-Q1-N1-E5
aattgccattaacgtataagttgaaagacttgggagtaacgaaagacgatgatagtatttctgtcacactggctcccatatatggngacaagcctgttacaattaaggacgtaaggataaagcgtgtttatcctgaggtggacgatgaataaatctaaattatgtgtgtgctactgctagggttggttcctccaagggatactctatctgtcattggtggttccttaattagggtgttgtagtaattttccttggaacttaatagatccctttcatctgtgagggatactatgtaatggtaataataaatgttggtttaatggtt

SEQ ID NO: 39743 - DNA, 375 bp, Glycine max
  Clone ID: LIB3065-012-Q1-N1-E6
ctttgatgctaaccacaaaaacacagcacaacacaactcgtgccatttcagtcggcaattctggaaaaagtcaaatcattctggaattttcattcatttgagagaaaagagaaaaacaagtgttctttgaatctgttgaaggtggtgatttgatttgatttgaataattcacataaccaattcatctattcattatctctccgatctttcaatggattctgacttctggacctcgcgtcttgccgccgctaaacgccaatacacgcttcagcatcaccatcccaactcttacttaaaatcggttggaatccaatattttgatattgaagaagaagttagaccccgttttccttggccctaatggtattaaaacct

SEQ ID NO: 39744 - DNA, 298 bp, Glycine max
  unsure (1)..(298): unsure at all n locations
  Clone ID: LIB3065-012-Q1-N1-E8
caaccaaccctttcccaaaaccactgacccacgcgtccaaattgccggtaacttcgcccccgttccggaacaccccgtcgaacattctctccccgttattggcacaatccccgacgccattaacggcgtctacctccgtaacggcgccaacccattgttcaagccaaaagcgggccaccacctcttcgacggcgacggaatggtccacgccgttaaattcaatgacggcaccgncagctacgcgtgccgcttcaccgaaacgcagcgtctcatgcaagagcgcaaattgggaaaacct

SEQ ID NO: 39745 - DNA, 381 bp, Glycine max
  unsure (1)..(381): unsure at all n locations
  Clone ID: LIB3065-012-Q1-N1-E9
ctccattgtctttgaacactcatcaccatggccaagcttgggctttccctttgtttccttcttttcagtggctgcttcgctctgagagagcaggcacagcaaaatgagtgccagatccaaaagctgaatgccctcaaaccggataaccgtatagagtcggaaggtgggttcattgagacctggaaccctaacaacaagccattccagtgtgccggtgttgccctctctcgctgcacccttaaccgcaatgcccttcgtagaccttcctacaccaacggtccccaggaaatctacatacaacaaggtaatggtatttttggcatgatattcccgggttgtcctagcacttatcaagagccgcangaatctcagcaacgagga

SEQ ID NO: 39746 - DNA, 292 bp, Glycine max
  Clone ID: LIB3065-012-Q1-N1-F1
agaaaaaccaattgcaaaaaaatatagaatagatgactatttgggcatgccttgtaatatgctggttcttggttttactacatatccagcggttgggtggtatagggttgaattaatgcgttcgtccttaagtagaatcgaatcattcttgtttctggatattcaatcctaattttcatttttggggtcaatttttattattggattcagaatcttttatttgcagctacttggtctagtttgaacgagtgtgatttgaaattgacaatctttgggatcgcttaactaataa

SEQ ID NO: 39747 - DNA, 398 bp, Glycine max
  Clone ID: LIB3065-012-Q1-N1-F10
ctccatctttgatcgctggtgcaaatatcaagggcttcactgcaatttcagttctacctgctcctcccccgagctattttctgggttacactcttccttctggtcatccctgtaatactttcacacttcctccttcaccggcagataaaaagcgaactgggccacgaccatgcccagtatgttaccttcccgtggatgaagccattgcacttatgccaaagtttccgtcaccttctccagtacttaagaacttagcatttatctatgaagaaactcttagcagggatggtgaatttggtggttcggactttggtggatatcctactttgaggcagagaaatgaatcttttgatatacgagagtcaatgagtgtgcactgtggatttgttagaggaact

SEQ ID NO: 39748 - DNA, 407 bp, Glycine max
  Clone ID: LIB3065-012-Q1-N1-F11
agctgttcgagaaaagccgcgtccgaccaaaggacgtgggcgtcctagtagtgaactgcagcatcttcaacccgacaccatcactctcagcgatgatcataaaccactacaagatgagagggaacattctgagctacaacctcggcggaatggggtgcagcgcggggatcattggtgtggacttggccaaggatattctccaggcgaaccctaataactacgcggtggtggtgagcacggagatggtggggtacaactggtaccaggggaaggacaggtctatgcttatcccgaatagcttcttccgcatggggtgttctgctgttctgctttccaaccgtcgaagggactatagccgcgcaaagtaccgtcttgaacacattgttcgcacgcataacggtgccgat

SEQ ID NO: 39749 - DNA, 290 bp, Glycine max
  Clone ID: LIB3065-012-Q1-N1-F12
ctccacggcagagacatatacatgtacagaggagagaaagcgttctgtaaccctgagtgtcgatcgagtcaaataacgatggactataggaaggaacggtgtaccacagaagcttcaaggtctgcgtaaatgtctagttcgtcatatacatgggaacaaatattttcaactgggattcttgcgctttagcgtgactctctgggtgcagaacataattacttaaccagagattgatgatgctactacgtacatacataataatatacggctatactattattcatgacagc

SEQ ID NO: 39750 - DNA, 362 bp, Glycine max
  Clone ID: LIB3065-012-Q1-N1-F2
atggatcagaaagtcgatttcagtgctccgcattccatgggaaccactatcatcggcgttacttacaacggcggtgtcgatctcggagccgactctcgaaccagcactggagtgtatgttgccaaccgagcatcggacaaaatcacacagctcactgataatgtttacgtgtgtcgctctggatcggctgctgattctcagattgtctctgactatgtgcgctacttacttcaccaacacacgatacaacttggacaacctgcgacagtttaaggtgctgcaaaccttgtccggcttttcgcattttaccatgagaatttcgtaccgaccgggttaattggtggtggttgggataaatatga

SEQ ID NO: 39751 - DNA, 222 bp, Glycine max
  Clone ID: LIB3065-012-Q1-N1-F3
agaaagtcttccatagccccccaaaaatgaagagcaccatggtctgtgctctctttctcttttgtgccttcaccacctcatacctaccttcagccatcgctgatttcgtgctcgataatgaaggtaaccctcttgaaaatggtggcacatattatatcttgtcagacataacagcatttggtggaataagagcaagcccaacgggaaatgaaagatgccctc

SEQ ID NO: 39752 - DNA, 399 bp, Glycine max
  Clone ID: LIB3065-012-Q1-N1-F4
attgaattttgattctagcaagcagagcttttgtcaatttgctattgaccttctcggtggaggaattttagtggacaaaactggagattggatcacacttatacaaaattctccaattagtaacttgttgagagttgctgcttggaagaaaggctgtttaatggttaagattgtgatgtctgggaatgcagcagtcaaaaggagtgattgggcctgattggtacaagtgtttctaacaaacagcaacagtacagagcattttgatgcatgtaagtggacaaaatctgaaccacattccttggaattgatccttccaattgaagtattgggtcctaaatatgggtttgaaatggtgaagtcttaattggccaaataaacctcattgcctttggattttcc

SEQ ID NO: 39753 - DNA, 401 bp, Glycine max
  Clone ID: LIB3065-012-Q1-N1-F7
ctcgagccgaatcggctcgagcacctttctcctaaaacatgtccagtgggttcttcttcttctattacaacaacgtcgtccaagaccatgaccatggccatggccacgatcctgctcctgttcacggtcttcgcggtttcatcggccctagacatgtcgataatctcgtacgacaacgcccacgccgccacgtcgcgcagcgacgaggagctgatgtccatgtacgagcagtggctagtaaagcacggcaaggtgtacaacgcgctcggagagaaggagaagaggttccagatcttcaaggacaacctgcgattcatcgacgaccacaactcccaagaggaccgaacctacaagctcggactgaaccggttcgcggatctcaccaacgaggagtacagggc

SEQ ID NO: 39754 - DNA, 303 bp, Glycine max
  Clone ID: LIB3065-012-Q1-N1-F8
atagctagaagcaataagatgaaaatgaaagtgcttgttttgtttgttgctacagttttggtagcatatgaatgccatggctcagactaccagaagttccctctccaaatgaaaactgggtttggtgggcaatacagcaatgaggtggcatgtgccagttggaggcttggcgtggaagcaaacaacgtagtcaagtggcaaactgttcctgcagcttgcggagagtacatagctgactacgttctaggagaccaatatagatcagattccaaaacagttaaccaacaagcttatttctatgct

SEQ ID NO: 39755 - DNA, 338 bp, Glycine max
  unsure (1)..(338): unsure at all n locations
  Clone ID: LIB3065-012-Q1-N1-F9
aaaagaaagctcagatattataatcctagacgataactttggatcagtggtaaaggttgtccgatggggccgctctgtatatgcaaatattcagaaatttatccagtttcagctcacggttaatgttgctgctcttgtaataaatgttgtggcagcaataacttctggtgatgttcctttaaatgcagtgcagcttttgtgggtcaaccttatcatggatacacttggggcgcttgcactggctactgaaccgncaacagaccgactaatgcacagatcaccagttggccgaagagaatctcttataacaaatatcatgtggagaaacttgatcgtac

SEQ ID NO: 39756 - DNA, 385 bp, Glycine max
  unsure (1)..(385): unsure at all n locations
  Clone ID: LIB3065-012-Q1-N1-G1
gcaaacttcaacttgtaatcaagggagagagaaaatttcaagcacaaaaaatggcggagaagaaagtggtgatcctaggaggtggtgttgccggtgccaaccttgcaaaaactatacaacgtcaagccaacgtcacccttattgatccgaaggaatattttgagattccatgggcaagtttgaggggattggttgagccaacttttgctgaaaggatagtgatcaaccatagagagtacttcaaaaagggtaaccttgttgtatccagtgctgtcaacataactgaaactgcagtggtgactgaagatggccagcagattgcctatgactatcttgntattgccactggacacacagaaccaatccccaaaaccaggagtgaaag

SEQ ID NO: 39757 - DNA, 339 bp, Glycine max
  Clone ID: LIB3065-012-Q1-N1-G10
gaattgttatgggatctcttggtatcaggggtacgacctgatgatgtatgctcacaggttggtttatgtttcaaaagggctaaatcagagagcaatggaattgagatggtgaccgaaaagggacaaagagagttatcagctaaagatactgctttgtgcacttcctgtcagatgcttgtggtttggattcagaatcaactaaaacaaaagaagaccaaggagatagtattcaactatgtaaatcagctgtgcgagagcttgccaagtccaaatggagagtcagtagtagactgtaatagcatttatggattgccaaacatcacgtttactggtggagac

SEQ ID NO: 39758 - DNA, 342 bp, Glycine max
  Clone ID: LIB3065-012-Q1-N1-G11
cttccaataatcaccctggagaagattgaagacagtgttgagttcataagctcgaggcctaaagctttagctatttatgccttcacgaaaaaccaaactctgcagagaagaatggtatctgaaacatcatcaggaagtcttgtattcaacgatgcaattctacaatacgtagcggataccctaccatttggaggagttggtgaatgtgggtttgcatcaaggatcttagattctactgctattactattactttatactgaacataccacaatgaagtgtcattaatagactgtaattacggagatggattttgtggaatcgcatatactactagattcaga

SEQ ID NO: 39759 - DNA, 394 bp, Glycine max
  Clone ID: LIB3065-012-Q1-N1-G12
gctggattacgtggaaaggcgctgagaataactcatgactatcgtgatttgctttgggaatctgccgaggggcattgcgtgcctaatgcaggttttttcgaagatgttgtctttgaggatccttctttgttacaagcttctcatgattctgatttgactgatgctgtcggtgagacatcaattgatcagcacaacaactcaaaaggtgatggaccggaggaatctctagatgtaaatgagttccaacctgattctaaccctgcattgacgatgccaaatggtaatgaaaatgataccgctgctgaagtaactgaaggcgtggctgatctgaatatacgggatactgcctctgctaatgacccagatgaccaacagactctatcaactgcatacg

SEQ ID NO: 39760 - DNA, 395 bp, Glycine max
  Clone ID: LIB3065-012-Q1-N1-G4
aacgaacaattttagcttcaaacacacacaaacacatcgggatcagcttcatcactctccgacacttgaaactctcatgttgttcctctagaaacctcttccgcaccaccgtggaattttcctgctacttttgcacaaaacacacactctgcttctattataattcatgcttgtccttgtccttgtccttgtgctggtttttttctagatagggtttgcactttttaatcagaactagccaagaccaggtacagaaagtactgtgttagttaaaaaaaaaaaaactttcatcaattattatcaactttattcggtagtgtagccttgtaggtgaactatgtgtcaggattctgaagtttgattctcttttatattgattgaatagttgtgtgtag

SEQ ID NO: 39761 - DNA, 395 bp, Glycine max
  unsure (1)..(395): unsure at all n locations
  Clone ID: LIB3065-012-Q1-N1-G5
gtcaaagacaatgtcagggatcattcacaagattgaggagacccttcatgtgggaggccacaagaaggaggaggagcacaagggtgagcagcaccatggtggagaatacaaaggggagcatcatggtgaacacagtactgaatacaaaggagagcatcatgttggtgagcacaagccggagcaccatggaggagaagagcacaaagaggggttcctagacaagatcaaggacaagatccacggcgaggaaggtggcgccaccgncgagggcgagaagaagaagaagaagaaggagaagaagaagcatgaacatggccatgacagcagcagcagcagtgacagtgattagattatctcccactgctgcatcacctatatatcttataaggtgtatg

SEQ ID NO: 39762 - DNA, 403 bp, Glycine max
  Clone ID: LIB3065-012-Q1-N1-G6
gttcagcagagttttggaggctatcaaggctaatttcaatgacaaatatgacgagtacagaaagaaatggggtggtggaatcatgggatccaaatctcaagcgaaaaccagagcaaaggagaagcttcttgccaaggaagctgctcagaggatgaattaggaggagtttcttatatcttgttgctttgcgaatgctattaagtttgttttttaatgtactcttttaattattgtcttcataaaaacatttgttattcacatgagctagagtatttcgctaaaatctcctgccgactgttccaattcctgaacccttggattactttaattttggtagtggacttttttcgggtactttatgaaggaactgcattaggatgcagttgcatccaattttttaaaa

SEQ ID NO: 39763 - DNA, 360 bp, Glycine max
  Clone ID: LIB3065-012-Q1-N1-G7
ctaactcctaactccaacttgacctacatttctatttcccgggcgaagctattcgatctcgatctcaatttccaatccacagatcacaatgctaactcgtaaacgactcgtcgtttctctctctctcgccactctccttctcttctcatccctctctctctctctctgcgataaaacccgccctcaaaacgacaacaaaaaaaacaacaacgacgacgacgaagatctcagcttcctcgaggaatccgatgacgctgccaccacttctcaccaaggccattttccagatcccgacgagttcgacgaggacgacggcgacgaccaggacgacttcggcgacttcgctggcttcgaccactc

SEQ ID NO: 39764 - DNA, 334 bp, Glycine max
  Clone ID: LIB3065-012-Q1-N1-G8
cacatcttaaccttgttcttaccagatggctgcctcagttgaactcttatttttgtcctttctctcgttgttcatctctttctccatagctcaaacctctttcagaccaaaggcacttgttcttcctgtaaccaaagatgtttctgcctcagttcctcagtatgtcacacaaatcaaacaaagaaccccacttgtggcagtgaaactaactgttgatcttggtggtggctacttgtgggtgaattgtgaaaagggctatgtctcatccacctctagaccagcccgttgtggctctgctcagagctcgcttttcgggttatatggttgcagtact

SEQ ID NO: 39765 - DNA, 355 bp, Glycine max
  Clone ID: LIB3065-012-Q1-N1-G9
caccacctctcttttcatcatcgcttcaattaacacttcctttcgttgttttcctctgatttttttggtggttgatggcgtgggcgaataagcgaggtgactcaaaaaatgcagggtttatgagaacgttggtggtggtgttgttggtgttgctatcggggttttggtgtgtttccggtgtgaaagaaggaaaaagaaatgcttacgcgacgatgatgtacgtaggtacgccgagggactacgaattctacatagccatacgcgtgcttcttatatcgctggctacgctcgacgctcaaaccgatcttgttgtcattgctatccttgatgttcctcctccatggattcgagctct

SEQ ID NO: 39766 - DNA, 393 bp, Glycine max
  Clone ID: LIB3065-012-Q1-N1-H10
gagatttataagcatcctaaagaagaaagaatagcccgaacttggggaaccactggccctggcctaccctatgttgaacaaactataaccaatgctggaaattggttgattgggggtgacctagaggtcattgaaccaatccagtacaatgatggacttgatcattttcggctgtcttcagcagaactccgtgcagagttcacaaggcgcaatgcagatgctgtgtttgccttccagctccggaatcctgttcacaatggccacgctttgctaatgactgacacccgtaggcggcttcttgagatgggttataagaatcctgtcctcttgcttcatccactgcgaggctacaccaaagctgatgatgttccacttgattggcgaatgaaacaa

SEQ ID NO: 39767 - DNA, 380 bp, Glycine max
  Clone ID: LIB3065-012-Q1-N1-H11
ctaaaccacaccattcgcatcacaacacttggttgtttgttaccatcttccaaaaatatcatgctcctaacgtaaaaatcctcggtttcaacgttcaactgcgatctctaaacaaaaccatggcatcactctcaggcatttgctcctcttccccaactctcaaaaaattcccgaaccaatccccatcgttgaccgaccctctccgcaaagaccacgtgtccttccccgcccgccgcgccgatcggactctcagcctcgcgccccctcctcgtgcggtggctcgtgaagtttccgacggagcattggcggcgatgaagaaagggttggagaaagatccgcgcgcgctgtggcggagatacgtggattggctgtaccagcac

SEQ ID NO: 39768 - DNA, 375 bp, Glycine max
  Clone ID: LIB3065-012-Q1-N1-H12
gttgcctcaaactcaaaggatgaccctgcaaaagaagctctggaccttaaaaggccaggtaataatcatgaaccaccctggtcagattggaaatggctatgcccctgtcctcgactgccacacttatcacattgctgccaagtttgctgaactcatgaccaagattgacaggcgatccggcaaagagcttgagaaggagcccaagtttttgaagaactgtgatgctggctttgataagatgattccaaccaaacccatggtttgtgaaactctgtccgagtatcctacacttggtaggttcgctgttagggacatgcgtcaaactgttgctgtgggagtcatcaagaacgttgagaagaacgatcctaccggagc

SEQ ID NO: 39769 - DNA, 379 bp, Glycine max
  unsure (1)..(379): unsure at all n locations
  Clone ID: LIB3065-012-Q1-N1-H2
atttatcgtccattctctctcactccataattgcttcttgctttggtcgatccattcggtgatcactgatcagtggtttggtgttgttgatagagaaaatgcattccagccctttgcttcttgaggaacccattaagatggcatccatccttgagccatccaagcctactttttttccggctatgacgaaaattgttggcacacttggtccaaagtcacgatcagttgatataatttcccattgccttgatgcatgaatgtctgtggcaaggtttgacttttcatggcgtgatccagattaccatcaagagacattggaaaattgagagttgctatcaaaagtaccaagaaactctgtgcggntatgctagaatactgg

SEQ ID NO: 39770 - DNA, 326 bp, Glycine max
  Clone ID: LIB3065-012-Q1-N1-H3
gggcatccagagaagacagggaaagtcataatcgtggatcacgtgcttcgacccgaaggcaacgaactcttcacagacgttggcatcgcattcgacatgatgcttctcgctcacaacgccggtggcaaagagaggaccgaagagaactggaagtggctgttcaaggaaaccggtttcgcgcgttacaacatcatcaagatcaacgctctcccttccatcattgaggcgtttccaatctgaagaagatgccactaccacaactgcatgtggtttttatgttgcatgtgttggtggtattattaacagctatatgatcttcgttttaa

SEQ ID NO: 39771 - DNA, 97 bp, Glycine max
  Clone ID: LIB3065-012-Q1-N1-H4
ctcaaccactatagataaccatgagacacactccgaagattggtggtcacggtgtctttgggggttataatatattggtattggtggtgaacaattt

SEQ ID NO: 39772 - DNA, 391 bp, Glycine max
  Clone ID: LIB3065-012-Q1-N1-H5
tttcactccaaaccttccttccttccttgtttgctccaaagaatgggagataacaatgtcaacctcccacccgggtttcgcttctaccccacagatgaagagcttgttgttcatttccttcaaagaaaggcaaatcttcttccttgccatccagatgtcatccctgatcttgaactctacccttatgatccttgggaacttcatggtagagctttggcagagggaaagcaatggtactactacagcagaaggacacaaaatagggtcactagcaatggctattggatgccaatgggaatggaagagccagtgatttcaaactctagcaacaagagagttggcatgaagaaatattatgtgttccatttgggagaagcccctgatgcaacac

SEQ ID NO: 39773 - DNA, 340 bp, Glycine max
  unsure (1)..(340): unsure at all n locations
  Clone ID: LIB3065-012-Q1-N1-H6
caagaatcttcctatttacatcactgaaaatggcatggctgaatcaaggaatgactcaataccagtcaatgaagcccgcaaggatagtataaggattagataccatgatggccatcttaaattccttcttcaagcgatcaaggaaggtgttaatttgaagggctattatgcatggtcattttcggacagttttgaatgggatgctggttacacagttcgattcgggctcatatatgtggattacaagaacaacttgaaaagataccccaagttctctgctttttggttgcaaaagttccttctcaagtgatctgaatntagtgttcctttgacatgtcta

SEQ ID NO: 39774 - DNA, 369 bp, Glycine max
  Clone ID: LIB3065-012-Q1-N1-H7
aacatattctcctctcattctcactcaaaacacaaaatccgaactaaggtgaaaatgaaggcatcacgcattgctttgttcactttggtggtgcttctttttgtggctgaagttcaagtgtcaaaggcagtgacctgcagcccagtgcagctgagtgcatgtgtgagtgcaataacctcttcaaccccttcatcaaacctatgctgctccaagatcaaggaacagaaaccatgcctttgccaatatcttaagaaccccaatctcaagaagtttggtgactcttctaatgcaaagggaagtgctaacacttgtggaacttcctttccaaagtgctaaagggttactaaatttgaagtgggtttaaattct

SEQ ID NO: 39775 - DNA, 302 bp, Glycine max
  Clone ID: LIB3065-012-Q1-N1-H8
ctttctctctcatgttgtagtatctcactagtgtttttcagtcgtttctgaaccacacaaacatcaccaccgaacaatgccgacggggttaccggcggcgaattccttagtggcgccggacgaagaggggtgggtgtgggggcagatcaaggcggaggcgcgccgcgacgccgagtcggagcctgctttggcgagctacctctactcgacgatcctctcgcactcgtcgctcgagcgttctctgtcttttcacctcggaaataagctctgttcctccacgcttctctcgacgctcctttacg

SEQ ID NO: 39776 - DNA, 372 bp, Glycine max
  Clone ID: LIB3065-012-Q1-N1-H9
ctttgcttcattttatttatagagacactctaatagatgatgaagagctctttatgtcacgttcatcattcttgccttcggtttctgaatcatttgcagcaaagttgttagctgctgcagaaaagtatggtttgccaagacttaagctgatgtgtgagtctgtactttgcaaagacatctctatagattctgttgcctatattctggctcttgctgatcgttatcgtgcaacagaattgaagtctgtctgtctacaattttctgctgaaaaccttgtcgctgtgatgcaatctgatggttttgagtatcttaaggaaaattgtcccttgctgcaatcagaactgctaaagacctgtgctggatgccaggagg

SEQ ID NO: 39777 - DNA, 423 bp, Glycine max
  Clone ID: LIB3065-013-Q1-N1-A10
ggggcccaccacactacccttaattcaaatctcattctctaacctttgactctgccttactcactctctactttgctcatcatcgtagatgaaccaacacttctagtctctcttactttataaccatgtaaaaatgagtcacctaatgaaaaattagtagcttcttgttgtgctttttattttgtttgtgttgagataaatttgtttgtttgtttggtattgttttgtgttttatgaattatttgatgggtgaagaaggagaagtggtgagaaagcaaggacaaaggggtgttggtggagataagtggtacttgtatagctgcttacaagactgtaaatattggtgctgtttaatacacgagactagttctctttcgatggtcccttttgagtgaaaaaccttgtcttctcagctttctttcg

SEQ ID NO: 39778 - DNA, 423 bp, Glycine max
  unsure (1)..(423): unsure at all n locations
  Clone ID: LIB3065-013-Q1-N1-A12
tcgagcttcaaaccctctctctcttttttctctttctctctttgaagctctgtgagaaaccttaactgtgtaattgcaatggctgatgcttctgtggcaccaccaccttcactgaaagatgagcttgacattgtgatccccaccataaggaaccttgactttcttgagatgtggaggccattctttcagccttaccatttgatcattgttcaagatggtgaccccaccaaaaccatcaaggttcctcctggctttgactatgagctctacaaccgcaatgacatcaacaagcttttgggtccaagggcctcttgcatctccttcaaggactccgcgtgtcgctgcttcggctacatggtgtccaagaagaagtacatcttcaccattgatgatgactgctntgttgccaatgatccatctgga

SEQ ID NO: 39779 - DNA, 390 bp, Glycine max
  Clone ID: LIB3065-013-Q1-N1-A3
ggcgagtgagtctcaacactgcctatgtcatggacactgctgagacccgaaccaacattgccgttatcaagtattgctgtaaaagagacgaaaccttgatcttaccggttaacgatagtatcagtctcactctcgatccctcccacctgtgcaccaccaccactgttgccgtcagttccgctttccaccaagatcgcatgtggctcaatgccaagtgtaggagatttctctttctgggggcaggttccagagctgtttaagggagatccgtgctcgtgcttgtgatgttgaggatgaaaataagggtataaagatcacaaaggaggattgggccaaattgcacctacacattgcttcgtacaacaacttccctactgcagcaggactggc

SEQ ID NO: 39780 - DNA, 416 bp, Glycine max
  Clone ID: LIB3065-013-Q1-N1-A4
caccatttccctctcgattgtgagacttgttgttgttaactgaacttttctgagcaagaatgtctgggcgtggaaagggaggcaagggtttgggaaagggaggagcgaaacgacaccgtaaggtgctgcgcgataacattcagggaatcaccaagcccgcgattcggcgtttggctcgtaggggtggcgtgaagcgtatcagtggtctcatctacgaagagacacgtggcgtgctcaagatctttttggagaacgtgattcgtgacgccgttacctacactgagcatgctaggagaaagaccgttacggcaatggacgtggtttatgctctcaagagacagggaaagaccctctacggatttgggggctagggttttttaatttaatgggtaggttctttggttttggaggctaat

SEQ ID NO: 39781 - DNA, 349 bp, Glycine max
  Clone ID: LIB3065-013-Q1-N1-A5
ggcgagtgagtcgcaaaactgggtattcatggtgactgcagagacctcaaccaacattgccgttatcaagtattggggtaaaagagacgaaaccttgatcttaccggttaacgatagtatcagtctcactctcgatccctcccacctctgcaccaccaccactgttgccgtcagttccgctttccaccaagatcgcatgtggctcaatgccaagtgtaggagatttctctttctgggggcaggttccagagctgtttaagggagatccgtgctcgtgcttgtgatgttgaggatgaaaataagggtataaagatcacaaaggaggattgggccaaattgcacctacaca

SEQ ID NO: 39782 - DNA, 405 bp, Glycine max
  Clone ID: LIB3065-011-Q1-N1-A8
ggcaaatggattaagcaataaaatagtagccattaattttatgaaatatgcaaaaagatgttagttttgcaggtttgttgcctttgaaatgttaattaaatacactgagaagtttaatttcagaatatataaatagttttccaaaaaaaaaaaaaaaaaaaaaaaaaaaaaaaaaaaaaaaaaaaaaaaaaaaaaaaaaaaaaaaaaaaaaaaaaaaaaaaaaaaaaaaaaaaaaaaaaaaaaaaaaaaaaaaggggcggcccccaattagggactttgtaaacccggaattaaattcggaaccggtccttgaagggttacaatttttccttatagggagtcgttttaaactttggcgaaataatggcaatagctgttccctggggaaaattgttttccgttcaa

SEQ ID NO: 39783 - DNA, 405 bp, Glycine max
  Clone ID: LIB3065-009-Q1-N1-A6
ggagcccaagtttttgaagaacggtgatgctggttttgttaagatgattccaaccaaacccatggttgttgaaactttctccgagtatcctccacttggtaggtttgctgttagggacatgcgtcaaactgttgctgtgggagtcatcaagaacgttgagaagaaggatcctaccggagccaaggtcaccaaggctgcccagaagaagaagtgaatcgtgcgggctggttcatcaggggatgttggttacaataaatgttggtttcttttctgtactcttgtgtcttcttttctaggtagcttgtttttcggacaaagtttgaagtctccaccatcatctcgcaactgttgttcccagaactgggttcttgatcgacggtggcaaaattgctcttatttatctgt

SEQ ID NO: 39784 - DNA, 411 bp, Glycine max
  Clone ID: LIB3065-009-Q1-N1-A7
cacagttagtacaaaaaagggttacttcagcttccacatatcttgaagaattgatcaatgggcaagtctgtagttgagaagctactttggatggcaattgtgtgcttggtgctgggtgtaatttccattactcccaaggcccaagcagcagtgacatgcaaccaggtggtgagcaacctcaccccatgcatttcttatgtgctcaatggtggcaaaaccgtgcctggcccttgctgcaatgggatcaagaccctctttaacctcgctcactccacaccagaccgccaaaccgtttgcaagtgcataaagaacgctgttagtgcgttccattatggcaagtccaatgtggaccgtgctgctgctcttcctaagcagtgtggggttaacatttcttaccagatcagccctttc

SEQ ID NO: 39785 - DNA, 341 bp, Glycine max
  Clone ID: LIB3065-009-Q1-N1-A8
atatcttcttatagcttcatcccaaaaagctcttttcgttctaaatttgattccttagttcagcattctattattatatatggcttcttcaccttcctcagaaaacaaaaacctagagggagtagctggtggtgccggagagaaacccattccacttggtgagaacgttctgcagaagcatgctgcattctttgacttgaataaagatggggtcatctacccatgggagacttttaaagggttgcgtgaaatcgggactggggttctgctgtccgttggaggtgctattctcatcaatgtgcttctcagtcagagtactcgtcccggaaagtttccatcta

SEQ ID NO: 39786 - DNA, 390 bp, Glycine max
  unsure (1)..(390): unsure at all n locations
  Clone ID: LIB3065-009-Q1-N1-A9
gcctgctgagattgttggaaagcgtgttaggtataaaattgatggttccaagattatgaaggtctttttggaccccaaggagcgaaacaataccgagtacaagttggagacttttgctgcagtatacaggaaactttcaggcaaaggtgtcgtgtttgagtatcctactaccgaggcttangttctatttgttagctttgaatttcttcctgaattacatatggtggatgctggttttgttaagttggctttaattctggattttctttaattacttatagaaaatactgtgtcctggtttatcaatgtagaatttgatatattttcttgtaacattctatgaatccggatttttaagattttaacatcctatgaatccggatttttaag

SEQ ID NO: 39787 - DNA, 414 bp, Glycine max
  Clone ID: LIB3065-009-Q1-N1-B1
gcaactacagttccatcaatgattattgatgaatcaccacagaaaacagaacgaggagagattaaaccacaaaatcctcctctgcaagatcagataccggatccagaacactcggaagctcaacattcagctcctaagtcaccagctgtttcttcatccaaatctgaggataggggagatgccaatttagatacttcaccaaaggctactaatcatgagatgaaccaagcaatttctgagaaccccgattccaacaaaatgaagggcagaaaacctgtagaccgttcctcatgtggttccaacacaacctctagcagtgaagagactgagttactagagaaggatgagaaagaaaaggaagagcccaaaacacctgatgcgaacgttttagataccgagcttagtaatcgtcga

SEQ ID NO: 39788 - DNA, 275 bp, Glycine max
  Clone ID: LIB3065-009-Q1-N1-B10
gtgcaagtcactgagaagttgctagctatcaatctcaactttgtggcagccctgataatattccaaatgtatatcacgataggcttatcaggcaagaccctttcagattccatttaggggaaatagaatttgctaccttcttttccattcccccttttttgtacagtgcactctttttaccttaattcaggatttaaggtgtgtgtgtgctggtgtttgttaatttctaacatgtgcaagtatataatataatacaatggagtggatttcttatt

SEQ ID NO: 39789 - DNA, 324 bp, Glycine max
  Clone ID: LIB3065-009-Q1-N1-B11
cttcactttaaagttacatagttattcattggtttacttaatgtacaatggctgcttcaacaatgactgtctcttcatcatcattggctggccaagctatcaagcttgccccctccacccctgagcttggtgctggaagggttagcatgaggaaaacagcctccaagactgttttcctaagaagcccatggtacggaccagaccgtgtcaagtacttgggcccattctctggtgagcccccatactatcttactggtgaattcccaggtgactatggttgggacactgctgggctttctgctgacccacagacttttgccaaaa

SEQ ID NO: 39790 - DNA, 419 bp, Glycine max
  Clone ID: LIB3065-009-Q1-N1-B2
atttatcacctcattttctgatgaaaaaagttacacctttggggacgcccaagagaagaaccaacgagatcgaggaccttcttctgcttctgcttccgccttttccttcgcgcttcggtgctgcccacctacactcattccgtccaaacccctttttgtctgaaaaatcaaaccttaatttctgcgtttttttctattggatccaacttcactcgccggctagagtttcccgaggcactaccctattgggtctaatcattcgagttcttcgattaacgtgaatttgggtcagagacctcatcatcagagctggcaggtggcgggtaaaagaaaatttgcaggttgaccggtagatatagcaaaggagagtagaaaccctagaagaagaagaagaaaaagaagcaatccccatataagaa

SEQ ID NO: 39791 - DNA, 359 bp, Glycine max
  Clone ID: LIB3065-009-Q1-N1-B3
agattctgtaactaatgatgggaaagaggtcatcaaaggcaacatcttgagtcaagtcaccaatgcttcacaaatgataaagctggaaaaggatccacatgctgcatttgcattaattattgatgggaaaactctaacatatgctttaaaagatgatgtcaagcaccaatttttgggattggctgttggttgtgcatctgttatttgctgtcgtgtgtctccaaagcaaaaagcattggtaacaaggttagtgaaagaaggaactgggaaaaccactttagccataggtgatggtgcaaatgatgttggcatgattcaagaagctgacattggtgttggaatcagtggggttgaaagta

SEQ ID NO: 39792 - DNA, 405 bp, Glycine max
  Clone ID: LIB3065-009-Q1-N1-B5
gaaaaaatgggttcttcttcttctatgtggacggtgtgtgtgattttggcatcactggcctctgcagcactctgtgccaacccacgcaggccagtggatgtacaatttggccgaaactacgtgcccacatgggcctttgatcacatcaaatatttcaatggtggttctgacattcagcttcatcttgacaagtacactggtactggcttccagtccaaagggtcttacttgtttggtcacttcagcatgtacataaagatggttcctggagattctgctggcacagtcactgctttctatttatcttcccaaaacgcggagcatgatgagatagactttgagttcttggggaacagaacaggacaaccttacattctgcaaaccaaagtgttcaccggaggcaag

SEQ ID NO: 39793 - DNA, 416 bp, Glycine max
  Clone ID: LIB3065-009-Q1-N1-B6
gttttctggcacacaagaaaagtgtgccacatgtggcaaaactgcttatccattagagaaggtaacagtggaagggcaggcctatcacaaatcatgtttcaagtgttcacatggtggatgtcccataacgccatcgaattatgcagcccttgagggcattttgtattgcaagcaccacttctcccagctttttaaggagaaagggagctataatcatcttactaagtctgcatcagtcaaacgggcagccgcagccacagcagcagcaacaacagctgcctctgttccagaatcttgaatgttggttccttcaattgccttttctttttcaaatacattttggtttgtgaagcacgtgtttgtatgtgtggcctttttggttattgattgttctctcgtgactttgatcatttctg

SEQ ID NO: 39794 - DNA, 413 bp, Glycine max
  Clone ID: LIB3065-009-Q1-N1-B7
taaaaatcatgatgtgtatcttttaataagtagcatagttacgtgctatcaaatatactattgttaaaatcttgcatactgttttagacaagaagcaaaaaaggggaattggtgagttacctattctatgatgtatagggtatcattaaggtaaattaaattagattcgatggaataatttgatatgatatgattgataaaaattggcgttactttagcatgcgatcaatgtgattagaggtttgatcctgatgtccacgcatatagaataacatttggtaggacttggagaaactaattgcttaaatgcattatagtatttcgagggattaatctctgactctcaaccatagataccttgggttaaaaacagataataagatttgatccagtgtaaattagtggcatttcaa

SEQ ID NO: 39795 - DNA, 419 bp, Glycine max
  Clone ID: LIB3065-009-Q1-N1-B8
agaaatttaagtgaggagctagagaatgatgatgaagtctgctatgtgtgcagtggtggttgtagcacttcttcttctggcggaagaggggcccatggctgatgctgtgacatgcaccccaacagagttgagtccgtgtcttccagcaatcacttccggtgctaaaccttgcaatgcttggtgcacgaagctgaggcagcaaaaaccatgcttatgtggctacctcaaaaacgctagcttgaagcagtatgtgaactctcctaatgcccgacaaaccgttgcttcttgtgggattccctttccaacttgttaattaattaagccttcttataattaaagtgtgggatatatatatatatatagataaacagtttaatttatacacactttgatcctacaaagcatcttgacacaagcat

SEQ ID NO: 39796 - DNA, 359 bp, Glycine max
  Clone ID: LIB3065-009-Q1-N1-B9
acaaatcccacatgttctcacagataaaagagatacgttttggcaattcaattgatgaattaggagttgtaggtcacctctcttgcacctcataacagctctaaatcaacacacacaaatattagtcaaaaccgtaaattaaataacacactacttctacaatccataatatatatacacacacaatacaaaaaatatcaacagagtccccaaccttaatcaatccacatttaaattataagaaacgcccttcaagatacaaacaatgtcatctcgcattgttgccgaaaatgctctatcggtcaccaatattgtcacgccttcatatttcgacctaatggaactggacgatcttacgc

SEQ ID NO: 39797 - DNA, 420 bp, Glycine max
  Clone ID: LIB3065-009-Q1-N1-C1
cccaccaatattttgctttctcttttcttttcctgcttataactgccttttgttttggttttaattccacctcatattttatatgtgttccaaacttcttcttggaatgtcccttccttaatacccctcaaagaaaagccaccttaacatctctttctctgaaaattctctttagagagatagagagaggaagaaagaatggcagcttgcactgtctactcaacacaatctctgagcacaaattgctccatctcaaccccatcaaagacgcaactcagtttttttccaccaaaagcaggtagttttctggaggaacagcaagaagggcagctgcagcagcagaagaagctatgtgataacatgtgcagcaggtgactcacagacagtggtgattggcctggctgcagacttcaggtgtgg

SEQ ID NO: 39798 - DNA, 385 bp, Glycine max
  Clone ID: LIB3065-009-Q1-N1-C10
ctcgcacttctagttttggtgttctgagttcgagcgaggaaggtctatgacctgagaaagtcttgctgctgtggtaactgaaggtgcggaagctcctgcaagtgcggcaacggctactgaggctgcaagatgtacctaaacttgaactacactgagtcaaccactaacgagaccttgttcatgggaatggcacctgttaaggctcaattggagagtgctaagaagggtgagaccattgagaacgacggctgcaaatgtggaccatactgctgctgaacgtctgcacttgcaatggaggtgttgggagagcaagcttcaagcagagagttcccttaattacgataatgatgaactattaatgagtaactaagaacttatgtactat

SEQ ID NO: 39799 - DNA, 182 bp, Glycine max
  Clone ID: LIB3065-009-Q1-N1-C11
cgaagttccaagtgctgcgttttgatagccgtgcaaaaacgggatgaaatttgaaatgaaaggagtggaatgcgagccgagcaattatgtatatgtactaatgtagtcttcaatttcattttcaacctctgttctcataaaaccctagaaacattcaaacaaagatgtcttagtgggcatgc

SEQ ID NO: 39800 - DNA, 392 bp, Glycine max
  Clone ID: LIB3065-009-Q1-N1-C12
gtccaaatacagtggtgctgaaacaacagctagcattgcatttattctttttgttttgggttttaccgtgacacggatcatttactacccattctggattcttaggagtacgagctatgaagttgttcacgccttgaaaatggacctggtggatggtccattatattattatgtgttcaattctcttctatatttcttgcaagttcttcatatatattggtgggttctgatgcttaggatgcttgttaaacaaatgcaagaaaaaggaaaagttagtgaagatatccgatctgattcagaagatgaagatgaacatatacatgatgaatgaacagataaacaagactggatacgatcccattgtgttcaaatggtatcatggttgtcttacc

SEQ ID NO: 39801 - DNA, 400 bp, Glycine max
  Clone ID: LIB3065-009-Q1-N1-C2
gttttcgttcaaggtgagaccttgttcccgggcatactctcatgattggactgagtgtccttttgttcatcccggagagaatgctcggaggagagaccccaggaagttccattacagctgtgtgccgtgccctgattttagaaaaggggcttgcaggcgtggagacatgtgtgaatatgctcatggggtgtttgagtgctggctgcacccggctcagtatcggacacgcctctgcaaagatggcaccagttgcaatcgaagggtgtgtttttttgctcacactgcagaggagcttcgtccgctgtatgtgtccactggatctgctgccccttcgccccgttcatctgcttcaggtcctaatgtcatggacatggctgctgccatgagcctttttccagga

SEQ ID NO: 39802 - DNA, 420 bp, Glycine max
  Clone ID: LIB3065-009-Q1-N1-C3
agtggagcttgtggcagcccggaaagtgccattgaccaaatcatcagaacagttaccaacaaagtctacaacattacattttcagttggagatgcccaaaatgggtgtcatggatcaatgatggctgaacatttgcgataaagatccttcaaagtttcctataaatctgaaaggaacggaacatccgagactgtaagctttaagttcaaagcaattgcaccaagaaccagactcactttctacaggtccttctaccataccacaattgatgactatggctgtatatgtggccctgacattgatcaagttatagtgttccctgtggcctaaatattagagttccattccatctgtaccagtataatatgtagtaattgagatttttgcaaatcacttgagcttttcttttctataattaca

SEQ ID NO: 39803 - DNA, 409 bp, Glycine max
  Clone ID: LIB3065-009-Q1-N1-C4
gcaaacttcaacttgtaatcaagggagagagaaaatttcaagcacaaaaaatggcggagaagaaagtggtgatcctaggaggtggtgttgccggtgccaaccttgcaaaaactatacaacgtcaagccaacgttacccttattgatccgaatgaatattttgagattccatgggcaagtttgaggggattggttgagccaacttttgctgaaaggatagtgatcaaccatagagagtacttcaaaacgggtaaccttgttgtatccaatgctgtcaacataactgaaactgcagtggtgactgaagatggccagcagattgcctatgactatcttgttattgccactggacacacagaaccaatccccaaaaccaggaatgaaagacttgaccaatacaaaggagaaaa

SEQ ID NO: 39804 - DNA, 421 bp, Glycine max
  Clone ID: LIB3065-009-Q1-N1-C7
agcaaatttctctttgctggcccatccaaatctgctcacacccttttccaatatatagctccggagctggtgccggttcaatatggtggacttagccgagaggctgaacaggaattcaccacttctgatcctgtcactgaggttacaatcaaacccgcgactaagcatgctgttgagttccctgtttctgagaaaagtcatgctgtttgggaaatccgagtggtgggctgggatgtcagctacggtgctgaatttgttcccggcgctgaggatggttacactgtcatagttcagaagaacaggaaaattggtcccgctgatgagaccgttattaccaacgctttcaaaattggtgaacctggcaagattgtactcaccatagataaccaaacatccaagaagaagaaactcctctacaggt

SEQ ID NO: 39805 - DNA, 329 bp, Glycine max
  Clone ID: LIB3065-009-Q1-N1-C8
ctcgagccgttgcatttcgttactttcatttgttgtgcaatcgtacaagttccaaacttctctattttggtattatttgttctcacttctcacacatacagatttgagccttttatattatcatggcttctaaggtggtttcggatttggttatagcgatgatgttgtttggcatgaactgtaactgcactagtgttggccacatgccttcaaccaaagaggaaggtcacgattttcaggagtctaaagccaagaccacacaaactgcgaacaaggccatggaaactggtaaagagggacaagaagccgcagagtcatggacagaatgg

SEQ ID NO: 39806 - DNA, 317 bp, Glycine max
  Clone ID: LIB3065-009-Q1-N1-C9
gattaacatccataatcttaagtcagcatattgttcttctttgcctcgcaactgtgtgaaatggaataatgatgtgtatgttttttctaggtatctttacttctttgagaagggaaacctacaagtcaccgttgctgctatccagggcttaattgagttaattatgaatgagatgcagagtgataccacaactcaagatccagctgctaatgctttcttagccagtaccatgcgctatatagagttccagaaacaaaaagggggtgcggtaagcgagaagtatgaagccatcaaggtttcacatgctggatgaccga

SEQ ID NO: 39807 - DNA, 419 bp, Glycine max
  Clone ID: LIB3065-009-Q1-N1-D1
tggaaaagctctggtgcagatatgtgttataatcaataacatcggtgtgctgattgtttacatgattataattggtgatgtgctctctggaacatcttcaagtggagatcatcactatggtatccttgaaggatggtttggtgtgcactggtggacggggcgaacatttgttgtcctttttacaacacttgccatatttgcaccccttgcaagctttaagcgaattgattcattgagattcacatcagccctttcagtcgcacttgcagttgtttttctagtcattgccgtgggaattgcagttgtcaagatattcagtggaggcattgcgatgcccagactcttccctgtcactactgatgtggcatcattctttagactattcactgtagttcctgtgtttgtgactgcatatatct

SEQ ID NO: 39808 - DNA, 284 bp, Glycine max
  Clone ID: LIB3065-009-Q1-N1-D11
tcgctccagatatagaaaagctcggggtttttttaaaataataatgggggccgtgaggaaacttttttgggaaggcaaggtgtgtaaaaaactggtttaaggaagaagctactgaaacctgtattatgaggttcaaaagctttggctatgccaggaaaatttggaatattacaatatgggtagcaacaggactattgtttggtttagaagggaccttagaattgaggacaatcctgcattagctgctgctgcaaaggaggggtctgtactccctgtgtatatat

SEQ ID NO: 39809 - DNA, 390 bp, Glycine max
  unsure (1)..(390): unsure at all n locations
  Clone ID: LIB3065-009-Q1-N1-D12
ctttcaaacacacaagccaaacccaatcacatcatcacacaggggaaaagagcacagaccgaccaattccaacggttgaattttttggctgaagacaccccaccgacgttagtcaaataaaacatgtcttgctccgtcgcggtttacaattcgtcggtgatctatccttcttattacctattctgctcgaagccctccatcatctcttcttcgccggaatccctctcgatctctatctcgcatctcaaaccttccaactgttctacgacgtcgtcttgttcttcaccctctgctgctgcttattcatcttcttgtgcttattctccgtttcggcttcgccttcccaagcctnccaccgtgttctctgcttcttcgtctgcttcgtctacc

SEQ ID NO: 39810 - DNA, 417 bp, Glycine max
  Clone ID: LIB3065-009-Q1-N1-D2
caccgacttgtggaagcgagtctgcaaccagatctggacttgcaaccggccctcagctcctctgactttcaggaggggagcaatagcagctgcatacagtagcagcggcgggtcagtgtatgacaagaaccctgatgatcagatccactctggggcggtcccagacgatgtgatccaggcaacacaatccggcaaatactgggccccacacccacagactggggtatttgggccccccggaggagcaggagacgaagctgcatctgctcccacttccacttgcacttgtgatgccctggaagagaaggcctggtttcgccccaccagtctcgaggatttcgagaagcctcacacacttccttaacaacccctttctttctttcaattaggacatcatatatattatacacaattaaa

SEQ ID NO: 39811 - DNA, 395 bp, Glycine max
  Clone ID: LIB3065-009-Q1-N1-D3
tggcaagcaaagcgggggtgaacaaaaacaatggcgacatcgctatgggttttgacatctgtttatttcaacaatgtgtgttttggcaaagcgcttcctctatctcggcccttccttgtatgtctcgctctccgcaaatcccttctatctctgtgcacgcgccgacgaaccttcgccgtccgcgccgaatcccaaaacggggccgatgccgtccccgcacactacgacttcgacctcttgaccatcggcgccggcagctgcggcgtccgagccgctcgcttcgatgtcaactacggcgcttccgtcggcatgtgcgagcttcctttgtccactatctcctgcgaaaccaccggaggcgtcggcggaacctgtgtaatacgaggatgtgtgccaaa

SEQ ID NO: 39812 - DNA, 325 bp, Glycine max
  Clone ID: LIB3065-009-Q1-N1-D4
gaacaaaagagaagtaatggagagtgaacttatgctgcataggatgcggatgaagtacaagcatgaaaccgcactcttggaagacaacataggactctctggatttactcccttcacttccaagtttgtctccagtgaagaggaatatctcgattcacatgatgtcatgataaaccggcttgcgcggacacggtctactgcagtacagcatttgccttataatgaaaccaacgtttccatagcatctgccgctagtacaaagcaagagttcacgatgagatatgtgccacatgcatggcctcataaactgtatgcactcgagcca

SEQ ID NO: 39813 - DNA, 417 bp, Glycine max
  Clone ID: LIB3065-009-Q1-N1-D5
cttgaacccttcaggccgttttgtcattggtggccctcatggcgatgctggtctcaccggccgcaagatcattatcgatacttatggaggatggggtgctcatggtggtggtgctttctccgggaaggaccctaccaaggttgataggagtggtgcttacattgtgagacaggctgctaagagcattgtggcaagtggacttgccagaaggtgcattgtgcaagtgtcttatgccattggtgtgcctgagcctttgtctgtgtctgttgacacctatggcactgggaagatccatgataaggagattctcaacattgtgaaggaaaactttgatttcaggcctggtatgatctccatcaaccttgatctcaagaggggtggaaataacagtttttgaagactgctgcctatggacac

SEQ ID NO: 39814 - DNA, 407 bp, Glycine max
  Clone ID: LIB3065-009-Q1-N1-D6
accaagacgaggatgccatttcgctgtcacctgacatgagcgctggtacagaggaagatagcagaagccagggatctccacgtagagtttactcaatggcccttcacttgcgatcaattgcttcaatcttggaaagcaacctcgaggagaagtccaagttatacaaagaagtctccttgcagcacttgttcttaatgaacaacctgcattatatggctgaaaaggttaaggggtctgaactcaggctcatacatggagatgaatggattcgaaagtgcaattggaagtttcagcagcatgcaatgaaatatgagagagctagttggagtcccattctcaacttgcttaaggatgacggaattcatgttccgggtacaaattcggtctcaaaaagtcttcttaaagag

SEQ ID NO: 39815 - DNA, 420 bp, Glycine max
  Clone ID: LIB3065-009-Q1-N1-D7
ttccaatatattccattctctctgtgtatttccctacctctggcttcacgatgcagatcttcgtcaagaccctcaccggcaagaccatcacccttgaggtggaaagctctgacaccatcgacaacgtcaaggccaagatccaggacaaggaaggaatccccccggaccagcaacgtctcattttcgccggaaagcagcttgaggacggtcgtacccttgctgactacaacattcagaaggagagtactcttcacctcgtactccgtctccgtggtggcatgcagatcttcgataagacactcaccggcaagaccataaccctagaggttgaaagctccgacaccatcgatgacgtcaaggccaagatccaggacaacgaaggtattctcccggaccagcaacgtctcatctttgccggaa

SEQ ID NO: 39816 - DNA, 407 bp, Glycine max
  Clone ID: LIB3065-009-Q1-N1-D8
ctccaatatattccattctctctgtgtatttccctacctctggcttcacgatgcagatcttcgtcaagaccctcaccggcaagaccatcacccttgaggtggaaagctctgacaccatcgacaacgtcaaggccaagatccaggacaaggaaggaatccccccggaccagcaacgtctcattttcgccggatagcaacttgaggacggccgtacccttgctgactacaacattcagaaagagagtactcttcacctcgtactccgtctccgtggtggcatgcagatcttcgttaagacactcaccggcaagaccataaccctacaggttgaaagctccgacaccatcgataacgtcaaggccaagatccaggacaaggaaggtattcccccggaccagcaacgtctc

SEQ ID NO: 39817 - DNA, 419 bp, Glycine max
  Clone ID: LIB3065-009-Q1-N1-E1
gaaaaggaacaccttgaaaactgcatttatgttcccaggcattctttttgctgtcttctttgtgctgaatgctttaatctggggggagcagtcctccggggcagtcccttttggaacaatgtttgctctagtctgcttatggtttggtatatcagtacccttggtctttgttggcagttacttgggttttaaaaagccagcaattgaagacccagtgaagactaataaaattcctaggcaggtacctgagcaggcgtggtatatgaaacctgtcttctcaattcttattggaggcattcttccatttggggcagtgttcatcgagctcttctttatcctgacatcaatatggctgaaccagttctattacatctttggcttccttttcatagtgtttgtgatcctattaatcacctgtg

SEQ ID NO: 39818 - DNA, 372 bp, Glycine max
  Clone ID: LIB3065-009-Q1-N1-E10
ggcaacctcatatttgtcttcaattttcattggaacaacagcgattcagattacagagttggctgttcaacccctgggaaatataagattgtcttggattcagatgatgccttgttcggtggcttcaatcggctcaatcacactgctgagtacttcacctgagaaggatggtatgatgaccgacctcgatcctttcttatctatgcaccttctagaacagcagtggtttatgcccttgcagatgatgctgaacctaccctagcagatgaagctgaacctgccctagcagatgaagctgaaccagatccagttgatccttgatgacaatcttctgggatgctgaaatgttacaagtgcacaacggcatggatg

SEQ ID NO: 39819 - DNA, 376 bp, Glycine max
  Clone ID: LIB3065-009-Q1-N1-E11
gtgggaatgcctaatgctggtaaaagcactttactcggggctatatcaaaggctaaacctgctggtggtgactatgccttcactactattaggccaaatttggggaatctaaactatgatgatctctcaataactgtggctgatattcctggacttataaaaggcgcacaccaaaatcgtggactcggacatgcgtttatgcgccacatagaacgcacaaaggttcttgcttatgtggtagacttggctgctgctttaaatggaagaaaaggaattccaccatgggaacagctgagagacttaattctagagctagagtaccatcaagatggtttatacaaacgaccattcttgatagctgcaaattagactgatg

SEQ ID NO: 39820 - DNA, 362 bp, Glycine max
  Clone ID: LIB3065-009-Q1-N1-E12
caaattccattttccaattcaaaaccctaactccgttcgaagcaccaaatcgtgatggcaccaaaggcagagaagaagccagcagagaagaagcctgtggaggagaagaaatcgacggtgggagacaaggctccggcggagaagaagccaaaggccggaaagaagcttccgaaggagggaggcgccggcggagaaggtaagaagaagaagagaaacaagaagagcgtggagacatacaagatctacatcttcaaggttctgaagcaggttcaccctgacattggtatctcaagcaaggccatgggaatcatgaacagcttcatcaacgacatcttcgagaagcttgcccaggaatcttctag

SEQ ID NO: 39821 - DNA, 368 bp, Glycine max
  Clone ID: LIB3065-009-Q1-N1-E2
gaaaccagcaatcggcgattaggagtgagagagatatggagggaattgaaggaaatagcagcagatacagtctgaaaccctcgcgaatttgcaacgaagatgttctgatctgcgtcgacgtcgatcctcagtgcctcgtcgaaatgaaaggtgccaccggtcccaatggcagacccctcacccgtttggactccatcaaacaagccatcgttctcttcgtcaatgccaaactcaccatcaaccccgaacaccgttttgccttcgccactctctccaacaccctcgtctcttgggtcaggaaagagtttagcagtgaaattgagtcaacacttgcagcaatgcgtgttctttcagcttcttcttcttct

SEQ ID NO: 39822 - DNA, 421 bp, Glycine max
  Clone ID: LIB3065-009-Q1-N1-E5
acatgattctggagaaatggattcagcatcagaatcaggtaaagccaaaggtgcttcggttgggaagggaaggggaggttcccaaggtgcaggaaggggctctttcgtttatggtggggcacaggtaatgggcaccactggaaatgtggctgttagtcatggagatccaaacttcccagccttcttgccagtcatgcaatttgggggccagcatcctggtggtatgggagttcctgctgttggcatggcattccctggatacgttggtcagcctcaacttggtttgggaaagtctgaaatgacatggctaccagtgttggctggtcctgcaggagctttaggggctacatacccattccttcctgttgatggtgcaagcagtcgacaatctggacaggcctctgcaatgggtacttcaagc

SEQ ID NO: 39823 - DNA, 401 bp, Glycine max
  Clone ID: LIB3065-009-Q1-N1-E6
cattctctctgtgtatttccctacctctcccttcaagatgcagatcttcgtcaagaccctcaccggcaagaccatcacccttgaggtggaaagctctgacaccatcgacaacgtcaaggccaagatccaggacaaggaaggaatccccccggaccagcaacgtctcattttcgccggaaagcaacttgaggacggccgtacccttgctgactacaacattcagaaggagagtactcttcacctcgtcctccgtctccgtggtggcatgcagatcttcgttaagacactcaccggcaagaccataaccctagaggttgaaagctccgacaccatcgataacgtcaaggccaagatccaggacaaggagggtatccccccggaccagcaacgtctcatcttcg

SEQ ID NO: 39824 - DNA, 418 bp, Glycine max
  unsure (1)..(418): unsure at all n locations
  Clone ID: LIB3065-009-Q1-N1-E7
ctcataacacaaagcacaaagcaaagctcatccttgagttaaaaaatggcagcagcttcttccatggctctctcatccccatccttggctggcaaggccgtgaagctgggcccatcagccccagaagtgggaagggtgagcatgaggaagaccgtcaccaagcaggtctcctcaggaagcccatggtacggcccagaccgagtcaagtacttgggcccattctctggcgagcccccgtcctacctaaccggtgagttcccaggcgactacggctgggacactgctgggctttccgcagacccagaaaccttcgccaagaaccgtgaactcgaagtgatccactccaggtgggccatgctcggagccttgggctgcgtcttcccggagttgctgtcccgcaacggngtgaagttcggag

SEQ ID NO: 39825 - DNA, 408 bp, Glycine max
  Clone ID: LIB3065-009-Q1-N1-E8
cctgaactactgaacaacaacctcttcttcttctctctctctgtttagcataatcattcatcaccacacaagagaaaaaagaaaaagaacaaagaacaaataaacctttttttttttataaaaaaagaaagaaaaggaaataaagttttttgttttttcgatgaaccagaagttcatcggaaagccgccggcgacggtggacctggatcggatgccggagcgtgggtcccaccaccggcgttcccactccgacacctccttccgcttcgccgcgaacttcgacgaccttctcctcttcgacccctccgacttcgacatctccggcctcccgtcgccgctccctctgccatctccggtctccgccggcttggttccgatgtccgtcgactccgacgagtccggcaaaca

SEQ ID NO: 39826 - DNA, 424 bp, Glycine max
  unsure (1)..(424): unsure at all n locations
  Clone ID: LIB3065-009-Q1-N1-F1
tccaacggtgcatcttgatttccgtggaacagtattgaacgtgaagccttcaccagtagtggcagcttttagttccagagggcccaatatggttaccagacagattctgaaaccggacgttattgggcctggggttaacatcttggccgggtggtccgaagcaattgggccatcagggttatccgatgacactcggaaaactcagttcaacatcatgtcaggtacatctatgtcttgtccacacataagtggattggctgccttgttgaaagctgcacatccgcaatggagttctagtgcgataaaatcagccctaatgacaacggcagatgtacacgacaacaccaagtcccaactccgggatgcggcaggnggtgcattttccaacccatgggctcatggtgcgggccacgtgaacccacac

SEQ ID NO: 39827 - DNA, 414 bp, Glycine max
  Clone ID: LIB3065-009-Q1-N1-F10
gaaaagatgatgatgtttgaagatatggggttttgtggcgatgtggatatgttatgtgtttctcttggagagggggatattgctgtgagacaaactgaaccggatcctgtagttgaggatgactacagtgatgaagaaattgatgtggatgaacttgagaagaggatgtggagggacaaaatgcgtcacacgcgattgaaagaacaaaccaagtccaaggaagggactgatgcaacaaagcaaaggcaatcccaagagcaggcaaggaggaaaaagatgtcaagagctcaagatggaatactgaagtacatgctgaaaatgatggaagtttgcaaggcacaagggtttgtttatgggataattcctgagaaggggaagccagtgactggagcatcagacaatcttcgtgaatgg

SEQ ID NO: 39828 - DNA, 409 bp, Glycine max
  Clone ID: LIB3065-009-Q1-N1-F11
cttcacaattagaaaaaaaaaaaaaccaaaaatgggcgtttctcgttctcaaaagcctcatgttgtttgtgtgccattcccagcacaaggccacgtgaacccttttatgcaactaagcaaactccttctttgcaccggtttccacataacctttgtgaacaccgagttcaaccacaagcgtttggtgaagtctcttggacaagaatttgtcaagggacaacctcattttcgatttgagaccataccagatgggttgcctccatctgacaaagatgcaacacaaagcattgcagcattgtgtgatgcaactagaaaacatttgtatgagccactcaaagagcttgggaagaaactcaatgcttcacatgaagtgcccttggttacctctatcatctatgatgggctaatg

SEQ ID NO: 39829 - DNA, 433 bp, Glycine max
  Clone ID: LIB3065-009-Q1-N1-F12
tgctagcatgcctgcacgtctactctagatgatcctctcggtgaattccaattccacattttcaagaaataacgaggcaaaaatgttcatatatgaattggaattatttggtttcttattaagcctatcctgaagccaaatgaaatgagatcggaattcctcggggaattccaattccacattttcaagaaataaggaagcctaaatgttcatatatgaattgcaattatttgctttcttattaagcctatcctgaagccaaaggaaatgagatcggaattcctcggggaattccaattccacattttcaagaaataaggacgcataaatgttcatatatgaattggaattatttggtttcttattaggcctatcctgaaaccaaaggaaatgagatcggaattccttcggggtaccgagctcgaattcccta

SEQ ID NO: 39830 - DNA, 411 bp, Glycine max
  Clone ID: LIB3065-009-Q1-N1-F2
tgctagtgttaggtgaattccctcgcttcacatgcatgatcgcaccttcaactctcttcttcttcttcttctccatggctttttttcaaggttttggcgccgtggagttcgttttgtagcatcaccgtatcatcagcttcagcttgctttcaccaaaacggctttactatttggtgtgttccatgtcacaaaaaacgaaaggagatattccttttacccactcctcgtcagggaagatctgaagcagcgctagcagcacacgtcctctaatggacgccgactcctctggagaagaagtggttattaaaacaagaaaaccatatactatcacaaagcaaagagaacgatggacagaggaggaacataacagatttctagaagccttgaagctatacgggcgagcatggcagc

SEQ ID NO: 39831 - DNA, 425 bp, Glycine max
  Clone ID: LIB3065-009-Q1-N1-F3
ctcgagccggataatgtgtccgattttattagggtaggtggaattcagagactgcaggatggagagtttattgttcaggcaactaaagattgtgttgcaaagacattgaaaagattagaagagaagattcatggccgagtgctgaaccatttgttatatctcatgcgagtttcagaaaaggcttttcaaagacgagttgctttaactcttgctcacctttgttctgcagatgatcaaagaaaaatatttattgattataatggtttggagttgcttatggggcttcttggctcttataaccccaagcaacagcttgatggagctgtggctttatgcaagttggccaataaagctatgactctgtctcctgtagatgccgtacccccatctacaacaccccaggtctatttgcgagagcagtatgt

SEQ ID NO: 39832 - DNA, 395 bp, Glycine max
  Clone ID: LIB3065-009-Q1-N1-F4
gcaggacctaaaccagcagtttatctagaaactgctaaggatttggctgaccgtctgctatctgcttttacggccagtccaactgctattccgtttagtgatgctattctgcatgaaaagtcagcccatccagctcccggaggactgagtagcacatcggaagtttccactttacagcttgagtttaattatctcagtcagatatctgttgatcagaaatatagtttggaagcaatgaaagtcatggagcacatgaagactcttccaaagattgaaggactagttcctatctacattagccctcattctggtgagtttagtggagaaaatattagactgggatctcgtggggacagttactatgagtacttaatcaaagtatggcttcagagtgg

SEQ ID NO: 39833 - DNA, 324 bp, Glycine max
  Clone ID: LIB3065-009-Q1-N1-F5
gtcaagaggtgctaccctcattgtatataggtttacatattggtggcagcattgggaatagcagatgttgccaattgaccttactgaagccaaagtgaaatgaaatggggatcccaaggggagtgccccaatgacaatgtggataaatatcgtggcaaaaggggtggacgcagattgggagctgttcggccccgtaataagcctctgccgggtacctgcggaatgccagctgtcctcatgggggaccttctataagatgggcagaataatggacgaagctgaaacctgtgtaaaagagttgtcacgcatacgattcctcacaag

SEQ ID NO: 39834 - DNA, 420 bp, Glycine max
  unsure (1)..(420): unsure at all n locations
  Clone ID: LIB3065-009-Q1-N1-F6
gtctgtctttttttctctttctctctctagattttctttctggttcttctttatgagccctaactcggggccccatagtcgtcgctgctagctagccatgtcgctgaggaaggtcttccgctcccgcaagttctccaaatcgttcaaagaggtgctgccggcggagggcgccgccgtcgagggcggggtcgccggcaccgtcgaggaggcggcgaatgggaataataatgggtggtctagcatgctgccggagatcctcggcgagatcgtgcggcgcgtggacgccgncgaggagcagtggccgaaccgncaaaacgtcgtcgcctgcgcgtgcgtctgcaagaggtggcgtgacatcacgcgcgaggtcgtgcgtgtgccctcgcataccgggaaaatcactttcccttcgtgccttaa

SEQ ID NO: 39835 - DNA, 404 bp, Glycine max
  Clone ID: LIB3065-009-Q1-N1-F8
ctctatctttttcttttccttctcctagccctcttccctataggacaaggaataacaaacacaaaaatacacaatggctttcactttcaccagaatcctaattctctttgtctccctctcctctctcatcctcaacacccacgcagcccgtgcgccccgcaccatccagacccgcctctacagcctctgcaagcccaccaccaacatggacctgtgctacaagaccatccttccggaggtggagggcctgtcccgcttcagcaactacaaggccctcgaagtggagatccttgccacccagaaacaggtggagacaacctcgaagctcataacctcgctcctggcgaagactgacaactcgaaagacctgacagaatcgctccagatttgcaaagagcagtacg

SEQ ID NO: 39836 - DNA, 408 bp, Glycine max
  Clone ID: LIB3065-009-Q1-N1-F9
agcttctatatcttcagattcagagaccaagtcaaatgatttacctcctcgtaatggttttgaacatatccacactgctccacctccacttcctcagagtccaagattgtcccagaagttatctggtttacaaaattcatcaaataatttagagactagttcaacaagtgctgatcacagcagtgaacagacaaatcttgattcttcagctgaacggagagtagaatctgaaaaagatatggcagatgtacctggatcaggtgacaatttgcgaaaggatgataaagttgttaataatgatgtttctgtggtttctaatacctctacaacatataagcacccaacccatttggtaactccatctgagatattctctaatgcttctttatcttctgatacttcccatac

SEQ ID NO: 39837 - DNA, 412 bp, Glycine max
  Clone ID: LIB3065-009-Q1-N1-G1
gtcatttgcaagggatgttttcgcggacaatcagacttctagaagctgggataaaacctgtatatgtttttgatgggaagccacctgatttgaagaaacaagagcttgccaaacgttactccaagagagctgaggctactgaagatttgtcagaagccttagagaccgccaataaggaagacattgaaaaattcagtaaacggacagtgaaggttacaaagcagcataatgacgactgcaaaagacttttaaggctcatgggagtgcccgttgttgaggcaccctcagaagcagaggctcagtgtgctgctctttgtaaagctggaaaggtttatggtgtggcttctgaagacatggattccttaacatttggagctcctaaatttcttcgccacctaatggatccaagctc

SEQ ID NO: 39838 - DNA, 343 bp, Glycine max
  Clone ID: LIB3065-009-Q1-N1-G10
gctgaatgcttcatattatctaaaaacagggggtcattttggtatttcaatcaaggctaactgcatagactccacagtccctgctgaagcagtgtttgaaagcgaagtgaacaagttaaaggctgatcaattcaaaccattcgagcaagtcacccttgaaccatttgagagggaccatgcctgtgtggttggtggatacagaatgcccaagaagaaaaaagatgctgctgagtagattgctttccagtagccagtaggcgtgtaccaatgttatttcatgagattcgtgttaattttgattcgaaaccttggttataaaacagttctggtttgaatttaaaaa

SEQ ID NO: 39839 - DNA, 324 bp, Glycine max
  Clone ID: LIB3065-009-Q1-N1-G11
caagttattatcaaataattaattaaattccctcgggaatcttgttggagccatgtttacagctggtcaggtcatcaagtgcagagctgcggtggcatgggaagcaaggaagccactatcgatagaaaccatagaagtggcaccaccccagaaaggtgaagtgcgtttgaagatcctcttcaactccctttgccgtacagatgtttactggtgggatgctaagggccagactccgctgtttcctcgtatcttatgccacgaagcttcggggattgtggaaagcgtgggccagggtgtgacacatctgaaaccaggtgaccatgc

SEQ ID NO: 39840 - DNA, 407 bp, Glycine max
  Clone ID: LIB3065-009-Q1-N1-G12
ttgcactacatcaaagcacattgttcatatgtgtatgagtgcaattctggtcaacattgaaatgggtcaatttactcatgttacaagctatgttagcaaggcagaacagtcaccagatgcccttgaagcagtaacagttgcaaagctacgatgtgctgcaagattggctaatctagaagccaaaaagtacaagcttgctgcccgaaagtttctagaaacaggacctgaactgggaagtcactataatgacgtaattgcacctcaagatgttgcaacatatggaggactttgtgcacttgcaacatttgatcgggcagagttaaagagtaaagttatagacaattccaacttccgcaatttcttagagttagtaccctgaagtaaggaactgataaatgatttttact

SEQ ID NO: 39841 - DNA, 419 bp, Glycine max
  Clone ID: LIB3065-009-Q1-N1-G2
ggagaagggtgagtggaagatctctaaaggctcagagagaagatagcattagaagaacagtatatgtttctgagattgatcagcattcttttttcctggtgtaggttactgaggagcggcttgctgccttattcagcagctgtggacaagtaattgattgccgaatttgtggtgatccacattcagttctccgttttgcttttgttgagtttgcagatgagtatggtgcaaggactgctctaaatcttgggggtaccgtgcttggatactatccggtcagggttcttccttcaaaaactgccattcttccggtgaatcctacattcctgcctaggtcggatgatgagcgtgaaatgtgtgcccggactatctattgtacaaatattgataaaaaggtttctcaagctgaagtgaagaat

SEQ ID NO: 39842 - DNA, 396 bp, Glycine max
  Clone ID: LIB3065-009-Q1-N1-G4
atcgtgagagggacggtagcagagattccgtgagttgcaaagatgaggacaattctttctgcagagaccatgaacatcccggacggcgtgagcgtcaaggttaatgccaaggtcatcgaagttgagggcccccgcggaaaattggtgcgagacttcaagcacttgaatctcgattttcagctcatcactgacgaaaacggtaaaaggaagctgaaggtggaggcctggttcggttctcggaaaacatccgccgccattcgcaccgccctgagccacgtggagaatctgatcaccggcgtcaccaagggctaccgctacaaaatgaggttcgtttatgcccattttcccatcaacgcaagcatcggcaacgacaacaagtctattgagatcagaaat

SEQ ID NO: 39843 - DNA, 399 bp, Glycine max
  unsure (1)..(399): unsure at all n locations
  Clone ID: LIB3065-009-Q1-N1-G5
gaaaagaaaataaaaccacaacttcataaaaaaagacttaatgtgcacgccattgtggtgagatagaaagaaagatgcaaatggaattccaaggctaacaacacaacttcaacaaattagggcttttattattctttgcaatcatatcatatccttcactccttcacttcactctcaaaactcccacagttgaagagacatgttggactatgaatgggggaacccgtccacgataatgctctccggaaacgaagacagctccgccgcgggctccgaccaaacccaccgtcaaatcttcgaccactatgcgtcccacacactcatccccgaccacttcctacacgcgccaacgcactccaccgtcaccaccgncgccgcagccaccgtggatttcaccca

SEQ ID NO: 39844 - DNA, 415 bp, Glycine max
  Clone ID: LIB3065-009-Q1-N1-G6
ctagccctgttcataggacaaggactcctcgtgggaggagtgtgtcaaggagtgtatcacctgatgcttcaccaaagcgtatcagaaggggaagaggtttcagtgaaagatactcttatgcaagaaggtatagaaccccctctcggtctcctgtgaggtcataccgctacaatggaagaaatgaccgggacagatattctacttacagaaggttttcccctaggcgtttcaggagcccaccaccacgtggaagaactcccccaaggtatcgaagcaggaggagcaggacgccatctgtttcacgcagtccacgatatcgagcccgacgatatagccgaagtaggagcccggttcgcagtcgttccctagttgatagatcccgcccctctcgtgtggagaggcatgcatcttcttc

SEQ ID NO: 39845 - DNA, 419 bp, Glycine max
  Clone ID: LIB3065-009-Q1-N1-G7
caagattgtttttgatgataagcttgtgttggctaacacacgggaattctttgatggaaattttccagtggattcttggttaccaatttttgtgaattgtctttatcctgtaagtcaattaccttcagaagctgtcgttgtaaatgtcacatgtggtagtggacgtgtggtttacccaccactgcttggattagttctgcagttaacaatcgctcctcagatatcaacaaaaggattcgcacagcacttgggaaaggtaagaaaattgtttttcttactagagttgatccttttgcagtagctttactggctgatctttttggtgttaagaatgaaattctgagttctaacgccactaatcctatgctgacgcgacttcttgaaaactgtaagagtctcaaatatctggttgatgagtg

SEQ ID NO: 39846 - DNA, 385 bp, Glycine max
  Clone ID: LIB3065-009-Q1-N1-G9
caaaaccctaattcccccaatccaaaaccaatggcaacccttggagaagatgaagaatctgcacctccccaccgccgccgacgccgaatccctcgccttcgaactccacaccgacggggaccaacccgaatccgacatctcctacggcctcaacgttcgtgccgacaaaaatccagaaggaaacaacaaagacgacagtgatggtgctgccccacggcgtcgagttccgctggaggccacggcgctgcagaagctgaaaagcgacctggagaggctgccggaggaccaggggatggaggagttcaaggatgtcgccgtcgagggctacggcgcggcactgctcgccggctatggctggaaagaaggaatggggattgggaggaac

SEQ ID NO: 39847 - DNA, 54 bp, Glycine max
  Clone ID: LIB3065-009-Q1-N1-H1
attccatgttaaactggaagttgaggctgtcaaattttctaaattttttttgtc

SEQ ID NO: 39848 - DNA, 411 bp, Glycine max
  Clone ID: LIB3065-009-Q1-N1-H10
tggtaatcggatgcttcgcaacatgggctggcaggaaggattggtaccgttttgttcctcctcattacatgagtttttacgtattacatttttttgttattcaagttgtttggtagagcttgatatattattccaaatttcctcttttcagggatatgctagtactttgatcctagacctagataatattttcctctagtttagatatatgtgtatataatacacacacacacacgtatatatattattttcttcagtcattttggacctcaagaattggatgggatacccctggaaatttggtattttctcaacatatccgccgaaggattctaacatttcttcattatggttgtttcttgtattatggataatttgattacagggactaggaaaggatgggagtggaat

SEQ ID NO: 39849 - DNA, 390 bp, Glycine max
  Clone ID: LIB3065-009-Q1-N1-H11
gcaccacgtatccctgagaaaagagaggaaccacactctctaagccaaagcaaaagcagcagcagcagcaatggttaaagacacaaagcctttagcctatgctgccaataatggataccaacaaaagggttcttcttttgattttgatcctagcgctccttcaccgtttaagattgcagaaatcagagcttcaataccaaaacattgctgggtcaagaatccatggagatccctcagttatgttctcagggatgtgcttgtaattgctgcattggtggctgcagcaattcacttcgacaactggcttctctggctaatctattgccccattcaaggcacaatgttctgggctctctttggtcttggacatgattgtggccatggaagctt

SEQ ID NO: 39850 - DNA, 343 bp, Glycine max
  unsure (1)..(343): unsure at all n locations
  Clone ID: LIB3065-009-Q1-N1-H12
ctcttttccttgtcctaaccctttttcctattaaaaagaaaaggaataaccaatacaatatacacaatggctttcgctttcaatttcaccaaaaccctaattctcttggtctacctctactgcctgcgtatgcaaacccaagctgnccccatgccctcgtacccgtcaagcccggctctacagcctctgcaagcccaccaacaatgctgggctgagctacaggaccattctgccagaagtgctgggcctgccccgattcaactattacaaggccctcaaagtggagatgctcgtgacccatatacaagtggagaaaaccctcgagttgataagcgtgctcctg

SEQ ID NO: 39851 - DNA, 420 bp, Glycine max
  Clone ID: LIB3065-009-Q1-N1-H2
acaaggcttacctagctcgtccatggaagaattactctaggagcatggtcatggacacatacattgatgatttgattgacgctgatgggtatttgccatggcaaggaccagagggtccttctggtatggatacttgcttctatgccgagtaccacaacattggccccggttcagacaaatccaagcgtgtgaaatgggctgggatttggaacctcaattcaaaagctgcacgttggttctcaccatctaagttttttcatggaactgattggattgaagttactggaattccttgctttcctggcgtgcccaaacaccatatgcacaaaaagacaatacttaattggcaataaaagtaatgagttgcaaaatcaagcaatataaattaattaaaaagtaatgattgtgcttctttattct

SEQ ID NO: 39852 - DNA, 399 bp, Glycine max
  unsure (1)..(399): unsure at all n locations
  Clone ID: LIB3065-009-Q1-N1-H4
aagattgcttacttgggaaggccgtggagggtttacgctaaggttgtgatcatggactcgcagatcgatgacatctttgtccctgaagggtacatgccgtggatgggaagtgctttcaaggacacaagcacctactacgagttcaacaacaggggttttggtgctaacactcaaggtagaatcacgtggcctggttttaaggttatcactcccattgaagctactgattactacccagganaattctttgagatcgctaattcgactgagcgtgattcttggatcgttgggtctggggtgccctactcccttggcccaattattgcgctgcctttgccaacagcttaattcatggtcttttttaatgactctaatagaatatacatggtactacatatc

SEQ ID NO: 39853 - DNA, 410 bp, Glycine max
  Clone ID: LIB3065-009-Q1-N1-H6
tttctctctcctcgactcgatcccaattccactagggattcggttccgatgcgattccgagcttgttagatccacgacaaggtttcgtttcccagattcttttgtaaaaaaaaattcttcctctgcccaacaggtaagttgtaaaaaaatggaccatgacaagactgggtgccaagctcctcctgaaggtcctatattgtgcatcaacaactgtgggttttttggaagtgcagctaccatgaacatgtgttctaaatgccacaaagacatattgctgaaacaggagcaggccaagcttgcagcatcatccattgggaatattatgaatgggtcatcaagcagcactgaaaaggaacctgttgttgctgctgctgctaatattgatatcccagttattccagtagagccta

SEQ ID NO: 39854 - DNA, 415 bp, Glycine max
  Clone ID: LIB3065-009-Q1-N1-H7
cgttgaatagaacaaaatcatgttctaagtttctttagttccgatctccaactttggattgtttgttccaacgacgatgctgtccctttaacacatttgaattctacgcaatttttttaaaaaaaatgcgaaggctgctcgggaagatttctgggttcttgagcaatcgaactatggtgggagtggacaaaacagggaacaaatacttcaccagaaatgaagaggttgatggtatcgtgaaagagaaaagatgggtgatatttaaaggagaggaggatcctacctctatcccagttgaatggatatgttggctgaatgggcagcgtaaaaaggctccaactccagaggaaatgatggaattggaagcaagacgtgaacgtgttagacagaatgttgctcttctcaagaaagaaga

SEQ ID NO: 39855 - DNA, 377 bp, Glycine max
  unsure (1)..(377): unsure at all n locations
  Clone ID: LIB3065-010-Q1-N1-A1
ctttcgctgcgtcctcggttatggcttctcgcaggctctcagcatctctgctccgaccattcctccgtccatctctgccggaatttcaagctccgacccctttccggctattctctgtcccaaacttttccactcgcgtttctccgatcgccattacaaaattacctgggactgaggtattctcacaatttgagtccggtaatggtttagcatcagtgctgagaagctctggaatgggcttgtaccagccagctggggggcttgtaccgncttttgctagcaggtttatgtcaacagaggcaacttctgttgattcttcttctcaagatagttcgatgctggagcctgaaattcctnctcgtatcaaatttaagaga

SEQ ID NO: 39856 - DNA, 371 bp, Glycine max
  Clone ID: LIB3065-010-Q1-N1-A10
tttctctctcactccaaacctgcgattctcacccctgcccaatggcttcgcaggagaatggtcgtccattacctaaattcggtgagtgggatgtgaacaatcctgcctcagctgacggttttactgtcatactcaacaaggctagagatgagaagaagactaacacggcaaccccacgtagatctgatcctgtgttcaagaatgagaattataacactcctcaatattctggaaagagaaagtggttttgctgcggctgaatctagaagagggcatgatggatcatgaccctatttgctgtggaccatgatcccgctaatcaagtggagcaaggaatggcttatgatcctatttgctgactgtcacttctt

SEQ ID NO: 39857 - DNA, 408 bp, Glycine max
  Clone ID: LIB3065-010-Q1-N1-A12
aagagattcaagaccggcatggctaatgaagaggaacagaagaaccacctcttcggcatcaaagatctcggtcacaagactcttcttcagagtgatgcactctatcagtatatacttgaaaccagtgtctatccaagagagcacgagtgcttgaaagagatacgcaagatgactgcaaaacacccactgaacatcatggcaacaccagcagacgaaggacaacttctgagcatgcttgttaagctcacgaattcaaagaacgccttggaaattggtgtattcactggttactctctgctctccactgccctggctcttccccctgatggaaagatcttggctttggatgtgaatcgcgaatactatgagttaggattgccaataattcaaaaagctggagtggctcac

SEQ ID NO: 39858 - DNA, 342 bp, Glycine max
  Clone ID: LIB3065-010-Q1-N1-A2
attcaaatgcaaatggccctttacattacactaataattgggcttctagtaaacaccctagtactctataaatagcatttgcatgcaccttagtcttcaccaaaatactcctcttggcatcttgcgttgtgtccctcttttaagctatttccttctcttaacacaattggatgtgccaattgccatagtcaccaaccaattaacaaaggtatatatatcatcatatcatcaccaaatgaaaaatatctggctgttttttcttggggcggtggctacttttgcggtggcagccacagctggtagcttttaacaagactttgaaataacgtggggtgatgatcg

SEQ ID NO: 39859 - DNA, 395 bp, Glycine max
  unsure (1)..(395): unsure at all n locations
  Clone ID: LIB3065-010-Q1-N1-A3
cctctttcttcctcttcctcagtagtgcgattttcgattctgttctctgcaactatgcctaaccctaaggtcttcttcgacatgaccatcggcggtcaacctgccggccgcatcgtgatggagctctacgccgacgtgactccgagcaccgtcgagaacttccgcgcgctctgcaccggcgagaagggcgccgggcggagcggcaagccccttcactacaaaggctcgtccttccaccgcgtgatcccgaacttcatgtgccatggcggcgacttcaccgtcggaaacggcaccggatgcgagtcgatctacggcgccaagttcgccgacgagaacttcgtgaagaagcacacttgtcccggcatactctncatggcgaacgccggtcccggaac

SEQ ID NO: 39860 - DNA, 378 bp, Glycine max
  Clone ID: LIB3065-010-Q1-N1-A4
tggaaaaagcttctggtgcagatatgtgttataatcaataacatcggtgtgctgattgtttacatgattataattggtgatgtgctctctggaacatcttcaagtggagatcatcactatggtatccttgaaggatggtttggtgtgcactggtggacggggcgaacatttgttgtcctttttacaacacttgccatatttgcaccccttgcaagctttaagcgaattgattcattgagattcacatcagccctttcagtcgcacttgcagttgtttttctagtcattgccgtgggaattgcagttgtcaagatattcaatggaagcattgcgatgcccagactcttacctgtcactactgatggggcatcattcttt

SEQ ID NO: 39861 - DNA, 402 bp, Glycine max
  unsure (1)..(402): unsure at all n locations
  Clone ID: LIB3065-010-Q1-N1-A6
cttcctcagtagtgtcatttacgcttctcttctctgcagcggctatgcctaaccctaaggtcttcttcgacatgaccatcggcggtcaatctgctggccgcatcgtgatggagctctacgccgacgtcactccccgcaccgccgagaacttccgcgcgctttgcaccggcgagaagggcgtacggcggagcggcaagcccctccactacaagggctcgtccttccaccgcgtgatcccgagtttcatgtgtcagggtggcgacttcaccgncggaaacggaaccggcggcgagtcgatttatggcgccaagttcgccgacgagaacttcgtgaagaagcacaccggtcccggcatcctctccatggcgaacgccggtcccggaaccaacggatcttagttct

SEQ ID NO: 39862 - DNA, 302 bp, Glycine max
  Clone ID: LIB3065-010-Q1-N1-A7
attgtggggcgcacacattggttggagaacttaagaggctgtctcttgacttttccagaaaaaccaacaccaagtttgattttcataaagagaatttttaaattcttttatcatagttcgttatttttattttttccaactgtagcatacgtatgtagttgagggaaatttagtttgctgttttttttttctttggtgctagagctaggtagataaagctgctagctgcattcaattggagttgtatacatgtataaaaaaattgtattcattttgatataaaatgaaatgattacgtcgtt

SEQ ID NO: 39863 - DNA, 408 bp, Glycine max
  unsure (1)..(408): unsure at all n locations
  Clone ID: LIB3065-010-Q1-N1-A8
cttgacaaggatattaattcattctccatgagagtcagagagtggtattcttggcattttcctgagctggtgaaaattgtaaatgataattatctgtatgccaaagttgcaaaatttattgaggataaggcaaagttggctgaagacacgattccaggcttaactgacatagttggagatgaagataaagcaaaggagattgtggaagctgccaaagcctccatgggacaggatttgtccccagtggacttaatcaatgtccatcnaattgcacagatggtaatggacctatctgagtacagaaagaacttatatgattacctgtttgctaaaatgaatgatattgcaccaaatttggccacttaaatgggtgaagttgttgttgctcgtttgatttcccatgctgga

SEQ ID NO: 39864 - DNA, 379 bp, Glycine max
  Clone ID: LIB3065-010-Q1-N1-A9
gaatgggtatacagtgatgggaaatcaacaacatgtgttgcctttattctttcaatgtataaagcggctggaatattcggccctatttctagctccattcaagtaactgaattcacaattcgtgatgcatacatgcttaggatttttgaggataaccaaacacgtctaccaagatggtgcaacaatgagaacgatcggcatccattctgccagattcttggtgaatataggatggaattgcctggctataacaccttggatccttatgccaatatgaacgagcactgtccttcccttccttccacttatgacaggcccttgaaatgttagtctcttctccggcatttccattttctgatttgcctgtaatccatgatct

SEQ ID NO: 39865 - DNA, 396 bp, Glycine max
  Clone ID: LIB3065-010-Q1-N1-B1
ggttcggatacctagtggaaaaaaattgttcaaggcttgcagggaacatggccaccccagagtgcgggttggatgcagcaagctcttgatgaatctgtgcgtaatgtgcttacttctgcgacttccaccatttcctaccaacctatttcttctgtgacttcccctgtttcctatcaacttcctgttcctatttctagtaccaatgttaaggtgaatccagggacaacttctcatttttccttaaatgcaagagcttttggacatccttataacccaccttccataaagcctcatgttgcacctcaaacttcccaagatttttttgccacagttagtaaaaaagttttagctccatgtccttgtcttccatcaattaattcacaccttcatcaaaat

SEQ ID NO: 39866 - DNA, 343 bp, Glycine max
  Clone ID: LIB3065-010-Q1-N1-B10
aatatatcaaagcaagaaaaaatggggtccgcataatttgctgggatattaacaattgtcattatctcaatgtgtagcatttccttggcacaaaattcgcccaaagatttccttgacgcgcacaatgcagctcgtgcagaggatggtgtcgagccactcgcatggacacgacaccgatcgcagcctacgctcagcaatatgctgactcaaggatcatacagtcgcctagacagcactctcaagggccttatgatgagaacctgcaggccatatacgacgaatgatggggctgtgatacaaagtgatggttaatgcaggtgcttgcgatgacatgcctaacgct

SEQ ID NO: 39867 - DNA, 401 bp, Glycine max
  Clone ID: LIB3065-010-Q1-N1-B11
gtaagaaacactgctacagtccctgaaactgatattcaaaaaactttggttgacaatgttacaggaagaaatgccactacattccctgaaactgatactcaaaaaactttggtcgacaattttgtgggaagaagtgcctctacaatccccgaaactgatgataaaaaaactctggctgacaatgatatgggaagaagtgccactacagttcctgaaactgatatccaaaaaactttgcttgataatgttacaggaagcagagacagtgaaaacaatttgcttgacactgttacaggaggcagcgacagaaaatctcaagtacgatcaaataaaccccagagaaagaaagaggtcaaagtacctatgcggttatcaaagcgacttgctggccttgaacctga

SEQ ID NO: 39868 - DNA, 374 bp, Glycine max
  Clone ID: LIB3065-010-Q1-N1-B2
tggatgtgaaaaacagtggcaggggaattccattcatgaccttttatctctttcttcttctcctttctgccatctctgttttgtcccatgcttcctctattgcttttcagattaaaggaaatgtgtatccacttgggtattacacggtgaacctcgccattggcaatccccctaaggcttatgaacttgacattgacacaggtagtgatctcacttgggttcagtgtgatgcgccatgcaaaggttgcaccctacctcgcgatcgacaatataaaccacatggcaaccttgtgaaatgtgtggatcccttgtgtgctgcaatccaatcagcaccaaacccctccctgtgttaacccaaatgagcaatgtgacta

SEQ ID NO: 39869 - DNA, 365 bp, Glycine max; identical to SEQ ID NO: 36643
  Clone ID: LIB3065-010-Q1-N1-B3

SEQ ID NO: 39870 - DNA, 401 bp, Glycine max
  unsure (1)..(401): unsure at all n locations
  Clone ID: LIB3065-010-Q1-N1-B4
agaaatttaagtgaggagctagagaatgatgatgaagtctgctatgtgtgcagtggtggttgtagcacttcttcttctggcggaggtggggcccatggctgaggctgtgacatgcaccccaacagagttgagtccgtgtcttccagcaatcacttccggtgctaaaccttccaatgcttgttgcacgaagctgaagcagcaaaaaccatgcttatgtggctacctcataaacgctagcttgaagcagtatgttaactctgctaatgcccgaataaccgttgcttcttgtgggattccctttccaacttgttaattaattaagccttcttataattaacgtgtgggatatatatatatatatagattaacagtntaattatacacactttgatcctacaaag

SEQ ID NO: 39871 - DNA, 406 bp, Glycine max
  Clone ID: LIB3065-010-Q1-N1-B5
caaggcttggaggctcagtatttgcttgagagggttgagtgcgtcaaggcttggcaaactcaaccctctcactgctttgcttgagagggttgagtttgtcaagcatagcagtgaaggtgagccatgccaattgtgacgactcattggagacggaattccacgttgacgtgaaaaacgaaggctcaatggatgggacccacacccttctcatattctcgaaaccacccccgggaaaatggtcacacattaaacagtcggtgaccttgcacaagacccatgttcctgctggctccaagcatcgacttaatgttaatgttcattcctgcaaacacttgtccgttgtggaccagtttggggttcgaagaatcccaaccggtgaacatgaactccacattggcgatctcaa

SEQ ID NO: 39872 - DNA, 390 bp, Glycine max
  Clone ID: LIB3065-010-Q1-N1-B6
ctccccttccgccgaggaacacaaacaacaacctcaacttaacgcattgtgtgcatgatggaggagatgaaagtttctcggcgggtggagtggtggcagaacatgatgttccccgttcggagggtttggtttgtcgttgccaagcgcctcggcattcgcaaaactgggttactgaagctaagtaatgatgtgagggcatgcgaatatgaggacattcaagtgatgtgggagatactaaacagaaacgaatcagagtttggtcgttcttctagcactaggaaaggcaacaacaagaaagggcattgctggaaattattgaaggtggccaaggtgtcctcaatgcttgttgccgaacatggaccgtgattgctgggtccgtgagaagaaaaa

SEQ ID NO: 39873 - DNA, 348 bp, Glycine max
  Clone ID: LIB3065-010-Q1-N1-B8
ggctaattcctacttatccttgcttgtcttgatccttgtagctctgctcctcacccctcaagggcttgctgatgaatctgattcttactataagccaccagtttacaagaaaccaccagtgtacaagcccaagcccaagccacccattcacaagcccaagccacccgtttacaagcccaagccacccgtttacaagaaacccccttatggtaagtacccaccagttcaagacaacgatcacttctaaaccatgcaacaaggcatgttaatgttaactatctactaaaataaagaggttcagttaacctactacgtacgttgctccttttaattcctaaatcgtaattt

SEQ ID NO: 39874 - DNA, 392 bp, Glycine max
  Clone ID: LIB3065-010-Q1-N1-B9
aagaggtccaagtcaaatcaatacccaagcacctccctaaggcagattgagaatgtaaactctaaggaagaagttgcgtggtactgtgggaagcgcatggcttacatctacaaagcgaaggtaaagaagaacggaagccactatcgctgcatttggggtaaggtcaccaggcctcatggtaacagtggtatagttcgagctaagttcaagtccaatctgccacctaggtcaatgggtgcaagggttagagtattcatgtatccaagcaatatatgagttatgatggggctgtggtagaaagtgatgaataatgcaggtacttctgatgacatgtctagcgctgttctcttggtgcagccgaaatggctgtgccgagcatctgcactgtgtct

SEQ ID NO: 39875 - DNA, 408 bp, Glycine max
  Clone ID: LIB3065-010-Q1-N1-C10
ctcagaccaaatgggctcttgttgttctatgtagacggtgtgtgtgactgtggcatcactggcctctgcagcactctgagccaacccacgcaggccagtggatgtacaatgtggccgaaactacatgcccacatgggcctttgatcacatcaaatatttcaatggcggctctgacattcagcttcatcttgacaagtacactgctactggcttacaatccaaagggtcttacttgtttggtcacttcagcatgtacataaagatggttcctggagattctgctggcacagtcactgctgtctatgtatcttcccaaaacgcggagcatgatgagatagactttgagttcttggggaacagaacaggacaaccttacattctgcaaacaaatgtgttcaccggaggcaa

SEQ ID NO: 39876 - DNA, 310 bp, Glycine max
  Clone ID: LIB3065-010-Q1-N1-C11
caagataagaaaaaagaaaaaatgtttgcagggaaaggggctgtttggttctccagagcggtggcgttggcagcaatcgcggtggtagcttgcgttgggcttacacaggcccaacccgaggccaggttcaagtgcaacagcgcgatacattcccacgtgtcgcgcgctcataagctactctcacccgaacaccaccaccctcggcgacatgcaaaagctcttcaacgtgaaacacattctcgacattgtgggaacgaacaaacttccaaacaacggcaccaaaaccttacccggggggccccaccaaggt

SEQ ID NO: 39877 - DNA, 406 bp, Glycine max
  Clone ID: LIB3065-010-Q1-N1-C12
caagattagagtaaagaaaaaatgtttgcagggaaaggggctgtttgattctccagagcggtggcattggcagcaatcgcggtggtagcttgcgttgggcttacacaggcccaacccgaggccaggttcaagtgcaacagcgcgaacatccccacgtgtcgcgcgctcataagctactctcacccgaacaccaccaccctcggcgacatccaaaagctcttcaacgtgaaacacatcctcgacatcgtgggagcgaacaacctcccaagcaacgccacaaaaacatacgcggtgggccccaacgaggttgtgaaggtccctttcccgtgcaggtgcagcaacaacacgggactctcggaccgtgttccgctgtacaggatcaagaaaggggacacgctgtactaca

SEQ ID NO: 39878 - DNA, 385 bp, Glycine max
  Clone ID: LIB3065-010-Q1-N1-C3
gcagtgatgtgtcataggctaaatttcagaactgcagtattttactgccatgaagtccgtgaaacaacagctttcatggttccattggtggctggtgatggaaccaaaactcaggcacttgctatttgccactcaaatacttctggaatgaatcatcaaatgcttcatcaacttatgggagttgatcctggaactaaccctgtttgccatttccttggaagcaaggccattttatgggtacccaatttatctgtggacactgcctatcagaccaacattgttgcttaattagtccatgcatcttgagcaccatgagaatgagaatgtgtataaaataaattatcatgtgctgtgtgttgtgcaagtactaccttctctagctaga

SEQ ID NO: 39879 - DNA, 324 bp, Glycine max
  Clone ID: LIB3065-010-Q1-N1-C4
gccatgtatgttgcaattcaagctgtcttgtctctgtatgcgagtggacgtactacaggtattgcgcttgattctggtgatggtgtgagccacacggtgcccatatatgaagggtatgctcttactcatgcaattcttcggttggaccttgctggccgtgatttaacagagtacttggtgaaaatccttaccgagagaggatactgcttcagcacctctgccgaaaaggaaattgtccgtgatgtgaaggagaaattggcatacgtggcccttgatttcgaacaagatatggagactactaagagtagttctgcagtgggaaag

SEQ ID NO: 39880 - DNA, 323 bp, Glycine max
  Clone ID: LIB3065-010-Q1-N1-C5
gtgttcaatcttcaaagacttgaattcttcttacttaggttctgaatggctggaatttgctgtggtgttgtcggagaaggtgacactccggctccactcgagccaactactcgcccctccaggcgccggagtttggacatcttacccttaaaatacatcgctgacatggcggtgccgccgtcggatggttcacggaaacgtcccaagctggatctcagggaccgcgataacgtagttcaaaattgcgacgaatccactggacacaaggtggtgaaaaaagaagccaaagtggaaatccacgacaatatttccgaaacgaaaaa

SEQ ID NO: 39881 - DNA, 379 bp, Glycine max
  Clone ID: LIB3065-010-Q1-N1-C6
aaaaatattattaagatgatcaacattattggagcacttgtgctactctttgcattcctctttctcaggtgtgtgtatgcacacgacacaacaacccttgtgcctgcaatcataactttaggtgattctgctgtggatgtagggaacaatgactatcttcccacccttttcaaggctgattaccctgcttatgggagggactctgttaaccaccaacctactgggaggttctgcaatggcaaattagctactgatatcactgctgacacattgagtttcaagacctatgctccagcttatattagcccacatgcttctgggaaaaacctcctaatggaaccaaacttggctgcagtggcttcaggttttgatgaaaatg

SEQ ID NO: 39882 - DNA, 386 bp, Glycine max
  unsure (1)..(386): unsure at all n locations
  Clone ID: LIB3065-010-Q1-N1-C7
ctcgagccggataatgtgtccgattttattagggtaggtggaattcagagactgcaggatggagagtttattgttcaggcaactaaagattgtgttgcaaagacattgaaaagattagaagagaagattcatggccgagtgctgaaccatttgttatatctcatgcgagtttcagaaaaggcttttcaaagacgagttgctttaactcttgctcacctttgttctgcagatgatcaaagaaaaatatttattggatattaagggttggaagtgcttattggggctcctgggttctaataaccccaagcaccagtttgatggagctgtggctttatgcaagttggccaataaagctatgactctgtctcctgtagatgccgnacccc

SEQ ID NO: 39883 - DNA, 328 bp, Glycine max
  Clone ID: LIB3065-010-Q1-N1-C8
atctatatctaccatggagcagaatataacccttctgtctggttagtgaatatgagaatggcttcagatcggaaacttgacactttcgaggaggtggcaaagcacgaccagaccaaggattgctggctcatcatttctggcatggtgtatgatgtcacccctatgatggaggatcatcccggaggtgatgaagtagtggcatctgctacaggtaaagatgcatccgatgatgatgaagatgttgtacacagtgaatctgctagagatatgatggaaaagtactacattggcgagattgatcattaacctgaaccactaaaacgtacct

SEQ ID NO: 39884 - DNA, 354 bp, Glycine max
  Clone ID: LIB3065-010-Q1-N1-C9
ctggagccaaggtcaccaaggctgcccagaagaagaagtgaatcgtgcggtttggttcatcaggggatgtcgtttcttatggttacaataaatgttggtttcttgcccttgtgtcttcggttctaggtagctttgttttcggacatagtttgaagtctccaccatcatctcgcaacttttgttcccagaattgggttcttgatcgacggtggcaagactccttttatcattctggtttaatgtgttgtgtttgtgagaacccctgattacatttttgttaagcgcatcgagttttagggctttgccgttgcgttgttggtttgctttttaaatgtcaactttatatttgtgttc

SEQ ID NO: 39885 - DNA, 403 bp, Glycine max
  unsure (1)..(403): unsure at all n locations
  Clone ID: LIB3065-010-Q1-N1-D1
gttgagggccaaacaagacaacctggatgccggtttcaagccttggggggctttttttacaaacccaattgcctttttttcatggatattccccattaggacttatggagaaacggacactttaattttccaaaaacccatttcactggtttttaattccaaaaggggtgtacaatgaaatgggttgatgggcaatggcgaaaatacggaaaggctttcttggaaaaatgggtattcggaagctacaatgggaggaactatgtctatctggataaagtatctctgttgttgggttttggtttgtggggtctgggcttcctctttagcttatggacaagccatgggcatggntatggagatcatgaatctaaagaagttccagcttgtgtatcaaattggaatg

SEQ ID NO: 39886 - DNA, 326 bp, Glycine max
  Clone ID: LIB3065-010-Q1-N1-D10
cagaaaacggatcgtttcgttggactgatcagatgcagggctaggagcgtagcgtagagataacggcgccatttttaacggtaattggtagaaattccaacttggtctcttgcttactaaatataggacctaataacgattcgctcttagcacttgggtatgtctcgattctgatgtcacacagtcatgaattcatgtaaccgtgacacgaattggtgatatttaacactgctatgcatatatattctatggagtaaaatttgtctattatgaaggcaacattctgaagacgaattattgctggtacaaaaggcactgagacatat

SEQ ID NO: 39887 - DNA, 176 bp, Glycine max
  Clone ID: LIB3065-010-Q1-N1-D11
tatactgaatgttttgggatgaagcttttgaggaaaagagatattccagaggagaaatatgccaatgcttttcttggatttggccctgaacaatcccattttgttgtggaattaacatacaattatggggtgacctcatatgatattggaactggatttggacattttgctatcgc

SEQ ID NO: 39888 - DNA, 356 bp, Glycine max
  Clone ID: LIB3065-010-Q1-N1-D12
gggaagagtcagtatgtcaaatgggcatggcaagaacgtgtagggttaaattcgttcaacgattctctattctttgatccatctatccgtacttatttcacgaattacatcaagactgtcttgaccatgaaaaatactatcaccggaatcgaatatagaaatgaccccagcattcttggttgggaattgattaatgagcctcgatgcatgtctgatccttcaagtgacactctacaaggatggatagacgaaatgtcaacttttgtcaaaatgattgacaagaaccatctgttgactgtgggtctcgaaggtttttatggtccaaacgatccacaatgtgcaactgtcaaccctga

SEQ ID NO: 39889 - DNA, 313 bp, Glycine max
  unsure (1)..(313): unsure at all n locations
  Clone ID: LIB3065-010-Q1-N1-D2
gtgagtgatcggcgttcactagatccttcataagccgtcatgatcatcatcatcatcaccgttgattgaagaagattccgatcagaaacatcgtcatcggaaggcctgaaaaggctactcaccccgacacgttgaacgcgtggttggctgagttcatgtgcaccttgatcttagtgttctgcggttcaaggtccggcatcgnctacgacatgctcaccgtcaacggtgccgncactgccgccggcctgatgtacgatttcattgtccatgctttcgccctgttcgtcgccgtcttcgtcggggccaacatctt

SEQ ID NO: 39890 - DNA, 297 bp, Glycine max
  Clone ID: LIB3065-010-Q1-N1-D3
atccattgcacctttctcttcctccgatggctaatctctcactcttgttcttcggtctcctcctattctccgctgccgtagccaccgtcgaacgaatcgacgatgaagacaaccttctgatccgtcaagtggtgccggacgcggaggaccaccacctgctcaacgcggagcaccacttctccgccttcaagacaaagttcgccaagacctacgccacgcaggaggagcacgaccaccgcttccgtatcttcaagaacaacttgctccgcgccaagtcgcaccagaaattggacccct

SEQ ID NO: 39891 - DNA, 167 bp, Glycine max
  Clone ID: LIB3065-010-Q1-N1-D4
gatcattatgtattggtttcttgtgttttggaacaatttgggaattgtggtttttatttttccttatctaagggaaaaaattgaaacgctgtccccgaacaattttgttcttgcacacttttcagaggattaatgagtagctattgctctacttaagtcgtgatttt

SEQ ID NO: 39892 - DNA, 405 bp, Glycine max
  Clone ID: LIB3065-010-Q1-N1-D5
caaggatttgaccaagaaactgctgcagttgtaatggctagatttgcttctctgaaaatggagagtgaggaaacatttgatgctacacggtggttggatcggtttctcattcgcctctgttctaaatttggtgactaccgcaaggatgatccatcgtcttttacattaaacccatcattttcacttttccctcagtttatgttcaatctgcgacgctcacagtttgtacaggtttttaacaacagtccagacgagactgcatatttccgcatgttgttagacagggaaaatattagtaatgctgccgttatgaatcaacccgtaattgatatcgtattcatttaatgcactgcctgcaccagcattgttagatgtggcttccattgctgcagacaagattttgtt

SEQ ID NO: 39893 - DNA, 393 bp, Glycine max
  Clone ID: LIB3065-010-Q1-N1-D6
cgtttgatcgctaacggaaccgaagccgaagccggtttgattcccgtttttccctctctcactttccccaaccactactccatcgccactggcctctaccctgcttaccacggcatcattaataaccacttcaccgatccactctctggggaacccttttacatgggtaacagccatgaccccaagtggtggctcggggaacccttgtgggaaactgtggtaaaaaacggcttaaaggctgcaacttatttctggcctggttctgaggtaaataaaggtccttggtcttgtcccttcaaatattggcagcactattaatccttcggttgcgtttgaggatagggttgatgcggttttggggtactttgatttgcctagtgatcagattcctga

SEQ ID NO: 39894 - DNA, 399 bp, Glycine max
  unsure (1)..(399): unsure at all n locations
  Clone ID: LIB3065-010-Q1-N1-D7
atcacatactatcaacactataaacattgattctggctctttgctgcagcgagaccaatatgtctttcactgcaaccaagttttcaccttgtcctctacctctcacttccaccacccccagatccaatgacaagcctctctctttctgcttcgatcactccaaacccaacccttcttgctccttacttggatccactcgcaagcttcttcgcttcaatgctctcgctacgcctcatgctcaccctcgtgcttctgcttcccctgctgctgctgttcttctcgaacgaacctncaatctgcttgtcacaaaagatgaaaggttggaactctatgaagacatgatattagggaggttttttgaggacaagtgcgctgagatgtattataggggcaaaatgt

SEQ ID NO: 39895 - DNA, 367 bp, Glycine max
  unsure (1)..(367): unsure at all n locations
  Clone ID: LIB3065-010-Q1-N1-D8
atcacataataacaacactataaacataagaaaaaagggtctgtgatgcaacagagacctaaaagtctttcactgcaaccaagttattcaccttctcctctacctctcacttccaccacccacagatccaatgacaagcctctctctttctccttcgatcactccaaacccaacccttcttgctccttccttggatccactcgcaagcttcttcgcttcaatgctctcgctaggcctcatgctcaccctcgtgcttcttcttcccctgctgctgctgttcttctcgaacgaacctncaatctgctagtcacaaaacaggaagggttgaaactctataaagccatgatattaggaaggttttttgagg

SEQ ID NO: 39896 - DNA, 405 bp, Glycine max
  Clone ID: LIB3065-010-Q1-N1-D9
gagaagagagatggatccagacgcgttggcaaaggcattcgtggagcactactacagcaccttcgacaccaacaggaacggcttagcgaatctctaccaggagggttccatgctcactttcgaagggcagaagatccaaggcgcttccaacatcgttgccaagctcacctccctcccttttcagcagtgccaccactcaatctccaccgtcgactgccagccctccggcgtcaacgccggcatgctcgtcttcgtcagcggaaaccttcagctcgccggcgaacagcacactctcaagttcagccagatgttccatttgataccaacacctcagggaagctattatgtgttgaatgacatattccgtttaaactatgcatgaagatgtcatatgacccggaaggc

SEQ ID NO: 39897 - DNA, 382 bp, Glycine max
  Clone ID: LIB3065-010-Q1-N1-E10
agtgagtaggctgccttttctctcttctttctctgttgcgttttgtgaaatctaattcgacatggcgtcacgggacaacaagaaggcgtccagcagccgagccggccgaattcgcaccctctccgatctgaaccgtccctccgccgattccgacagcgactccgatggccctcaggagtattacaccggcggcgaaaagagtggaatgcttgtccaggatccttcaaagggaaatgatgtggatgaaattttcaatcaagctaggcaacttggggctggtgaaaggcctcttgatcagcttcaagagcctccaaggtcaactagctttactggaactggcaggttactctcaggggaaactacacgatctactaataatcag

SEQ ID NO: 39898 - DNA, 404 bp, Glycine max
  Clone ID: LIB3065-010-Q1-N1-E11
tcaagatcggctttgctattcctcctggtttgagccctgctgagcttcttgactcgccggttctccttaattcttccaacattctgccatctccaacaactggagcatttgttgctcagagcttcaattggaagagcagttcaggggggaatcagcaaattgtcaaggaagaagacaaaagcttctcaaatttctctttccaaacccgatcaggacctcctgcttcatccacagcaacataccagtcttcaaatgtcacagttcaaacacaacagccatggagttttcaagaggccacgaaacaggataatttttcctcaggaaagggtatgatgaaaactgaaaactcttcttccatgcagagtttttcccctgagattgctagtgtccaaactaaccatagc

SEQ ID NO: 39899 - DNA, 394 bp, Glycine max
  Clone ID: LIB3065-010-Q1-N1-E12
ggccgtcggaaagaacaagcgcatctccaaagggaaaaagggtggcaagaagaaggcagctgatccctttgccaagaaggattggtatgacattaaggccccttctctttttcaagtgaaaaatgttggcaaaaccctcgtctctcgtacgcagggtaccaagattgcttctgaaggacttaaacatagagtgtttgaggtctccttggctgatcttcaaggggatgaggatcatgcattcaagaagattaggttgagagctgaagatgtgcaagggaagaatgtcctgacaaatttctggggaatggatttcacaactgacaagctgaggtcattggtgcgaaaatggcaaactctaattgaagcccatgtggatgtgaagacaactgataac

SEQ ID NO: 39900 - DNA, 367 bp, Glycine max
  Clone ID: LIB3065-010-Q1-N1-E2
gggactaacattaaggaactttggtcccaaaaagagggaagagcatggtggttcatcaagattcagttttggaagcagctttcggaaaacgggaaagtacgtcaaggaagaagaattcctcattgaaaaaggagcagaagatagtgatggtaatcagaagggatatcacaaacacaaccacaggattactatatctgatgttgtgttcaagcacaggtggagcaacgtgagttcttcagaccttatgtttctgaattcggagatgctgaacgatgcatcaagcaacagattcagcaacttggaatcaaatgctgacatgatgtctagtacaagaagggtggtggaaaatgagcaaattatgaatatt

SEQ ID NO: 39901 - DNA, 365 bp, Glycine max
  Clone ID: LIB3065-010-Q1-N1-E4
tcttaacttaacttctggttcccaactttttttttcaaaggccacccagccttttttttaccggtcatgggccaaggcaaaaaccggatcaacggatttggaaagaattggccgtttggttgccagagtcgctctgcaaagagacgatgtggagctcgttgccgttaacgaccctttcattaccaccgattacatgacatacatgtttaaatacgacagtgttcacggacactggaagcatcacgatgtcaccgttaaggacgagaagacccttctcttcggtgacaagccagtcactgtttttggacacaggaaccctgaagagatcccatgggggtcaactggagctgatatcattggtgagt

SEQ ID NO: 39902 - DNA, 396 bp, Glycine max
  Clone ID: LIB3065-010-Q1-N1-E5
acgacgcacgcagcagcatcagcttctactcgtgtaatctctgcgtgggctacaatggattccggtgtccaaggttgcatcttagccactttaattctccacgacgaggaaatcccagtcaccgctgagaagatcaacgctctgttgaaggcttctaatgtctccgccgagtcttactggcccagcctcttcgccaagctcgcccagaataagaacatcgaagacctcattttgaacgccggcggtggtggggccgccgttgcagttgccgctcccgtcggcgatggtggtggtgccgctgctgcagccgcacccgtcgccgaggaaaggaaggaagaagtgaaggaagaaagtgacgatgacatgggtttcggcttgttcgattagatcttttat

SEQ ID NO: 39903 - DNA, 289 bp, Glycine max
  Clone ID: LIB3065-010-Q1-N1-E6
gggtgaagtcggggaaacgtgtgggggtgagcttggggagggtgcgggagatttggtggtgagggtggaaatgagggtgtcgagcttatgggtcatggtttgcaggttttcactgaaactgagttgatgaatggtgagcttatctatggcgtcttccaacttttcagagttggacttcgaggccatgatagcgagacgagagcaccaaattgttaggaatgcgtttataaattctgggcttcgagggccagactttcctgccttatttcatttaaatggtatttataat

SEQ ID NO: 39904 - DNA, 370 bp, Glycine max
  Clone ID: LIB3065-010-Q1-N1-E7
ctcgagccgattcggctcgaggcagaggccgtttaccacgcgcgtgactaccacgcgcgcatcgtctccctcatggaccagctctcacgcgcccagagcctcctcctcaagaccggtgcctcctccatttcgcttccttcctcctcctaaatcataatcacacacacacacatatatatacaaagattgtaataaatttttttcattttctggtcagagtcattgtgattattagatgtatatgatgatgatcatgatcaagatgatccatatcgccggggatcgaatgtgttgtaaaattttgggggatgatggagaatagtttgattggtttagagattcgagacctaattaagtaacgttcttcaaa

SEQ ID NO: 39905 - DNA, 400 bp, Glycine max
  unsure (1)..(400): unsure at all n locations
  Clone ID: LIB3065-010-Q1-N1-E8
cccaaccatgctgacgctgattacctcatcgttatccttaacgggactgccattctttccttggtgaacaacgacgacagagactcctacagacttcaatctggtgatgccctgagagtcccctcaggaaccacatactatgtggtcaaccctgacaacaacgaaaatctcagattaataacactcgccatacccgttaacaagcctggtagatttgagagtttcttcctatctagcactgaagctcaacaatcctacttgcaaggattcagcaggaacattntagaggcctnctacgataccaaattcgaggagataaacaaggttctgtttagtagagaggaagggcagcagcaaggggagcagaggctgcaagagagcgtgattgtggaaatctcga

SEQ ID NO: 39906 - DNA, 119 bp, Glycine max
  Clone ID: LIB3065-010-Q1-N1-E9
catcctcctcgttggcctgctcgcctcttggaccttcctctacctcttccgtccctcggatcaacctctcgtcattctcggccgaacattctctgacttcgaaaccctagccctcctct

SEQ ID NO: 39907 - DNA, 305 bp, Glycine max
  Clone ID: LIB3065-010-Q1-N1-F1
catgaaactaacaatcagatttggaacgctacacatcaaaggtaaatcgagccaacgcatttaattgtaagtgtcttcatattacctgtgttctgtcacatctttttgcataatattggcactaagtcttttttgatagaaattgtgaagatgtactgttatcattgtatcaactatattgtgcccttctttttttatttgatttggcaaacacggctacttttctccaaataagatggatcatttgtattgccggctttgtgcacaattatctacttgtaagaagtccaatttcgggcaacaac

SEQ ID NO: 39908 - DNA, 368 bp, Glycine max
  Clone ID: LIB3065-010-Q1-N1-F10
gtggtttcagtgagtgatcggagttcacttgatccttcataaggcgtcatcatcatcatcatcatcaccgctgattgaagaagatgccgatcagaaacatcgccatcggaaggcctgaagaggctactcaccccgacacgttgaaggcggggttggctgagttcatctgcaccttgatcttcgagttcgccggttcaggttccggcatcgcctacaacaagctcaccgacaacggcgccggcactcccgccggcctcatctgcgcttccatcgaccatgctttcgacctcttcgtcgccgtctccgtcggcgccaacatcttcggcggccacgtcaaccccggcgtcaacttcggcgccttcgtgggc

SEQ ID NO: 39909 - DNA, 320 bp, Glycine max
  Clone ID: LIB3065-010-Q1-N1-F11
gaatttagatcaaaacttggaagctccttttgccatggccactagtgctgcacccaaacccaaccaatattatttcttcacattaatccttcatttctgtctcctccttatcatttccacatgcactactcaacaacgcttcaaacaagcccccaaattctacaacttccccagctgtcccaccattcgcctctcacccaccgacacgtgttccgacgaggcagtccacgtggccatgaccctggacgtaacctaccttcgtggcttcatgggcgccatcctctccgttcttcaacattgcttctgccccgaaaacatta

SEQ ID NO: 39910 - DNA, 383 bp, Glycine max
  Clone ID: LIB3065-010-Q1-N1-F12
cgaaggacaatgagtgttcggtccaaaaactggaactgtgtattctatgcagattggtaccatcccattcaagctggcagcatcgacggcaccgatgttgctcctcacgataacgccgtttatcgcgctcaactctgttcctacatcggcctctatgacccatttggtgatcccaaggccactggagacccttattgcactctctttgtcgctcgtctatgtcgcctcaccaccgaagatgatctccgcaaggtcatgactaagtatggtcgagtgaagaacttacgcttggatagggacattgtgacgggagcttctcgcggtcatgcttttgttgaatacgagactgaaagggagatgcgacgagcatatatggatgctca

SEQ ID NO: 39911 - DNA, 412 bp, Glycine max
  Clone ID: LIB3065-010-Q1-N1-F2
gtatagccctacctttccgttcaagatgcacatcttcgtcaagacgctcaccgtcaagaccattacccttgaggtggaaagctctgacaccatagacaacgtcatggcctagatccatgactaggaacgaatacctccggaccatcaacgattcattttgaccgtatagcatctagatgacgggcgtacctttgctgactactacattcagaaggagagctctcttgaccttgtgctgcgtctgctcggaggcatgcataccttcggtaagacactcaccggcaagaccataaccctagaggctgaaagctacgacaccatcgatgacgtgaaggccatgatccaggacaagggaggtatccccccggaccagcaacgtctcatcttcgccggaaagcagctcgaggacggc

SEQ ID NO: 39912 - DNA, 411 bp, Glycine max
  unsure (1)..(411): unsure at all n locations
  Clone ID: LIB3065-010-Q1-N1-F4
gccgatttccttgagaatgacattcgtgtgaagccagatcttgatgcacttggctctcttggcgatgaagggtggtattgtcttagagcaatactctgggctgccaactatgaactccctaaaactgtaatagcctcacgcaatcctgagcttaataaagctggggtgatattgtcttgtggggcttctttacactgggaagatgggaaagtagcaaccttccactgctccttcttgaccaacttgacaatggatataactgctgttgggacaaaaggaacactacatgttcatgacttcattatcccttatgaagagaaggaagcatcgttntatgcagctacagaaacaggctttgatgaccttgtgtcaaagtggatcccacagccaagcaagcatataataaaaact

SEQ ID NO: 39913 - DNA, 395 bp, Glycine max
  Clone ID: LIB3065-010-Q1-N1-F6
tcttagcatttggcaagatctgatttccctcttcacaaggagagaaatagaaaggcatatgatcttcttcaagttgcaatctttttagagagagagggttagaagaacaacatacttgagatctgtcactgtgtttgagttcaggatgccatcggattttctggtagaaaattaaattgctttgctctgtgaggctctagatcttcaaagtttgcttacttgttcttttggtgcataggatcacattaaggaatgccaaatggggacgaaggggaattggttctccagtgtgaagaaagctctcagtcctgactcacaggagaagacagaacagaaatcacgtaaatctacgacgaaatggtttgggaagcacaaattggagacttcagtctcat

SEQ ID NO: 39914 - DNA, 263 bp, Glycine max
  Clone ID: LIB3065-010-Q1-N1-F7
ccttatcatttggcaagatctgatttccctcttcacgagggggggaaatagaatggcatatgatcttcttcaagttgcaatctttttagagagagagggttagaagaacaacatacttgagatctgtcactgtgttcgagttcacgatgccatcgcattttatggtagaaaattaaattgacatgctctgtgaggctctagatcttcaaagcttgcttccttgttcctttgctgcataggatcacattatgagaatgccaaat

SEQ ID NO: 39915 - DNA, 408 bp, Glycine max
  Clone ID: LIB3065-010-Q1-N1-F8
gcagaaggaggagaagcagaaagaggagacgaagcaatggcgccgaagaagccccgaaccacgtcgaggaaccctgatttggtcaggggaattggcaaatattcgaggtcgcagatgtaccacaagaggggcatctgggccatcaaggccaaaaacggcggtgttttgcccctccacgatcccaagcccaaacccgaggccccggcccagaagccgcccaagttctacccggccgatgacgtgaagaagcccctcgtcaacaagcacaagcccaagcccgcgaaactcagggctagcattactccagggactgttctgatcctgcttgctgggaggttcaagggaaagagggttgttttcttgaagcagcttccatctggattgcttcttgtaacaggtccctttaag

SEQ ID NO: 39916 - DNA, 285 bp, Glycine max
  Clone ID: LIB3065-010-Q1-N1-F9
aaagggtcttcttgtacaaggatttggttccttttggggccatggtgaccatggaatgcctcaacgtagccttgaatactctgatcaaaagcagtaccttgagagggatgagttaccatgtctttgatggctatgcttatgctgatgctgatatcggtctcattcctggaccctttatttcccaaaggtgcagatcaagagtgcttcatacgctgaacttgccctatactacgcaaaatcggacttatcgggctaataaggtgcgcttgtcagatcgcgggatac

SEQ ID NO: 39917 - DNA, 324 bp, Glycine max
  Clone ID: LIB3065-010-Q1-N1-G1
atcgtgagatgtacggtagcagacattccgctagttgccaggatgagaacacttgtttctgcagagaccatgaacatccccgacggcgtgagcgtcaaggttaatgccaaggtcatcgaaattgaggaccctcgaggaaaattggtgcgagacttgaagcacttgaatctcgatattcagctcatcactgacgaaaacggttaacggaagctgaaggtggaggcctggctcggttctgggaaaacattcgccggcattcgcaccgcactgtaccacgtggagaatctgatcaccggcgttaccaatggctaccgctacaaaatg

SEQ ID NO: 39918 - DNA, 350 bp, Glycine max
  Clone ID: LIB3065-010-Q1-N1-G10
aagatgagaaaaagcaaccacttgatcggtctcttaaacttgctaacattcctgctgtcgattccgatcctaggaggcgggatatggctgagcagcagggcgaacaacaccgactgcctcaagttcctgcagtggccgctcatcatcatcggcgtcagcatcatggtcgtgtccctggcggggttcgccggcgcgtgttaccgcaacaccttcctcatgcggctctacctcgtcgtcatgttcctggtcattgccgttctgatcgggttcatcatattcgcctacgttgtcaccgacaaggggtccggtcggagggtgatgaaccgcgcttacttggagtattatcttga

SEQ ID NO: 39919 - DNA, 256 bp, Glycine max
  Clone ID: LIB3065-010-Q1-N1-G11
gttcttgtgattcatggaacggctgacgatgtagtggattgctcccatggtaagcaactttgggaaaattgtaaacaaaagtacgagcccttatggattaaaggcggaaatcactgtgatttggagctttaccctcaatttataaagcacctcatgaaattcatgacggtcattgtgaagtcaccacatcaaaaaactggatctgaccgtttccctgatcaacttgacaaacctaggaacagcatagattttggag

SEQ ID NO: 39920 - DNA, 396 bp, Glycine max
  Clone ID: LIB3065-010-Q1-N1-G12
aaacttacaaaacaatggcgttcgcttgtttcctcggcagaggcctcttcgctgctgtcttcatactctctgcttaccaacaatttaatgaatatggagttgatgggggacctgctacaaaagcactcagacctaagtttgatgcctttacacatcaggtgcattctcaagtgggctatcaaattacagagattaatctgaaatgatcaattgctggggctattgctctgaacggtcttgaaggggttcttttcatatatggcagctctcatggagctttgcttctgctactgcaccagctgattgctactccaatgcattatgattgctacaatcatgatagtgaggacagagaatttactcaactgttcatcaaatttacacagaatatggctc

SEQ ID NO: 39921 - DNA, 410 bp, Glycine max
  Clone ID: LIB3065-010-Q1-N1-G2
cacataagtgctgaaaagggtggagagtttttcatagacactgagaaacatatgcgaactgtagctactgcagcaagtccaatacctagtccacaaagtagtggagactttggtgcgctgagtccattggttggaggtttcgtcatgagttgtagagttcaaggtgaagggaagcgaagtaaaccatcagtacaactggcaatgcgacacgtgacatgcgtggaggatgctgccatcttcatggcacttgcagcagctgttgacctcagtatcgtggcatgtaaacctttccggaggaaggtcaggagaggtttttggcattcgatgtgatcaacaaggcaaatgtatttataagcactgtcggaactgtcaatgctctgcctttgcttttcattgctgcaatgcttaaa

SEQ ID NO: 39922 - DNA, 286 bp, Glycine max
  Clone ID: LIB3065-010-Q1-N1-G3
aaacaaacaaaacaatggcgttcgcttctttcctcggcagagtcctcttcgcttctgtcttcatactctctgcttaccaacaatttaatgaatatggagttgatgggggacctgctacaaaagcactcagacctaagtttgatgcctttacacatcgggtgcattctcaagtgggctttcaaattccagagattaatctgaaatttttaattgctggggctattgctctgaagggtcttggaggggttcttttcatatttggcagctcttttggagctttgcttct

SEQ ID NO: 39923 - DNA, 220 bp, Glycine max
  Clone ID: LIB3065-010-Q1-N1-G5
gttcttcttcggcttcgtttttgaggcagttaagtgcaaaaaaggagggttggaaagagagatactataatagtggtagtggtggctggggaatgagctttggagggtgtgaggcaagtgtgaaactaatggaagggtttaacatgcaggggaatgtggggaggaagagggtgatggtagtggttgatgactcataacatttcaagcatgcattgttgtg

SEQ ID NO: 39924 - DNA, 405 bp, Glycine max
  Clone ID: LIB3065-010-Q1-N1-G6
gtccaggagcaagctgatgacacaacgtcccaggatagcaattctgacattgttgccaaaactccaccttgtaaaagtgggggaattagttctgctacctcaactcctgttgaccatgctactcctgtttctgtgaatgtttctggtcataacttgtctagtgcacctgttgcagtcctacctggttcaaattctgtgcggaatgtcttagagaatactaatgttatcaattcattatctgtaaatcagtctacctctacaaatgaagaagagattaatagcttccctagccggagaccatctccatcgctttctgatgcaacacttttgaagggcagaagcagcctgtcaaatcaagcaacagccagcattcctcttggttctggaaacatggtttctagcaat

SEQ ID NO: 39925 - DNA, 241 bp, Glycine max
  Clone ID: LIB3065-010-Q1-N1-G7
gaacaatagagcatctttcctagttttgtctcaaatcaaacaactctgacggaggatactgctattgctccgcctgaatctccatggctgatccacagccgctgcttctcaacgattccgagccaactcaatttcaaaacacccgaatcgccttccttgacgtctttcgcggcctctctgtttttgtaattaactagctcttttctttctttctttccttgctttctacccaataaattct

SEQ ID NO: 39926 - DNA, 390 bp, Glycine max
  Clone ID: LIB3065-010-Q1-N1-G8
gctagaagcaataagatgaaaatgaaagtgcttgatttgtttgctgctacagttgtggcagcatatgaatgccatggctcagactaccagaagttccctctccaaatgaaaactgggtttggtgggcaatacagcaatgaggtggcatgtgccagttggaggcttggcgtggaagcaaacaacgtagtcaagtggcaaactgttcctgcagcttgcggagagtacatagctgactacgttctaggagaccaatatagatcagatttcaaaacagttaaccaacaagcttatttctatgctaaatccctcaaactcaccaacaaagatgtctttgtcttggacgttgacgacactactctgtctaatcttcagtattttgctaaccatgga

SEQ ID NO: 39927 - DNA, 387 bp, Glycine max
  Clone ID: LIB3065-010-Q1-N1-G9
cccaattcctaattgtttaaacctaattctcatttcttgatcggtcgattcttctcctcctaaagatgcagatcttcgtgaaaactttgaccggtaagaccatcacccttgacggggagtcctccgacaccatcgatgacgtgaaagctaagattcaagacgaggaacggatcccacctgaccagcagagacttatctttgggggttaacagcttggggatggtcgaacccttgtcgactacaacataccaaaggaatccactcttcaactcgtgcttcgactcaggggtggcatgcatatctttgtcaagactttgactggcaagaccatcaccctcgaagtcgaatcctcggacaccattgataatgtcaaggccaagatccagg

SEQ ID NO: 39928 - DNA, 377 bp, Glycine max
  Clone ID: LIB3065-010-Q1-N1-H1
gtttccattcccaattcccaatcgtgttgggtggccatggaggctgtactggcgaactatgcctcttcagatgaagaagaagatcaacagccatccccaccaaaaacgacgacgttttcctcccttcctcaacccaaactttctctgtttcaatcccttcctcaacccaaatcttctctgtttcaatcccttcctccacccagacaaccttccaccgaaagctcttccctccctaaccctaaccctaaccctgaccctaaaccccaaatcgaaaagacacaacccaaacgcgtcgtgcaaatcaggcccccaatcatcccttttccacaacctttaacacacgacgatgacgacgatgacgacgacgacgacgaaga

SEQ ID NO: 39929 - DNA, 388 bp, Glycine max
  Clone ID: LIB3065-010-Q1-N1-H10
gcttacagttcctataattttttttctccattagatgaccaagctctgcaactttgcttctcaacatggagtatcgtctcctacccatttttactttactcaatattgcactggtggcaacccatgctgctttaccccctgaagtttactggaagtcggtgcttcctactacgccaatgccaaaagccatcactgatatcctttactctgattgggtggaagagaaaagcagctcagtgcatgttggaggtggaggcgtgaacgtgcatacaggaaaaggaggtggcagtggcaccactgtcaacgttggtggaaaaggaggcggaggcgtaaacgtgcatgcaggccacaagggaaagccagtgcatgtttcaattggctcaaagtc

SEQ ID NO: 39930 - DNA, 406 bp, Glycine max
  Clone ID: LIB3065-010-Q1-N1-H11
gaagccattgctagggtacggaatgagaaagctcggagatacttgtgttgcatgcgtaagaagaagccagttcctttctcccaaaagtttcctaatgtagacccccttgctcttcgtgtgttagaaagaatgctggcatttgaacctaaggatcgacctactgctgaagaggctctagcatatccatattttaaaggcttggccaaggttgagagagaaccttctgctcagccagttaccaagatggaatttgaattcgagagacgtaggataacaaaggaagatgtgcgagagcttatataccgagagattctggagtaccatccaaagatgttaaaagaacatctagagggagaagagccaacaggattcatgtatccaagtgctgtggaccacttcaagaaac

SEQ ID NO: 39931 - DNA, 411 bp, Glycine max
  Clone ID: LIB3065-010-Q1-N1-H12
gttttgaacctgaattgcctgcaaggaaattggaagcaattgagaggatggggtttgggctgctgaacaaggttgctatggtttttcctcatgtgttttggggggaagatcgagacacatttggatgtctcaatgaacatagtcatcaacgtggggaatttttcctattttactgttaccatacagtttctggaggtccagcacttattgcgctggtggctggtgaagctgcacaagcctttgaatccacagatgcttccattttgctgcatcgggttttgaccgtgttaaaaggaatatttcatcccaaaggcatcattgtgcctgatccaatacagtcaatttgtacaagatggggcagtgatcccctttcttatggttcctactctcatgttagcgttaattcatctg

SEQ ID NO: 39932 - DNA, 407 bp, Glycine max
  unsure (1)..(407): unsure at all n locations
  Clone ID: LIB3065-010-Q1-N1-H4
ctatactctatttttcgcgtcacataaccaaaaaaaataaactgggggagaaacatgttgtntgatgttggggactatgcttnctattgntctctgcatttccacttgcgttctctgagagatgccacccacaagacaagaaagcgttgctccaactccagaaggacctcggcaacccttatcacatcatatcctggaacgcanaggaggattgctgcgagtggttctgctgcgttaagtgtgacgagaaaacaaaccgcgtcattagcgttgccttatcatccccttttccagacaccaatctctcggcccaaatacctncctctgtgggtgacctnccttacctcgagtccctcgtcttccacaaattccccaaactcgtgggcccaatccagcccgcaatcgcc

SEQ ID NO: 39933 - DNA, 385 bp, Glycine max
  Clone ID: LIB3065-010-Q1-N1-H7
gaaaactagtaatatggcttcaagaactatatgttttaccattcaagtgactcttgtagtagcttttctaacatcaaaggttgttttatctgatgacactgtgccaattcccgcgaacaaagcacaattaggtgaatggtataatactaatgtggggcctttagatcaaagaaagagcaccatggacccagcattggtgactgctgaagaaggcgctaaggttgtaaaggtgatgcaagatggcagtggggaattcaagaccatcactgatgccattaaaagtatacctagtgggaacactaagcgtgtaattatttacattggagctggaaattataatgagaaaatcacaattgagaagacaaagccttttgtcaccttgtat

SEQ ID NO: 39934 - DNA, 392 bp, Glycine max
  Clone ID: LIB3065-010-Q1-N1-H9
tgcagcacatcctgtacctgctcaagaaaagatgagtgctctggttgaagctttgttcgagggaactgagaaaggttttgctaaagaagctgataaaaagaagaactacttttctgttgctgttgcggatgagggatcccagccgttgttgcttcatgctattgaagagttttcttgcaagtctacttcaaatgctttgaaggaggttgccctggttctaaaggcactctacgatgctgatgtgttagaggaagaacacatagtgcagtggtatcaaaagggactgaagggtgataacaagaactctaggatttggaagaatgctcaacctttcattgattggcttcagaatgcagaatcagataccgaggaagaataaattgcctacattc

SEQ ID NO: 39935 - DNA, 218 bp, Glycine max
  Clone ID: LIB3065-011-Q1-N1-A1
ttggacttgaaccttgctctcaagcccaaggattggagccggcagggggtcgaccgcgggaggtaccgcccctgcgacttccgaccgcacctgcagcgccagactgaacgcggcgacgccgctcagcagccactggctgcccgccccttagggtgccactcggcagggaaccactgtcatcgacgccatcaacgcctaccctaagaaccaccaaggca

SEQ ID NO: 39936 - DNA, 398 bp, Glycine max
  unsure (1)..(398): unsure at all n locations
  Clone ID: LIB3065-011-Q1-N1-A10
gagaaaagttagggttcacaacttttccttttccttttgcttgcgaatctgaatcaaataatcaatcatccattcattattcatcatgtcgtcggcgaagaaaatcacgctgaagagttcggacggcgaggctttcgaggtggaggaggcggtggcgctggagtcgcagacgataaagcacatgatcgaggacgactgcgccgacagcggcatccctctgccgaacgtgacgagcaagatcctggcgaaggttatcgagtactgcaagaagcacgtcgaggccgcgaatcccgaagacaaaccctncgaggacgatctcaaggcctgggacgctgaattcgtcaaggtcgaccatgccacgctcttcgatctcatcctggctgctaactacttgaaca

SEQ ID NO: 39937 - DNA, 172 bp, Glycine max
  unsure (1)..(172): unsure at all n locations
  Clone ID: LIB3065-011-Q1-N1-A12
catgaagcnctgataatgcatgtagaacaaagctctgaatgggacgttgacaaccggaacgcgtatgatgtaccgatcctcgatgtcatacataacatctactactaaactctgcacttatgctcaatcaatttgcataccaaactcatctcattgagaagaactagatctc

SEQ ID NO: 39938 - DNA, 417 bp, Glycine max
  unsure (1)..(417): unsure at all n locations
  Clone ID: LIB3065-011-Q1-N1-A2
aaacaactgtctaataatgcttatgaagcttccaaaagaaaagggagtgggaggaccaagatttgttcaatccaaacgccattacacagttcacggctgcaacgaatgaagatatatctctctcttctcacctctaattgaccttcaactaccaaaagttcaaaaccttgctagtcatatattgctaagattaaaactaaaaaatattaaacggcttggttgcgcggaactgagatatcaataacaaaaggccttcataaaagtctatttttcatgaacaagagggcaatactcagggtaccacatattgcctcggacatactccacggtttcttcttttgacatgtttgctagctctntgaaccctacatcaccatgtccttcagcctgcttttctgcaaccgctgcatgtacaac

SEQ ID NO: 39939 - DNA, 351 bp, Glycine max
  unsure (1)..(351): unsure at all n locations
  Clone ID: LIB3065-011-Q1-N1-A3
ggccgacttcggccgcctcgagatcgagctggccgaggttgagatgccnggcctcatggcctgccggaccgagttcggcccatctcagcccttcaagggggcccgcatcaccggcttcccttcacatgaccatccagaccgctgtcctcatcgagaccctcaccgctctcggcgccgaggttcgctggtgctcctgcaacatcttctccactcaggaccacgccgncgccgccatcgcccgtgacagcgccgccgtcttcgcctggaagggtgagaccctccaggagtactggtggtgcaccgagcgcgccctcgactggggccccggcggcggccccgacctcatcgtcg

SEQ ID NO: 39940 - DNA, 329 bp, Glycine max
  Clone ID: LIB3065-011-Q1-N1-A4
ggccgacttcgtccgactcgagatcgaactggccgacgttgagatggcgatcctcatggcgtgccggaccgagttcggcccatctcagcccttcgaagggggcccagcatcaccggctcccttcacatgaccatgcagaccgctgtcctcatcgagaccctcaccgctctcggcgccgaggttcgctggtgctcctgcaacatcttctccactcaggaccacgccgccgccgccatcgcccgtgacagcgccgccgtcttcgcctggaagggtgagaccctccaggagtactggtggtgcaccgagcgcgccctcgactggggcccccg

SEQ ID NO: 39941 - DNA, 436 bp, Glycine max
  Clone ID: LIB3065-011-Q1-N1-A6
aaaatgacggaactttaaggccacttgccatagagttgagtttgccacatcctcagggagatcaatctggtgcttttagtcaagtttttctgcctgcagatgaaggtgttgaaagttctatttggctgctagcaaaggcttatgtagttgtgaatgactcgtgctatcatcaacttgtcagccattggttaaacactcatgcagttgttgagccattcatcatagcaacaaacaggcatctcagtgttgttcaccctatttataaactccttcaccctcactatcgtgacaccatgaacataaatggccttgctcggttatcactggtcaacgacggtggcgttatagaacaaacatttttgtggggaaggtattctgtggaaatgtctgctgtagtttacaaggattgggtttttacagatcaagcattgcctgc

SEQ ID NO: 39942 - DNA, 413 bp, Glycine max
  Clone ID: LIB3065-009-Q1-N1-A5
gctaggcatctctgaaatcaggcaagtgaaaaccaaaaatagaatggtctcacagacagttgaactcttaaagaatgagattcctctggagcaggaatcagtggttttagctgaagatgctgtaaatggtctcgttcttgtggacatcataaatggcttttgcacagttggtgctggaaatctggctccaagagaatccaatacgcagatttcgggaatgatcagtgaatcagcaaggctggctagagtgttctgtgagaagaatttgccggttatggctttcctggattctcaccatcctaacaagccagaggacccttatccccctcactgtattggtggctctgatgaatcaaatctggttccagcattaagatggctagagaatgaacctaatgtaacaatcaggcgaa

SEQ ID NO: 39943 - DNA, 390 bp, Glycine max
  Clone ID: LIB3065-007-Q1-N1-A2
ctgaaaggttcacctatcgataccttgatccgttcctgtcttttggaggagcgatctggtgcggcagcatacaattatgatgcccctggtgcttcctacaccctcaagtggaccttccacaatgatcttggtcttgtttttgtggctgtttaccaacggatccttcacctcttatatgtggaggatctgcttgctatggtgaagcgcgagttttcgcaagtttatgatcccaaaacgactgcataccccgatttcgatgagacctttaggcagctgaagatggaggccctggctcgcaccgaggatttgaagcggtcgaattcaaatcctgttgccgggaatgcgaagaagcaggtgcaggggaatgataaatctggatttgagggaggg

SEQ ID NO: 39944 - DNA, 201 bp, Glycine max
  Clone ID: LIB3065-007-Q1-N1-A3
aaaagttagggtttgtaccttggcctttggcttgcaaatctgatgggattagtattcattcattcttaaggtcgccggcaaaaaaaatccccctgaaaagtccgaccgccaagctttccaaggggaccaagccgttgcccctgaatcttaaaccattaagcccctgatccaagaccactgggcccaccgcggcattccttt

SEQ ID NO: 39945 - DNA, 458 bp, Glycine max
  Clone ID: LIB3065-007-Q1-N1-A4
cacacttacccccaactaacaataattccttcacttgcagaacttaggttctctgttgcatcatcatcatcttcattagtgttagccctaaacttcaccttcaaccatgaccacagtgccaccacacagtgtccaagtgcacacaacaacacaccgctacgaagccggcgtcgtcccgccggctcgttttgaggcgccgcgttacgaagccggcatcaaggcgccctcttccatttaccattccgagagaggtccgacgacctctcaggttctcgcagttgtcgccggccttccggtcggcggcatcctcctgctcctggcaggactgaccctggctggaactctcaccgggcttgtggtggcaacaccgctcttcatcatcttcagcccggtgctgattccggccacggtcgcaattggcctggccgtggccgggttcctgacgtcgggagtctttg

SEQ ID NO: 39946 - DNA, 226 bp, Glycine max
  Clone ID: LIB3065-007-Q1-N1-A7
aattaccttcagaagctggcgttggaaatgtcacatgtggtaatggaccttgtgggttacccaacactgcttggaataattctgcaattaacaatcgctcctcagatatcaacaaaaggattcgcacagcacttgggaaaggtaagaaaattgtttttcttactagagttgatccttttccagtagctttactggctgttctttttggtgttaaaaatgaaattct

SEQ ID NO: 39947 - DNA, 452 bp, Glycine max
  unsure (1)..(452): unsure at all n locations
  Clone ID: LIB3065-007-Q1-N1-A8
cccaactaaccaaaccagctatggcggcgatgcagaggccactcaggagaaccattgcaatcgccaagctacgcgcgtgcttttcctctctccgacccgccgccgccgccgacatcgtcgcgtctcctccgccgcagctcccgccgttcgatcaccagccgcacccttacaacggtcccttcgccgatgaagtcctcgccaagcgcaaaacgttcctcggtccttccgtcttccactactataagaaacctctgaatatcgtggaagggaagatgcaatatctgtatgatgatagtgggaggcgttaccttgatgcatttgcggngatagttactgtttcttgcggacattgccaccctgaaatcttgaatgccatcacggagcagagcaaacttctgcagcatgctacaaccatatatctacatcatacaataggtgattttgctgagtca

SEQ ID NO: 39948 - DNA, 298 bp, Glycine max
  Clone ID: LIB3065-007-Q1-N1-A9
aacatattctcctctcattctcactcaaaacacaaaatcctaactaaggtgaaaatgaaggcatcacgcattgctttgttcactttggtggtgcttctttttgtggctgaagttcaagtgtcaaaggcagtgacctgcagcccagtgcagctgagtgcatgtgtgagtgcaataacctcttcaacccctccatcaaacctatgctgctccaagatcaaggaacagaaaccatgcctttgccaatatctcaggaaccccaatctaaaaaagtttgttgactttcctaatgcaaggaaag

SEQ ID NO: 39949 - DNA, 271 bp, Glycine max
  unsure (1)..(271): unsure at all n locations
  Clone ID: LIB3065-007-Q1-N1-B1
tcagcatgttccatgcttttgaatttttcgctttgttaatgaaagnctaacgcacctgttctagttgccgcgttggcgagaaatccagtttccgatttgctccattgaggcatattcactattctgcaagggttgcctctactttctctttccatgcaactattcttattaattcgttcaattgtcgattgcacatttaggttgaacgaaccttacggcttgcactgcaccaccattatctcttaaaggacgcccgccctctaatacactc

SEQ ID NO: 39950 - DNA, 363 bp, Glycine max
  Clone ID: LIB3065-007-Q1-N1-B10
ggatctgtatggatctgaaccagatctacacgccgatggtggttttggcctggtctttcatagatctgatgcatggaggctcagatctactgtacagagatactgtagataatcgatgagaagaacgcagatccagccgcttccgcttgttcgatcgctacagacgcttgtatcggattattcatgattgattcataagcagcatgtcttcctccggctatagttgttgcagaactcggatgttgtaaaattagtgtatgatgtgaagctatgggctggaaaatggtgatgtaggagatttcgggacgaaaggcctcaaaacgctttcgtcgttgggttactgagtcctgagtgatcttgtca

SEQ ID NO: 39951 - DNA, 419 bp, Glycine max
  Clone ID: LIB3065-007-Q1-N1-B11
gttgtgtccctcttttaagctatttccttctcttaacacaattggttgtgccaattgccatagtcaccaaccaattaacaaaggtatatatatcatcatatcatcaccaaatgaaaaatattgggttgttttttcttgtggtggtggctacttttgtggtggcagccacagctggtagcttttaccaagactttgaaataacgtggggtggtgagcgtgccaaaatctatgagaatggaaaccttctcacactctcccttgacagagcctctggctctggctttcgttccaaaaaagagtacttgttcggaaaaattgacatgcagctcaagcttgtgcctggtaactctgctggaacagtaactgcctattatttatcttctctggggcctactcatgacgaaatagcctttgagttt

SEQ ID NO: 39952 - DNA, 255 bp, Glycine max
  Clone ID: LIB3065-007-Q1-N1-B12
ggacaaagccccctttatgctttgtttgttatgtaaggaatgactagataaacttggaataaaacttcctctcttttcgtggcccataatttgctttctgcaaatctgggtcttcttcattccaaaaaaaaaaaaaaaaaaaaaaaaaaaaaaaaaaaaaaaaaaaaaaaaaaaaaaaaaaaaaaaaaaaaaaaaaaaaaaaaaaaaaaaaaaaaaaaaaaaaaaaaaaaaaaaaaaacaaaaaaactagaaaaa

SEQ ID NO: 39953 - DNA, 376 bp, Glycine max
  Clone ID: LIB3065-007-Q1-N1-B2
cccgtgtggaggatcccaccattctcatgcttccacatccacacgggccgttcccaatcccttcgcactttcgccagaatccgggtcggacccaggtcgtgggctcctattcgggcatcggcagcgagctcggagagaggggagatagtattggagcagaagccgaagaaggatgacaagaagaagctgcagaagggaatcgcagagttttacgacgagtcttctggcttatgggagaacatttggggcgaccacatgcaccatggcttttatgactcggattccactgtttcgctttcggatcatcgtgctgctcagatccgaatgatccaagagtctcttcgctttgcctctgtttctgaggagcgtagtaaat

SEQ ID NO: 39954 - DNA, 494 bp, Glycine max
  Clone ID: LIB3065-007-Q1-N1-B3
ctatgacgtcgcattgccccctacctaagcttcggattccggttcagggttaaccctttttaaccttcccctttggttcttaaccataatcttggtaagtcccttacctacccccaattttcctttcggaattcctctttttcaattctcgatttcctttcttcctttggggtcttcataatccagatcctctcttcgatctagggtttctggcttaattaacaatcaaatgtttaagggaagaatttctatgacgattcgcaaccccatgcgacgaatccgtctcctccactccttctccgtcgtcttcctctactggttctacgttttctcatgaactaactccctctcaatcccctaccctaattcctccaatttccccattttttttctaattaatcagatttgcaaaatcctaatttctctatcctaacaaaaaccccaaattcaaacaaatccaatggcttcgattccgcgtccggcgagttcgggat

SEQ ID NO: 39955 - DNA, 348 bp, Glycine max
  Clone ID: LIB3065-007-Q1-N1-B6
ctcttctgcggcgtagcaatgggacactccaacgtttggaattctgacccaaaaaactacggtcctggttctcgcacttgccgagtgtgtgggaatccacatggattgatcaggaagtatggccttatgtgctgcaggcagtgcttccgtagcaatgccaaggaaattggcttcatcaagtatcgctaaaagagctgttgtcacctacggaccaatattatgttctggcactaggatgttttgaagatgttatgtttgaagaaacttgagacttgtttttttcatctattttattatcagacataatgtgtggaacgaagaatacttttatataaattgttttgcact

SEQ ID NO: 39956 - DNA, 433 bp, Glycine max
  unsure (1)..(433): unsure at all n locations
  Clone ID: LIB3065-007-Q1-N1-B7
ctcgagccgcaagaatattctagaggcctcatacgacaccaaattggaggagataaacaaggttctgtttggtagagaggaggggcagcaacaaggggaagagaggctgaagagagtgtgattgtggaaatctcanagaaacaaattcgggaactgagcaaacatgccaaatctagttcaaggaaaaccatttcttctgaagataaacctttcaacttgagaagccgcgaccccatctattccaacaagcttggcaagttgtttgagattaccccagagaaaaaccctcagcttcgggacttggatgtcttcctcagtgttgtggatatgaacgagggagctctttttctgccacacttcaattcaaaggccatagtggtactagtgattaatgaaggagaagcanacattgaacttgttggcattaaagaac

SEQ ID NO: 39957 - DNA, 450 bp, Glycine max
  Clone ID: LIB3065-007-Q1-N1-B8
gagaaaaaataccaaccatggcaaccatttctactgatcaaccaagaggatcctactcctatggaacctcctatggagcaccctatggaaccacctatgagaccaacagcagcattaacaaccctccttcacgccaaaccgtgaagttcataactgctgcaactattggcatcacactcttactcctgtctgggttgaccctcacaggcactgtcataggtttgatcattgcaacccctcttcttgttatcttcagccccatccttgtccctgctgcgtttgtgctgttcctggttgcttctggctttttgttctctgggggctgtggtgtggctgccattgctgctttatcttggatttacaactacgtttctgggaaccagcctgcgggttctgacacccttgactatgcaaaagggtaccttactgataaggcaagggatgtgaagg

SEQ ID NO: 39958 - DNA, 392 bp, Glycine max
  unsure (1)..(392): unsure at all n locations
  Clone ID: LIB3065-007-Q1-N1-B9
cgatcttttcctctgagaagacgtgtcggtagctgaagcattttataagcctncactttcctgaactagttntaacatacaatctttcaagtacacctncncagcttccatttaagaatggagatcactagaataggccaatggttaagtcttctgatatgtgtactactattactgcagacaaaagggttcctgggggatcacttttgttgaaaatgcagtggcaaaggggcttgttgtttggagggaatcctncagcttaccactttcacaagggatctggagcagggattaaacaactggatagntcacttttgagggaggaggatggtgcaacaacgttactacttgcctttcccgtaaggacactcgattaggttcatctaagaaaa

SEQ ID NO: 39959 - DNA, 304 bp, Glycine max
  Clone ID: LIB3065-007-Q1-N1-C10
ggctcgagaaagaagcgatacatgcacctgacggaggagtggctgagagagaacccgaacatgtgcgagtacatggcgccatcgctggacgtgagacaagacgtagtggtgatggaggtgccgaagctgggaaaacaagccgcaacgaaagcgattaaggagtggggtcaaccaaagtcaaagatcacacaccttgtgttctgcaccacttcaggcgtggacatgcccggagcagattaccagctcacgaagcttctcggcctgaggccctccgtgaagcgcctcatgatgtatcagcagggct

SEQ ID NO: 39960 - DNA, 287 bp, Glycine max
  Clone ID: LIB3065-007-Q1-N1-C11
aaatattttttagttttaactctacggtatagaagaaatagaaaaggatcatataaaagttttttaaatttaaaacggatcagtacacccggtctacgaatatattctaattatcaacgaatccctcgaattttagggggcatggggattgtaattctttcaacttctagaggtataatgacagatcgagaggctcgattagaaagaattggcggagaagttttatgttatatatggtaatctttctaacacccgaattatatgagaaacttcgatccatttttggt

SEQ ID NO: 39961 - DNA, 360 bp, Glycine max
  Clone ID: LIB3065-007-Q1-N1-C12
ggagttcttgagtcctgaaataagccgaacatcactggttggtattgtcaaagatatacgtgagtctatgcttgaagaagttgacttttacaaggaggctgcaaatattgaggcttttaggagatatttagaaacaatgggacttactgggaatgcaacagctccaaaagtgtatcgatactgcagtacaatgaaagttttaactatgcaaagactatatggagttcctcttactgacctagactccataagttcattagtttctaatccagaaaccagccttataactggtctcaatggggtggtttgaagtttgcttgcatgtgaatcttttcatgcagatgtacatgcaggaaatct

SEQ ID NO: 39962 - DNA, 397 bp, Glycine max
  unsure (1)..(397): unsure at all n locations
  Clone ID: LIB3065-007-Q1-N1-C2
gaccaacacttccattcttttttttttttttttttttccaacctaggggggccaaccaatccgcccttaatttgggaaggttcggccgggcaacctcttccttcttaaccggggcctccggccggcgcttttcttccaacgtgccgggaacccccgccggggttcccggcttcgcgaggcgtggaaaaaagtgggccccaacaatcgaaccggcgaaaacgccggttggcgtacatgaaagccctgaccacccacttcctcggctcttccttcncaagctcacagtcaacttcgtcttgccctactcttctcaattggccgcaaaagaggttgatatggtcattgtaccagcaacaactgggcagatgggtgttctcccaggacatgtagcaacaat

SEQ ID NO: 39963 - DNA, 466 bp, Glycine max
  unsure (1)..(466): unsure at all n locations
  Clone ID: LIB3065-007-Q1-N1-C3
ttcagccgacaccaattcttcaatgcgcaccttaacggcttcaaggttaaggaaccgttcctttcggttccccgaaccaccaagctcaggaccgaaaactccaccgtcaaaattgagaattctgacggcgccaaagacgccggagccgtcggatctggcgccgncgncgncgcgggaccggtccccgggattgtggttaaggaggacccgactaagatttttactgataatttgcaaaccagtggggcttacactgccagggaggagagtctcaagaaagaggaggaagcaggaaagctcaaatttgtatgcctttcaaacgatggtgttgatgaacatatggtttggttgattggattgaagaatatatttgctaggcaacttcccaatatgcccaaggagtacattgtccgacttgttatggataggagccataagtctgtaatggttataaggcgcaatcacg

SEQ ID NO: 39964 - DNA, 447 bp, Glycine max
  unsure (1)..(447): unsure at all n locations
  Clone ID: LIB3065-007-Q1-N1-C4
ttcaaggccaggtcaaggttcttaatggttgcaaaaccattcctggacacaaatggttagtcaaattaccaattcatttagattttcaaatatttttcctgcctttacttttcccagagccaatggccacggagcccattgtggaacctgccatttccaatgattgtaagcataatggtgtagctaaggatactgttaatgaagttgtcagtgatgggtttagctcaagggagactataccagtaaagagtcagcatactggtgccgatgacattgcttctgcttcagtagttgaggaaaaagttgaaacaagtccaagagaaaaatcctctgaaaatgttgaaataggcgaaacttgctcatttatgagaagtgctgcatctttgaaggaatgggcaaaagctaaggctgctatgagtggatcactcanaagaaaacgtggtcaga

SEQ ID NO: 39965 - DNA, 422 bp, Glycine max
  unsure (1)..(422): unsure at all n locations
  Clone ID: LIB3065-007-Q1-N1-C5
attgttggagagactactataagtggagatgcatcccgctagactggcctgttgctttgcttcttcaatggccacttacaatatatcatgctgctcgacttgttggaattacagccttgaatcctgaaatcagtgataagttgtacattcattaccttggacctgagaaagagttgctacaacttgctgtgtttggagaattactggcactcttccccggtgtacgaattcatatagaacttgttggacctgcaattcctcctcaaagggatggtgagatgattcacatttctaagtatccttgttgcaatgaagacgaatgtgaatgcaaaataggaagtaaaaatacattcttagaaacacaatctggtatcacttncactttgacattgcaactttggcaaggattctatcatgatcga

SEQ ID NO: 39966 - DNA, 450 bp, Glycine max
  Clone ID: LIB3065-007-Q1-N1-C8
cccataaccaacaacatgggactaccgttggttatgctggtgacactggaaggcagcatgggaatacaggtggcctttactatggaaccgacaccgcggacacaggaaccggtcctagaagtggaaacaccggtggcaccggttatggaggcactggtggtactgattatggaacagctggtggcactggttatggaagtggaactggctatggaatcaacactgggggtgcgcacactgaagcagggtatgggaaggagcatcgtcagcatgagcaatctcatggtggtcagcacgagaagaaagggatactggacaagattaaggagaagcttcctggaggacacagtgacaagtagatgcatcgtgcatgcatgcatatagtatatatataataatggtgtctttgaataaatttgctgcatatgtacttggaggatatagcatatg

SEQ ID NO: 39967 - DNA, 425 bp, Glycine max
  Clone ID: LIB3065-007-Q1-N1-C9
cagagtttgaactttgaacgttgaaggaacatagaggcagaggttggtcttctctcaccgtagaatcgaatcgagttcactttgatcgtgtgtgtctccgatcttcaaatccgcaacaaccatggtgaggggattgctcaacaagctcgtctctcgctccctctccgtcgccggaaaatggcagcacaaccaactccgccgcctcaacatccacgagtaccagggcgctgaattgatgagcaaacacggagttaatgttccgagaggcgtggctgtttcctctgttgaagaggtcagaaaggccatcaaggaccttttccctaatgaaaatgagttggtggttaagagtcaaattttagccggtggaagaggtttgggaactttcaaaagcggccttaagggaggagtgcacattgttaagactg

SEQ ID NO: 39968 - DNA, 433 bp, Glycine max
  unsure (1)..(433): unsure at all n locations
  Clone ID: LIB3065-007-Q1-N1-D1
ccggttgagcttttttaaaacctacccaccccaccaaattcaatttgccatggagaagtttggtggaaagggaaaacgttccggcggtgtgtaaggaagatgatcagatggatttgccttccggatttcgattccacccgacggatgaagagctcataagccattacctctacaagaaggtcattgacaccaagttctgcgccagggcaattggagaagtggacctcaacaagtccgagccttgggatttgccatggaaagccaaaatgggagaaaaagagtggtactttttctgtgtgagagacagaaaataccccactggcttgagaaccaacagggccacagaagctgggtactggaaagccacagggaaagacaaagagattttcagaggaaaatctttggttggaatgaagaaaactctggntttcta

SEQ ID NO: 39969 - DNA, 326 bp, Glycine max
  Clone ID: LIB3065-007-Q1-N1-D10
caactttagtgataccaataaaataaagaaagggttctaaaagtatgtgttgatgctggcagctagttgtaccacatctaacaggctggtccaattgcatgcaccgtgccatgttttcctttaaaactttttttttttttttaggtttcacatggaagtttcttttgtctaggctgtaaatttttgttcagttaatataaaggtttaatttagtaaacaaatccaccacggttcaataggagaagggaataactttttttttaaaggaggacgtttgtgttctgtaattagcattcagttacaataatttatttttattatggttc

SEQ ID NO: 39970 - DNA, 386 bp, Glycine max
  unsure (1)..(386): unsure at all n locations
  Clone ID: LIB3065-007-Q1-N1-D11
agaaactggacaagacaggaaagaaaatgttgtgcagacatctgaaaatgcagctggaaccaagtctggcaagccaaaaataaaaggagtctcattaactgaattatttactccagagcaagtcagggaacatatcactggcctcaggcaatgggttggccagagcaagtcaaaagcagagaagaatcaagcaatggagcattcaatgagtgagaactcctgccaattgtgtgctgtagagaagcttacctttgaaccaccgnctatttattgcacaactttgtggggttcgcattaaaccgaaataatatgtattataccacggggcaccggtgacacaacgggcattatttttgtcttccatgctataatgatgctcgtacaga

SEQ ID NO: 39971 - DNA, 425 bp, Glycine max
  Clone ID: LIB3065-007-Q1-N1-D12
attttatggtaagcgatgcaggaggggattgtcgagtcattttgatggaaaatcaaaatcgttctcagatctatctcaaatgagtaatttgagtaatctgaaggagttgcaaaagcaagagagtcctttcaacaagagaagaagggttttgattgcatccaagtggtccagaagatcatctttctattcctggtccaacccacaatccatgcctcttttgcctgtggatgaggatcaggattatgattatgaagaggaagaagaagaagaagatgacgaagaaaaagctagaaaagttccctctgcttcatcttcttcgtcttcctccttggccgaggaaaagaaaccagaagatcaggttcagctaagactcaacagagtgccagaatcttatgctgctcatatgagacttagacttggaagct

SEQ ID NO: 39972 - DNA, 464 bp, Glycine max
  unsure (1)..(464): unsure at all n locations
  Clone ID: LIB3065-007-Q1-N1-D4
gttgaggccagggtggttggaatggggcctaccatgggaaaacaggctgttaggagcattgtggcaggtggactagccagaaggtgcatggggcaggtgtctaatgccattggggtgcccaagcctttgtctgtctttgttgacacctatggcaccgggaagatccatgataaggagattctcaacattgtgaaggagaactttgatttcaggcccggtatgatctccatcaaccttgatctcaagaggggtgggaataacaggttcttgaagactgctgcatatggacactttggcagagaggaccctgactttacattggaagtgggtaaagcccctcaagtgggagaagggcctaagccattcatttcactgcaatgtgctgggagttttttagcgttgcccttataatgtctattatccataactttccacgtaccttgctctgngtttntctctcgtcg

SEQ ID NO: 39973 - DNA, 412 bp, Glycine max
  Clone ID: LIB3065-007-Q1-N1-D5
cttcgtctcaaatctcttcgttccttcgattcgttccatttcttccgaaatggccaaagacccagttcgcgttctcgtcactggagctgcagggcaaattgggtatgctcttgtccctatgattgctaggggagtgatgttgggtcctgaccagcccgtgatcctccacatgcttgacattcctccggcagcagagtcattgaatggggttaaaatggaattggtggatgctgcattccctcttcttaaaggtgttgttgccacaactgatgtggttgaggcatgcactggggtcaatattgccgtgatggttggtggattcccaagaaaagaaggtatggagaggaaggatgtgatgactaagaacgtctccatttacaagtcccaggcttctgcccttgaaaagcatgct

SEQ ID NO: 39974 - DNA, 351 bp, Glycine max
  Clone ID: LIB3065-007-Q1-N1-D6
ggagttccccttgcgattactttcagtgtcccttttgctctagcggcaatatactgcagcgcttcaggagcaggacaaggtttatctttgggagttctcaatcttgcaattgtggtaccacagatggtggtgtctgcattaagtggtccttgggattccttgtttggtggtggcaacttgccggctttcatggtgggtgctgcggcagccgcgttgagcgccataatggcgattgtcttgctgccaactccaaagccagctgatgaggccaaggcttcaagcatgatggcagggggctttcactagttaatggagttttgcatgtttcagttttgtcccctgctttaatag

SEQ ID NO: 39975 - DNA, 379 bp, Glycine max
  Clone ID: LIB3065-007-Q1-N1-D7
tcataacacaaagcacaaagcaaagctcatccttgagttaaaaaatggcagcagcttcttccatggctctctcatccccatccttggctggcaaggccgtgaagctgggcccatcagccccagaagtgggaagggtgagcatgaggaagaccgtcaccaagcaggtctcctcaggaagcccatggtacggcccagaccgagtcaagtacttgggcccattctctggcgagcccccgtcctacctaaccggtgagttcccaggcgactacggctgggacactgctgggctttccgcagacccagaaaccttcgccaagaaccgtgaactcgaagtgatccactccaggtgggccatgctcggagccttgggctgcgtctt

SEQ ID NO: 39976 - DNA, 348 bp, Glycine max
  Clone ID: LIB3065-007-Q1-N1-D9
ctcagccactatagataaccatgagacacactccgaagattggtgttcacggtgtctttgtgtgttataatatattggtattgttgttgagcagttttcatgaatcaacatcatcctcttcccactgtaaagcatggttagtgcaatccattcccaccgatatgccccacttatcccatgttccaggcaccctctctactggggatgtacttcggtggctggctgcaaactccaccacgaggcttcacataattggtcagtactggcagctgttaccttctcccaacgatcctcgctctggggactatggttacactcagcatcagatgcatgaatttggtgccgatc

SEQ ID NO: 39977 - DNA, 405 bp, Glycine max
  Clone ID: LIB3065-007-Q1-N1-E10
gaaaaccaggttccccatctcacaaatcagtgtgatgggttttgtgtattgtgatttctgctccaacaacagcttttccagacacagctacttcttgccaggtgctgaggtcaaggtagattgcatgttcaaagcactttcagagaaaacctctgagcagatttcactttcagtgaacagaactaccaataagtatgggatgtacaagctggaaatcccttcagtggatggagtgaaatgtgcagaagattctgcagttgtgtcttcttgccaagcaagcttaataggtagttcatcctctgcttgcaatgttcctggctacaaaaccacttctaatgtgatagcaatcaaagcaagaagagccaatctctgcatatacagcttcaatgctttgactttcagacc

SEQ ID NO: 39978 - DNA, 432 bp, Glycine max
  Clone ID: LIB3065-007-Q1-N1-E11
aaagaaagaaagaaagaaaaccctagcttaccttttcaactttcaagatgcaaatctttgttaagacactcactggtaagacaatcacccttgaggtggagagttcagataccatagataatgtaaagtccaagattcaagacaaggaagggatcccaccagaccagcaacgtctcatttttgctggcaagcagcttgaggatggacgtacacttgctgattacaacattcaaaaggagtccactctacacttggtgctccgtcttcgcgggtggaatgcaaatctttgttaagaccttgaccggaaagacaatcacccttgaggtcgagagctctgacaccattgacaatgttaaggctaagattcaggacaaagagggtatcccaccagaccaacaaaggcttatctttgcaggaaagcagctagaagat

SEQ ID NO: 39979 - DNA, 346 bp, Glycine max
  Clone ID: LIB3065-007-Q1-N1-E12
cgctgctctttctaactttcctttcccgatctccggccataccccatgccgcacgcagattagggaatcgaacttgtgaatggaactgagttgattttctaagatggaaaaggaaaataaggtgaaggacactgcaagtgatgacggttattgttggtggtggttggttcaagaaaggaacaacagctgtattcatcactgttgggttgtttgcattgttggtccgtgtggctgtgtcactgcacccttactccggcgctggcaaccctccgaaatttggggactatgaggctcagagacattggatggagatcaccattaaccttccaattaaaggaatggtata

SEQ ID NO: 39980 - DNA, 437 bp, Glycine max
  Clone ID: LIB3065-007-Q1-N1-E2
cagctatgacgtccatgcacgcgtcctagcttgggattccggttcagggtggattcaggaccgatgcttttttcaaaactaatctttccgagggtatgctgttggtgatgttgctactttccctttgaaattatacggtgaattgagaagagttgaacatgttgatcattctcgcaaatcagctgaacaggctgtgaaggccataaaggcagctgaggaaggaagaacagttgaggagtatgattaccttccatacttctattcccgttcatttgatctgtcttggcaattctatggcgacaatgtcggcgacacagtactattcggagacaacaatcctgcgtcgtcaaagcctaagtttgggacatactggattaaagatgggaaagttgttggggtctttctggaaggtggaactcctgaagagaaccaggcta

SEQ ID NO: 39981 - DNA, 419 bp, Glycine max
  unsure (1)..(419): unsure at all n locations
  Clone ID: LIB3065-007-Q1-N1-E3
agctatgacgtcgatgcaccgtactagctcgaatttcggtcgagttncacacatttttttctacaagaactcaaattacaaacgtatgtttcaactctttttgcaccaacttataaaatcctcatatctgttcccaaaagcttgttgtgagaatggacttcggtgaaaagagattcccaccttaaccaacaacaaacacagcctgggaaggagcatgctatgaatccagtaccccaattcactagccctgactacaagccttcaaataaacttcaaggaaagatagcattagtgactgggggtgactctgggattggacgagcggtgtgtaacttgtttgccttagaaggtgctaccgtgggcttcacatatgtgaaggggcatgaagacaaggacgcgaaggacacgttggaaatgat

SEQ ID NO: 39982 - DNA, 397 bp, Glycine max
  unsure (1)..(397): unsure at all n locations
  Clone ID: LIB3065-007-Q1-N1-E4
cttcaagtgcttttaacggaatcgcttctcctccttccttcggtttcaggagccaacgagaacaagagcaaggttccagaagacaaatggtatttagcctacattgtgtattttaccctgngtctcggttaccttctcccatggaacgctttcatcaccgccgttgattacttctcctttctctaccctgacgccagcgttgaccgcatcttcgccgtggtttacatgatagtcgggctggtggggatcttccttataatcctctacagtcacaagtcttacgcctatgtgaagatcaacgttggattggccctattcgtcgtttcgcttctcgtcgttcccctccttgatgccttttacataaagggtccggtcgggttttatagcgggttctacg

SEQ ID NO: 39983 - DNA, 354 bp, Glycine max
  unsure (1)..(354): unsure at all n locations
  Clone ID: LIB3065-007-Q1-N1-E5
tctttctgcaccatcgttctccatttttggctttacaaaaccactgtgtctgattaagggttctttaatatttccaatatttcttgtagtgaaaaagttgttagctaaaagaagaccaagtttttggtgttgtagaaggaagagaagaattaacatgaaaattcagtgtgacgtgtgtgagagagctccagcaacagtgatttgttgcgcggatgaggctgctttgtgtgccaaatgtgacgttgaagttcatgctgcaaacaagcttgcaagcaagcaccaaagacttcttcttcaatgtctatcaagcaagcttnccacatgtgacatttgccaagacaagccagcattcat

SEQ ID NO: 39984 - DNA, 454 bp, Glycine max
  Clone ID: LIB3065-007-Q1-N1-E7
caagggatcatcatcccaagatgatgaagatattcagctccaagggatcaatgatgatgataaaaataacaacaactttgaaagcactactaagctagtgaaccttcatcatcttcagcacaaagtaagaaacaaagatgagcatcaagagggtggtggtggtggcgtagataacatggtttctcatgaagagtttgattctattttgtcttttgagaaccttaacaatgctgctggggacaggtccactggggattccatgccagaaaagagttctgaagctgctgctgagtattctgttgatcatcatcatgatatagctgctcatgagaggaacaacattaggcaaaaatctgagaacagtggtgctcctccattgtcatttcttgagaaagtggctctggatgaaagtgttggtcaccaagtggaggagatgattggagtgtctcctatg

SEQ ID NO: 39985 - DNA, 405 bp, Glycine max
  Clone ID: LIB3065-007-Q1-N1-E8
ggccgacgaagccaaagccaaaggcaacgcagccttctcctccggggactatcctgccgccatccaccacttctccgatgccatcgccctggctccctccaaccatgtcctctattccaaccgatccgccgcatacgcctccctcaaaaactacgcagatgcattagcggatgccaaaaagacagttgaactcaagcccgactggtccaagggttacagccgtctcggtgccgcgcatcttggcctttcccaatacgatgatgctattttggcttacaaaaggggtctcgaaatcgaccctcacaacgagccccttaagtctggtttggcagatgcgcagaaggccttggccgcggcctccaggcctcgcccctcggcctctaaccccttcggtgatgctttctc

SEQ ID NO: 39986 - DNA, 393 bp, Glycine max
  Clone ID: LIB3065-007-Q1-N1-E9
gggagagaaaaaaggggaacttggtgggagagagcacagaccacaggggcatgtctcaaaatttgttgcaaagtgtatagttgagggtttggtactttggtttcatttagttaaatttgtttgtgtctggaattgccgcttgtttgaaaatgtctctctttgctgcattttccatttgtaaagttgccaaggatgcagctggagttgcaggaaatgtgtttgcttttgggttgtttgtgtctcccatacccacatttaggaggattatcagaaatgggtcaacagagatgttctcagggttgccatatatttattcccttctgaactgcttgatctgcatgtggtatggcacacctctgatatctgctgataattggttggttacaactgtta

SEQ ID NO: 39987 - DNA, 452 bp, Glycine max
  unsure (1)..(452): unsure at all n locations
  Clone ID: LIB3065-007-Q1-N1-F1
acaataccaggtgattntgtcattggtgttaaagttgacaaccataggcaatatgtgtgcatatgggctcaatcctggtatttcaggttctcgtcttttgggcaccattcctcagtccatttcacagcaaactgtttggaatcaaatggcaacagtgagaacaccattgaattttgattctagcaagcagagcttttgtcaattttctattgaccttctcggtggaggaattttagtggacaaaactggagattggatcacacttatacaaaattctccaattagtaacttgttgagagttgctgcttggaagaaaggctgtttaatggttaagattgtgatgtctgggaatgcagcagtcaaaaggagtgattgggcctcattggtacaagtgtttttaacaaacagcaacagtacagagcattttgatgcatgtaagtggacaaaatcgg

SEQ ID NO: 39988 - DNA, 435 bp, Glycine max
  Clone ID: LIB3065-007-Q1-N1-F10
ccagaatgttagtgtctctgtgatggttgggaggaaggattcaaataaggttgctcgtgtaataaacaagtccatgtttgattacatcgatcgttcatcatatagagccttggcttttgattacctagacatatcccctggctacccatttttgtctggcatccgtgcatggatctctttgctattcatggaagatagaaatgaagatctcatggatgtatttgggatccaaatggatttctgtgatgtagcaaattctaaggaagaagtcttgtggctgttggacatgcttgactggaagtaaatgttcaagaaaagtgtggtgccccatcattacaacaaaaagtaattggacattgtgattttatgttaacttgtttgttgatacggggtgcattacaaagtttaccatattatcagcaccaataatttgcg

SEQ ID NO: 39989 - DNA, 400 bp, Glycine max
  Clone ID: LIB3065-007-Q1-N1-F11
cttcttccttttcttcaccccgtacattcacaactctggccctcttcaaatctaagaccaaagccgctcctgctaagactaaggttacaaagccaaagcaaaaggttgaagatggtatctttggcacttctggaggatttggttttactaagcagaacgagctctttgtgggtcgtgttgctatgcttggttttgcagcatcactgttgggtgaaggaataactgggaaaggaattctagcacaattgaatctggaaactggaattcccctttatgaagcggagcctcttcttctgtttttcatcctcttcaccctgctaggagccattggaggtttacgtgaccgtggaaaatttgttgatgacgaacctactactgggagtgttattcctccaggcaa

SEQ ID NO: 39990 - DNA, 115 bp, Glycine max
  Clone ID: LIB3065-007-Q1-N1-F12
atctgtttagtccccgtttttctggggtttgatcttccttgtatggtttgtgcactaggaaaatttgatggacattcatttcgtatttattatggaatattaacataattgactt

SEQ ID NO: 39991 - DNA, 452 bp, Glycine max
  Clone ID: LIB3065-007-Q1-N1-F2
ttcaggtcctgaaggcatggttccagaaaatagtgaagttgctgaaactttgttaggtcaagttgacagggctgctgtattccacaatgcaagtacacggttttgtgatggagcacgctttgggcttggcgcaaaggttggaattagtacaagtcgaattcatgctcgaggtcctgtaggagttgagggttgttgacaaacagatggatattgagagggagtgggcatgtggttgatggagatcaagggatcaattacacttacaaagagttgccactaaaagcataactttgcatgcaacttagctcactttcaagctataacatgctcacctcaacaaagcagcatcacttttctggtctggtatgatatgcagaagttgctgagatgctggccatgtataatcgtaactatcacttgaccctttccagggcctttttcttacctggagc

SEQ ID NO: 39992 - DNA, 452 bp, Glycine max
  Clone ID: LIB3065-007-Q1-N1-F3
attcaaggaacatgatttagaaaactgccaagcccacccatattcggtctgtcaaaacttgcaaccatgaactgaagcaccacacatacccacttcctccaaagacatcatttttattacccaatcttccaatttcagagaaaattctttgtgggcatctcttaattaaaaaaatgtcaagcttccccaacacggtggcggaaggccgcaggtccagcaaggcaccggaaaaatccactttttctcagacttgcagcctcttgagccagttcttgaaagaagaacgtgcttctgctgattccacctttcgaattggtgggaaaatggaacccatagcgagtaccaagggtttgttaggaagcctgcaaaactctgatggggctttgaaactaagcgcttctgccatggaatttcttccccagcttgtggaaaacccctgcattaagaagtct

SEQ ID NO: 39993 - DNA, 458 bp, Glycine max
  Clone ID: LIB3065-007-Q1-N1-F4
cttactttgcaattgcattcccagattcatttcagacaacgcaacgttagctttcccacatacgctaactcaataaccctttcattccgttcattgctctttccagattctattttgcctcttagaagttggaatagagaactagagctgggtggatggaggatgacaagaggaggaggaagaacaagaagaagaagaacaagcagaacaagaatgtggaaaatggggtgggagaaactgctaatagggatcagaatctgctgagtaatggaaaggatgagcatactaatctttccaagactgcaaatgagcaaagctcgaatgtcgatttgaatggggttggagagacattaagtagggatcacaatctggtaaataatggtaaggatgaacctgctaatctttcaggagtcgctgatgagcaatgcatggatgcagatcggaatggggttgttgaa

SEQ ID NO: 39994 - DNA, 392 bp, Glycine max
  Clone ID: LIB3065-007-Q1-N1-F5
aaccaaaccctttttttctcacttttcttccttgcggcctctttctgtgcgttgtgttgcgttcatccctgtttggtgcggtgggagtttttggtcttttcgctgccccccattatcacacggtccctctccatccacgtcatctacgtcttcttcgtatcgtaccctccccaccttcctttcttcctctccctcttctcactatataacaattttctcacccccttagggtttccaaaagccattgtccgatttcgcactgcgcaacccttttctcccaccatgtctccttccacttcctcctcttctccgcaattcattcttccacgcttcttctcacgcgtttgaggctttcggtccatgggcactcgagttcggtcatgcttgctgta

SEQ ID NO: 39995 - DNA, 398 bp, Glycine max
  Clone ID: LIB3065-007-Q1-N1-F6
taaaaatcatgatgtgtttcttttaataagtagcatagttactccgatcaaatatactatttttaaaatcttgcatactgttttagacaagaagcaaaaaagtggaattggtgagttacctattctatgatgtatagggtatcattaaggtaaattaaattagattcgatgtaataatttgatatgatatgattgataaaaattggcgttactttagcatgcgatcaatgtgattagaggtttgatcctcatgtccacgcatatagaataacatttggtaggacttggagaaactaattccttaaatgcattttaatatttcgagggattaatttctgactctcaaccatagataccttgggttaaaaacagaaattaggattggatccagtgtaaat

SEQ ID NO: 39996 - DNA, 449 bp, Glycine max
  Clone ID: LIB3065-007-Q1-N1-F7
ggcgtcaccctgaaaatgttgaacttgataaagttcaagtggttcgttactgtgctgctgggtctaagccttggaggttcactgggaaggaagagaacatggatagggaagatatcaagatgcttgtgaagaagtggtgggacatatatgaagatgagacactggactacaataacaactctgtcaacgtggaacgtttcacatcggcactattggatgctgggggctttcagtttgtgccagcaccttctgctgcctaatatgcttattatttacagctacaaattaatgttaattaacgacaaagtatatgtattggtatttgctttttttcgtttttgggtcttatatatgaaggaacaacgtctatggttttaatttggatgaccttcttgtatacaaagccacatgtgatctcatacagcttttgattattattaagaaattag

SEQ ID NO: 39997 - DNA, 415 bp, Glycine max
  Clone ID: LIB3065-007-Q1-N1-F8
ggcatcttcttctggtagtttagacacctctgcaagtgcaaactcgcttcaccaacttcaccttctccacacaccctttcatgaccacttctttctctgaccttcttgcttctcccacagacaacaacaaaccaccacatggtggtggtggtggtttgtctgagagaactggctctggtgtccccaaattcaagtccacaccaccaccttctctgcctctctctccccctcccatttctccttcttcctacttttctattcctcctggattgagccctgctgagcttcttgactcacctgttctccttaactcttccaacattctgccatctccaacaactggagcatttgttgctcggagcttcaattggaagagcagttccggtgggaaccagcgaatcgtcaaagaagaaga

SEQ ID NO: 39998 - DNA, 412 bp, Glycine max
  unsure (1)..(412): unsure at all n locations
  Clone ID: LIB3065-007-Q1-N1-F9
gccgagttccgccgccagttcctcggcctcaagccgctccgcttcccggcgcacgcccagaaggcgcccatcctccccaccaaggatctccccaaggatttcgattggcgagacaaaggagccgtcactaacgtcaaggaccaaggggcgtgtggttcgtgttggtctttcagtacgacgggagcgttggaaggagctcattatctggccactggtgagctcgtgagccttagcgagcaacagcttgtggattgcgatcacctgtgtgatccagaagaatatggaacgtgtgacttcaggctggaatggtgggttgatgaacaacgcatttgagtacatacttcagtctgggggagtacagaaagaaaaggactatccatacnaccggagagatggcaccttgcaatttgac

SEQ ID NO: 39999 - DNA, 446 bp, Glycine max
  Clone ID: LIB3065-007-Q1-N1-G1
ggaatccaatggctggggatgcctgtatgtcttcccataccatggctgatgatctccacatgaaactactgtaccttgagaacagagtggcatttgcaagacttttcttcccttcagaagccaaactagccatggacattgcccatgctgagacaccatctgagtttgctggtctttctgcgtcaaactcaaaaggttcaaatggaaacttaagggaggttgatctcaatgagactcctatagtgcaaaataaaagacttctttctagaatggaagcccttacgaaaacagtggatatggcgcggcgctacttcccacattgctcggaagtgctgcacaagttcatggaagatgacctgcctgactttgtttaccttgaaaagggtactcatgaagagcagagaatcaaaaggacgcgtttcatggagcttaaagatgacgtccac

SEQ ID NO: 40000 - DNA, 340 bp, Glycine max
  Clone ID: LIB3065-007-Q1-N1-G12
ggctcgaggaagcagaagccatggaaaccaacacactcccaaaccagcagacaccaaaaaccaaaaggcaaatcttcatactctcaggtcaaagcaacatggccggtcgtggcggggttatcagggacgctaacaaccgtaagcggtgggacggcgtggttccgccggagagccgctccgatccatccatcctccgcctctccgccaccctccaatgggaacccgcgaacgagcccctccacgtcgacattgactccagaaaggcttgcggcgtgggccccggcatggtcttcgcgaacgcgctgctgcggcggcgcgtggtggtgggcgaactgggtct

SEQ ID NO: 40001 - DNA, 370 bp, Glycine max
  unsure (1)..(370): unsure at all n locations
  Clone ID: LIB3065-007-Q1-N1-G2
ccgcttcaagggggtttaccagaccgtggactaatcacctatggcggaaaaccacgacatgaagaacccagccgtgaagcggattctccaggaggtcaaggagatgcaatcaaaccctttccgatgactacatgagncctnccttcttgagggaaaatatatttgaatggcaatttgcgatcagggggcctcgtgatactgaatttgaaggtggtatttatcacggacggattcagctgccttcagaatatcccttcaaacctccttcgtttatgttgctcacacctagtggccgttttgagacccaaaccaagatttgcttgagcatatcaaatcatcaccctgagcattggcaaccatcatggagcgt

SEQ ID NO: 40002 - DNA, 449 bp, Glycine max
  Clone ID: LIB3065-007-Q1-N1-G5
gttgattttttttatgaatgcagagaaggtggaagaagacactaaagctgcgatttttatctcaaactccatgaatacatgttcgttttcttgctttgtctatcaaagcttaaatttgtgttttgagccttctccgacgtgcttcccctgccattttcaatttttatctccaaactccatgaatacaggttcgttttcccttcccgtcttcttctatgttttctttttttacctctatttgcatttgtatgcgttttttattttttcactgcatgttcattgtttcttctaaagctgcgatttttatctcataaagcttcgatttttatctccaaattccatgtacagaggttcgttttcttgctttctctatcaaagcttaattttttttgtgttcccgagctttctttgtcgtggttcccccgccattttcattttttatctaaaaa

SEQ ID NO: 40003 - DNA, 425 bp, Glycine max
  Clone ID: LIB3065-007-Q1-N1-G6
gatcagtgcctcatttttctttcagttttcctgcttcttctgttggtcaactggttttgagattgccattttcttatcttgtttagtttagcttgtttggttgagaggaattaattattttgtataaaacaatgaaggagagtgtaggaaaccctttgcgtcttcaatctgtgaatcatatctccctcatatgcagatcagtggaacaatcaatggatttctatcagaacgttcttggattttaccccatcaggaggcctggctctttagattttgatggggcatggctattcggctacggaattggaattcatttgctagaagcagagaaccctgaaaagttgccaaagaagaaggaaattaatccaaaggataatcatatatctttccagtgtgagagcatggttgcagtggagaagaagctg

SEQ ID NO: 40004 - DNA, 448 bp, Glycine max
  Clone ID: LIB3065-007-Q1-N1-G7
tcggatataaacaataaaataaaataaaacagaagagaaggaaacagaagtaaaaaaaaaataaaatgggttacacaagatcttctcttctgtccgtggctcttgtcttggcattctgttcaagcattcagggtttggacatcaccaaattgttgggcgaatatcccgaatatgcacagttcaacaaatacctaactgaaaccaagctggcggaccaaatcaacagccgtaacgccgttacagtccttgcccttgacgacgccgcaatggcttccctctccggcaagtcgcaagacgccgttaaggccatccttagcacccatgtgctcgtcaacttctacgacgagaagaagctgatggaagccgaaggtagtcgcaccaaggtcgaaaccctattccaatcctccggtgtcgccaagcccaaccagggttacatctacgtggcgct

SEQ ID NO: 40005 - DNA, 410 bp, Glycine max
  Clone ID: LIB3065-007-Q1-N1-G9
ctctctctcttcttcttcttcttcttcttgcacgtattgttctaatgcacaaaaataatggccttaaattacaacattgccctcgccttctctacggttctcacgctgcttctccttcccttaccaacccttggggagctcgtgcaggagcagccactagtcctcaagtaccacaacggccaactcctgaaggggcgcatcaccgtcaatctcatctggtacggcaccttcaccccgatccaacggtccataatcgtggacttcataaactcactaagcagcgcgccaaacgcgccgcttccatcgactgccacgtggtggaaaaccacggagaagtacaaggggggaggatcctctgcgctcgtcgtagggaagcagttcctacactcggctaactcgttagggaaaaa

SEQ ID NO: 40006 - DNA, 423 bp, Glycine max
  unsure (1)..(423): unsure at all n locations
  Clone ID: LIB3065-007-Q1-N1-H1
gtgattgtggtgataatgtttgaaagattntgaatttggagagctggaagaagtattgcagtattatcctcaagggtaccatggagttgataaggaaggtaggccagtctacattgagagacttgggaaagcccatccaagccgcctaatgcacgccaccacaatagatcgatatttgaaataccacgtccaggagttcgagaggaccctgcaggagaaatttccagcatgctccatagcagcaaagagacggatttcttcaacaacaacaatatttggatgtacagggcttgggaatgaaaaatttctcacgtactgctgcaaatctcttgtctgctgtgacaaaaatagatagcagttactatcctgagacattacatcacatgtatgttgtcaatgctggttctggctttaagaagatgc

SEQ ID NO: 40007 - DNA, 435 bp, Glycine max
  Clone ID: LIB3065-007-Q1-N1-H10
caacactaaaatggcacttccatacccattttcctatctcctcttgctccttctaattctcttatcttctctcccaaacatttcccaagccacctctcgtgccccaaatcgcatgttagccttggttcaaaaccaaccgcttgtactaaaataccacaagggtcctcttctaaagggcaacatcaccctccatttgctatggtacggtacatttacccccacgcaacgatcaatagtcatcgatttccttgaatccctaacctccacgtcagcacctggagccccttcagtttccacgtggtggcaaaccaccgagagctacaggggaggcccctgcaccctcgtcgtagggaaccaaatcctcgatgaaacctactccctcggaaaatcactaaaaaacgaccacctcgtagctcttgcgtcgaatcctaaact

SEQ ID NO: 40008 - DNA, 355 bp, Glycine max
  Clone ID: LIB3065-007-Q1-N1-H11
cacattcaaatccaaatggccctttacattacactaataattggcctcctagtaaacaccctagtactctataaatagcatttgcatgcaccttagtcttcaccaaaatactcctcttggcatcttgtgttgtgtccctcttttaagctatttccttctcttaacacaattggttgtgccaattgccatagtcaccaaccaattaacaaaggtatatatatcatcatatcatcaccaaatgaaaaataattggttgttttttcttggtggggtggctaacttttgtggtggcagccacaggtggtagcttttaccaagactttgaaataacctggggtggtgagcgtgccaaaat

SEQ ID NO: 40009 - DNA, 315 bp, Glycine max
  Clone ID: LIB3065-007-Q1-N1-H12
caacatacacaaagcaaagcatgggagtgactctggagtttatgacacagaatgacgttatgtgccagcaaatattgagaacatattcagtaagtatgctcgtacagtacctgaacagctcacacttggggagctctgggacttgacagagggaaaccgaaatgcttttgacatatttggctggcttgcagcaaaatttgaatggggggttctgtacattctggcaagggatgaggaaggtttcctgtctaaagaagctgttagaagatgctttgatgggagcttatttgaatactgtgcgttaatgcatactac

SEQ ID NO: 40010 - DNA, 440 bp, Glycine max
  Clone ID: LIB3065-007-Q1-N1-H2
agaaagaaattaataaataatttctagagtccagaagtgaacaaccctgctccaccaccacgtaggctttacatgtcccaacaactctcaacatatgatgtattggcacaacatctctgcctttattatggtttatatttcagccacatatataagacccttacattactacatgcatacattttttattcttctacataaactataaccatatactatatcctccacatacatgacaagacactgtacgtacgtaagtacatatgcagcaaatttattcaaagacaacaatattatatatatgcatgcatgcatgatgcacgatgcatctacttgtcactgtgtcctccaggaagcttctccttaatcttgtccataatccctttcttctcgttctgatcaccatgagattggtcatgctgacgatgttccttcctata

SEQ ID NO: 40011 - DNA, 458 bp, Glycine max
  Clone ID: LIB3065-007-Q1-N1-H3
ctccctctcgattttaacaaccaactgccaaataattaataatacagtaacgtaaataaaccgaactctggttaatcattgtgacacgttattttaatttttggtagaaagtaaacaacaaaaaattaaatttgattgttgcttattaaagagagggggagggagacaagatacaccaaagtcgtcgctcatggaagacttactcggccttttaaggattcacatcaagcgcggtgtcaacctcgccgttcgtgatgtcaatactagcgatccatacgtcgtcgttaagatgggcaagcagaagctgaagactcgtgtgattaaaaaggatgttaatcctgagtggaaggaagatcttacgctttctgttacagatccaattcatccatttatactgacagtgtatgactatgacactttcagcaaggatgacaaaatgggagatgcagaatgtgaca

SEQ ID NO: 40012 - DNA, 439 bp, Glycine max
  unsure (1)..(439): unsure at all n locations
  Clone ID: LIB3065-007-Q1-N1-H4
ggcagaaacccggacgaactaaattttcaaattttgtttccgatctctgaagaagagagtgatggcggaaccttggagaaacatcgacgtggagaagctgatctcgtacagcgacgacctcgtcaaggtgttgtcggagggtccgcgcgacctcaacaacctctctcactctctccaacaaacacgcgccctttcttcctnctgcgactccgacctcaatgaagctcgctccttcctgcatgactatcagaacaaagtagatgcatgcaagcagaatatagaggaagctagatccgagactgctgctgatggagacccggatcttctacaaagagaactggaggaagaacttgagaaagaacgctggttgaaagaagagtttagagcccatcgtgatgagtttaatgatctagaacagcaatggatttctgtccaagag

SEQ ID NO: 40013 - DNA, 62 bp, Glycine max
  Clone ID: LIB3065-007-Q1-N1-H5
caagattattgtaaaaaaaaaagttgtgattcattcaataatgaaaatattagttatcttgc

SEQ ID NO: 40014 - DNA, 442 bp, Glycine max
  unsure (1)..(442): unsure at all n locations
  Clone ID: LIB3065-007-Q1-N1-H6
cgacgagctatttatttcattctcccatgggatttccaatgtcaagtttccgatgactccaatcaacctgcattgatctaaatcccaaacttgcaaatcacgtgtttctccttcgcaaaaccattgttccttgcgaaacagaccgaatagtgtgcatcgccaccgattcacatcacagaactgcatttgagtgactcatggaaccagcttcagctgattcttcatctcaacctactcctccagcttctaatactgatgaacaacactcaaccaaagtgtctggacaacctggcaatgcacatgattcgcaattgtcgtcacccacttctggcatatcatcctgngcaagagatctgaaattcccacaggccctcgngcttggagcacaacagaactcccagaccgaaaatgctggcatgtcagcttttgctcgcctgactgg

SEQ ID NO: 40015 - DNA, 306 bp, Glycine max
  Clone ID: LIB3065-007-Q1-N1-H8
acacaccttgcaaaaaccgctattgttgattaatacctatattctccatatattgacactcattcaactatggaaaactcaacaatgggtagtaattgtcttaccacatgttgtacggggaatttcttcaagaaaaagaaatctctccccattgataccatattcaagcttcctgttcctgttgcaaattcttcttggcctcaaggtggtaattttgctagtggaataatcgatctgggtgggctacaagtgtctcaaatatcaacattcaacaaagtatggggcacctatggcggcggaccggac

SEQ ID NO: 40016 - DNA, 383 bp, Glycine max
  Clone ID: LIB3065-007-Q1-N1-H9
gtttgttggactgaacaagggtcacgtcgtcaccaagaaggaattggccccacgcccctcagatcgtaaggggaaaacaagcaagagggtgcactttgtgaggaacctcataagagaggttgctggttttgcaccctatgaaaagcgtataactgagttgctgaaggttgggaaggataagagggcactgaaggttgcaaagagaaagcttggaacccacaaacgtgcaaagaagaagcgtgtggaaatgtccagtgttctcaggaagatgagggctggtggtgctgtgagacacgaagaaataagtcttatttatttactcttttccagattcactagatggacctgtgtattgatggacgagctttcatatttttgctttg

SEQ ID NO: 40017 - DNA, 259 bp, Glycine max
  Clone ID: LIB3065-008-Q1-N1-A1
ggcagttatccggggtatcctggttaccaaccacctcagcaacagcaacaaataggatatagttgagaagagaatgttccttttcttctgtaatcttttgtgatacttatcgagttgcgtgtctcttctcgtctcgtggaaaaccgactctgctactctttttcttttttccccttgtttgcttaataacattaaattttatcggagccgccttttgtatccataatacaaacaaaaaacataaaaagtaaagaactga

SEQ ID NO: 40018 - DNA, 350 bp, Glycine max
  Clone ID: LIB3065-008-Q1-N1-A10
gcatgaggtttcatctcggacaaaggatcatagagttgatgtgagaagactgtcttaccgtgaattacaagtttttagaaaacgatggcagaaggcagttgaggaggatgaatttttgactattagtatttgttattgaaatggatcgacccaacattcatcctcctcaactgcctcaaactattagcaatttagcaccttctactactttgtaatcgttcaagagttgtgaactgtgaagaatgagttcaacaagccgtgcttggacttggagcgtggcagcaagtgttggagtggtggaggccttgaaggaccagggtatatgcaggtggaacagtgtgatgagatca

SEQ ID NO: 40019 - DNA, 354 bp, Glycine max
  Clone ID: LIB3065-008-Q1-N1-A11
aaaaaaaaaaaaaaaaaaaaaaaaaaaaaaaaaaaaaaaaaaaaaagagaaagggaaaaaaaaaaaaaaaaaaaaaaaaaaaaaaaaaaaaaaaaaaaaaaaaaaaaaaaaaaaaaaaaaaaaaaaaaaaaaaaaaaaaaaaaaaaaaaaaggggggccccccaattatgggccttgtaaccccggaaataaattcggacccggcccttgaggggtaccaattttccctaaaagggggccaattaaaaattggggaaaaaaagggcaaaaatttttccctgggaaaaattttattcccttaaaatttcccaaaaaaatacaacccgaaaccataaagttaaaacccggggggcc

SEQ ID NO: 40020 - DNA, 366 bp, Glycine max
  Clone ID: LIB3065-008-Q1-N1-A12
aaaaaaaacaaaatttaaataaaaaaaaaataaaacacataaaaaaagtaaaggataaataggtaaataaaacaaaaacattaaaaataaaaaaaaacaaaataaaataaataaaaaaaatataatacaaatataaaaaaaaaacaaaaaataacccatcatataacatataatcaatataccaccaaaaaatcactaaccttaaaaaaaccactttacaaattttcttaaatatactccaatttaataactaacattacaaaaatctacactcaattcacaataaattaaaccccacaatactataaaaaaactattcatatcccaatcaaaaatatttaatcccctatcccttaaaaaacttac

SEQ ID NO: 40021 - DNA, 386 bp, Glycine max
  Clone ID: LIB3065-008-Q1-N1-A2
caatcacaattctctgtgaactttctagaatctcgttcttcctttgccttctccttcttcttcaaccctttttctttctctttctttcgcactttcattctctaaaaaaaatctaagtccctttggtcttcatcttctgttctgatccaggtatggcttctaaacgcatcttgaaggagctcaaggatttgcagaaggatcctcctacctcatgcagtgcaggccctgtggctgaggacatgtttcactggcaagccacaatcatgggacctgctgatagcccatatgcaagtggtgttttcctagtttcaattcattttcctcctgactatcccttcaagccacccaaagttgcttttcggacctaaggtgttcacccaaacatc

SEQ ID NO: 40022 - DNA, 451 bp, Glycine max
  Clone ID: LIB3065-008-Q1-N1-A3
cgtgacttcatcgaagtcatcttcgagaaccctggcaaggtcattcagtcctacaaccttgacggctattctttcttcgctctcgcggttgagccagggaagtggaccccagagaagaggaagaactacaaccttcttgatgctataagcaggcacaccattcaagtgttccctaactcttgggcagcaatcatgttaacctttgacaacgctggaatgtggaacttgaggtcggagatggcagagaatcgttacctgggacaacagttgtacgtgagtgtcttgtctccaaacaggtctctaagggatgagtacaacctcccagagacccagcttctatgcggaattgtcaaggatatgcctaagccaccaccttactccagttaagaaagtttttctcttctgagatgtatatatatacaccaccagtaagggcggagctagaatttct

SEQ ID NO: 40023 - DNA, 376 bp, Glycine max
  Clone ID: LIB3065-008-Q1-N1-A4
ctcttttgctgcatcagaggagttgtaaattaagagcatggctgcagaagctcttgtatcatcatcttctcttaccttctcagcggaggctgcaagacaaagtcttggaccaagatcactccaatctccatttggcttctccagaaaagcctcctttcttgttaaggcagctgctaccccccctgtcaagcaaggatcagacagacctttgtggtttgcatcaaagcaaagtctttcttacttggatggcagccttccgggtgactatggatttgaccctctgggactttcagaccctgaaggaacaggagggttcattgagccgaaatggctagcatatggtgagataatcaatgggtcgtatgcaatggtgggg

SEQ ID NO: 40024 - DNA, 391 bp, Glycine max
  Clone ID: LIB3065-008-Q1-N1-A6
gccaatgctatacctgtattctcaggaataccaactgtggcctgtgctatgaatagttcttttagggggcgtgccagttctgatatttacaccatctgctctcaagactgtgaattatggaatcctgcttgcacaaaagcaatgactatgtcatttaatccaaacccgtgttctgatgcatggagtttggaatttctgaagcgtaccggatttcattgtgatatcatttgtgtcactggatggactgccaccccaatgcaggatgttcaggttaccattgattggtttatttcctttcaggaatgtgttcccaagaacctattgtgttttaaatccaccaaaatccttttgggtaaaaataggtggatggggaaactgactttcccccagg

SEQ ID NO: 40025 - DNA, 408 bp, Glycine max
  Clone ID: LIB3065-008-Q1-N1-A7
gacacataaacccggcggtgacatttgggctggttttggcgaagaagttgtcgttgcccaaggcgattttctacatcgtgatgcaatgcttgggtgctatttgtggcgctggcgtggtgaagggtttcgaggggaaaacaaaatacggtgcgttgaatggtggtgccaactttgttgcccctggttacaccaagggtgatggtcttggtgctgagattgttggcactttcatccttgtttacaccgttttctccgccaccgatgccaaacgtagcgccagagactcccacgtccccattttggcacccttgccaattgggtccgctgggttcttggttcacttggcaaccatccccatcaccggaactggtatcaaccctgctcgtagtcttggtgctgctatcatct

SEQ ID NO: 40026 - DNA, 325 bp, Glycine max
  Clone ID: LIB3065-008-Q1-N1-A8
tcgtaattggctacatagagttccagaggaatgcagagctcgacccagagaagaggttgtacccaggtggcagttacttcgacccattgggcctggcctcagacccagagaagaaagccaccctgatctggatcgaggtactcgtaattggctacatagagttccagaggaatgcagagctcgacccagagaagaggttgtacccaggtggcagttacttcgacccattgggcctggcctcagacccagagaagaaagccacccttcaattggcggagatcaagcacgcccgtcttgccatggtgggcttcttgggccttgcagt

SEQ ID NO: 40027 - DNA, 442 bp, Glycine max
  Clone ID: LIB3065-008-Q1-N1-B1
gcacaaagcacgctcatcctagagttacaaaaatggcagcagcctcctccatggctctctcttccccatccttggctggcaaggccgtgaagctgggcccatcagcccgcgaagtcgggagggtcagcatgaggaagaccgtcaccaagcaggcctcctccggaagcccatggtacggcccagaccgcgtcaagtacttgggcccattctctggcgagcccccgtcctacctcactggcgagttcccaggtgactacggctgggacactgctgggctttcggccgacccagaaaccttcgccagaaaccgtgagcctcaagtgatccacttcaggtgggccatgctcggggccttggggctcgtcttccccgaacctgtgtcccgcaaccgggtcaagtttggagaagctgtgggttcaaggcccggtcccagatcttcagc

SEQ ID NO: 40028 - DNA, 364 bp, Glycine max
  Clone ID: LIB3065-008-Q1-N1-B10
cgcaagctgtttgttagggagagaagaaagagagaaaaagaaaaatgaaaggacggtggtgagtgctgcttctgcttcatcatcatcagagaagaatggcggctactgtgtcttctgcgtggtcaaagcccggcgcgtgggctctcgattccgaggaacacgaagccgaactccttcaacagaacaacgacaagccactcgccgacttcccctccctcgccgccgccgctgccaagcccaagaagaagaaggcccagacctactccctcgccgaattcaccgccaaacccgacacctcctttgccgaccaagatcccgtcgtcctccccaccggcccccgccagcgcaccgccgaggagctcga

SEQ ID NO: 40029 - DNA, 255 bp, Glycine max
  Clone ID: LIB3065-008-Q1-N1-B11
ggctcaaggctgccttggccgccatcgacacctgcgacgcttccattcccggagacgacgacgttctctccgtcaagagtgccatgttccgcaggctgtgcaacattgccattgccatcaccaagcgcttgaacaaacctcttaaattctaaacttgtcgattgtcctttcctttaactcttttttttttttttcatcctgtgtcaatcttaatctgaatatcttccgtaatttcatttacggtattaacagtgc

SEQ ID NO: 40030 - DNA, 355 bp, Glycine max
  Clone ID: LIB3065-008-Q1-N1-B12
gaaagataaagcattccatagcctcccataaaaatgaagaatactatcttctctgctctctttctactttgtgccttcaccacctcatacctaccttcaaccaccgcggtggtcgataccgacggtgatattcttcagaatcctggcacatactttatcttgtccgtttttcgacccggcggcggagtagaattcgccgccactggaaacgaaacttgccctctcactgtcgtgcagactctcttcgggaggggctttccagcaatattatcgtcccggttacgaatccctttcatcggcgaaggacaactcttcagcatcctgttccgtattgtgccatggtgcgccaccactc

SEQ ID NO: 40031 - DNA, 263 bp, Glycine max
  Clone ID: LIB3065-008-Q1-N1-B2
cttcattgccatgttgttgcctgagacaaagaacatccccattgaagaaatgcatacagtctggagatcacattggttttggtcaaagattgttccacatgctgatgatgatcgcaagcctgaggctgcccaaagttgaataaagaatgccaatgatatataaggagtgaaaatggaagaagaaaaaaaaaaagaggttgaattcctatgtatcacaagaaatgttgaattattgattagggaaagaatgctctttttcactc

SEQ ID NO: 40032 - DNA, 445 bp, Glycine max
  Clone ID: LIB3065-008-Q1-N1-B4
tggacgctgatgttatcaccattgagaactctcgctccgatgagaagctcctgtcagtcttccgtgaaggtgtgaagtatggtgctggaattggccctggtgtctatgacatccactccccaagaataccaccaactgaagaaatcgctgacagaatcaataagatgcttgcagtgctcgagaagaacatcttgtgggtcaaccctgactgtggtctcaagacccgcaagtacactgaagtgaagccagccctcacaaacatggttgccgcagcaaaactcatccgtaacgaacttgccaagtgaatggtataagaaagtagaatctacaagttccatggttcttcttttaatatacacccaaggaaaattttctataatggggtggttcaattacccggtgtggaatatttagatgtttagcatgctctgtgagcaattgattc

SEQ ID NO: 40033 - DNA, 446 bp, Glycine max
  unsure (1)..(446): unsure at all n locations
  Clone ID: LIB3065-008-Q1-N1-B5
gtcatttaatccaaacccgtgttctgatgcatggagtttggaattgctgaagcgtaccggatttcattgtgatatcatttgtgtcactggatggactgccactccaatgcaggatgttcaggttacaattgattggtttatttcctctcaggaatgtgttcccaggacctattgtgttttaaatccacaaaatccttttgtgttaaataggtggatggggaaactgacttttccccagggcacttcccgaagtgttaaaagaatgcctctttctatagggggaggagctggtgcaaagaatgctattctcatgaatatgccaaatgctgttctttcaatgtggagatattttgttggagatctcgtctttgaagtttctaagatgacttctccctacattaaatgtacagtctctntcttcatagcatttggaaatttggctgatg

SEQ ID NO: 40034 - DNA, 445 bp, Glycine max
  Clone ID: LIB3065-008-Q1-N1-B7
accctcctctttattttctttaacacctcctcctctttctgttctgagcaagtatggccgtggaattcatgatggggtacaggaacgacactttcgcggaggataatgcggttcgtgaagctgcgtcggggctagagagcgtcgagaaactcatcaagttgctgtcgcatactcaacaacaataccagacaacctcaaagtcttccatggaaaacatcgacaccgactacacagctgtcgctgacgtcgcggtttctaagttcaagaaggtcatttcgcttctgggccgcaccagaaccggtcacgcgcgttttagaagagcccctgtgcctgtgcctgtgcctgtggcttcacctccaccttcggaaccgagagtctaccgtgctacgccgctgcagcagatcccgccacccacccttcacactcactctgtcactgaccactc

SEQ ID NO: 40035 - DNA, 348 bp, Glycine max
  unsure (1)..(348): unsure at all n locations
  Clone ID: LIB3065-008-Q1-N1-B8
ttcgggagaaaaagcaatccactcagagagctagaagaattcaacgatgcctcactatgatgataaatacggcaatacccgcctctatgtggggcacttatcttcgaggactcgttcccgggatctggagcgtgccttcagcagatatggaagagttcggggtgtggatatgaagaatgatttcgcctttgttgattttagtgatcctcgagatgctgatgatgcaagatataacttggatggtcgggatgttgaatgaagtcgtattattgtggaatttgcaaaaggggctcctcgtgggtcccgggaatattttgggggcaggtcctcctnctggctctggacgct

SEQ ID NO: 40036 - DNA, 375 bp, Glycine max
  unsure (1)..(375): unsure at all n locations
  Clone ID: LIB3065-008-Q1-N1-C1
gggcatcctacaggaattggagtggaaaaatggcacaatataaaatgctttatcattaagagtttgaaccatcaaaacatccatttgtcaattgagaaaggaatttgggctactcaaatcatgaatgaaccgattctagaagaagcttttcataattcaggcagtgtaatccttatatttagtgtcaacatgagtggttccttccaagggtatgcacaaatgatgtcctccattggaagggggagagacaatgtttggagtgagggaactggntaaagtaatcctctggggncgagttttaaggtcaaaatggatgtgtttgaatgatttgcctttccacaagacactgcatctcaagaaatcgttgaatgacta

SEQ ID NO: 40037 - DNA, 427 bp, Glycine max
  unsure (1)..(427): unsure at all n locations
  Clone ID: LIB3065-008-Q1-N1-C11
ccaattcccactcaaccaccaaaccctattcagcatttcccccaaatcaccgtcacaccatgggctcctccgcgatggtgttggacccgaaaccctcatcggagcctccgccgttcctcccgtcgacgaaatcggactaccttcaaggcagcttcggcggcgacgccaccgcctccgacgaggacgacctctacagccgcctgaaatccctccagcgccagctggagttcatcgacatccaggaggagtacgtgaaggatgagcagaagaatctcaagcgccaagctgcttccgagcgcatgaggaggtgaaaccgnatacagtcgggtgccgctcgtcattggcccagttcatggagatggttgaccagaacaacggatcgtcggatccaccaccggatccaactactacgtcaggatcctcagta

SEQ ID NO: 40038 - DNA, 330 bp, Glycine max
  Clone ID: LIB3065-008-Q1-N1-C12
ggtgaaaatggcgcagtgtgtgaccaacacattcgtgcaaggaaaagcctgtcttccagttgcagcagctcccactaaaaatgttcggagagcggttcagtgcggtgtgtggtgcaagaagaaggagatacacccgcaattctacgaggaatcgaaggtgtactgcaacggggagctggtgctgacgacaggtgggacccagaaggaatacgtggtggacgtgtggtcggggaaccaccccttctacctcggaagccggtcggcgtctatggtcagcgacgaccaggtcgagaagttccgcaagaagttcggggagctcaaagagatcat

SEQ ID NO: 40039 - DNA, 380 bp, Glycine max
  unsure (1)..(380): unsure at all n locations
  Clone ID: LIB3065-008-Q1-N1-C2
cgaaaccctttctttatcgccaganaattttcaaaccctaaaatccgaatttcgctgatgatctttcctaatcgtcatcataccaaacaatttttcttcatatctgtctccgggagagtcgctttgacgggaaacaagggttttcgctgcaattctaatcggtcaaattggaatcgtcggatcaatttgtcatgaagttcctggagtgttctgctttagatcggcttaatgatttcttgggtaatttgaatctgggagaacgtactatcaaaggatgccttgaagcttatagttgcaaacatgctggatcggataaaaaactcttcatcagtttggagacagagattcttgattatcttgggaaatcatccgacactgat

SEQ ID NO: 40040 - DNA, 413 bp, Glycine max
  Clone ID: LIB3065-008-Q1-N1-C3
gcgatgggcaacactagcagctatgtttcaagcagcagcagcagcagcaaatggctgggcttcgtggcggccgtgtggattcaatgcatctccggcaacaactacactttctcaaactactccgacgccctcaaatccctcatgcaccttactcagctccaactcaacaacctcttcgtcgctaaagacgttggcaaagcctttgggcttctggcgggcctcgccttcgaccgcttccccacttgggctattctcctcattggctccgtcgaaggccttattggctaccgagcccaatggcctcgtggtagccagagaattcagcccctcccttactggcagcttggcgtgtttctctgcatgggaggcaacagcaccacttggatgaacacctgccgcttggtaacatgcat

SEQ ID NO: 40041 - DNA, 437 bp, Glycine max
  Clone ID: LIB3065-008-Q1-N1-C4
caagattcagcaagtgcgttttggaagcagagaccgaaatacttcgagatggcccgtacaaagcaaactgctcgtaagtcaactggaggaaaagctcccaggaagcagcttgcaaccaaggctgcacgtaagtctgcaccaacaactggtggtgtgaagaagcctcatcgttatcgccctggaactgttgctcttcgtgagattaggaaataccagaagagcactgagctcctaatcaggaagcttcctttccagaggttggttcgtgaaattgcccaggatttcaagactgatctgcgtttccagagccatgctgtgcttgcattgcaagaggctgctgaggcataccttggtgggctctttgaggacactaacctgtgtgccattcacgccccaacgtgggactattatgcccaaggatattcagctggcaagaa

SEQ ID NO: 40042 - DNA, 447 bp, Glycine max
  Clone ID: LIB3065-008-Q1-N1-C5
gagaaacatggcttccttaagctccttagtgctgctccttgcaggggtaattctatcccctcaagttcttgcaaactatgagaatcccccagtgtacaagcctcccactgagaaaccaccagtttataagcccccagttgagaagcctcctgtttacaaacctccagttgaaaaccccccaatttataagcctccagtagagaagccaccagtgtacaagcccccagttgagaaacccccagtgtacaagcccccagttgaaaaaccaccagtgtacaagcccccagttgagaaaccaccagtgtacaagcccccagttgaaaaacccccagtttacaagcccccagttgaaaaacccccagtgtacaagcccccagttgaaaaaccaccagtgtacaagcccccagttgagaagcccccagtttacaagcccccagttgagaagcc

SEQ ID NO: 40043 - DNA, 426 bp, Glycine max
  unsure (1)..(426): unsure at all n locations
  Clone ID: LIB3065-008-Q1-N1-C6
cttcaggcacatactcccgcaggttaaatggcgaggatcaaacctcaggctctgctacagcaaagcaaaaggaagaagggtccttctcggataagtgccgtgactgttatattttactttttgattcttgccttggttgggtttttcctgtttgcttcgtacagacattggtccagcagatcaagattacaatccgaagatcacttgtcagtctccgagggtgaaaatacttttgtggactccaagaaatctgagctgcctggatatgctgttttaaatacctctaaaggttctataataatagaactgtacaaggaaagtgctcctgaagttgttgatgaattcattgacttatgtcaaaaaggacacttcaaggggatgctntttcacaaagtaattaagcactatgtgattcaggcaggggat

SEQ ID NO: 40044 - DNA, 438 bp, Glycine max
  Clone ID: LIB3065-008-Q1-N1-C7
cgaatcgctcgcgctactcgttatgtttccgcttggtgagtcggagtgtgcttcgctcgcatctgattctgtgaagattggctatctatcgcggatgttgacgcataactcgttcgacgtccgagtcaactcggccgcgttgatcgagatcgtcgtcgccgggacgcactcgccggagctacgcgcggaggtgagcagtgtcgacgaaatctacgacggagtggtggatctgctccggagcccgatctcgcacccgcgcgcgctcaagatcgggatcaaggccttgttcgcgctttgtttggtgaagaatacgcggcagaaggcggtggacgccggcacgccggcggttctagtcgaccggctcgcggacttcgagaagtgcgacgcggagagggcgctggccacggtggagctgctctgccggattccggcgggatg

SEQ ID NO: 40045 - DNA, 448 bp, Glycine max
  Clone ID: LIB3065-008-Q1-N1-C8
gggtcatggggatttgaaggataagccatggtggcaaaagatgcaaactcgtgaagagttggttgaagcttccgctaccctcatatggattgcttcagctcttcatgctgctgttaactttggacagtatccatatggaggtttaatcctgaataggccaactattagcaggagattcatgcctgagaaagggtctcctgaatatgatgcgttagctaagaaccctgagaaggagtttttgaagactattactggcaagaaagagaccctcattgaccttacaattatagaaattttatcaaggcaccgcatctgatgagttctaccttgggcagagagaatgcggtgactactggacttctgatgccgggccattagaggccttttaaaggtttggaaagaatcttgaagagattgaaaagaagcttatagagaagaacaataatga

SEQ ID NO: 40046 - DNA, 361 bp, Glycine max
  Clone ID: LIB3065-008-Q1-N1-C9
ctctagagtaatggcggaatcagctagaattttctaataatggccaaagacgttgagcaggttacagagcaaggtgaatactccgcgaaggattaccatgacccacctgcggcgccgttgatcgacccagatgagctcactaagtggtccttgtacagagccgccatagctgagttcatagcaacactccttttcctttacatcaccgtgttgaccattattggctacaagagacagagtgacaccaaaatccccggtaacaccgagtgcgacggcgttggcattatgggcatcgcttgggccttaggtggcatgatcttcatgcttgcttactgcaccggcggcatctctggtggacaca

SEQ ID NO: 40047 - DNA, 180 bp, Glycine max
  unsure (1)..(180): unsure at all n locations
  Clone ID: LIB3065-008-Q1-N1-D1
ggagacaagaaaaatgagccatggtggcctaagatgcaaactcgtgaagagctagttgaagcttgcgctatcatcatatggactgcttcagcacttcatgcagctgttaattttggacagtatccctatggaggtttaatcttaaaccggccaactcttagtangcgattcatgcctgaa

SEQ ID NO: 40048 - DNA, 437 bp, Glycine max
  Clone ID: LIB3065-008-Q1-N1-D10
gcaaccagacattcccaatacatggagagcaatggaggcactctatgactcagacaaggctagagccataggagtgagcaatttctcttcaaagaagcttcaagatttgttagatatagcaagagtggttcctgctgttaaccaagtggaattgcacccaggatggcagcagccaaagttgcgcgcattttgtgaatctaaagaaattcatctatctggatattctccactaggttcaccagcagctctcaaaagtgatattcttaagaatcctgttgtcacagagattgcagagagattggggaagacaccagcacaagttgcccttcgatggggcttgcaagcaagtcatagtgtgcttcctaagagcactaatgagtccagaatcaaggggaaattttgatatcttgactggtctattcctcaagatttgatga

SEQ ID NO: 40049 - DNA, 355 bp, Glycine max
  Clone ID: LIB3065-008-Q1-N1-D12
agcattccatagcctcccataaaaatgaagaatactatcttctctggtctgtttctactttgtgccttcaccacctcatacctaccttcaaccaccgcggtggtcgataccgacggtgatattcttcagaatcctggcacatactttatcttgtccgtttttcgacccggcggcggagtagaattcgccgccactggaaacgaaacttgccctctcactgtcgtgcagactctcttcgggaggggctttccagcaatattatcgtcccggttacgaatccctttcatcggcgaaggacaactcttcagcatcctgttccgtattgtgccatggtgcgccaccactccttttaagt

SEQ ID NO: 40050 - DNA, 409 bp, Glycine max
  Clone ID: LIB3065-008-Q1-N1-D2
ctttagcaaattccaattcccaattcccaattcgaaacccttattggtttcagagaaccaaattgagtgatcgtgatggcaccaaaggcagagaagaagccagcggagaagaagcccgcggaggagaagaagtcgacggtgggagacaaggctccggcggagaagaagccaaaggccggaaagaagcttccgaaagagggaggcgccggcggagaagggaagaagaagaagagaaacaagaagagcgtggagacatacaagatctacatcttcaaggttctgaagcaggtccaccctgacattggtatctcaagcaaggccatgggaatcatgaacagcttcatcaacgacatcttcgagaagctttgcccagaatcttctagacttggccgttacaacaggaagccca

SEQ ID NO: 40051 - DNA, 437 bp, Glycine max
  Clone ID: LIB3065-008-Q1-N1-D3
ttcaacatctggactattaactcaggacacgatgtacagaaacaggaaaggacatgccattattgcaccagtgggtcagttgctagaacgaaaggcaaacgatttcaaaatatgatccatttctccaaccgaaaggatgtttggagatttgtgcatgaattaggctacagcaatgaatcatcatctaaaaccaaaggggagttgtactcagttgtctgcagcccaatagatgcagccttggtggctactgcaggcggtgatgacagaggatttctctggaagattggccaagcggattgggcttttgagcttcaagattatggccccattgtaagcggtaaaatagcagattatgcaagtcgtcgagttgcaatgggtttcttgaaggttttctgcatctttggatcacttatcatagcattctcaaagctaacatg

SEQ ID NO: 40052 - DNA, 396 bp, Glycine max
  Clone ID: LIB3065-008-Q1-N1-D4
gtttctttcttcttctacatccactgcacaattgccacatgaatcattaggtagggtttattctgcaagaaaagcaatgagtgcgtccaggttcatcaagtgtgtcactgtgggtgacggtgccgttggcaagacttgcatgctcatctcctacaccagcaacacttttcctacggactacgtgccaactgtctttgacaatttcagtgcaaatgtagttgtggatggaagcactgcgaatcttgggttgtgggatactgctggccaagaagattacaatagattaagacccttaagctatcgtggagcagatgtattcctgcttgctttctctctcataagcagggctagctatgaaaatgttgccaagaaatggattcctgagttgaggcatta

SEQ ID NO: 40053 - DNA, 443 bp, Glycine max
  Clone ID: LIB3065-008-Q1-N1-D5
tttttattctacctaacaccacatggatacgttgccggaggattgtgtttccaaaattctgtcttacacatctccaccagacgcatgtagattctctatggtctcttcaaccctacgctcttccgctgactctgaccttctctggcgaactttctttccttctgattactctgacattgtctcaagggctctcaaccccctctcccttaattcctcttcttcatacaaacaccttttctatgctctttgtcatccactcctcctagatggaggcaacatgagcttcaaattagacaagtcttcgggtaagaaatcttatatcctatctgcaaggcagctttctataacgtggagcaatgaccctttgtattggagctggagaccagttcctgaatcaaggttcaaagaggtggccgagctgagaacggtgaactggttagaaa

SEQ ID NO: 40054 - DNA, 366 bp, Glycine max
  Clone ID: LIB3065-008-Q1-N1-D6
gatctttcttctctttttctctctctatcctcatggctgagaatttggacgacggcgagttctggctgccgcgcagttcctcgtcgacgacgacgtcgtcgtatttccgacaccctttgaagcaaagactccgcctttgtccgacgacgccgctttgctcccgtacgcgttctaccgtggattccaccgttggtggctccagcgagaccgagagcgacgaggatacagcacactcgttgccgagcttaactggcctcttatcttgctcctgtgttgcaccttgcaccgagtcttgggcgcggcttgggtctggatatcctatatcctatctgcgcggcagctgactatgacgtggatccatgaccc

SEQ ID NO: 40055 - DNA, 415 bp, Glycine max
  Clone ID: LIB3065-008-Q1-N1-D7
ccctcttttaagctatttccttctcttaacacaattggttgtgccgattgccatagtcaccaaccaattaacaaaggtatatatatcatcatatcatcaccaaatgaaaaatattgggttgttttttcttgtggtggtggctacttttgtggtggcagccacagctggtagcttttaccaagactttgaaataacgtggggtggtgagcgtgccaaaatctatgagaatggaaaccttctcacactctcccttgacagagcctctggctctggctttcgttccaaaaaagagtacttgttcggaaaattgacatgcagctcaagcttgtgcctggtaactctgctggaacagtaactgcctattatttatcttctctggggcctactcatgacgaaatagactttgagtttttgg

SEQ ID NO: 40056 - DNA, 416 bp, Glycine max
  unsure (1)..(416): unsure at all n locations
  Clone ID: LIB3065-008-Q1-N1-D8
ctaatatggcaattgaaaaccaagacaacactgtcagagaaatcaagccaaagaacaggagaatcatgggtgctggaggccctgatgatgacgacaataggtggccaccgtggttgaagccactgctgaaagagagcttctttgttcaatgcaagttgcatgctgactctcacaagagcgaatgcaacatgtattgcttggactgtatgaatggccctctctgctctctctgcctcgctcaccacaaggatcaccgtgcaatccagattaggaggtcctcataccatgatgtgatcagagtctctgagattcagaaggtgttggacatcactggtgtccaaacctacattatcaaccagcggcaggggtgtgtttttgaacgagaggcctcaaccaaggccagnaaaaggggtcac

SEQ ID NO: 40057 - DNA, 378 bp, Glycine max
  Clone ID: LIB3065-008-Q1-N1-D9
atttgacaggttcatcatcataaccttcaatgaaaagaaatggctgaggcaagcattggcagcaaaagcagcagatggtctttacagggaatgacagctctcgtcaccggtggatccaaaggaatcggatatgctatcgtggaggagttggcacagcttggagccactgtgcacacttgcgctcggaacgaagctgaactcaatgaatccttaaatgaatggaacacaaaaggatacagagtaactggttccgtctgtgacgtggcgtctcgtgcagaaagacaagacctcatagctagagtctccaatgagtttaatggcaaactcaatatccttgtaaacaacgtgggaaccaacgtaccgaaacatacccctgat

SEQ ID NO: 40058 - DNA, 381 bp, Glycine max
  unsure (1)..(381): unsure at all n locations
  Clone ID: LIB3065-008-Q1-N1-E1
gggatattttgcatacatggcaattgatagtctcccagggaatcaagtntgggaaaggatatcgcttctgatcatcccaccaagtcgacgctataagatattggaaggttatcatgcctcgtttgtggagtcagtaccattcaagaccatagctgtattcacaatattacagtttgtgtatttcctaatctgttttggagtgacatggatacctgtaggaggaatactttttccattaccatttttccttctcataactataagagagcatttgcttccaaagatattcaaacctaatcatcttcaagaactagatgcatctgggtacgaggaaattggtggtgctccacatattacacataatataccaccaagggaaaa

SEQ ID NO: 40059 - DNA, 333 bp, Glycine max
  Clone ID: LIB3065-008-Q1-N1-E10
ggcttcttctcctcaggtaaatggaaaattggtgaagcgggctatgttgtataaattggaggaaatgttttaattttgtttctcaagttcagcttcttgctgtacaagtaatagactattattagacttgccagaaatcaccaactgggttgctctttctaaccaggttctctaagtcaactttcagtttttgattgttgaggatggtgctggttttggccctgggggatttgcacataccccacagggctcctgatcttcctgctaagttcaaatccatgcttgtccctggcaagatccagcacataatttgtacttgaaaattaatgtatt

SEQ ID NO: 40060 - DNA, 345 bp, Glycine max
  Clone ID: LIB3065-008-Q1-N1-E11
ctcgagccgctcgagccgatccaagtaaccaaacacacccgccgagaatgatcccgcgctaattcgaagacggagacaaccaaacgccatagtagtgccgaggcggtgacgatggatcccatcatcctctccgacgaagaagacccttcaacgccgttcccgctccgtcccaagaaacgccgaaccgaaccggatccaaacccaaacccaaaccgcaccgtcttcgtcatcgacgatgacccaacccctcacaaatccgccacaccttctatcgttcccgagactccaatgtccgcgctattcgattccgacattgcaatcgtcaaatgcaccataccttccgat

SEQ ID NO: 40061 - DNA, 318 bp, Glycine max
  Clone ID: LIB3065-008-Q1-N1-E2
aatttgatgagttgatggcggctgctgctgctgctgctgaagatggtgaaaatggagatgttgaagagcacactgcataagttcatcgaaggttatacctgtcttgggtgaagatatgtactctttaatgaactgcgcttgtgttgttagtatgtagcggacaaacaaagcaaagaattcgttatatagactggcctgcaatgttgaactatgcaattccttcatttcttttccctataaatagaggctttttgtgtcttagctgttgctgtgttcagttttcgatggataaaaagcattggcacatttaacttgttc

SEQ ID NO: 40062 - DNA, 425 bp, Glycine max
  unsure (1)..(425): unsure at all n locations
  Clone ID: LIB3065-008-Q1-N1-E3
cacaactactacaagtacttccttacaatcaaaaccaacaacaactatggcgagttatcaaaagcactacgatgatcagggtcgcaaggttgacgagtatggcaacgttgagaagcaaaccgacgaatacggcaaccctgttcatgctgctagtgtcacctatgtagccaccagaactgctgctggtggttacagtgatgacattaataagcaacatgataccaccaatgcctacggcgtagacactggtagacagcattctagtggtggctacgatggtgacactaataaacatcatggaactactggtggctataatgatgacaccaatagacatcatggaactataccggnctatggatagacaccgataggcaacaacatgggactactggggctatgtcgtgacactgtaggcaacatgg

SEQ ID NO: 40063 - DNA, 359 bp, Glycine max
  Clone ID: LIB3065-008-Q1-N1-E4
gggagtttccccctggcgatttccctttaagtgtccctttttgcttctagcatcaatatactgcagcgcttcaggagcaggacaaggtttatctttgggagttctcaatcttgcaattgtggtaccacagatggggtgtctgcattaagtggtccttgggattccttgtttggtggtggcaacttgccggctttcatggtgggtgctgcggcagccgcgttgagcgccataatggcgattgtcttgctgccaactccaaagccagctgatgaggccaaggcttcaagcatgatggcagggggctttcactagttaaatgggtttttgattgttcagttttgtccccctgctttaataga

SEQ ID NO: 40064 - DNA, 434 bp, Glycine max
  Clone ID: LIB3065-008-Q1-N1-E5
cttggcatcttgtgttgtgtccctcttttaagctatttccttctcgtaacacaattggttgtgccaattgccatagtcaccaaccaattaacaaaggtatatatatcatcatatcatcaccaaatgaaaaatattgggttgttatttcttgtggtggtggctacttttgtggtggcagccacagctggtagcttttaccaagactttgaaataacgtggggtggtgagcgtgccaaaatctatgagaatggaaaccttctcacactctcccttgacagagcctctggctctggctttcgttccaaaaaagagtacttgttcggaaaaattgacatgcagctcaagcttgtgcctggtaactctgttgaaccagtaactgcctataattaatcttctttggggcctactcatgacgaattaaactttgagttttt

SEQ ID NO: 40065 - DNA, 342 bp, Glycine max
  Clone ID: LIB3065-008-Q1-N1-E6
gtctttctactccaagaaaccagctaaaagatcttttgaagacagagtcaggaaaccaacttgatatgccaacagcaaacctcgtctgtaagatgcgacgagtgaacttggattcgtgaatgttcctaactaacttcaagcaaccgagccccttccaccctctctccctttttccagacatgtttttgcgttgcagaggagattcttttacatcggcaatgcctacttgcagttttttgtcatgtgggtgaatatacctattacctacttgcatattgaatttgtaactagttacaaaagggatacaatctcctgcatattatatcttctgttttatcggag

SEQ ID NO: 40066 - DNA, 449 bp, Glycine max
  unsure (1)..(449): unsure at all n locations
  Clone ID: LIB3065-008-Q1-N1-E8
caactccactcttagctgccattggtttttcttcttccatttctcgtcctttctaagcttttttcgattacccatttggagattctgtcctaatggctcttgctccttccaaagtttcctccttttccgggttttctcccaaacccagtgttggggatgctctgaaaaacccaacttgctctgtttctctgagctttgcgaatgtgaaacttggaagcagaaacccttagggtttgtgcctcaactgtgcctctctcaggggtgattttcgaacccttcgaggaggttaagaagggtgaacttgctgttccaacggctccccaagtctcgcttgctcgtcagaactacgctgatgagtgtgaatctgccattaatgagcagataaatgtggaatacaatgcttcctatgcgtaccactccttggttgcatactntgacagggacaacgt

SEQ ID NO: 40067 - DNA, 433 bp, Glycine max
  Clone ID: LIB3065-008-Q1-N1-F1
ctcgagccgatacggctcgagaaacacacatgctcaaccatggcagcaccaggttcagagacaaagtcaccatcatcctcgaacacgcagcttacgctgaaaccaatcccaggcagctacggaatgccgttttttggagcaataagcgacagacacaactacttctaccaccaaggacgcgacaagttcttcgcgacgaggattgaaaaacacaactccaccgtgatccgaaccaacatgcctccggggcccttcatctcctcggaccctcgtgtcgtcgcgttgttggacggtgcctccttcccgatcctcttcgacaacgacaaggtcgagaagcttcacgttctcgacggcaccttcatgccttccaccaagttcaaccggcgggtttcgcgtctgcgcctacctcgacaccaccgaacccaaccacgca

SEQ ID NO: 40068 - DNA, 335 bp, Glycine max
  Clone ID: LIB3065-008-Q1-N1-F10
gttgaaaacacataagaaaaaaaatgggttcttctctgtggacctgtctgattttgttatcacttgcttctgcttccttcgccgccaacccaagagcaccaattgatgtgccatttggcagaaactatgtgcctacctgggcctttgatcacatcaaatacctcaatggtggttctgagattcagcttcatcttgataaatacacaggtactggcttccaatcaaaagggtcctacttgtttggtcacttcagcatgtacataaaattggttgctggtgattcagctggcacagtcactgctttctatttatcatccacaaactcagaacatgat

SEQ ID NO: 40069 - DNA, 416 bp, Glycine max
  unsure (1)..(416): unsure at all n locations
  Clone ID: LIB3065-008-Q1-N1-F11
gaactttgctgatatagaaaagcagattaatgcttttgcaaagaaggcaaatgatggaactttatcaattgatgagatggctggaggcactcttacaatatcaaatggtggtgtttatggaagccttttgagtacccctattatcaaccctcctcagtctgcaatcttgggtatgcattccatagtgagccgtccaacggttgttggaggaaatattgtcccaagaccattgatgtacgtggctctaacatatgaccacagaattattgatggaagagaggctgtgttctttctgcgacgcatcaaagatattgtggaggatcctcgtangcttctgctcgacatatgaagtgaacctctaatttaaaatggagtaaattaaacctcaaaattcaaatcccttaaggggacccctt

SEQ ID NO: 40070 - DNA, 400 bp, Glycine max
  Clone ID: LIB3065-008-Q1-N1-F12
ctcgagccgctcgagccgcaagtacttccttacaatcaaaaccaacgacaactatggcaagttatcaaaagcactacgatgatcagggtcgcaaggttgacgagtatggcaacgttgagaagcaaaccgacgaatacggcaaccctgttcatgctgctagtgtcacctatgtagccaccagaactgctgctggtggttacagtgatgacattaataagcaacatgataccaccaatgcctacggcgtagacactggtagacagcattctagtggtggctacgatggtgacactaataaacatcatggaactactggtggctataatgatgacaccaatagacatcatggaacctacggtgtctatggtatagacaccgataggcaacaacatgggactac

SEQ ID NO: 40071 - DNA, 392 bp, Glycine max
  Clone ID: LIB3065-008-Q1-N1-F2
gctaaatccaccttttcaaagaagaaagcaagggggtttgatgaagaacggactttaactactcacaggcaaattgatgagaaagaggaagctccagatgaagatgatggtgatgataacgtgcaatggctgacagatacatcacttgatgctgctcgtcaacgtatccaagaacagttaagtgctgtgacagctgatatggttatgctttctacagatgaaccagagaagaagaaaaaagcagcaagtaacggaaaatggggttctcagaatggtaactcaatgcactatgggaccctggttgtgggagtgaaagctaatttgaaggaaggtattggagcgaatgaattgctgcccatctttcagcacatcctgcacctgctcaagaaaag

SEQ ID NO: 40072 - DNA, 384 bp, Glycine max
  unsure (1)..(384): unsure at all n locations
  Clone ID: LIB3065-008-Q1-N1-F3
gttgaatcatgcaagcgtttacgcatcatgaaaggaaaggaggccattggtcgtggtcttgcaccaagagccatggcaaaatccaagaacaggagctagactagtcgcacaattcatgacctgccccatcctttgtaattgcggtgcccagttggcttagttactaaagtaaggataattaagctgcagcagacacggatggacattgctaagtggttgaattatagttaattngtgtcattatggtttgttataatatttcatcaaacaaaacaatgagatgcatgtctaattaagtactaatcatgaacaggaacataatgactctcaatcatgttgttagacttggctttcttatatatcgatctttgcttggtctgtgtg

SEQ ID NO: 40073 - DNA, 412 bp, Glycine max
  Clone ID: LIB3065-008-Q1-N1-F6
aaggaacctatgctttcatcagggttcttttgagttccaacaccggggctttggaaattgattccacctgatcaagtgaaagagattcttcaggcttcatctttgtttctttcacacaatttttccaatttagagcacagaaaatgaatggccacaaaaagttgaattctccaaggggagaggttggagagatagacactagggcaccattccaatctgtcaaagctgctggtgttgatttggcgaagtagccatcactagagacagattttctgtcaagagaagatcatcagagaatgtatttgaaaaggagacgcagcttatcttggcccaaaaggaattaaacaagataaagaaacaggtggataatgctgaggccatcaaagccaaagcactttctgagcttgagaat

SEQ ID NO: 40074 - DNA, 384 bp, Glycine max
  Clone ID: LIB3065-008-Q1-N1-F7
atgaacttgatcggttcatttacttcatgttacttgactagtggagcattttccaagaccgcagtgaattacaatgcagggtgtaagactgctatggcaaacgtggtacaggcaatagtaatggcactcacactacaatttttggcgccactatttggcttcacccctcttgttgctctctcagctattattatttctgccatgcttgggctcattcattacgaagaagtcatccatctctacaaagttgacaagtttgactttgttatttgcatggctgacttccttggagtcatctttataagcatggacgttggtctcatgctgtctgttggtctcggcgttcttagagcactttcatatgtggctagacctgcgccatgc

SEQ ID NO: 40075 - DNA, 441 bp, Glycine max
  Clone ID: LIB3065-008-Q1-N1-F8
agaaaattctctcccttccaatgatcatctgaaattacataggatgatatttatagggttatcaagaactcttcagcattaaaaaaggtgatttataatcagaaaacaagggacagccacacagaagttatcttgaatcagaaaacatgatgctaagaagctcttcaacaccagttcttggatccctcctctcatccttcccagatagtcctaacaacaatattcactcagaaacctgtcatgcacttaaacactttccaccaaccagtgtcccacaaccttatcacaaacttacttgccaccaaacccggtcctttgcatgtggttcttctccaatctctccctcaattggtgagcttgaaaggcaaaacaaaggctttagaagagtccaatctgatgggaacttgcaagacttggcctacttttcttgcaacaatgaag

SEQ ID NO: 40076 - DNA, 365 bp, Glycine max
  Clone ID: LIB3065-008-Q1-N1-F9
ttcgatcccaattcttcctcacaccattttcagttcacagggttaggtttaggtcccttgtctggtctggtgtgcaattctccccatacaataacaatacacccactttatcaaccaatcaatcaatatacctagtagtgattagatttagtgatcgatcctctcctttcgttctcaaaccgtagatttagattttagggtttctctcttaatataatcttttgacacttccgtaacaaacaaaaaaattacataaattttcccttataattattattatttggcttttatctttggattaactaggcttgagctatcacaaataattgtttcggagaatggaaagaaaaagggtgcaagttccc

SEQ ID NO: 40077 - DNA, 370 bp, Glycine max
  Clone ID: LIB3065-008-Q1-N1-G10
gtttcttgcagcttcacactgtgccactgctccgttttagggttgcaatggcgctgttcctcctctacgagtcggcgtcgggttacgcgctcttggaggcgcacggcctcgacgaaatcgggcacactacggaggccgttcggaactccgtttccgacctcaacaggttcggcaaggtcgtcaagcttcgctccttcaaccccttcaccttcgccctcgacgctctcaaacagtgcaacgccgtttccgaagggctgttgactgatgagctgagaacggttttggagactaacttacctaaagttaaggaaggtaagaagtccaagttcagtttaggtgtatcggatccaaagattggttcccagatatc

SEQ ID NO: 40078 - DNA, 406 bp, Glycine max
  Clone ID: LIB3065-008-Q1-N1-G12
atgaacttgttcggttcatttacttcatgttacttgactagtggaccattttccaagaccgcagtgaattacaatgcagggtgtaagactgctatggcaaacgtggtacaggcaatagtaatggcactcacactacaatttttggcgccactatttggcttcacccctcttgttgctctctcagctattattatttctgccatgcttgggctcattcattacgaagaagtcatccatctctacaaagttgacaagtttgactttgttatttgcatggctgccttccttggagtcatctttataagcatggacgttggtctcatgctgtctgttggtctcggcgttcttagagcacttttatatgtggctagacctgcgccatgcaagcttggaaagttacctgaaa

SEQ ID NO: 40079 - DNA, 352 bp, Glycine max
  Clone ID: LIB3065-008-Q1-N1-G3
ctcaaaacggtccatgtcctataaatgtacttcgattgggtgtgtgtgccagtgtgttgaacctggtcaatgttacactaggatcaccaccaaccctcccctgttgcaccctcattcagggtttggctgatgttgatgttggtgtttgcctttgcactgtcctcagagctaaccttcttggcatcaacttaaacttgccaatttccttgacattgcttctcaatacctgcagagggaacatccctaatatccagtgttcttaaatttatcttctctagtggaatatacatgtggtctatgaaaaaataaactcatcgcctccatccacaattccacatgttgtctctctcat

SEQ ID NO: 40080 - DNA, 440 bp, Glycine max
  Clone ID: LIB3065-008-Q1-N1-G4
gttatcaagaggttcctcatgaagggcccatgtgcgatctgttgtggtctgagccagatgataggtgtggctggggaatttctcctcgtggtgctggatatacatttggccaggatatatccgaacaatttaatcacacaaacaagcttaagttaattgctagagctcatcagctggttatggatggatttaactgggctcatgaacaaaaggtggttaccatttttagtgcacctaactactgttatcgatgtgggaacatggcctccattttagaggttgatgattccatgggccacacatttatccagtttgatcctgctcccaggagaggagaacctgatgtcacccgtagaacgcctgattacttcttatgatgttgctgctgctgcatatcatacttggggtcgagttacatctcattctgcacaaatttcaag

SEQ ID NO: 40081 - DNA, 376 bp, Glycine max
  Clone ID: LIB3065-008-Q1-N1-G5
gcaatgacagctatattagaatggttagccccgctcgctcgcaacgggcttagatggcaatccgagagaagctatgagcaacactgctttgtttccaggacaaatgtgttgctggtgcaaaccctttattttgcaagtcaagaaaaaacagaagcaataatcactgagcttcttgtgggtctgaattatgtgtggagatatgctagggagttcaataaaaaagctctgctagactgtggcagtggtggggtagatattggatattctcaactaaatggataagcaatttttatgaagctcatgtgaggttctcttttcaacaaaagtgcagtacctgacaagtgattgggatgaatcttttcaggcacaccaattc

SEQ ID NO: 40082 - DNA, 429 bp, Glycine max
  Clone ID: LIB3065-008-Q1-N1-G6
tatcacttgagggcagatatacatcgacaggcagctgtggaataggcagatatacccaccaatcaacgtcctcccatcactatctcggttgatgaagagtgctattggtgagggaatgactagaagggatcattctgatgtgtccaaccagctctatgcaaattatgctattggaaaggatgtccaggcaatgaaagcagtggttggagaagaagcactttcatctgaggacctgctgtatctggaatttttggagaagtttggagaggaagtttgttgcccagggagcctatgacacccgcaatatattccagtcacttgatcttgcatggactttactccggattttccctcgtgaacttcttcatcgtataccagccaagactctggaccagttttacagcagagatgctggtaattgatgattaa

SEQ ID NO: 40083 - DNA, 397 bp, Glycine max
  Clone ID: LIB3065-008-Q1-N1-G7
gcgcgccatggctggcatcaccacctcccccttcaaactcgctcaggttccgactctcttctcttcttctgattccaaactcttcggccttcccctctccaatccctattccctcaaattcgacccttcttctctctccactacctctctctcctacgtcaaagcccgctactacggcggcggcggcggccctccccgctcccccaacgactcccgcttccgcaagtcctccgattccgacgacgacgataaagctctcgacctctccactctcaggtcagataccgtgaggcttattgatcagagccagaatatggtcggagtagtgtcaattgatgacgccattcaaatgggctgaaggatgtcgaacttggactggtaatattatccccagatg

SEQ ID NO: 40084 - DNA, 307 bp, Glycine max
  Clone ID: LIB3065-008-Q1-N1-G9
aaagggcttgggagtgaagttcccctttgaccaacccatgaaggtgtacaacagcttgtggaatgctgatgactgggccacaaggggtggtttggagaaaacagattggtccaaagcacccttcatagcagaatacaaagggttccacgttgatgggtgtgaagcttcagtgaatgcaaagttctgtgctacacaaggcaagaggtggtgggatcaagcacagtatcatgatcttgatgcttctcaatggagatggctcacgtgggtgcgcaggaaatacaccatctacaactactgcactgacaga

SEQ ID NO: 40085 - DNA, 364 bp, Glycine max
  Clone ID: LIB3065-008-Q1-N1-H1
aatttctggccctatagtggtggcaggagtgttatgtttcatagctggttcaatatctagtgctggtggaattggtggtggtggacttttcataccaatattaaccattgtggctagcctagacctcaaaacagcttcaagtttgtcagctttcatggtcacaggagggtcaattgcaaatgtcatgtgcaaccttcgtgccacaaatcctaaacttggtggcaagtcattgattgactatgacatagcacttttatcagaaccttgtatgctgctaggagtgagtgttggagtcatatgcaaccttgtgttcccagaatggttgattaccatgctatttggtgggtttctaaactgggctacc

SEQ ID NO: 40086 - DNA, 303 bp, Glycine max
  Clone ID: LIB3065-008-Q1-N1-H10
caaatattttctttttttcctttatctctcttcattcagaaaacaatgtctcgctgctgatttgcagtcttcttgtgttgactggaaaatgatgtacccttgattcccataaagagctattgaaactattatattagctgaaaaaaaaaaaaaaaaaaaaaaaagaacaaaaaaaactaaagatactcaaacccaaaattaacttctgtcagggaccgattaaaactaccctacgaatattcgttgaaagctaccttggatatgttgcttacacctaatgacctttttgcgacccaaatcaca

SEQ ID NO: 40087 - DNA, 409 bp, Glycine max
  Clone ID: LIB3065-008-Q1-N1-H12
caacatacacaaagcaaagcatgggagtgactctggagtttatgacacagaaggacgttatgtgccagcaaatattgagaacatattcagtaagtatgctcgtacagtacctgacaagctcacacttggggagctctgggacttgacagagggaaaccgaaatgcttttgacatatttggctggcttgcagcaaaatttgaatggggggttctgtacattctggcaagggatgaggaaggtttcctgtcttaaagaagctgttagaagatgctttgatgggagcttatttgaatactgtgctaaaatgcatactactagtgatgccaagatgagttgaaattggattatgcagtgtgcataggtacgtgtgatgtgtcgttctgttagacatgttagtggtgtaatgtg

SEQ ID NO: 40088 - DNA, 427 bp, Glycine max
  unsure (1)..(427): unsure at all n locations
  Clone ID: LIB3065-008-Q1-N1-H2
aagagctatgacgtcgctgcccgctggattcggtcggatatcgatgggtctccttctttagcgctttagctcgtaccgcgacatggaaggtatcgaggaattagatgtcggaatcggagcgnntcgtcgagaaattatattgcatcaaatatcgatacctctgagattgtcgccatcaagatggaaagcaagaagaccaagcatccgcagctattgtatgaagcaaagttatatagtattcttcaaggagaaagtggtgttccaagtatgaagtggtgtggcacagatggagacaataatgttctagttattgatcttttggggcggagtcttgaggactcttttgtctattgcgggaaaaagttttcattaaaaacggtttttatgttggccgatcagatgctgacaagaatagagtacatgcatt

SEQ ID NO: 40089 - DNA, 202 bp, Glycine max
  Clone ID: LIB3065-008-Q1-N1-H3
tcggactctctcggcaaattccaattacacatatctaacaaataaggagccacaaatgttcatatatgaattgcaattattcgtcttcttattagaccctatcctgaagccaaaggaaatgacatcggaattcctcggggaattccaatttcacattttcaagacataaggaggcacaaatgttcatatatgaattgaaata

SEQ ID NO: 40090 - DNA, 309 bp, Glycine max
  Clone ID: LIB3065-008-Q1-N1-H4
aattattttattttattggcgaatgttggtggttggttgggatgggattccaacccataacctatgtgcttccctttttccttcttttctttctttacaatttagaccaaccttgtatctctatcattctgaattattaacgttgtcgtgttttgtgttttgtgttgtgcaggggacaattatctgaagccgtatgtaatttcggaaccggaggtaacggtaactgagcgtagtgaggaggatgagtgtttgatatttaggagtgatgggctatgggacacagtgcaaaacgacatcgcatgcaaagtg

SEQ ID NO: 40091 - DNA, 307 bp, Glycine max
  Clone ID: LIB3065-008-Q1-N1-H5
gcgagacaaaggagccgtcactaacgtcaaggaccaaggggcgtgtggttcgtgttggtctttcagtacgacgggagcgttggaaggagctcattatctggccactggtgagctcgtgagccttagcgagcaacagcttgtggattgcgatcacgtgtgtgatccagaagaatatggagcgtgtgactcaggctgtaatggtgggttgatgaacaacgcatttgagtacatacttcagtctgggggagtacagaaagaaaaggactatccatacaccgggagagatggcacctgcaaatttgacaaa

SEQ ID NO: 40092 - DNA, 409 bp, Glycine max
  Clone ID: LIB3065-008-Q1-N1-H9
atcatatcattcgagctctgaatgcttctctctccataataacaaaaccaacaccctctttctctttctctcttcttcatttccaatgctgcagcaatctgcaagcttcataggcactacgacagacccaattgaattcccgagaaagaattgaagagaaaaaaccgtaaagttaggatcttttgtgtgatttcgatgggtgcgtacagagcggacgatgattacgactacttgttcaaggtggtgttgatcggagactcaggcgttgggaaatcgaacctcttgtctcgtttcacgaagaacgaattcagcttggaatccaaatccaccattggcgtcgaattcgccacccgcagcatccacgtcgatgacaagatcgtcaaggctcaaatttggaacacggaaggcc

SEQ ID NO: 40093 - DNA, 416 bp, Glycine max
  Clone ID: LIB3065-009-Q1-N1-A1
tagattgctcttttctccttcgctcttccctttcccattccgattcctattcctcctttccctctcctctccgctcctccaattccccccaaactttctccctccgccgcttcgccgccgcctctctcgcttgccctccaccgccgccgccgcccctcgacgccatggcccagaaaatcggaaagtccacgcgccgccccggtgcctcctccaaggcccgcgtctatgccgatgtcaacgtcgttcgccccaaggaatattgggactacgagtccctcaacgtccagtggggggagcaagatgattatgaggtggtgagaaaggtgggtagggggaaatacagtgaggtgttcgaaggtgttcactgcaccgacggtgagaaatgtgtcattaagatcctgaaacccgtgaagaag

SEQ ID NO: 40094 - DNA, 338 bp, Glycine max
  Clone ID: LIB3065-009-Q1-N1-A10
ctcctcctacttagagccattagatcgaattcgatgcatttcggatttgatctgatggttttggacttctaattagtctaagatggacaaggttacgaggttggcaacagaaaagggtgcggtggactttaccgcgagctcttggtgcctgagctatgcactcaacattctgatgcaagatcttggagcgatccctgtggttcatgaattcgtctgagaccctgtgggcaatgaaatagaggtagctataacggggtttgtgtggcctactactgttactgctgtgttcatcggaaggaatctggagttggacacctatgatggcatgatcctacgac

SEQ ID NO: 40095 - DNA, 364 bp, Glycine max
  Clone ID: LIB3065-009-Q1-N1-A12
gaaaagtgtttcatttgtttctcccaagtcagaacacatcacggcacaactaaacaacaatgtcgatcgctttttccttctttactgcactctcttccaaatccgttccatccttttccctctctaccccttctctctgttttcgcctcactcccctccgccgtcccaccgatcgcttttaccctctctgctcctccgccggaggacctggcggcggatccttcggaggccacggcggtcccggacacggaggacatggtggcggcggcggcggcggcggtcacgacaacgacgacaatgagagaaagaacgaggctttattggtggtggcggaagcggggaggtcgttggagagcgtgccggc

SEQ ID NO: 40096 - DNA, 418 bp, Glycine max
  Clone ID: LIB3065-009-Q1-N1-A2
gttgagtgaataatagttaataatttaaaattcacatcataatggaaccttagcatcgaaggacaaattatagaatgttgtgtgtgtataaattccaccaaagccaccccaccaaattcctcctcatcaaaccaagacatagcaaacgatccaaactcttttttcatttgcagcatcaaaatgagtggtagcaacgatggtagcggcagctggagctctaggtttttgaaggtggctagtgcagctgccgctacagccgccgttgccggcggtttatatgccattctttcatcctcaacctctgctagctctgagatggaagtgccgtttggcagcgcacggcgtgagagcaaagaacgtgacgatggtggctccgggtctcatcctcgcgagggtgccaccacggtcagtcgttgga

SEQ ID NO: 40097 - DNA, 381 bp, Glycine max
  Clone ID: LIB3065-009-Q1-N1-A3
gaaccaagaaaccaagcaaatcattgttctctctgtcctgtgttttgtgatttcccccttcaagccaccaccaatggccaacaacgagatgcaagttgagaggggtttggacttggaaaggtacatggggcgttggtatgagatagcctctttcccttcaaggaaccagcccaaggatggcgtgaacaccagagccacatacactcttaggaatgatggcactgtgcaagtgctcaacgagacttggagtaatggcaagagagggcacatagagggaactgcttttaagtctaaccgcacaagtgatgaagccaagttcaaggtcaagttttatgtccctccctttttgcctatcattcctgtaacaggggactactgggt

SEQ ID NO: 40098 - DNA, 431 bp, Glycine max
  unsure (1)..(431): unsure at all n locations
  Clone ID: LIB3065-007-Q1-N1-A12
ctagaagcaataagatgaaaatgaaagtgcttgttttgtttgttgctacagttttggtagcatatgaatgccatggctcagactaccagaagttccctctccaaatgaaaactgggtttggtgggcaatacagcaatgaggtggcatgtgccagttggaggcttggcgtggaagcaaacaacgtagtcaagtggcaaactgttcctgcagcttgcggagagtacatagctgactacgttctaggagaccaatatagatcagattccaaaacagttaaccaacaagcttatttctatgcttaatcccttaaactcaccaacanagatgtctttgtctttgacgttgacgacactactctctctaatctccagtattttgctaaccatggatttggtgtggaaccacacaatacgacggcgtttaagaactgg

SEQ ID NO: 40099 - DNA, 387 bp, Glycine max
  unsure (1)..(387): unsure at all n locations
  Clone ID: LIB3065-005-Q1-N1-A4
ctntcattgaatctctgaacctactcatcaaatctcgatggctgttaccttccctcacgaaaacgcaccctcttcaatttcaaaccacattcctttacttcaatctcaaaacaaaaccagcagaagtatcggaataaaaacccaaaatattcccccaattccaccaacaaaaacattatcaccaaaaaccaaaagtcacaaaccaaaaacaacgaaaaaaatgacaacaataacaaccacctcgttagcgtcattagaaagctgggccatcctcccattcttcattatgttcctctccatatactngatcggatacttnncttatttccgcaaacaaacccccaagatccgaccccgattctccagctgcctgatctcgctctttca

SEQ ID NO: 40100 - DNA, 415 bp, Glycine max
  Clone ID: LIB3065-005-Q1-N1-A5
gtcttcgaaggctttagtgaaggatcaaggttgggtctgtgtcgttgcagttgatattatctgtactacttaatctaatgccagctgccatactttgtcagttgctcaaaagtcatttttggaacctatgatcacttttgctagagctttcccagaaaacttaccctctacacataaccatatgttatgtttgggcaaggtgcataaaatctttcaattttataggactgaattttgctactttttcatatttacctgctccattcttatgtcaattgcaggcaaaggtaaaagtagtgagaaggcaaaagcagaacctactaaggtggagatgcatcgagtggctgttgatattttgaaggaagcagatttcaataaggtaagtaatgcttttctatgccaattcatgtatctt

SEQ ID NO: 40101 - DNA, 417 bp, Glycine max
  unsure (1)..(417): unsure at all n locations
  Clone ID: LIB3065-005-Q1-N1-A6
caccacaccactctctctgctcttcttctacctttgaagggtttaaagtattaagatggcagagacattcctatttacctcagagtcagtgaacgagggacaccctgacaagctctgcgaccaaatctccgatgctgtcctcgacgcttgccttgaacaggacccagacagcaaggttgcctgcgaaacatgcaccaagaccaacttggtcatggtcttcggagagatcaccaccaaggccaacgttgactacgagaagatcgtgcgtgacacctgcaggaacatcggcttcgtctcaaacgatgtgggacttgatgctgacaactgcaaggtccttgtaaacattgagcagcagagccctgatattgcccagggtgtgcacggncaccttaccaaaagacccgaggaaatcggtgc

SEQ ID NO: 40102 - DNA, 335 bp, Glycine max
  Clone ID: LIB3065-005-Q1-N1-A8
ccacaagctcagccaggttatggcgtgcccccaacgtccgaaccagcagcttatggtagtcaacctccagcacaatctggttatggatctggctatggaccccctcagacccaaaagcctagtggcacgccgcctgtgtatggacaatcccaatcacctaacacagcaggaggctatggtcaatctggtcatttgcaatctggatatcccccttctcagcccccaccttctggaggatatgcccaaccagagtcaggttctcaaaaagctccaccatctggttacggtggtgcagtgcaacccgggtatggtccaacatcatatggaggtgtccc

SEQ ID NO: 40103 - DNA, 387 bp, Glycine max
  Clone ID: LIB3065-005-Q1-N1-A9
ctgacatttttgacaaggaaacagggaaaatggttccaggtattgtgtttgcaagaggaccagctgtggctgtgttgatgctcctggaatcagagggtgagacttatgctgttcttactgaacaggcaagggttcctgttggaagaattattttggaattgcctgctggaatgttggatgatgacaaaggtgattttgttggtactgcagttcgtgaggttgaagaagagattggtatgaagttaaatgtaggagacatggttgacctcactgctttccttgactctgcaactggatgcaaagttttcccttccgggggaggatgtgatgaagaaatcagtatttttctgtacagagggcgtgttgataaagagataatatcacaac

SEQ ID NO: 40104 - DNA, 331 bp, Glycine max
  unsure (1)..(331): unsure at all n locations
  Clone ID: LIB3065-005-Q1-N1-B1
tatttctattccttctatcaacattctatctattgtatgtatgtgctcaattttatgctgaccatactttattcttcttacgcttatgttatacgactgccacaaaggatggctcaatcaacaatgaagaggaaacgaacgaagggttgactagaatgaaccaatcggataacagaactcgttcacattcatcctcaccatcaactcaaaaccgtcacacagaattgaggaaaccagctactactacttgagcaaggaaactgcagaaatccatacgctgcagaacacttgnggagctagaacttgacgaagtatagggttatacggatct

SEQ ID NO: 40105 - DNA, 421 bp, Glycine max
  Clone ID: LIB3065-005-Q1-N1-B10
acttcccaccttatggaaaggattttcagggaggaaaccggacgggtcgattttgctatggaaaaatttcttatgacttaatagttgaacaattgcgtattaaggagtatttgcctgcatatttggatccgaatctcaaatctagtgatcttgttaccggcgtgtgatttgtctacggtgcttcaggatacgatcctttgacacccaaaataacgttagttctatcggtatctactcaactagacatgttcagggaatacataggaaagctgaaaggcattgttggagagagcagaacagactacatcctatccaatagtctttatcttgtggtggcaggtagtgacgacattgccaacacctatgatgttgctcacgccagagttttacggtatgacattacttgttacaccgaccttat

SEQ ID NO: 40106 - DNA, 378 bp, Glycine max
  Clone ID: LIB3065-005-Q1-N1-B11
tcgagcccagatagtttactcaccatttccgtatgttacttcacggttagtgggtagtggttacatgatatcagcacactttcactcactgtgctttcccgtgacacgcatctatacttgtccagaagaagtaagatccatgaactaacattcccacacgctcgcttcaccatatttgccacccttttaacctcacttcttaaggttattatgctcccttttccttgcttgggaattgggtttggatcggattttcttggctgtaaaaggaaacatagaaagaactaagatgggaagaggtagggtacagctgaagaggatagagaacaagatcaatcgccaagtaactttctgcaaaaggagaggtgggttgctcaa

SEQ ID NO: 40107 - DNA, 390 bp, Glycine max
  Clone ID: LIB3065-005-Q1-N1-B12
ttttcagctttcattggtgtggcctagctgttttctcaatgagaaagccttcatctctgcaaagcgcacttttgcgctttggggttcccttgttgcttgttatcaccttctgttatgctacttctactgctgcagcaacaactcaagtttcagggaatgaagagctgccaaagacaaacctaaatgggcatgatgaagaagcaaaattcggattttttcatcataaaccaatattcaagaaacatattccaattccagtatataaacctgtaccaaagccatttccagtgtataaacctataccaaagccagttccagttccagtgtacaagcctattccaaagccagtgtataagcctattccaaagccagttccagtgtacaagccta

SEQ ID NO: 40108 - DNA, 414 bp, Glycine max
  unsure (1)..(414): unsure at all n locations
  Clone ID: LIB3065-005-Q1-N1-B2
cacaaacacacactgaactaaaaaacatcaaaagagacatggctgagcaaaccttcatcatgatcaagcctgatggcgtccaaagaggccttattggcgagatcattagcagatttgagaagaaaggtttctacttgaaaggtttgaaacttgttactgtggaccgtccttttgctgagaagcactatgctgatttgtctgccaagcctttctttagtggtttggtggattacattatctctggccctgttgttgccatgatctgggagggcaagaatgttgttacaactggccgaaagattatcggagccacaaacccaacttaatctgaaccttgaacttatccgggtgactttgccattgacatttgaaaggaatgtatccatggaagtgatgcagtngaaagtgcttaca

SEQ ID NO: 40109 - DNA, 354 bp, Glycine max
  Clone ID: LIB3065-005-Q1-N1-B3
caagtttcgtttccaggtttcggcgcaatcggctgctgcttcaaggaaggagagctcgctattctctatcaacaagtaaaatgtcacgtgaagagggtgtcattgcagatgatccagctgctgctgctgctgccatcccaggcgagccaatgtatatcatgactgccttacaacttgtgctcagaaaatctctggcttatggcggtttgacgcgtggccttcatgaaggtgcaaaagtgattgaaaagcatgctgcacaactctgtgttcttgcagaagactgtgaccagcctgactatgttaaactggttaaggccctttgtgcaaagcacaatgttagcctgctgacagttc

SEQ ID NO: 40110 - DNA, 409 bp, Glycine max
  Clone ID: LIB3065-005-Q1-N1-B4
ccggcgagcatgcccatcagatgtattctgcattggcaagcgaagcaaggaagcgttgtgaacagccaagtcctgaatgagatctcgcagtgcgtcgaaagcctcaacggcgtcaaagaaggaagatgcaaagcctccctcactttctacagacccaatttacgagaccagtcggtgaccatcgatttcccgcgcgattttctggggatatcgatgctggagcagccgaacaaatactacttcatcattcgcggccagaagattgttctggaggccgattcttctatcttgcttatcatggagaaactccagtcctacaagtccaaagtcgcccttcatttcgagggagtgctgtataaattgggtgactttcagatgagagtcattaaagttgttcccagtcaagcag

SEQ ID NO: 40111 - DNA, 210 bp, Glycine max
  unsure (1)..(210): unsure at all n locations
  Clone ID: LIB3065-005-Q1-N1-B5
cttgctctctctctctgtctctctgtctcctccatggccgtctgcttcagtcccaaacaccctgcttacgatgagatgatatacacagcaatcggagctctgaaggagagggatggttcgagcaagcgagccataggaaagtacatagaacaagtctacaaggaccttncacccactcaccctgctttggtgactcaccatctcaaccga

SEQ ID NO: 40112 - DNA, 411 bp, Glycine max
  Clone ID: LIB3065-005-Q1-N1-B8
gttctttctctcgcaatcttcactacattcaccgagcatgtgcattcacattgaatatggctgagactacacaatctaatgctgagttgttggagtggcctaagaaagataagcgccgcttcctgcatgttgtgtatcgtgttggtgatcttgatcgcaccattaagttttatactgaatgttttgggatgaagcttttgaggaaaagagatattccagaggagaaatatgccaatgcttttcttggatttggccctgaacaatcccattttgttgtggaattaacatacaattatggggtgacctcatatgatattggaactggatttggacattttgctatcgcaactccagatgtttacaaattggttgaagacatccgggcttagggtggaaatgtcaccagggagc

SEQ ID NO: 40113 - DNA, 402 bp, Glycine max
  Clone ID: LIB3065-005-Q1-N1-B9
gtgcggtgctcttcctgtttcttctctctatcctttcctggattggatggtgaaggattttaatattgcagaaggggaggaagatatcagtgcctatgctggctatattgggtctgcattcatgcttggtagatgtttgacatctatgttgtggggaatgatagctgatcgctatggtagaaaacctgttgtgattataagtgttatttctgttgtcattttcaacatactattcggccttagtacaagtttttggatggctgttattacaagactttttcttggatgttcaaatggtgtgatgggcacaatcaaggctttttcttctgaaatatttcgagaagaatatcaacctctgggactctcaaccgtctctgctgcttggggagtaggtttagcact

SEQ ID NO: 40114 - DNA, 418 bp, Glycine max
  Clone ID: LIB3065-005-Q1-N1-C1
tctatatctatccacacacaacacacacctctggcgtctactccgcacaactccttacacacaaaacacaacacacgctcatgttgttgatgagtggaggcaacaaaaaacatatatccatcactcacaagaccaattgacctttgttcttggtacaattcgattcaaatttttcgcactaaggagagccactcaaggctctgggatgtactatacgccgatcggggttctgattatcagcggcgagaaagttcaagagacacagtgggagaaggagcgataagagagaccatggctttgaaggctttgaaagatacgaaatcgctgtcagcggccgacgtggccggggcggaggctgagatgacggcgtcgtcggcgaagtgctgctgctgtgggctgatggaggagtgcacgcacc

SEQ ID NO: 40115 - DNA, 358 bp, Glycine max
  Clone ID: LIB3065-005-Q1-N1-C10
gaaaagaaaaaaaaaccacaacttcataaaaaaagacttagggtgcacgccattgtggtgagatagaaagaaagatgcaaatggaattccaaggctaacaacacaacttcaacaaattagggcttttattattctttgcaatcatatcatatccttcactccttcacttcactctcaaaactcccacagttgaagagacatgttggactatgaatgggggaacccgtccacgataatgctctccggaaacgaagacagctccgtcgcgggctccgaccaaacccaccgtcaaatcttcgaccactatgcgtcccacacactcatccccgaccacttgctacacgcgccaacgcactcc

SEQ ID NO: 40116 - DNA, 363 bp, Glycine max
  unsure (1)..(363): unsure at all n locations
  Clone ID: LIB3065-005-Q1-N1-C11
atcgacttcatcttcggcgacgcctncgcggtgttccagaactgcaccatggtggtaagaaagccactggagaaccagcagaacatcgtgacagcacaagggaggctcgacaagcaggagaacaccggcttcgtcctccagaaatgcgtgatcaaggccgacaccgacttggtacccctcaaagacacaatcaagaactacctcggaaggccgtggaaggagtattcaagaaccatcatcatggagactcagattgatgacctaattcaccctgatgggtttcttccttgggaagggaactttgccctaagcacactttactatggtgagtacaacaacaatggggctggttctagcaccact

SEQ ID NO: 40117 - DNA, 361 bp, Glycine max
  Clone ID: LIB3065-005-Q1-N1-C12
ctcatcagtattgtgggcaatgcccatgtcgactctgagagatgcactaccactggtcacctgcttcacaagcttgaatgcatcgacaatcgtgtcattgaaaggtttgagaaggtagttgatgagatgaacaagaggtctctcaagtttgcctgcgtgctggactaacttagcgctgagcgtgaaagaggaattaccattgatattgctgtgtggaagatcgtaaccacaaagtcttaatgcacattcattgatgcgtctgtacatatggatttgattaataatatgattactgggacataccaatctgactgcgctgatcttatcattggttcgaccactagtcgttttgaagctggta

SEQ ID NO: 40118 - DNA, 405 bp, Glycine max
  unsure (1)..(405): unsure at all n locations
  Clone ID: LIB3065-005-Q1-N1-C2
gcgagattgataacagctggagaagagacagagctgcttgttggtgttaaaaatgatggggattcaagcttgaatgttattgcgatcaaggctagtgttcaccttccttttgatcaccgtatgctggttcaaaatcttactgcacagggttttaacaatggttctgtaccagcctcagcacaagctactttcccatatttatttgcagtcagtaagttcttgcaggcaggaacttttgaccttgtgggcactattatatacgagatagatgaacatccatatcaaagcaccttttttaatggcactgttgaggttgttgaatctggtgcttntcttagcatggaatccgtttntcttgttactcttgnngttgcactccttgtcctnctggggctatggattcat

SEQ ID NO: 40119 - DNA, 330 bp, Glycine max
  Clone ID: LIB3065-005-Q1-N1-C3
aaatgatcccaagtttgatcacattgacatcaatgagaagcaaaaggtcttaaatgaatgtgtggaagctgagaactggctcagggagaaaaaacagcatcaggactcgcttccaaaatatgccacccctgtacttttgtcagctgacgtaagaaagaaagctgaagctgtggacaggttttgtaagccaattatgacgaaaccaaagccactgccacccaagccagctacaccagaagcaccagcaaccccacctcctcaaggtggtgagcaacagcaacaaccaccttaagaaaatcctaatgccagtactaatgaaaatgctgggga

SEQ ID NO: 40120 - DNA, 410 bp, Glycine max
  Clone ID: LIB3065-005-Q1-N1-C4
ctttcattgaatctctgaacctactcatcaaatctcgatgcctgttaccttccctcacgaaaacgcaccctcttcaatttcaaaccacattcctttacttcaatctcaaaacaaaaccagcagaagtatcggaataaaaacccaaaatattcccccaattccaccaacaaaaacattatcaccaaaaaccaaaagtcacaaaccaaaaacaacgaaaaaaatgacaacaataacaaccacctcgttagcgtcattagaaagctgggccatcctcccattcttcattatgttcctctccatatacttgatcggatacttccttattttccgcaaacaaacccccaagatccgacccgaattctccagctggctgatctcgctctttcacggcacccccgccgcaatcctcg

SEQ ID NO: 40121 - DNA, 397 bp, Glycine max
  unsure (1)..(397): unsure at all n locations
  Clone ID: LIB3065-005-Q1-N1-C5
aattcttccaccaagttatgggtttccttgtgttgcttcgtttgtccctcttaggtctctcttctagttccagcatatcaactcatcgttccatattggaccttgacctaaccaagtttaccacacagaaacaggtgtcttcactgttccaactatggaagagtgagcatggacgtgtctaccataaccacgaagaagaggcaaagagacttgagattttcaagaataacttgaactatatcagggacatgaatgcaaacagaaaatcaccccattctcatcgtttaggattgaacaagtttgctgacatcactcctcaagagttcagcaaaaagtacttgcaagctcccaaggatgtgtcgcagcaaatcaaaatggccaacangaaaatgaagaa

SEQ ID NO: 40122 - DNA, 414 bp, Glycine max
  unsure (1)..(414): unsure at all n locations
  Clone ID: LIB3065-005-Q1-N1-C6
ctgggggagaaattggccctctcaaatataaattcgctgagatcgtatgaagttgtcgatcaagtgaaggaagcgctcgagaaggactgccccggagtggtttcctgtgctgacatcataattatggcatctagagatgctgtctctctgacaggtggacctgagtgggaggtgaggttgggaagattggacagcttgagtgctaatcaagaagactcaaacaacatcatgccaagcccaagagccaacgcaagctctcttattgatctcttccagaaatataaccttactgtgaaagacctagtagcactctcaggatctcactctattggccaaggtcgttgnttctccgtcatgtttaggctatacaatcaatctggaactggaaggcctgaccctgccattgaccctagc

SEQ ID NO: 40123 - DNA, 128 bp, Glycine max
  Clone ID: LIB3065-005-Q1-N1-C7
aaggaagcccctcctgaatatcagagctatcttgtccaagtgacgaaaataccaagctgcacaaaactgtaagacctggatcgttggtaagtggatcacgccaagagagcaatactgggcaccacgtg

SEQ ID NO: 40124 - DNA, 414 bp, Glycine max
  Clone ID: LIB3065-005-Q1-N1-C8
ttcagaggcatgtttgacagccggatatttttggcgatggttttcgccaccgtggcatttcaagtggtgatagttgaattccttggaacgtttgccagcactgtgcctctaaactggcaattctggttactaagtgtggtaatcggagcagttagcatgcctatagctgctatcctcaagtgcatcccagttgaaagagatactagtaagcagcaccatgatggttatgaagcactgccatctggtcccgagctggcataaaatattataagaggcattaccctggttgctctgctgatttctcctactagtgtagtgtgcttttaatgctgtcattccttacggcattgcaaatttatgtaattttgtaaagacttgataccatacggaatttccaggcatgacaaaacatat

SEQ ID NO: 40125 - DNA, 400 bp, Glycine max
  unsure (1)..(400): unsure at all n locations
  Clone ID: LIB3065-005-Q1-N1-C9
cggctcgagcggctcgagaaaaaggtggataagccaaacagggtttgggatcaaccggcgccgcaaaccaaactggactttactgatcacgtggatggagatggggatagaagcgctgactttttggctaaggagcaaggagagagtatgatggataaagaagagattcttagcagtgatagtgaggttgaagatgatgatgatgatactggaaaggataacatgcctgtggctaaaaagaagggttggttttcctcgatgttccagagtattgcaggaaaggctaatttggagaagtcagacctggaaccagctttgaaagctctgaaagacaggctcatgaccaagaatgtggccgaggaaatagctgagaaactatgtgagtcantggcagcaagtc

SEQ ID NO: 40126 - DNA, 273 bp, Glycine max
  Clone ID: LIB3065-005-Q1-N1-D1
attgacatggataaagaggttaatataatccattgcctggaaaactctatagaaaagaggaaaggtcacattgatgctgacaagatggcagtgttgaatggttggcatagaatcgattgtagaacaagagatgcgcttcgccgtagttgtctttctgagctcattgagggttatgaggaatgtgtacgagctttcataacagaaagcacagatggcgatattcttgaactaccaaatcaggaaccttttccatagattgttactgcatgaagt

SEQ ID NO: 40127 - DNA, 387 bp, Glycine max
  Clone ID: LIB3065-005-Q1-N1-D10
ctcgagccgattcggctcgagcacaaacctagatttcatgcggaagaggaagatttctagtgacttcaacatgatgatggatcagaaaatctacacatgcgagcatccccaatgcccttacagcgaagttcgccttggtctccatgataggtctgctagggacaatcatcaattgaattgtgcatatagaaacagttctgcagattatggtggtggtcccaatttccatgctactgaggttaagccagtcatattcccccagtcctttgttcaacccaacactacagctcagtctgcaagtttggttgcaccttcatttgatctaactggtcttggagttcctgaggatggccagaaaatgattagtgaccttatgacaatctatga

SEQ ID NO: 40128 - DNA, 398 bp, Glycine max
  Clone ID: LIB3065-005-Q1-N1-D11
tctcggtgaagctcaattccacattttcaagaaataaggatgcaaaaatgtgcatatatgaattggaattatgtgttttcttattaggcctatcctgaagccaaaggaaatgagatcggaattcctcggggaattccaattccacattttcaagaaataaggaggcaaaaatgttcatatatgaattggaattattcggtttcttattatgcctatcctgaagccaaaggaaatgagatcggaattcctcggggaattccaattccacattttcaagaaataaggaggcaaaaatgttcatatatgaattggaattatttgttttcttattaggcctatcctgaagccaaaggaaatgagatccgaattcctctgaggtaccgagctcgaattcccta

SEQ ID NO: 40129 - DNA, 410 bp, Glycine max
  Clone ID: LIB3065-005-Q1-N1-D12
tttttcaagatattgagaaagatgaatttggcaaagttgcgagttttaagttgcataatcttgttcatgatcttgcacgatctgttacagaagatgtttgttgtgtcacagaaggcaatgatggatctacttggactgaaagaattcaccatctctcagatcataggctgaggcccgattcaatccagttgcatcaagtgaaatctttgaggacctatttattgccacatcagcgtggtggtgcactttctcctgatgtattgaaatgttattctttgcggatgcttcacttaggagaaatggaagaattgccatcttcaattggtgatttaaaacatctaaggtacttgaatctttctgggggcgagtttgaaactctttcagaatcattatgtaaattatggaatttg

SEQ ID NO: 40130 - DNA, 399 bp, Glycine max
  Clone ID: LIB3065-005-Q1-N1-D3
gtgatctgaacgatttatacataaactcagctgtgcaaagggatgtttctgggaaccgcaaggctgtggttatccatgtcccctacagattaaggaaaggattccggaagattcatgtcaggcttgtgagagaacttgagaaaaagtttagtggaaaggatgtaatcctgattgccacccggaggatattgaggccaccaaagaaaggttctgctgttcagcgtccccgcacccgaacactcactgctgtacacgaggcaatgctggaagattttgtattgcctgctgaaattgttggaaaacgtgttaggtataaaattgatcggttccagattatgaagggcttttcggaccccaaggagcgaaacaacaccgagtacaaattggaaacttttgctg

SEQ ID NO: 40131 - DNA, 409 bp, Glycine max
  Clone ID: LIB3065-005-Q1-N1-D4
gcacaacctcgttccaacagccatggcggttcctgcaacgtcctgagcccctgtccttcgacccatccccaccaaccgttccttctcttccccattccgttcactccccactcccaccacccgaaaacccctaaccgtcttcgccatggcccctaagaagaaggtgaacaagtacaacgaaaactggaaaaaggagtggtttggcgcggggatattctacgaggggagcgaggaagtggaggtggacgtgttcaagaagctggagaagaggaaggttttgagcaacgtggagaaagcaggcttgctctccaaggcagaacaattaggattctcgctctcttccatagagaagctcggcgtcttctccaaagccgaagagctcggcttgctcagcttgctcgaccgagcc

SEQ ID NO: 40132 - DNA, 416 bp, Glycine max
  unsure (1)..(416): unsure at all n locations
  Clone ID: LIB3065-005-Q1-N1-D6
tcaaaattcttctccttttgtgcttccaactcttggcttggttatattattctctttcactttctgccaacccttggagtcaacatgactatcctcattgagcaatctgatcactttggggctgaagtagaggcaaagactgaaccaataaatgagagagaactggtgttggatggtggatttctgataacacagaccaactcatttgggcacatgtttagggcttataatgatgctgaaagtgagaggcatgaaggagtggagaacttctacagaaaaaatcacacttaccaatcaattgatttcgtgaagaaaatgagagaggagtacgcanaattgaacagggtagagatgagcatatgggaatgttgtgaactccttaatgaagtggtggatgagagtgaccctgacttgga

SEQ ID NO: 40133 - DNA, 136 bp, Glycine max
  Clone ID: LIB3065-005-Q1-N1-D7
cttaaatacttacacttccttaatggaatatgggggagcgggttaatatctgtatttctttactttaattgcttacctttgatactgcatactttgacattaacttcagaatgcttaacatgtgccctcttaacca

SEQ ID NO: 40134 - DNA, 409 bp, Glycine max
  Clone ID: LIB3065-005-Q1-N1-D8
ctctggtttcgagggtgacaacatgattgagaggtccacggaccttgactggtacaagggaccaactctccttgaggctcttgaccaaatcaatgagcccaagaggccctcagacaagccactcaggcttccattgcaggatgtctacaaaattggtggtattggtaccgtgccagtgggacgtgttgagactggtgtcgtgaagcccggtatggtggtgacttttggtcccactgggctgacaactgaggttaagtctgttgagatgcaccatgaggctctcacagaggctcttccaggtgacaatgttggctttaatgtgaagaatgttgcagtcaaggatctcaagcgtggttttgatgcatccaactccaaggatgaccctgccaaggaagctgccaacttcaca

SEQ ID NO: 40135 - DNA, 242 bp, Glycine max
  Clone ID: LIB3065-005-Q1-N1-D9
attttaaccctaggatcctttctcctctcatccacctggagcaaagaatgaaccgggcaatggaagaagataatgaggaagaagagttcaacaccgaaccggtatttgtactcatgatgagtgttaaaaataatactcaggtactgattaattgtcagaacaacaaaaagcttctgggtcgtgtaagggcttttgacaggaactgcaacatggttcttgaaaatgtcaaggagatatggact

SEQ ID NO: 40136 - DNA, 190 bp, Glycine max
  Clone ID: LIB3065-005-Q1-N1-E1
ctggatgtcacggcaattttataggtcctccatgaaagagagagagagagaggaaaacgaatccaagggagatatacaaccaccgtccaaaccaccatcaacaacgtacgtcttacgttgctacatggccactcgtgttatccaaccaggattcctaaggaactttcgttccaacaccgtcacaaaaccc

SEQ ID NO: 40137 - DNA, 356 bp, Glycine max
  Clone ID: LIB3065-005-Q1-N1-E10
gcaggatgatagtgataatgtcacccgatttttaatgttagcacgagaacctatgattcctggcactgataggcgatttaaggtactcagctaatatagaataattagctggaattattggatagaacacatcacatgtctcctgactcccctattgattggatttatgcttatcaatattaatattgccattgattgtggtgttgatttctcagactagcatagtattttctttagaagagggtcctgggatacttttcaaagcccttgctgtttttgctttgcgccagattaaccttacaaagattgaaagtcgtcctttgcgcaaccaacctctacgagcagatgatagcaac

SEQ ID NO: 40138 - DNA, 346 bp, Glycine max
  unsure (1)..(346): unsure at all n locations
  Clone ID: LIB3065-005-Q1-N1-E11
ctcgagccgattcggctcgaggcttcacgtggaacatgggcaactgattgctggaatggaggaggcacacaaacatgtggaagaactagaatcaaaagccaagcaacttgaggaagaggtcgagaggcaaagaaccgtgatcttagaaggagcagaagagaaacgcgaggccataaggcagctatgtttctcactcgagcactatagagatggctataatatgcttcggcagcatgttatggggcacagacgagttccagctttggctgcctagttaataanatttgaaacgtgatcttgaatattggtttggtgctatcttcatttcagacttgggatggtttat

SEQ ID NO: 40139 - DNA, 368 bp, Glycine max
  Clone ID: LIB3065-005-Q1-N1-E12
ctctaataaattttaactctaaaccatggctattaccatggtgcgactctacttcatgctctgcatcacaatcacacaccaaacgattatgtaacccctaacacactcaattaccaatacccattacaacagtacctaccagcttgtcaaatctacctacactcgctcagcctcacgcttacactgacaaactcatcataactccgaagtccctctcccaatttcttcaggaagcgactacacgctttccttaaacttacgctcacacacttctcaattcataaccctttacatggacacatgcagcgacctcctctgggatccatgcactaccttataatgcattctatgcgaaggcaaattcaacg

SEQ ID NO: 40140 - DNA, 415 bp, Glycine max
  Clone ID: LIB3065-005-Q1-N1-E2
cttgatacattcgttgctggatggggtgattaagcatctacctgatggagtaccagaaaaggaagaaatcaggagaatgagaacagtggcaaatactgtaggtgttgttaatgatcatgattcagtttgggtaagatcaattttggaggaggttggtggtgcaagtgatggatcatggggcttgttaccatacttatttgccacattcatgacatctaatatttggtccaccacagcatttaatgttgacacagagggttttagtaacaatatccattgcttggcaaggtgcatttctgcagtgattgccggaagtgagtttgttagattggaacgggaacatcagcatcgacagtctttaacaaatggacatgctagtgagggaatggatcccgaattatcaagtcatatgtca

SEQ ID NO: 40141 - DNA, 410 bp, Glycine max
  unsure (1)..(410): unsure at all n locations
  Clone ID: LIB3065-005-Q1-N1-E3
ctgacccaaaatccgtcttctctttctttctactccgatgcctgcgttgcttttggtcttggtcgaattgcgaactcagcagcagaagaagttcctcaattgtttcacctcaaattcgattcgaactatgtaaacgccactgtcgcgtcgggtttgttgtctctgtttttgttgcggtgttactgttcctcggttcggatctccgaagcatgaatctcagcaacggaaagggatccatgtcaacccttactgcaagcgtggttatgaaatccggcgacgccgtctccgaccagtttccggcgggtctccgggttctcgtggtggacgatgatcccacgtgtctcatgattcttgagaagatgctccgcacgtgcctctacgaagttaccanatgtaatcgagcagaaact

SEQ ID NO: 40142 - DNA, 423 bp, Glycine max
  Clone ID: LIB3065-005-Q1-N1-E4
gtcagctttttcttgcttccgtagttcatatggcgtgtgtgtcaagtcatcacagtttttctctttgcattggctctagctaaaatttacccctcaacatgtcaagtggtgcagggaaaagtctcctgcgttgactgcactcacaactatgacttatctgatattaaggtttcggtgaggtgtgatggtgtgaaaaaactggctttggctactacagaaaatgatggctccttcaaggttgatcttcccctagaccacacaaaaccttcttcttctgtgaataattgcctagcaaaacttcttggtgggccagttcagctttatgtctcaagggaaaaccaggtatcccaaattatcaagggcaaagatcaaaacagctacaccatctccactttccttagtttcaggacatcatgcccccta

SEQ ID NO: 40143 - DNA, 408 bp, Glycine max
  Clone ID: LIB3065-005-Q1-N1-E5
ctgaagatgatccatccacttttttctctcttttcgggcggcgagctgctggttttcttttaccttgctatatcatggcttgggcaatcagtattttgcaacgccggcgacaaagacaagaagcggcagcactagcggcaacccaagttgcttttgttctacaaaccgggcagcgtaggggtctgcagtttgcaataggaccaggaccaccaacaatgaatacacaccaaccggaacaagtgtaatttttgtatgccaccagtgtatgtaacaaggcttgttggaatgccatgcatttttttactcatgatttttctgagctctaatttacatacatagcttgagagactttgagatggtacttaatattctagggtccttaaaccctcaaaaagaaccgctcatttt

SEQ ID NO: 40144 - DNA, 368 bp, Glycine max
  Clone ID: LIB3065-005-Q1-N1-E6
ccaagctctcgatgcattagatgagaaaaggggttccacgagggagaaagctttgtcatcgatcattgacgctttcaatagcaacatgcagcatgagtttgtggagaagaaatttgctaccttactacatcaatgtcttgcttcaataaaaaagggatctaaaaaggcatctgctaaggagatagctttggcatctcatgccattggttgtttggccttgactgttggatgcggtgacaatgcccgcgagatatttgaggaatccattcgtcctttggatgaatctctcacatctaggatagatgtttcaaagacaccatcattactggagtgtttggctataatcacttttgttggagggaacgatc

SEQ ID NO: 40145 - DNA, 380 bp, Glycine max
  Clone ID: LIB3065-005-Q1-N1-E9
cagaaacccaacttctgttcatatggaaaccagtgcggcgatggatgtcgaggaccaaccttcacccaactccaacaacgttaaacgcttcggccttaaaaactctatccaaaccaatttcggtgatgactatgttttccaaatcgtcccaaaggaagattggagtgcaatggcggtgtcactgtcaacgaacgcagtgaaactctattcacctgtggcgggtcagtattttggagagttcaagggtcactctgaaaccgtcaatcagatttcgttttcgggtccttcaaatccccatattttgtgttcgtgttcttctgatggcaccattagagcttgggacgctcggacatttcagcaggtttcttctatcaatgctg

SEQ ID NO: 40146 - DNA, 420 bp, Glycine max
  Clone ID: LIB3065-005-Q1-N1-F1
gaagaggagaaaaagactatggagggtttgaagaagagagagctggagctggacgaagcaggcaacggtgaattggcttccaaggaagagcttcgcttcctcattgaacctctcgctaaaccccagctcgtcgatcttcttgctaaactagggtcccaatatccttcaattgcagaagaaataaaaagtattgcaagtgcagatcctgcccatcgaaagctttttgttcgtggcttggcctggaataccacttcagaaacattgcgtgctgcatttcaagagcacggagaaattgaggaaggagctgtgatctttgataaagtgacaggaaaatcccgtggctatggatttataactttcaaaaatatggaatcaactcagcaagcattgagagcccctagcaagttaattgatgggaga

SEQ ID NO: 40147 - DNA, 371 bp, Glycine max
  unsure (1)..(371): unsure at all n locations
  Clone ID: LIB3065-005-Q1-N1-F11
cacattcatactaaaaataaataaactaatatttgttacagacacatttcttttttagtatgagtagcttaacaaattttatctaatgcattcatactaaaataaaggattatatacgttaacaaataccaattgtcttagataaaattatagaactgtgacagctgtcttcttgctaacctaacatgtcatacccaaatatttataaggcttgaagggaaagtggctcttatcagtggtggtgctagcggtataggtgaggccactgcaagactcttctctaagcatggagcacacgttgtgatagctgatattcaagacgatttgngtctctctctttgcaaacacttggaatccgctttctatgtcca

SEQ ID NO: 40148 - DNA, 259 bp, Glycine max
  Clone ID: LIB3065-005-Q1-N1-F12
cacaaagcaactaggcatagtgtgcatgatagggacaacggcaagagctgtgtacagagatgaatggcctaagcgagagcatggatctacggaaggttactctgctcttgccattggatgcaagtgccagatacatgcccaatgacgcttgttgggacgaccagaaaaactaccttggctatggggtctcgggagttggcaacaatggccttccctttgcctgagtgagttctggattcaaatgatataagggtggccc

SEQ ID NO: 40149 - DNA, 420 bp, Glycine max
  Clone ID: LIB3065-005-Q1-N1-F2
gaaaatctgaaatttcatttctctctgtataaatatcctgagtccttatcagcttcactatttcgattgaaatcgccgaagaaggtattgacgtcgatgatgaaaatgaaattggtgaaaacattactgcttctcctttgtgtgaaactcttctgttatgcagtgattggtgctcctcaaacttgtcctgctaacaatgaggataaatgcggcgattcagatgaatggaaaggggagtttttccctgacattcccaaaattaaatatgagggtccgtcaagtaagaatgtgctttcatttaaatggtataatgcagaggaggaaattcttgggaagaagatgaaggattggttaagaattagtgttgcattttggcatacattccgtggaacaggtgctgacccatttggtgcacctacc

SEQ ID NO: 40150 - DNA, 418 bp, Glycine max
  Clone ID: LIB3065-005-Q1-N1-F3
tttcattctctatttccatttttcggccgtccagaagacgccagcataccactaaagggtccacaggacgaccttcagaacgtgcctcaacaggccgccgaccaaaaacctcagaaactcagcccagatttctacataaaaacttgccccaatgcccaaaaaatcgtggccgatgcacttgcagacatcgttaagaagaatcccggcgctctcggaaacctacttcgccttcaattccatgactgcttcgttaatggatgcgatgcatcgatcttgctagattactcgccaagcggtgacaccgtggagaaaagttcaatggtgaatggtctactcctgaaaggagctgatatgatcgatgacataaagttgaagctggaggagcagtgtcctcaaactgtgtcatgtgctgacacat

SEQ ID NO: 40151 - DNA, 405 bp, Glycine max
  Clone ID: LIB3065-005-Q1-N1-F6
ttggtgtgttgatgttttattaaacttttgtactcttgcgttgaaactagttggttaggcaagttttagttttctattttatttcagacttttcaggtgctcatattcttatgatgatcatcaaactgcaaatatagtgagcccattaagctattactgaaatttgttgcagatttgaaattcttctaagatggatacttcttataggactggtggagtcaagtacgagtgcttgctttttgatatggatgacactctttacccattgagcttaggtctcaatttgttttgtcgcaagaacatacaagagtatatgttagaactcttgcatattgaagagagtgaagtgccaaaaatgtgtttggatttgtatagggaatacgggacaactatggcaggattaaa

SEQ ID NO: 40152 - DNA, 94 bp, Glycine max
  Clone ID: LIB3065-005-Q1-N1-F7
ctcaaattcactttctgcggatattccttatacctggaggggtccaacaattgtgtacgaaaacgatacatggttgatatccacttggattcct

SEQ ID NO: 40153 - DNA, 417 bp, Glycine max
  unsure (1)..(417): unsure at all n locations
  Clone ID: LIB3065-005-Q1-N1-F8
ctctgagtatcgtatcgttttattattatttctagggctgtcttatcagtatgtattcaaaaccctagctaggtttttggagctccctttctttctttccgatcccaccgtcaaacttgtcattctatatgctttgcagggtccattgaatatgtctccgtcgttggatcttcctcccaagggtggcttcagttttgatctatgccgaagaaacgcaatgcttcaaaacaagggcctcatagccccaacctttctcaaaactggcaccactattgtcggtttagttttccaggatggtgtcattcttggtgctgatactagggcaactgaacgacctatagtggctgataaaaactgtgagagaattcattatatggcacccaacatatattgctgtggagcangcacagctgctga

SEQ ID NO: 40154 - DNA, 213 bp, Glycine max
  Clone ID: LIB3065-005-Q1-N1-F9
tgcataaatgactcgctgggctatatggaaaccatggcgggagcgggtgtagatgactaaccggcagccatatggatctacgcagaatgctgggatcacgcaagctctatcctgaccgcttaaggcgatgactatgccatgaacatcgtaccggacgaagagctgactgcaatgcataggttactgtcaactgacgagcataacctatattga

SEQ ID NO: 40155 - DNA, 419 bp, Glycine max
  Clone ID: LIB3065-005-Q1-N1-G1
aagcttgttcagtctttcttggaactttgttactctcacacatgtcgggctccgtgcctttggtttcaaccatttttgtcttgcttctgcttctggtggccactgagatgatggggccaacaatggtggcagaagcaagaacttgtgagtctcagagccaccgtttcaaggggccatgtttgagtgacaccaactgtggctctgtttgccgaaccgaacgtttcactggaggacactgccgtggcttccgtcgcagatgcttctgcaccaaacattgttaattttaaaaaattaattaagagtgctttgatagaagatgatagatctatcatctttctactcgtgttgttaattaaccactttgtgtttgagaataagggttacccattctactatgggtttctttggttgcctcttat

SEQ ID NO: 40156 - DNA, 390 bp, Glycine max
  unsure (1)..(390): unsure at all n locations
  Clone ID: LIB3065-005-Q1-N1-G10
gaaaatttgaagagtttgtttattgtgaaaaaaagaaaagggcaggcagcaaagaaagccatagagacctttaaggaaaccgcagccaacattggcgcctctgccaagtctggcttggagaaaaccaaggccactatccaagagaagaatgagaagatgaatgcagaagatcaaactcaaatggatatggctaccaagaggaaagaagagaagatcaaccaggctgagatggagaagcagcaggcccgtaagtactacgccgctgcaaaacaatacgccatggctgagcacatggcaaagggcaaccacgacaccgncgggcctagaatcgagactgccacacacatcaccagtgggcccgggactgacaatgctatgtactctaacact

SEQ ID NO: 40157 - DNA, 409 bp, Glycine max
  Clone ID: LIB3065-005-Q1-N1-G11
tccttaggattcaaaataattgtgtgcttttggaacaagagattggaagggacgtttttagaagtaaaaacctattcgtgttgtgtgttggggcgtggcacggcactctttgtctcaactcaactcaatgcaagcccttcgtccactcctttcccatttctgatccaattgggtggccattagtgtgttgactggatgagattgatggacatgcttctaacagttcaataatctttaattcgaaacatggaaacactgctgtcttgtctttttatctctggggctctatagcaacacacaacattttttctgaatttgattcaggtgataatgttaatacaaacttctgtccttagttcagttgaagctggtctatgttatgtatctgatgatgggaaagatgttctat

SEQ ID NO: 40158 - DNA, 415 bp, Glycine max
  Clone ID: LIB3065-005-Q1-N1-G12
acttgaagttgcagagagaaaatggattgagaattctctgtcttggctctttctcttgccaactttccttccttgggatcattctgcttctttgctatggaagactcagattcagttgctacgctgatagattccacaacttctaagatacagcagctgcaaaaggcatttgctgaacttgaaagttaccgagctgttactctgaacttgaaatggaaagaactcgaggaacattttcatggtctggagaaatccttgaagaggcgctttcatgaattggaagaccaggaaaaagagtttgagaacaaaacaaggaaggctcaggagatactggagaagcggcaagcagctgtttatgccaaggagcaagccacgttgcagaggcttcaggagaaaagggatgctgctgtatttg

SEQ ID NO: 40159 - DNA, 383 bp, Glycine max
  Clone ID: LIB3065-005-Q1-N1-G2
ctcgagccgctcgagccgcgagaattcttcttggcctccgtccaggattcaaccattgtgagaagaaagaggtaggggaaaaaactggtgttccggcgacattgctgtggttttcaacgtataaaccatttcgccggaacccagagaaattaacaatgtcttcccctcataactctgctcctcataattcctcacccgataactccacccctgatgatgccactcccaataactccattcctgataattccacacccgataactccattcccgataattccacacccgataactccacatccaataaatccgctccccataactccacacctgataacgccactcccgataattctacacccaataattccaataaatcacac

SEQ ID NO: 40160 - DNA, 390 bp, Glycine max
  Clone ID: LIB3065-005-Q1-N1-G3
atttgtcgtgatgtccaccgtgcagagccagattggaaaagaatattgttaagatacttcaacccagtcggtgcacaccctagcggttgtattggggaggatccccgcggaattccaaacaatctcatgccatttgttcagcaagtagcagttggccgacggcctgcactgacagtttttggaaatgattataatacaactgatggcactggggtatgctctgactgacttaaacttatgcactgaaatttttccatgatgggcacattgctgcgttgcttaaactagatgatcctaatataggttgtgaggtttataacctgggaacaggaaagggaacatcagttttggagatggttcgagcttttgagatggcatctggaaagaaaa

SEQ ID NO: 40161 - DNA, 423 bp, Glycine max
  Clone ID: LIB3065-005-Q1-N1-G4
gctttatcatgtggcattactaccaccaatattagcaccagctgaatatgattggaatttcgtttgttctctgtcatgctgctatggcttccttatcgaatatcttactgatgttttgtttgttcaatcttctagcatacccagtttcagttcattcagctggtgaagttccaattaatgtgacaaagcacttttccttctataacttcagcttcagcaacaaccccagattagtccatgatgtgaagctcctaggcagtgccaagttctcaaatgaaaagggtgctcttcaaatccccaatgaatcagaagatataagacaccaagctggtagaggcatctattccttcccaattcgcctgctagatccaagcaccaagactccagcttcatttcaaaccactttctctttccaaatgaaca

SEQ ID NO: 40162 - DNA, 410 bp, Glycine max
  Clone ID: LIB3065-005-Q1-N1-G5
ctgacccaaaatccgtcttctctttctttctactccgatgcctgcgttgcttttggtcttggtcgaattgcgaactcagcagcagaagaagttcctcaattgtttcacctcaaattcgattcgaactatgtaaacgccactgtcgcgtcgggtttgttgtctctgtttttgttgcggtgttactgttcctcggttcggatctccgaagcatgaatctcagcaacggaaagggatccatgtcaacccttactgcaagcgtggttatgaaatccggcgacgccgtctccgaccagtttccggcgggtctccgggttctcgtggtggacgatgatcccacgtgtctcatgattcttgagaagatgctccgcacgtgcctgtacgaagttaccaaatgtaatcgagcagaaact

SEQ ID NO: 40163 - DNA, 392 bp, Glycine max
  Clone ID: LIB3065-005-Q1-N1-G6
aggcatcgttagcagttttgtagattcaacctcaagttggggagttacgttctaatatatttacacaagactgataagagaaaatgtctctgattccaagtttcttcggtggccgaaggagcagtgttttcgaccctttctccctcgatgtgtgggaccccttcaaggattttccatttcccagttctctttctgctgaaaattcagcgtttgtgagcacacgagtggattggaaggagacaccagaagcacacgtgttcaaggctgatattccagggctgaagaaggaggaagtgaagctggagattcaagatggcagagttcttcagataagcggagagaggaatgttgaaaaagaagacaagaatgatacgtggcatcgcgtggagcga

SEQ ID NO: 40164 - DNA, 420 bp, Glycine max
  Clone ID: LIB3065-005-Q1-N1-G8
ccgcgctgcagtcgccagggaggcagcggcggcggcggagaggccaagaactcgtttggcggccaaaaaagaggagaagccccttacagtaatatccgatcacgctaagaaagacgccgacgccatggctgacgagagcggtggcttgagtgcaaacaagggcgttgcacaagaagatgacaccaacgcagctccttttccggagagggtttttgttggccgacgagtcattggtggtaacgaccggagcactggtgctggtgccactaaggctcgtgaggctgctatgacagttcaaagaaagatggtagattctcagtgtaagaagagcaaaggttggtagactcctcggcttgtttatgggcagtgctctttttcaataaaactcggaacatttcgacagattctgtgtatgcactt

SEQ ID NO: 40165 - DNA, 389 bp, Glycine max
  Clone ID: LIB3065-005-Q1-N1-G9
ctcaaaaggtgaggtcgaagttctctgtttcttttccttgtgacggcaatgggaaggtgaaaaaaaaggttcccatcataaactttgacacatgaagagagatcacattacgggtttgccaaactaaagaaaaaagttggagtttttgatatggctcaatagctggttccatttgaaagtgttagtagtggtatttgatccttcgtgcaagcaaaaacaacagtgactatctgatataagttttgagaggttatcaaatttcatgctgagggtggtttgaggaatgagagcagaagataatggatttctggccagaatttcttgcaagcagttcgggaagagagtttgtagcaggtggctctggaggcattgctggtataatttcaggt

SEQ ID NO: 40166 - DNA, 232 bp, Glycine max
  Clone ID: LIB3065-005-Q1-N1-H1
gtgagaaacatagaaaggaaataattgatctttgaaaatgcgaggaggaaagaaagctggagagtccatcaaggaaacagctgcaaacattggtgcttctgccaaggctggcatggagaaaaccaaggccactgtccaagagaaagcagaaagaatgacggcacgtgatccgatgcaaaaggagttggcaacccaaaagaaagaggcaaagatgaaccaagcagaacttgac

SEQ ID NO: 40167 - DNA, 395 bp, Glycine max
  Clone ID: LIB3065-005-Q1-N1-H10
ataaagaaagatcatggcgatggcaaacttggctcgacggaagggttacgccgtcgttttgtcgtcgaggtcgtcgctttgtctgacaaggtggagggggttcgcgtccggatctgacgaaaacgacgtcgtggtcatcggcggcggtcccggcggctacgtggcggccattaaagcggcgcagctgggtctgaaaaccacttgcatcgaaaaacgtggcactctcggcggtacctgcctcaacgtcggatgcatcccttccaaggcacttttgcattcttgccacatgtatcatgaggctaaacatgcatttgccaaccatggggtcaagttctcatctgtcgaggttgatttgccagccatgatggcccaaaaagataaagcagtttctaatc

SEQ ID NO: 40168 - DNA, 407 bp, Glycine max
  Clone ID: LIB3065-005-Q1-N1-H11
ccggacgttgcggactgcgaggttagcttcaatgctgaattcaagcctgatgttgaagatgcgtatacgggtatcatacagaacgccacattgatgtcccccaccgatgaaccaatagtgtccaataactttcaagttgttgaactgggaaaattgttgctcaccatacacaatcctaccttgtaaaaaaagaggctactttacaggttcaagatcaaaccctactctgattgagagaaaataacctctggtggtggttttgggtacatgaaggaaattgaacttgaagagtaagaaatatgcatgtcatcattagatcggtccatttttcatctatagctgtggtcgtcagttgtttgcagattgtctttctctgactttggtgaatgatgtgttgcatgtaacac

SEQ ID NO: 40169 - DNA, 423 bp, Glycine max
  Clone ID: LIB3065-005-Q1-N1-H2
ctcccttttttcgtgcgcaaactgttcccgttggtctctgtccctctgcacttcacaatcctaccctctcactgtgctatctctcagcatcttcgcaatcacacccttcccagatggccttgcaaacagctactcctccaacaactcccagtgcccaagttgttggtaatgcatttgttgagcagtattaccatattcttcaccattcaccaggttcggtctatcggttttaccaagactctagtgtgataagccgtcctgattccagtggtgtgatgacatcagttacaaccatgaaaggcattaatgagaagattctttcactaaatttcaaggaatttaaagcagagataaagactgcagatgctcaaaaatcatacaaggaaggagtgactgtgttggtgactggatgcttgactggca

SEQ ID NO: 40170 - DNA, 407 bp, Glycine max
  unsure (1)..(407): unsure at all n locations
  Clone ID: LIB3065-005-Q1-N1-H3
cctgaactactgaacaacaacctcttcttcttctctctcggtctgtagcataatcattcatcaccacacaagagaaaaaagaaaaagaacaaagaacaaataaacctttttttttttataaaaaaagaaagaaaaggaaataaagttttttgttttttcgatgaaccagaagttcatcggaaagccgccggcgacggtggacctggatcggatgccggagcgtgggtcccaccaccggcgttcccactccgacaccttcttacgcttcgccgcgaacttcgacgaccttctcctcttcgacccctccgacttcgacatctccggccttccgtcgacgctccctctgccatctncggtctccgncggctggtttcgatgtccgtcgactccgacgagtccggcaaaca

SEQ ID NO: 40171 - DNA, 384 bp, Glycine max
  Clone ID: LIB3065-005-Q1-N1-H4
tctcaccattccctccaacctctccaagcccgccgccctgcgccgcaaactaagcccaaagctaaggtccgccgccacaaccaccatcgtctgcagcaccaccaacaacaacaacaacaacaacgtgtcctccgacctgaaggcgttctccgccgcgctggccctctcctccatcctcctctccgcccctctccccgccggcgccgacatctcggggctcaccccatgcaaggagtcgaagcagttcgcgaagcgtgagaagcagtcgataaagaagctggagtcgtcgctgaagctctacgaggcgggcagcgcccccgcactggccattaaggccagcgtggagaagacgaagaggaggttcgacaactacgcgaagcaagg

SEQ ID NO: 40172 - DNA, 408 bp, Glycine max
  Clone ID: LIB3065-005-Q1-N1-H5
ggtctttcaagtatgcctgggtgcttgataagcttgagggtgagcgtgaaagaggaatcacaattgatattgccttgtggaagtttgaaaccaccaagtactattgcacagtcattgatgcccctggacacagggatttcatcaagaacatgatcactgggacatcccaagctgactgtgctgttcttatcattgattccactactggtggttatgaagctggaatttcaaaggatggacagactcgtgaacatgctctgctttcattcacccttggtgtgaaacagatgatttgttgctgtaacaagatggatgctactacaccaaagtacttcaaggccaggtatgatgaaattgtgaatgaagtttcttgctatttgaagaaagtaggatacaaccctgacaaga

SEQ ID NO: 40173 - DNA, 408 bp, Glycine max
  Clone ID: LIB3065-005-Q1-N1-H7
gccttgtgccgtttgtgttgttttcgggacgaagaagaagatggtgtcaggttctggaatctgcgcaaagcgggtggtggtggacgcgcgccaccacatgctgggtcgtctagcctccatcgtggcgaaggagcttctgaacggccagaaagtggtggtcgttcgctgtgaagagatttgcatctcgggcggtctggtgaggcagaatatgaaatacttgaggttccttcgcaaacgcatgaacaccaaaccctcccatggccccatccacttccgtgccccctccaagatcttctggcgcaccgttcgtggaatgataccacacaagacaaagcgtgggggagctgctcttgctcgtttgaaggtttatgaaggaatccctactccatatgacaagaccaagagaat

SEQ ID NO: 40174 - DNA, 391 bp, Glycine max
  Clone ID: LIB3065-005-Q1-N1-H8
ggttgaaccttccggtgtttcctatagatatttcggtgctgcaattgggaagggcaggcaggctgctaaaacagagattgaaaagttaaagcttgctgatatgacatgtcgacaaggggttattgaagtggctaaaattatatatggagttcatgatgaggcaaaggacaaagattttgagctagaaatgagctgggtgtgtgatgagtcaaaccgccaacatgagaaggtcccggatgagcttctagaagaagcaaaggcagctgccaaagcagctcttgaagaaatggatgcagattaatagactagaaatgtttatttcaaagttgcatttcataacttgtaattgagcatttggaacatctataggaaatacaaggcttcgatagtc

SEQ ID NO: 40175 - DNA, 354 bp, Glycine max
  Clone ID: LIB3065-006-Q1-N1-A10
ctcgagccgaaaaaaatgggttcttctctgtggacctgtctgattttgttatcacttgcttctgcttccttcgccgccaacccaagagcaccaattgatgtgccatttggcagaaactatgtgcctacctgggcctttgatcacatcaaatacctcaatggtggttctgagattcagcttcatcttgataaatacacaggtactggcttccaatcaaaagggtcctacttgtttggtcacttcagcatgtacataaaattggttgctggtgattcagctggcacagtcactgctttctatttatcatccacaaactcagaacatgatgaaatagactttgaattcttgggaaac

SEQ ID NO: 40176 - DNA, 371 bp, Glycine max
  Clone ID: LIB3065-006-Q1-N1-A12
cggctcgagaccaacaccaaaccttaaaattattttgcccgtctgcttctctctctgtctttctcagaagacaactcaaaaaaaccatggacgtgggtcagatgcagagacagtggatcgactacaccaaatccctcttccttgagggcttcctggatggtcagtttctgcaacttcagcagcttcaagatgagaacaaccctgactttgtggtcgaagttgtctctctcttctttgaagattctgaaaggcttctcaaagatctcacctttgccctagatcagaatggtgttgacttcaaaaaagttgatgctcatgtgcaccagttaaagggtagcagttcaagcataggcgcgcaaagggtgaaaaat

SEQ ID NO: 40177 - DNA, 313 bp, Glycine max
  Clone ID: LIB3065-006-Q1-N1-A3
cacaaactcagggtagggcagagagagagagagagagagagagagagagagagaatgggagggtgggctatcgcggtgcatggtggcgctggtgtcgaccctaatctcccactcgagcgccaagaagaagcgaaacaacttctcacgcgctgtctcaatcttggaatctctgctctaaattctaatcttcccgccatagatgtcgtcgaacttgtggtgagggaattggaaacggatccgctgttcaattcgggccgtggatctgccctgacagaaaaaggaacggtggagatggaggctagcatcatggatg

SEQ ID NO: 40178 - DNA, 383 bp, Glycine max
  Clone ID: LIB3065-006-Q1-N1-A4
gcggacctcaacctttctctctccggtgatgccttcgacatcatagttaaaatcaaaaacgcattagaacttgcatgccctggtgttgtgtcgtgttccgacatcgtggcacaggccacaagagaccttgttaagatggtcggtggtcctttttaccccgtgaggctggggagaaaggatagcactgaatcagatgctgcgagagtgagtgcaagccttccaacaccaagcatgaccatggaccagatcattgagaagtttacctcaaagggtttcactgttaaaggagatggtggctttgactggggcacacaccattgggttcacacactgcaaggagttcatccacaggatctacaacttcagcaagacctctgatgctg

SEQ ID NO: 40179 - DNA, 424 bp, Glycine max
  unsure (1)..(424): unsure at all n locations
  Clone ID: LIB3065-006-Q1-N1-A5
agtttgttgagatagctagaagcaataagatgaaaatgaaagtgcttgttttgtttgttgctacagttttggtagcatatgaatgccatggctcagactaccagaagttccctctccaaatgaaaactgggtttggtgggcaatacagcaatgaggtggcatgtgccagttggaggcttggcgtggaagcaaacaacgtagtcaagtggcaaactgttcctgcagcttgcggagagtacatagctgactacgttctaggagaccaatatagatcagattccaaaacagttaaccaacaagcttatttctatgctaaatccctcaaactcaccaacaaagatgtctntgtcttggacgttgacgacactactctctctaatctccagtattttgctaaccatggatttggtgtggaaccaccaca

SEQ ID NO: 40180 - DNA, 373 bp, Glycine max
  Clone ID: LIB3065-006-Q1-N1-A6
caagaagaacatatatactgctagggagtatgttgtttatgtttatagtggctgttgctgtgctaatggcatcatcagggcaaagaaacagcactgccaaggaataattggacaacacacaagttgtttatagattgcctagtgcaaagggagaaaaattctcattgttcattggtgtgaataagagaagaagaaaaaatctattaagaaaagagtgcagaaaaagaaataaagcagggagcatagttgatatattcctaattgaaatgcttttatgttttttatttttctgtatatttggacttccaaaatgaaaaaattgtccgatattatatatatatatatatgatttatatataaaatctccaatgtt

SEQ ID NO: 40181 - DNA, 305 bp, Glycine max
  Clone ID: LIB3065-006-Q1-N1-A7
aatatctacacaaaagtgttccacttgagtgaaaagtagtgtgttaagaactaaacaatttttcaatggcgtccaagaaacaagaggagcgagctgaggcagctgcgaaagttgctgccaaagaactcgaacaagtcaacagagaaagaagagaccgtgatttcggtgttgttgctgaacaacaacaacaacatcatcaggaagatcaacaaaaacgtggtgtaatcgggtccatgtttaaggcggtgcaagacacctacgagaacgccaaggaagctgtcgttggcaagaaagaagctactaat

SEQ ID NO: 40182 - DNA, 300 bp, Glycine max
  Clone ID: LIB3065-006-Q1-N1-A8
ctcttctggtaccaatggggtcctcatcaaactggatttgtttccttttcctcaccacccttttgtttgctcttcaaatcagtgcacgagacaggcagttctttagcaaaggcacccattttgacaaaaacagtgtcgaagagacagaactttccaacaaagaaacaccacaagtgaacaagccagagcaacaaccacctttcattccggggactgaaaacagctatgggctatatggtcatcatgatgggtattacccagttcctttcaccaacaccaaacccaatttttatcaacccc

SEQ ID NO: 40183 - DNA, 189 bp, Glycine max
  Clone ID: LIB3065-006-Q1-N1-A9
gtttgtggtctgtcttatgtggacacaattcctagcagttacaacataatgtcatttgagtggtctttggccccctagcaggttatctgtaccgttacaaattaatggtccacacatacaggatttatgtacttttaggttattagcataatagttgaacaattgaattaataaattaattatgttatg

SEQ ID NO: 40184 - DNA, 340 bp, Glycine max
  Clone ID: LIB3065-006-Q1-N1-B1
tccagccagaggtgaaatctctagcactggaaattgctaagctgattgataatgacgatggcgttgccgctgcggttgatgcatcccatcgacatctgcctgatgagctgccactgccaactgctattccagcggaggaggaccacttgaatcctttgcagtggctttttctccaacttggaaggttctgttgtgcaccttgtggaggtgtgtaggttctctgcattaattactttttcattttcattgattcattgcagaatacatgttgtacgttgcctagtgaatggctatggcatatccttcattgtcaagtctttagggtgaggactcgactaac

SEQ ID NO: 40185 - DNA, 337 bp, Glycine max
  Clone ID: LIB3065-006-Q1-N1-B11
attgtcttgtacagaggaagatatatattctagatatgcgtgcacagagaatgatcaagaaaacaaaatatggaagcaaaaaactaaagaaagaagacaagtctcgttctattttttttttcgtttctggacagtttaaaaaaaggagaaaaagaaaattgtgcagctttccttgggttttgttttggagctaaacaaacgcaatggtatgctccaacattttccttcaactttatatatatgtttttcgtacgtggaaatgtctctccgaggtattttcatgtatacaattttgaaccacaggtaaataccacagcatatagggatttgtctttct

SEQ ID NO: 40186 - DNA, 410 bp, Glycine max
  Clone ID: LIB3065-006-Q1-N1-B12
gaagaatttggtcctgagtgggctatgcagcacatgaattcctcaggttttggagatgaacaacaacccacactatttgtatcggatgactattcttcgtgctatctctctgcttgctcctgtgatgggccctgaaatcacttgttcaaacttgttaccagttgttgttgctgcatcaaaagacagagtgcccaacataaagttcaatgtggcaaaggtattagagtccatcttccccatcgttgatcagtctgtggtggagaagactattcgtccatgtctggttgagctcagtgaggatcccgatgttgacgtgcgatttttctccaaccaagcactgcaggcaattgatcatgtcatgatgtctagctaggcagaaatggttccacacgcaattaattaggttgaag

SEQ ID NO: 40187 - DNA, 333 bp, Glycine max
  Clone ID: LIB3065-006-Q1-N1-B2
ctcacctacaccctggacgagattgagggtcccttcgagggtacatccgatggaaccgtgaaattcgaggagaaagacggaattgactatgctgctgtcactgttcagcttcccgggggagagcgtgtgccattcctctttaccattaagcagttggtggcatctgggaaaccagacagcttcagtggggagttcctagtgccttcttaccgtggttcctctttcttggaccccaaaggaaggggtgcctcaactggttatgacaatgctgttgctttgcctgctggtggcagaggagatgaagaggaacttgctaaagaaaaccaccagagt

SEQ ID NO: 40188 - DNA, 365 bp, Glycine max
  unsure (1)..(365): unsure at all n locations
  Clone ID: LIB3065-006-Q1-N1-B3
gacaaatggaaggttccgaagtgtgagacacagagtgttggcaaatgggttcaagtccaggctttcaatgatttactttggaggtccacctttgagtgagaaaatagcaccattatcctctctcatgaaaggaaaagaaagtctatataaagagtttacctggtttgagtacaaaaaatcaatctacggttcaagattatctaaaaatagacttgaacattttgaaagaattgcagcttcgtaatatatattctagagaattgtttgagacacttgtcaatacaaaatgggagattacaatatgtagtttgtatactataaatgctttntttttttttttttactttttaagttatttatcaatc

SEQ ID NO: 40189 - DNA, 336 bp, Glycine max
  Clone ID: LIB3065-006-Q1-N1-B4
gtttgttggactgaacaagggtcacgtcgtcaccaagaaggaattgcccccacgcccctcagatcgtaaggggaaaacaagcaagagggtgcactttgtgaggaacctcataagagaggttgctggttttgcaccctatgaaaagcgtataactgagttgctgaaggttgggaaggataagagggcactgaaggttgcaaagagaaagcttggaacccacaaacgtgcaaagaagaagcgtgaggaaatgtccagtgttctcaggaagatgaaggctggtggtgctggagacaagaagaaataagtcttaattatttactcttttccagaatcact

SEQ ID NO: 40190 - DNA, 286 bp, Glycine max
  unsure (1)..(286): unsure at all n locations
  Clone ID: LIB3065-006-Q1-N1-B5
aattgtttaaacctaattctcatttcttcatcggtcgatgcttctcctcctaaagatgcagatcttcgtgaaaactttgaccggtaagaccatcacccttgaggtggagtcctccgacaccatcgataacgtgaaagctaagattcaagacaaggaagggatcccacctgaccagcagagacttatctttgcgggtaaacagcttgaggatggtcgaacccttgccgactacaacatccaataggaatccactctccacctcgtgcttcgnctcaggggtggcatg

SEQ ID NO: 40191 - DNA, 404 bp, Glycine max
  unsure (1)..(404): unsure at all n locations
  Clone ID: LIB3065-006-Q1-N1-B7
agcctcgccgactcggttgctatcagcgagtgagagtgagtgagtggttctcttgcagcaacaaggtttagtgacaccaaacagacgggaaatgggtcgtggggtcagtgctggtggtggacagagttccttggattatctctttggcagtggggtacctgccagcagtgcaaatggtgctcgcactcaaaatgcaagtgctccttcaccaccggttgataagcaaagtccagcaccagcaccagcaccagcacctgcacctgcagcagcagcagcaccagcacctgcaccagcaccagcaccagcaccagctgataagcaaattccagctggaattcctggaagtctcanaaacaattaccatcgcgctgatgggcaaaactgtggcaactttctcactgatc

SEQ ID NO: 40192 - DNA, 253 bp, Glycine max
  Clone ID: LIB3065-006-Q1-N1-B8
ggacccatctacacgaccgctatcatacaagtagagtgaggcgacacacctagaggacaaagccaagtttacaccaaccacagtctacacgtacgggtcacctggaccacgatacaagtggcctactcctccacacaccatcctatatagtacccatcttcaccacccgcagtgtacaagtgcacatctcctactgctccctacaagcaccaatatccaccacctgcaccctacaagtaccaatatcctccac

SEQ ID NO: 40193 - DNA, 382 bp, Glycine max
  Clone ID: LIB3065-006-Q1-N1-B9
gagagaatgatgattgagacggactcaccatactgtgaaggcaagaatactcatgctggaattggttttgttaaatctacatggccttctaagaagaaagagaagtatgatcaagagtgcattgttaaaggccgcaatgaaccttgtttagttaagcaagttcttgaagtggttgctggctgtaaaggcatcaacgatgtgagtaacctcagcagaacattgtaccataacacttgcaggatatttttccctcatgacttggattctgctgctgatgctcttctagctggcggtaattctacataaacatacttgctagtgacttggccttttctttgcttatattcggagctgttctgtagaccaaatcctcattttcttg

SEQ ID NO: 40194 - DNA, 251 bp, Glycine max; identical to SEQ ID NO: 1321
  Clone ID: LIB3065-006-Q1-N1-C1

SEQ ID NO: 40195 - DNA, 394 bp, Glycine max
  Clone ID: LIB3065-006-Q1-N1-C10
cttttgtgttagtgagagaaagttctctctgcttgtctcgcttagactcaaaaccctattgcgtgctttgcaatcgaccccgattatggccaacagtaacctccctcgaagaatcatcaaggaaacgcagcgtttgctcagtgagccaggtaagttgtaatttcgagcaattttttagtgctttagaagctcaagctaagttaaatgggtagtgtttgttgtgcctattattttttgttaaatttgtaaaataccttgagtgtttccttgtggactttcgcaagaattccgtccttggtgtgttttgtcgtactgagttaatttgtttgtgtcttgtgtgatgatctgatgatgcagcaccctgaaattagtgcgtccccttcggaagacaata

SEQ ID NO: 40196 - DNA, 319 bp, Glycine max
  Clone ID: LIB3065-006-Q1-N1-C11
ctaatgcagtgaaaaggcctgttcgtattcgtgaattttgatcctaatgtgtttaacaagtaatgttctttctttgacttgattgccttagaattatcgatttatcaagggctccatttgttccctttagattaactttgttgtatgcttcagaatcaaagttcttaccaattttagtcatgatctttattgttgtgtatcatttacactttccaacaagaagagaatgtagtggcagatatgtcaaccaagctaaattgtctatggttacagtttactcatctaaaactaatttgttcagcaaaagaaaatttacaat

SEQ ID NO: 40197 - DNA, 356 bp, Glycine max
  Clone ID: LIB3065-006-Q1-N1-C12
ctgggatatgttgctgcatccaaggacccggtgattggaggcagcttacttttaacatacacaactggctatgtttctcctttactcttggctgcttcttttgctggagcactacagagcttgctctcattccgcaagttctcggcatggatcaatcctataagcggagcaatgctgttaggtggtggtgtatatacgttcttagataggctgttcccagtcacaatggtgatgtagaaaatctcttggctcttaacatgctgtgatattttacattaacagttcaatgtatatatgtcatacaagtattcaattcaattggaatagaaatccaaatgagactattgcataccaca

SEQ ID NO: 40198 - DNA, 389 bp, Glycine max
  Clone ID: LIB3065-006-Q1-N1-C2
gttgtgtttctgagtttcggaagcatggggagattctcgaggactcagttgagagagattgctattgggttggagaagagtgagcaaaggttcttgtgggtcgtgaggagcgagttcgaagagggtgactcgggggagccaccgagtttggacgagttgttgccagaagggtttttggagaggacaaaggaaaaggggttagtggtgagggactgggccccacaggcggcgatactgagtcatgactcggtgggtgggttcgtgactcactgcgggtggaactcggtgttggaggcggtgtgtgaaggtgtgccaatggtggcgtggcctctctacgcagagcagaagctgaataaggtgatctttgtggaaggaatgaaaagtggttt

SEQ ID NO: 40199 - DNA, 283 bp, Glycine max
  Clone ID: LIB3065-006-Q1-N1-C4
ctctttcaaaagggagaagaaaaggaaaggaaacaaaacgcacatgattattatagcaatggcagaacaaaaccaaaaccagacaactgaaactggaaagcaccaagaggttggccacaagagccttctgcagagtgatgctctttaccagtatattctggagaccagtgtctacccaagagaacctgaatccatgaaagaactgagagaagttgacagcaaaacacccatggaacatcatgacaacctctgcaaacgaagggcaattcttgaacatgctcct

SEQ ID NO: 40200 - DNA, 293 bp, Glycine max
  unsure (1)..(293): unsure at all n locations
  Clone ID: LIB3065-006-Q1-N1-C5
gaaaaaccctaagcaaagcaaagcggtaaggatggggaacacggagaagctgatgaaccagatcatggaattgaaattcacttcgaaatcgctgcagcgtcaatcgcgtaagtgcgagaaggaggagaaatcggagaagctgaaggtgaagaaggcgatcgagaaaggcaacatggacggcgctcgaatctacgcggagaacgcgatccgtaagcgcacggagcagatgaactaccttcgnctggcctcgcgccttgacgccgtggtcgcccgtctcgacacgcaagcgaaaa

SEQ ID NO: 40201 - DNA, 356 bp, Glycine max
  Clone ID: LIB3065-006-Q1-N1-C7
gtcaaagacaatgtcagggatcattcacaagattgaggagacccttcatgtgggaggccacaagaaggaggaggagcacaagggtgagcagcaccatggtggagaatacaaaggggagcatcatggtgaacacagtactgaatacaaaggagagcatcatgttggtgagcacaagccggagcaccatggaggagaagagcacaaagaggggttcctagacaagatcaaggacaagatccacggcgaggagggtggcgccaccgccgagggcgagaagaagaagaagaagaaggagaagaagaagcatgaacatggccatgacagcagcaggcacagtgacagtgattagattatct

SEQ ID NO: 40202 - DNA, 240 bp, Glycine max
  unsure (1)..(240): unsure at all n locations
  Clone ID: LIB3065-006-Q1-N1-C8
gttttcgttcaaggtgagaccttgttcccgggcatactctcatgattggactgagtgtccttttgttcatcccggagagaatgctcggaggagagaccccaggaagttccattacagctgtgtgccgtgccctgattntagaaaaggggcttgcaggcgtggagacatgtgtgaatatgctcatggggtgtttgagtgctggctgcacccggctcagtatcggacacgcctctgcaaaga

SEQ ID NO: 40203 - DNA, 416 bp, Glycine max
  unsure (1)..(416): unsure at all n locations
  Clone ID: LIB3065-006-Q1-N1-C9
gcaactggaaaggcaacaagttcatctgatgaatatgctgcaggatttcatgggcggatctcatgatagcatggtgactctagagaacagagtgcgaggtcttgagagaattgttgaagacatgtcacgagatttatccatatcatcaggtcgtagaaactttgcaggatttgaaggatcatctaataggccttctagcaagtataatggttttaatgactattccagttccaagtatggaagaggtggtgatggacgcattccatttggtgaaagatttgcccaatctgatggaaatgctttgggaatgaggggaagagggccatcttggagatctgacatgtctgagggctgngatcatcctgngtatggtgcttctagaaatggtcagatgtcctcaaggaagggctttgggg

SEQ ID NO: 40204 - DNA, 367 bp, Glycine max
  Clone ID: LIB3065-006-Q1-N1-D10
tggagcctgcggcttaatattatgacgtagataggatccgaatcaagttattgtcaagatccatttttgtctgaggttaagttattcttatgtgctgtcacaagagaagcaaaggaggaatattattccacctagtgttttctcggcttagagcatttgaaatgtaatcattgggcaaatttcaatccctccagataaacctatgggaagcttcatgggctttcacgaggtggtgattgatgggaggatccatactcttagattacaagaacctatttcagatgtggcgtggatcaaaaagaaggatctaatattgtcaacctgactcaagaaaacttctagtactcatacttgatagttgaatttt

SEQ ID NO: 40205 - DNA, 411 bp, Glycine max
  Clone ID: LIB3065-006-Q1-N1-D12
caaatacaaacatggcaatgaagaagttcttgtgggttgttctgtccctttctttggtccttggagtggccaatagctttgattttcacgacaaggatttggagtccgaggaaagcctgtgggacttgtacgagagatggaggagtcaccacacggtttcgcgaagccttggtgacaagcacaagcggtttaacgtgttcaaagcgaatgtgatgcatgtccataacaccaacaaaatggataagccttacaagctgaaactaaacaagtttgctgacatgaccaaccatgaattcaggagtacctatgctggctcaaaggttaatcaccatagaatgttcagagacatgccacgtgggaacgggaccttcatgtatgagaaggttggtagtgttcctgcttcagtggatt

SEQ ID NO: 40206 - DNA, 369 bp, Glycine max
  Clone ID: LIB3065-006-Q1-N1-D2
attaactaagcatatatagcgtgtaagacagtgagaaaaaaagtgttgtgtagagagaaatggctaggtggtgcatcttggtggttcttgcccttgtcgtggttgcaagtgccagaaacatgcccaatgacgcaggtttggaggaccagaagaacttcctcgggtatgggttctctggagttggcaacaatgggcttccctttggaggagtgggttctgggtttgatggtaatatgggtgggccttctgggctcggtggatttggaggattcggtgggcctagcgggctcggaggtcttggtaacggtgaagggcccaaccttcctctcccttgggagttgagaccacacaccttcgggtttcttattt

SEQ ID NO: 40207 - DNA, 359 bp, Glycine max
  Clone ID: LIB3065-006-Q1-N1-D3
cacataagtgctgaaaagggtggagagtttttcatagacactgagaaacatatgcgaactgtagctactgcagcaagtccaatacctagtccacaaagtagtggagactttggtgcgctgagtccattggttggaggtttcgtcatgagttgtagagttcaaggtgaaaggaagcgaagtaaaccatcagtacaactggcaatgcgacacgtgacatgcgtggaggatgctgccatcttcatggcacttgcagcagctgttgacctcagtatcgtggcatgtaaacctttccggaggaaagtcaggagaggtttttggcattcgatgtgatcaacaaggcaaatgtatttataagcact

SEQ ID NO: 40208 - DNA, 336 bp, Glycine max
  Clone ID: LIB3065-006-Q1-N1-D4
tgacaagaagtgccccttcactggcaatgtttccatccgtggccgtatcttggctggaacatgtcacagtgctaagatgaacaggactattattgttaggaggaattatctccattttatcaagaagtaccagaggtacgagaaaaggcactccaacattcctgctcatatatcacctgctttccgtgtgaaggaaggagatcacgttattattggtcaatgcaggccactttctaagactgtgaggttcaatgtgttgaaagtgatcccagctggatcttctagcggtgcaaagaaggcttttactggaatgtgagctttgatttccagttttta

SEQ ID NO: 40209 - DNA, 415 bp, Glycine max
  Clone ID: LIB3065-006-Q1-N1-D6
aatttttggaccctttgattgtaaacatttaactgatttacatgttacctaaatgtaagggtaagtctgcgtacaacaaccctgccccatatcttcgcatagtgaagagcctccgggcaatggggtacgaagtttacatgttacctaaatgtggcctaacctacgtgtccgtggactggattgagccctttgaaaacttctgcaatatattaatgttagacattgtaaatataaattgctgcatttttggatttcgcatattaagttggaccaaatatattactcatcattattattattatatggtatttatttaatggaatcaattattgcataaattgacaataggagctactagcttatcatgatcatgatccaaacagatgatgatgttgggaatgaattatggaacata

SEQ ID NO: 40210 - DNA, 337 bp, Glycine max
  Clone ID: LIB3065-006-Q1-N1-D7
gagacttgagattttcaagaataacttgaactatatcagggacatgaatgcaaacagaaaatcaccccattctcatcgtttaggattgaacaagtttgctgacatcactcctcaagagttcagcaaaaagtacttgcaagctcccaaggatgtgtcgcagcaaatcaaaatggccaacaagaaaatgaagaaggaacaatatttttgtgaccatccacctgcatcatgggattggaggaaaaaaggtgtcatcacccaagtaaagtaccaagggggctgtggaagcggttgggcgttttctgccacgggagccatagaagcagcacatgcaatagca

SEQ ID NO: 40211 - DNA, 417 bp, Glycine max
  Clone ID: LIB3065-006-Q1-N1-D8
aatgggtgttgctttgactgtgtgctcaattcctggtcaagttgcatcagatcgtttggggccaggaaagatggaacttggtcttggaattcatggagaacctggggcagctgtggctgatattcagcccgtaaatgtggtggtttctcatgttctacagcaaatattgtccacggaaacaaactatgtaccgataactcgaggagaaagagtggtccttatggtcaatgggttatgtgccacttcttaccatggaactaatgattatagctggaaaaacagttccaaaattacagctagaacatggattggctgttgatagagtttatacagggtcatttatgacttctcttgatatggcaggtttctcaatttctattatgaaagctgatccaattattctttaacgattagatg

SEQ ID NO: 40212 - DNA, 405 bp, Glycine max
  Clone ID: LIB3065-006-Q1-N1-D9
cagctgctttgtatgtgttgcggtgctcagcctcagcctcagcctcaggcagcaccgtttatgaggttcccattttggaattcagttcatccaaagaatccaacaagtgtagtaagggtgcaagcagaagcagcagatatgaatatgaattcaatcccacacgtgctgagtgttgctgggtctgattctgggggtggtgctggaatccaagctgatcttaagacttgtgcggctcgccgtgtctactgttccactgtcattactgctgttactgctcagaacactgctggggttcaaggactcaacattctacctgaggattttgtggcagaccagttgcactctgtgctctctgatatgcatggtcatgtcgtcaaaacaggcatgctggcctctcttaatata

SEQ ID NO: 40213 - DNA, 339 bp, Glycine max
  Clone ID: LIB3065-006-Q1-N1-E1
aagcaaaaagaaagaatcccaggcgaggagaaagatggaggggaaggagcaggatgtgtcgttgggagcgaacaagttccccgagagacagccgattgggacggcggcgcagagccaagacgacggcaaggactaccaggagccggcgccggcgccgctggttgacccgacggagtttacgtcatggtcgttttacagagcagggatagcagagtttgtggccacttttctgtttctctacatcaccgtcttaaccgttatgggagtcgccggggctaagtctaagtgtagtaccgttgggattcaaggaatcgcttgggccttcggtggcatgatctt

SEQ ID NO: 40214 - DNA, 362 bp, Glycine max
  Clone ID: LIB3065-006-Q1-N1-E10
atagcgcagcctgcagcatgatatcatgacgtcaataggatgccaatcaccgtattgaggccatccatctggcgctgatgcataggctatccttatgctgcacgagcatcgagaagcatcggactaatattatacgagctaaagcccgataggattatagcgataccaatgcgatcattgtgcaagcttcattgtgtgctgatctgcctataccatgctgcataccctatacctatgcggcgatcgatgttaggatccatactctcagactactagatcactactgtagatgtgtcagttatcagtaggacgatctattcttgctgacctgactgcacaaaccttctagtcatcatactcga

SEQ ID NO: 40215 - DNA, 419 bp, Glycine max
  unsure (1)..(419): unsure at all n locations
  Clone ID: LIB3065-006-Q1-N1-E12
agaaaaaatgggttcttcttcttctatgtggacggtgtgtgtgattttggcatcactggcctctgcagcactctgtgccaacccacgcaggccagtggatgtacaatttggccgaaactacgtgcccacatgggcctttgatcacatcaaatatttcaatggtggttctgacattcagcttcatcttgacaagtacactggtactggcttccagtccaaagggtcttacttgtttggtcacttcagcatgtacataaagatggttcctggagattctgctggcacagtcactgctttctatttatcttcccaaaacgcggagcatgatgagatagactntgagttcttggggaacagaacaggacaaccttacattctgcaaacaaatgtgttcaccggaggcaagggtgatagagagc

SEQ ID NO: 40216 - DNA, 380 bp, Glycine max
  Clone ID: LIB3065-006-Q1-N1-E2
agacaataaaggcgttacagggaaacaagccccaacagaggaggaatccatggagatcggggatgtaaagccccaacaagggaagcaatccaatgcaaatggaattcaaggatgatatgtcaaatcacaacacatgccaaagacaatagtcatgtttgtcatttttcagctacataatctgcaactgagagcaagaacctctatgatttgatctgctctttaaaaggctgtaatttacttcttgctaagacactggcacctttaattagccgataatattgcatggaaacaagcatgtggtgggtgagtttttattagcttctttcccctggtcttaaggaatttaaggtgggggcttttttctaatggaccacctaacc

SEQ ID NO: 40217 - DNA, 300 bp, Glycine max
  Clone ID: LIB3065-006-Q1-N1-E4
ctcttccttttctcttctctgtctaaggggtgccctgagatcacattgaacaatggtgaaggctgtggccgttcttggcagcagtgagggtgtcactggaactattcacttcgttcaggagggaagtggtccaaccaccgtaactggatctcttgctggtcttaagcctggtctccatggtttccatgtccatgccttgggggacactaccaatggttgcctctcaactggatcacatttcaatcctaataacaaggagcatggtgcccctgaggatgagaatcgtcatgctggtgatct

SEQ ID NO: 40218 - DNA, 406 bp, Glycine max
  Clone ID: LIB3065-006-Q1-N1-E5
ggctcgagcacaccgtgccccaatggtgggactaatcatagaatattagtgatagtgggtatttttaggctatttgctataatgctcttaggtagtataaaaatactactatactaatgcgagtgtttcgacgtcgtttcatcaaaatccaatactcgagctttcctagggcaggtattgggaagtgtcaccgtccttctttctctttttctgtagtgatttctagcgttatgtatatatagaaagtccaatagaactggaaaaggctgaccaagtagaaataagacacctatgaaatagttgatggtgcagtgatcagaagaatggcgtgtaacagaataggcaaggctcttttcaaccttagttaaagcgatgatgtttgataaggacttatagggttcggttt

SEQ ID NO: 40219 - DNA, 390 bp, Glycine max
  Clone ID: LIB3065-006-Q1-N1-E8
cattggtgtggcctagctgttttctcaatgagaaagccttcatctctgcaaagcgcacttttgcgctttggggttcccttgttgcttgttatcaccttctgttatgctacttctactgctgcagcaacaactcaagtttcagggaatgaagagctgccaaagacaaacctaaatgggcatgatgaaaaagcaaaattcggattttttcatcataaaccaatattcaagaaacatattccaattccagtatataaacctgtaccaaagccatttccagtgtataaacctataccaaagccagttccagttccagtgtacaagcctattccaaagccagtgtataagcctattccaaagccagttccagtgtacaagcctataccaaagcca

SEQ ID NO: 40220 - DNA, 381 bp, Glycine max
  unsure (1)..(381): unsure at all n locations
  Clone ID: LIB3065-006-Q1-N1-E9
ctcgagccgattcggctcgaggcttcacgtggaagatggacaactgattgctggaatggaggaggcacacaaacatgtggaagaactaaaatcaaaagccaagcaacttgaggaagaggtcgagaggcaaagaaccgtgatcttagaaggagcagaagagaaacgcgaggccataaggcagctatgtttctcactcgagcactatagagatggctataatatgcttcggcagcatgttatggggcacagacgagttccagttttggctgcctagttaataaatntgaaacgtgatcttgtatattgttttggtgctatcttcatttctgtcttgggatgttttatggttctagtgtatgagtcaaggtcatgtgtactact

SEQ ID NO: 40221 - DNA, 357 bp, Glycine max
  unsure (1)..(357): unsure at all n locations
  Clone ID: LIB3065-006-Q1-N1-F12
tgtcttccgaagcaggaactaaatatggctgacttgttggaatggtcaaagcaagataagaaacgaatgcttcatgtcgtctaccgtgttggtgaccttgatcgcaccatcaaattttacacagaatgtttaggaatgaagcttttgaggcaaagagatatcccagaggagaaatatgctaatgcttttcttggatttggccctgaagaatcccattttgttgttgaattaacatataattatggggttacctcgtatgacattggcgatggctttggacattttgcaattgcaactcaagacatttataaattggttgagcacatcanggccaagggtggaaacatcacaagggaa

SEQ ID NO: 40222 - DNA, 331 bp, Glycine max
  Clone ID: LIB3065-006-Q1-N1-F3
ctcgagccgattcggctcgagccatttggagaaatgaattgattcttgtaataatctgtgatctgatgagcagatagaaagagaagagaagttgatgtcaacagcagaagctcctcctccgttccaagaagcagcgcgatgcgttgtgtgcaattgcagtttcaacaccttcagaagaaggcatcactgtcgatcctgtgggagaacattgtgcaatgaacattcatcagatcaaatggctttaccacaatttggcatttactcaaatgtccgagtatgtgctgattgtttcaacaactcacggtctgggagggatgaaccacagacttct

SEQ ID NO: 40223 - DNA, 404 bp, Glycine max
  Clone ID: LIB3065-006-Q1-N1-F5
ctggcaagaacaagaactccacagattctgcatctgagagcaagagccacgaggcaagccgatccgacgaacgagatccatcagcggcttcatccgtgacctttgcatcacagcaacagccttcgagctccaccttaagctttgccatacccattaagcaagacccttcagattactggtccatcctggggtaccataattctccccttgacaacactggcatcaggaacactactagtgttactgcaacttcttttccatcctccaacaatggcactactagtagtttgacaccctttcacatggaattctcaaatgccctcacaagtgccggcagtgataacgatgccgcgtttttcagtggaggaggcatctttgttcaagcacaaagtggtcatggtaat

SEQ ID NO: 40224 - DNA, 285 bp, Glycine max
  Clone ID: LIB3065-006-Q1-N1-F6
gcaaaaagtacgttgctggaaatggattctacataattggggctcacacggatagtccttgtctcaaactcaagcctgtcaccaaggttgttaaggctgggattttggaagttggtgtccaaacctatggaggtggtctgtggcacacgtggtttgatcgagacttgactgtggcggggagggtcattgtgcgggaagagaatgctggttctgtttcgtactcacatcgccttgttagaattgaggaacctataatgcgaataccgactttggcaattcacttgg

SEQ ID NO: 40225 - DNA, 384 bp, Glycine max
  Clone ID: LIB3065-006-Q1-N1-F7
gaatttcgctgttctgactatgcgggatacacatgccagaatagctccatgctcctatctagcctttcggtgtgcaaaaatgtgctgggaaatgatgtttctggacagcattgtgcacccagtgagcctagcatactacagcaactggaagaggttgttgtcatacccaactaccaccgactattccctggtggtgctagaaaattatttaatatatttggtagctcctactgtgatgagactgctaaacggcttgcctgctggatctcaatccagaagtgcgacaaggatggagacaacaggcttcgagtgtgccattctgcatgccagtcttataatctagcatgtggagctttacttgactgctctgatcagacgcttttc

SEQ ID NO: 40226 - DNA, 397 bp, Glycine max
  unsure (1)..(397): unsure at all n locations
  Clone ID: LIB3065-006-Q1-N1-F8
aacacgcaaggtcagcagaaaccccgaattgataaggggaatcggaaagtactcgaggtcgcagatgtaccacaagaggggcatttgggctatcaaggccaaaaacggtggcgttttacctcgccacgaccccaaacccaaacctgaaactcccactgaaaaaccacccaaattttaccccgctgatgatgtcaagaaaccccttgtcaacaagcacaaacccaaaccagctaagctcagggctagcattacccccggaacagtgttgattcttcttgctggtagatttaagggaaagagggtagtgtttttgaagcagctaccttctgggttgctttttgtaacaggtcctttcaaggntaatggagttcctttgagacgtgtgaatcaggcctat

SEQ ID NO: 40227 - DNA, 388 bp, Glycine max
  unsure (1)..(388): unsure at all n locations
  Clone ID: LIB3065-006-Q1-N1-G1
ggtaattatctcggctgtttctctcatcctggtggttggagtggccataggtgtggtggtggccgtcaacaagaagggcgaggatcccacacttcaatctcaacaaaaatcagtaggggttatctgccaaaacactgatgaccagaagctctgccacgaaaccctaagctccgtgaagggcatggacaccgctgatccaaaggcttacatcgccaaggcggtgaaagccaccatggacagcgtgaccagggccttcaacatgagtgataggctcagtaccgagtacggaggcaacgataacggaaccaagatggcccttgatgattgcaaggaccttttgcaatccgctatcgagagcctncaactcaacattgacatggttcacaac

SEQ ID NO: 40228 - DNA, 369 bp, Glycine max
  unsure (1)..(369): unsure at all n locations
  Clone ID: LIB3065-006-Q1-N1-G10
ataaagagagcattacattacaataactctgtctcttttgtttaaaattagggaaacaaggaagcaaaatgacacaatagtccttcttccctgtttccactttccaggttttctccttctcgtttgttgagcgcttttctctccctctccctcttcttcactcagtcagctgccgtagaaattcattatggtggcaacagctgcaacttcatcatttttccctgttacttcaccctcgccggactctggtggagcaggcagcaaacttggtggtgggcctgcgaacctntgaggtctaaaatccaaatctgtgtcttctggtggcttgaaagcaaaagcacaagcccctttgaaattaaatgaaccaca

SEQ ID NO: 40229 - DNA, 392 bp, Glycine max
  Clone ID: LIB3065-006-Q1-N1-G11
caaacttaattattaacacttccttagttcaatatggggaagcccttcactctctctctttcttccctttgcttgctactcttgtcgagtgcatgctttgctattagctccagcaagctcaacgagtgccaactcaacaacctcaacgcgttggaacccgaccaccgcgttgagtccgaaggtggtttgattcaaacatggaactctcaacaccctgagctgaaatgcgccggtgtcactgtttccaaactcaccctcaaccgcaatggcctccacttgccatcttactcaccttatccccggatgatcatcatcgcccaagggaaaggagcacttggagttgcaattccaggatgtcctgagacgtttgaggagccacaagaacaatcaaa

SEQ ID NO: 40230 - DNA, 388 bp, Glycine max
  Clone ID: LIB3065-006-Q1-N1-G12
cgatgctttcggcaaatggcgaatcttgcattctgagcttccgagtccattaactcactgagtcaaacagccgagtcgagatcgcttaacatgttggacggaatactcggcagaggcttcaccgcgaaatgcaaatcgttgatcaaattgacgaacaggcgaatcgatgtgatacggaggaagagaagagcgacagagaagtttctgaagaaagatattgctgatctattgctcaacggtctcgatatcaatgcctatggaagggcttgtggttgagttaacactgtcctcttgctatggtttcgttgagaattgctgtgaagttgtgttgaagcatctccctgcgatgcagaaactgagtgtccttgccgctgccaatggtctctct

SEQ ID NO: 40231 - DNA, 390 bp, Glycine max
  Clone ID: LIB3065-006-Q1-N1-G3
ctggccccaagcacgtcagccttactcccctgatacggttgattatatcaaatctctggatgccgagaaagacatagagcttctgaaatatttcgggtgggatgtcccggttgagtgtgcacgaacactccgaatctccacaatgttattgaagaaaggggttgagagaggtctcactccttatgacattggaagcattatgtgtagggaaaatttgaacaaagaatctgtcatcgaggagattatttgtgaagcccaagaatcattgctacctggcatggaggaatctgtgtttcttgaatctgtctcccagatcatggattcccgccttggatagctttcaaaatagactctctttgattcatagttatataataacaataatatata

SEQ ID NO: 40232 - DNA, 379 bp, Glycine max
  Clone ID: LIB3065-006-Q1-N1-G6
attgcaatcaaattagttcattctctttgcgcagttccctacctctcctttcaagatgcagatcttcgtcaagaccctcaccggaaagaccatcacccttgaggtggaaagctctgacaccatcgacaacgtcaaggccaagatccaggacaaggaaggaattcccccggatcagcaacgtctcatcttcgccggaaagcagctcgaggacggccgtaccctcgccgactacaacatccagaaggagtcaacccttcaccttgtccttcgtctccgtggtggcatgcagatcttcgtcaagactctcactggcaaaaccataaccctagaggtcgaaagctctgacaccattgacaacgtcaaggccaagatccaggac

SEQ ID NO: 40233 - DNA, 393 bp, Glycine max
  Clone ID: LIB3065-006-Q1-N1-G7
aaacatctcaatgggttcttcttctattacaacatcgcccgcaaccatgaccatggctgcgatcgtgctcctgttcacggtctttgccgtttcctccgccctagacatgtcgataatctcgtacgacagcgcccacgcggacaaggccgccacgttgcgcaccgaggaggagctgatgtccatgtacgagcagtggctcgtgaagcacgggaaggtgtacaacgcgctcggcgagaaggagaagcgcttccagatcttcaaggacaacctgcgattcatcgacgaccacaactccgcggaggaccgaacctacaagctcggactgaaccgggtcgctgatctcaccaacgaggaatacagggcccagtacttggggaaccaagatcgatccca

SEQ ID NO: 40234 - DNA, 270 bp, Glycine max
  Clone ID: LIB3065-006-Q1-N1-G8
ggctgttgttcaggtctttgagggtacatctgggattgacaataaatttacaactgtgcaatttaccggagaggtgttaaaaactccagtatcattggacatgcttggccgcatattcaatggttctggaaaaccaattgataatggtccacccatattacccgaggcttacttggacatatcaggaagttccatcaaccctagtgagagaacctatcctgaggagatgatacagacagggattatctaccattgatgtcatgaattcta

SEQ ID NO: 40235 - DNA, 299 bp, Glycine max
  Clone ID: LIB3065-006-Q1-N1-G9
ggttcacaatcaatggccactcttacttcaacctagtttggatcaccaatgtggctggagctggtgatgtgaattcagtgtccattaaagggtccaaaactgggtggcagcccatgtcaagaaactgggggcaaaactggcagagcaactcatacctcaatggacaatccctctcttttcaagtcaccaccagtgatggcagaactgtgacaagcttcaatgtggcaccagccaattggcaatttggccagaccttccaaggaagccaattctagagacattattgcaatgagggatag

SEQ ID NO: 40236 - DNA, 424 bp, Glycine max
  unsure (1)..(424): unsure at all n locations
  Clone ID: LIB3065-006-Q1-N1-H10
ggctaactgcaacaaattcagaggcctgaaacccagagagcacgctgcactcaaggactgcgccgaggaaatcagcgacagcgttgaccgcctcagccggtcgctgaaggagctcaagctatgtaaggttaagggtgaggacttcacgtggcacattagcaacgtggagacatgggtcagttctgctttgaccgatgagagcacttgcggcgatggattctccgggaaggcgctgaatgggaagatcaaggactctattagggctaggatgctcaatgttgctcaggttactagcaatgctctctcgcttattaaccactatgctgcacaacactagttgggaacaatgatcttggttgcttaatgctntacttttcttcttttatgtgctctatgtaattattatatatgtgagtctttatag

SEQ ID NO: 40237 - DNA, 337 bp, Glycine max
  Clone ID: LIB3065-006-Q1-N1-H11
ggataatatccgtggaaatgctgtcgcatctggacctgttatgactgtccttatggagggtgtcatgaattcttcagaagtgagcgacgttgtgaatgcagcaacgtctcaatcacttgttggtcgcatgggagaagctaaacagatatcagcattagttgcttttctttgccttccggttgcatcatacatcactggacaagttatatgtgttgatgggggtctcacaacttaattagtattctgttaattactatcatttggctgctgaattaaattctaatgtatgcagttggtgtttcctgcaaccccattcatgctttgcatatcattgggc

SEQ ID NO: 40238 - DNA, 280 bp, Glycine max
  Clone ID: LIB3065-006-Q1-N1-H12
tcttcctctatataaaccctaccctcaccttcaatttccgtttctctcgtcaaatttatccattcaccacagagtttcttcaatggcccagcctcaaccagagtcccacgccaccaatggctcacacgagccattgctcaaaatcccaaagctccaccaaaacggcgacgtttccgcaaccgctccctttctccgcgtcaagaagctctccgacaaggccgttttgccctctaaggcttcccctctcttccgcggttacgatctctctagcgcggtggag

SEQ ID NO: 40239 - DNA, 368 bp, Glycine max
  Clone ID: LIB3065-006-Q1-N1-H2
gttcttcatcatagtcttaaacattaaaccttagcaaaagtcaacaatgctagacatcaaaggctacctcgtactcttcttcctatggttcatatcaaccattctgatacgttccatcttcaagaaaccacagcgtctaagactcccaccgggtcctccaatttcaatacccttgctgggacacgcgccatatctccgttcactgctccaccaagcattgtacaagctatcactgcgctatggacccttgatccacgtcatgatcggttcgaagcacgtggtggtggcgtcgtcggcggagacggccaagcagatcctcaaaacctcggaggaggcattctgcaaccgtcccttaatgatagcgagcg

SEQ ID NO: 40240 - DNA, 377 bp, Glycine max
  Clone ID: LIB3065-006-Q1-N1-H3
tgatggtgcaatcacaaaccaagaacttgttcaaagggcaagagagaagctgaagaactccggtttcactcaaaaaccgggactctattgcagtgatcatcatgttgatgctccttttgtgtgttgatctgttctcatctgatgcagagaaagagagaataatatgtgttgtttatagtctgcttgtgtattgctgtatagttggagactcaaaatgaagttaatgttttcatccagttatcatatgctgctctattatcaggaattatattccttcaacattttagcccttgttgtgtctttgctgctacatgaccattgggctgggagaccaaactatcagagcaggttccatgcacccaaccacagattttggc

SEQ ID NO: 40241 - DNA, 309 bp, Glycine max
  Clone ID: LIB3065-006-Q1-N1-H5
gctttctttattagcttgctctggaaaagataacagatttgttcggaactaaagtcaagtttggaatgctctcttttgtaatgctgagttgggtggctaattatcttgaggtggaaaagtatctaattttcgtgctgcaatacaaagttccgatttttttttttcgttacatctgatgtactagatttcgtagcactaaaaaggctggtttccaaggaggcaactcttgatttgatgtactgaccaaggaggcaactcgtgtaaatcataaccctgggaaactatgtgcaccatctattgggccttatg

SEQ ID NO: 40242 - DNA, 239 bp, Glycine max
  Clone ID: LIB3065-006-Q1-N1-H6
ctcttggcatcttggggtgggtccctcttttaagctattggcttctcttaacacaattgggtgtgccaattgccatagtcaccaaccaattaacaaaggtatatatatcatcatatcatcaccaaatgagaaatattgggttggtttttcttgtggtgggggctacttttgtgggaggcagccacagctggtagcttttaccaagactttgaaataacgtgcggtggtgagcgtgccaa

SEQ ID NO: 40243 - DNA, 305 bp, Glycine max
  Clone ID: LIB3065-006-Q1-N1-H7
cggctcgagcggctcgaggagagaagcttaattggtattgtcatgtttttcggatttgcatcggggcaaaggaaaaaatggaggcatccattatgttacctcttgaaaggacttcgtcaattgaaagagagcccaggactcttaatatcaaccaaattcaatccgctagggagttagcaatatatatattgaacacaaagaccatagaagaagcgtccagaattttcacggaggggttgcagccggtggttagtgctgctccaaagatgggttttgggttgagaagttgaagtggtggaattcca

SEQ ID NO: 40244 - DNA, 389 bp, Glycine max
  Clone ID: LIB3065-006-Q1-N1-H8
attcatttacatcgtttcatcattttcataattgaatagtgtgcttaatatgatttgatgacctgaccattccgtctcttaaaattgtatgaatagtgattccttggctgcgattggaggcatggatcaaagactggtcatctgggatatacaacatttcttatctcgagccacctgtgaccatgagggtggagtgacatgtttgacatgggttggttcatcgtgtgtggctactggatgcgtggatggaattgtgagattatgggatattcggtctggtgaatgtgtagaaaaattcagggggcactcagatgcccttcaatctctttgtgagtctgctaatggggattatattgtcttgggcttcttggatcatacagcttggggtt

SEQ ID NO: 40245 - DNA, 383 bp, Glycine max
  Clone ID: LIB3065-006-Q1-N1-H9
gaggagggtactcataacgtagttgacattccacaatgccaagctcatcatcctaatattaatgctgctgtggagctgcttagacggggtattattgaaataggtgttgagccatatattgaagatgaaggtactggtgatttgcgatatgtccagatggctgtgacaacatataacacatctcttcctgcggctcaaagatataagaatggaaaggttcaggttacattggtttggaattcaagaaatgaaaactcacccggttcagacaaactgaatgcattagcaaattttctgtggaaaaatggtggtcaaaggagcaggcttcatttaattcactctgtgtgggccaactttcagacttctactaacaatataatttt

SEQ ID NO: 40246 - DNA, 429 bp, Glycine max
  Clone ID: LIB3065-007-Q1-N1-A10
cataaacccggcggtgacattcgggttgttcctaggacgcaaggtgtcgttgataagggcgttgttgtacatggtggcacagtgtgccggtgctatctgtggtactggattggccaaggggttccaaaaagcatactacaacaggtatggaggtggtgccaactctgttgctgatggctacaacaatggtactgctttgggtgctgagattattggtaccttcgttcttgtctacactgtcttctctgccactgaccctaagaggaacgctagggattcccatgttcctgtactggcgccacttcctattggatttgccgtgttcatggttcacttggctacaatcccaattactggtactggcattaacccagcaaggagtttcggagcagctgtaatttacaacgaagacaaaatctgagatgatca

SEQ ID NO: 40247 - DNA, 371 bp, Glycine max
  Clone ID: LIB3065-007-Q1-N1-A11
gtgatggtaactcgacttcacctttatggtaaatgggtcaagaaatgtaaccatgctgagatatatcaagaaatctctgatgaaaacttggagttaatgagggaacggctcatggagacagtaatatggcccacagatgacacaaacacagaaaagattggttgataattcatctcaaatttttactttgtcttccaacctcttcctagtctaggtatattttttgtttcaatatcaatctgttttgtttccaaaattgtcatttgtgtcattttcctttaataggattctcagttttatgttatgtaaattatgtatatatatgtaccttgttaaatacacaatccattatgtatcgctagtttcagatg

SEQ ID NO: 40248 - DNA, 418 bp, Glycine max
  Clone ID: LIB3065-005-Q1-N1-A3
gggtgatccaatggcgacccttttccagggattgggagttgtgaacccatcattgtcttcttccaactccaacaacttcctgcttccttctcgaacatccctctctgagagaaaagatggcatatttgtagtcagatctgatgcaagggtaagcagcaaggttctgaaggccggagctcgcaagcatgaattgttggttactaatgcagtcgcaacaaaggaaggcagttctgcggcttctacatcaaaatctgggcatgaacttctcctttttgaggccctacgtgaaggtttggaagaagaaatggagagggatccttgtgtatgtgtcatgggcgaagatgtaggtcactatggacgatcctacaaggtgactaaaggccttgccacaaagtttggggaccttagagttttggac

SEQ ID NO: 40249 - DNA, 356 bp, Glycine max
  unsure (1)..(356): unsure at all n locations
  Clone ID: LIB3065-002-Q1-N1-E2
gttgtggatggagctacatgtcaaaaacagggagaagcgtctcacatcccttcgtcaacacctctccgactcttctcgttctctccatggcttcgtcctccttcaaggtggcgaggagcaaacgcgttacgacaccgatcacttggagctcttcaggcaagagagttacttcgcttacttgtttggagtcatagagcctggattctatgcagctattgacgttgcaactgggaattctatcctatttgctcctaggttaccttctgagtatgctgtttggttgggggagattaagccactctcctactntaaggaacactacatggttaccacgtgtngcttctcagatgaaaatg

SEQ ID NO: 40250 - DNA, 390 bp, Glycine max
  unsure (1)..(390): unsure at all n locations
  Clone ID: LIB3065-002-Q1-N1-E5
attttctcaagagaaactttaagcagatgtctaatgttttgtgggtggctcctgaggacaaggcgagtttatggtcacaacttcattatgtttcgtgtaataatctggaaatgcaagaagcttatcttgtcaatctcgtaaatgtgttacgagaattgtatttgcacagtccagaggaagctcgccaattgagaaggaaagctctctctcgtattgaatggctgcaaaaagctgatgtgcctaccatagcacagattgaagagtttcattcgatgcagaggatgatgaatgctcctgattcaaatgataatattgatctactgttgagcattgatttgttgggtttacaaggagcangtaaagcttttcaaacaagattgtttttgatga

SEQ ID NO: 40251 - DNA, 365 bp, Glycine max
  unsure (1)..(365): unsure at all n locations
  Clone ID: LIB3065-002-Q1-N1-E7
aaaaaccgccacacctttccgccatggcgctgccatggccggtttttaacaacactgattattatcattggtacctccaatgttgtaatttagcaactcaccactaagctgcattccaatttttctcttaaacaattgggtaaacttgactattttcttggtattgaaatcaaattggtggctgatgggactattctactgactcaaagcaaatatatcagagatttgctttagaaaaccaaaattgtagaagcacaacctatttctttccctatgactgctaattacaagttgaccaaagttggctcgaatntattcagtgattcatctctctataggtctgttgttggtgctcttcaatacac

SEQ ID NO: 40252 - DNA, 414 bp, Glycine max
  Clone ID: LIB3065-002-Q1-N1-E9
tagtgcgtccccttcggaagacaatatgcggtatttcaatgtgatgatccttggcccaactcagtcgccttatgaagggggagttttcaagttggaattatttttgccagaagaatatccaatggctgctccaaaggttaggtttctgacaaaaatatatcatccaaacattgataagcttggcaggatatgtcttgacattctgaaagataagtggagtcctgcccttcagattcgcactgtacttttgagtattcaagctcttctaagtgcaccaaacccagatgatccgctttctgagaacattgccaagcattggaaatctaatgaggccgaggcagttgaaacggccaaggaatgggacccgttatatgctagcggcgcttgatgctttggtggaaacttttggctttc

SEQ ID NO: 40253 - DNA, 423 bp, Glycine max
  Clone ID: LIB3065-002-Q1-N1-F10
aaagcatataagagatggggttagaagggaaggaaacgccgtcgtttatgagggattttctcgataagtgtggtggctgcgccgttattgacggtggttttgccactgaacttgaaaggcatggggcggacctcaatgacgaactctggagtgccaaatgccttattagctccccacatcttgtccgaagggttcacctagattacctcgatgcaggagcaaacataatattaacagcatcttatcaggccactattcaaggttttgaggccaaagggttctctagagaagaaggtgaaactatgcttagaagaagtgtggagattgcacgtgaggcacgagaaatttattatgataggtgcaccaaagattcttctgactttatgagagatgaaagatataggaaacgtcccattttaattg

SEQ ID NO: 40254 - DNA, 409 bp, Glycine max
  Clone ID: LIB3065-002-Q1-N1-F11
gatgagaacaataagctgattctggcaatattggacaatcaaaatcttggaaaacttgcagaatgtgcccagtaccaagctcagcttcaaaagaatttgatgtatttagctgcaattgctgatgcccagcctcaaacaccagccatgcctccacagatggcaccacaccctgccatgcaaccaggattctatatgcaacatcctcaggctgcagcagcagcaatggctcagcagcagcagcaaggaatgttcccccagaaaatgccattgcaatttggcaatccacatcaaatgcaggaacaacagcagcagctacaccagcaagccatccaaggtcaaatgggactgagacctggaggaataaataatggcatgcatccaatgcacaatgagggcggcaacagcggtg

SEQ ID NO: 40255 - DNA, 423 bp, Glycine max
  Clone ID: LIB3065-002-Q1-N1-F6
caaaacaaaaagtttacgttacaaatcgcataataaccgtcctaagtttattgagagaattttgcaagtgtgagaaacatggcatctcgtcaaaacaacaagcaagagcttgatgaaagagcaaggcaaggagagactgttgtcccgggtggaactggtggcaagagcctggaggctcagcaacaccttgctgaaggaaggagcaagggagggcaaacaaggaaggaacagctgggtacagaagggtaccaggaaatgggacgcaaaggagggttgagcactgtggacaaatcaggagaagaacgtgctcaagaggaaggcattggcatcgatgagtccaagttcaggactggtaataacaagaaccagaatcagaacgaagaccaagattagtgataatgtaacacccttcactaacatgtg

SEQ ID NO: 40256 - DNA, 362 bp, Glycine max
  Clone ID: LIB3065-002-Q1-N1-F8
ttattccactaaatttccctcaattatttctcaccatcatgaccccctttccttctctcaagaaaaaaaaaagttaatttcttgaacccaatggcttcagagacagaggtgccggatattatttcctctgttttcgaaaggtttcaacaaaacagagacatgtctctgtttctgcccttcctcttcggcttctctgacgccaccccaggacgaaatagcgacgacccagatcacgaaactgctcccacagaagccccacaacgtcaaagaataatcttggtgaaccccttgactcagggcatggtggtgatcgacggtggttcgagcctcgaggctctgtttcgcgaattaccaacggaaaa

SEQ ID NO: 40257 - DNA, 414 bp, Glycine max
  Clone ID: LIB3065-002-Q1-N1-F9
ccaaacactctagaatttgcatgcactgttcttcatacaatggcattacgcgagcttcttatgatggggatattgctgctggtatgtcttgctaaggtttcatctgatgttaacatgcaaaaggaagaagatgaagaacttcgctttcctaatcaccctcttatcgtgagagacgggaacagaaggctaatgcaagacatagattgcggaggattgtgcaagacaaggtgcagtgcccattcgaggccaaacgtgtgcaacagggcttgtggcacgtgttgtgtgaggtgcaagtgtgttcccccaggaacttcaggcaacagggagctctgtgggacctgctatactgatatgatcactcacggcaacaagaccaagtgtccgtagagcccggcccattgaaagtcagcccta

SEQ ID NO: 40258 - DNA, 334 bp, Glycine max
  Clone ID: LIB3065-002-Q1-N1-G1
ctcgagccgttcgagccgattcggctcgagccgacagccgtgggctgcggtgaccaccacttgggaatgggatgggtttccagcacgtgcaaggggaccattgctgattgcctgggaggggaggagtacgagttggattcggagatcaaccggcgcatcttagccaccaacaagtacatcagctacgttgcgctgcagaggaacactgctccctgctctcgccgcggcgccttctactacaattgccgacccggagcacaggccaatccttacagccgtggctgcagcgccattacgaggtgcaggagctgaattttccctttttttaaaattt

SEQ ID NO: 40259 - DNA, 398 bp, Glycine max
  Clone ID: LIB3065-002-Q1-N1-G11
cttgaactcgtttatatactatggcaaatgacgtggttctgcgagagttctgtccaaatccattctggatgaaggtcaggattgcacttgctgaaaagggtatcaaatatgagtccaaagaagaggacttgcagaacaagagccctttgctcctcaaaatgaacccggttcacaagaaaattccagttctcatccacaatggcaaacccatctgttaatctctcgttgctgttcagtacattgaagaggtctggaatgacataaatcccttgttgccttctgacccttaccagagagctcaagctagattcttggctgactttgttgacaataagatattttatcttggaagaaagatttggacatcaaatggagaagacaaaaaatctgcccaaaaa

SEQ ID NO: 40260 - DNA, 382 bp, Glycine max
  unsure (1)..(382): unsure at all n locations
  Clone ID: LIB3065-002-Q1-N1-G2
agccccccaaaaatgaagagcaccatcttctttgctctcgttctcttttgtgccttcaccacctcatacctaccttcagccatcgctgatttcgtgctcgataatgaaggtaaccctcttgaaaatggtggcacatattatatcttgtcagacataacagcatttggtggaataagagcagccccaacgggaaatgaaagatgccctctcactgtggtgcaatctcgcaatgagctcgacaaagggattggaacaatcatctcgtccccatatcgaatccgttntatcgccgaaggccatcctttgagccttaagttcgattcatttgcagttataatgctgtgtgttggaatcctaccgagtggtctgttgtggaggatct

SEQ ID NO: 40261 - DNA, 329 bp, Glycine max
  Clone ID: LIB3065-002-Q1-N1-G3
cccatactccatggaatggagtatgggttgattccaacttgacaactaagcttgtcccttttcttcataatgaacccatactccatggaatggactggtttggccaatagattactgagtaagggcaacgatattctgtgttgcgattatgctagttttgatggtttgattaccaagcaagttatgagcaaaatggcagaaatgataaacagtctttgtggtggtgatgcaaaattgatgcgtgaaaggacacacctgctgttggcttgttgttcaaggatggcaatttgtaagaaagatgtttggagagttgaatgtggaatcccttc

SEQ ID NO: 40262 - DNA, 337 bp, Glycine max
  unsure (1)..(337): unsure at all n locations
  Clone ID: LIB3065-002-Q1-N1-G5
ctcgagccgaaatgaccaagttcacaatcctcctcatctgtcttctcttctgcatcgcccacacttgcagcgcctccaaatggcagcaccagcaagatagctgccgcaagcagctccagggggtgaacctcacgccctgcgagaagcacatcatggagaagatccaaggccgcggcgatgacgatgatgatgatgacgacgacaatcacattctcaggaccatgcggngaagaatcaactacataaggaggaacgaagganaagacgaagacgaagaagaagaaagacacatgcagaagtgctgcacagaaatgagcgagctgagaagccccaaatg

SEQ ID NO: 40263 - DNA, 330 bp, Glycine max
  Clone ID: LIB3065-002-Q1-N1-G6
ctcgttcctagaagaccaagttcacaatcctcctcatgtctcttctcttctgcatcgcccacacttgcagcgcctccaaatggcagcaccagcaagatagctgccgcaagcagctccagggggtgaacctcacgccctgcgagaagcacatcatggagaagatccaaggccgcggcgatgacgatgatgatgatgacgacgacaatcacattctcaggaccatgcggggaagaatcaactacataaggaggaacgaaggaaaagacgaagacgaagaagaagaaggacacatgcagaagtgctgcacagaaatgagcgagctgagaagcc

SEQ ID NO: 40264 - DNA, 283 bp, Glycine max
  Clone ID: LIB3065-002-Q1-N1-G7
cagcctattacgccccttccttctacaacaaacacacactccctctcgagccgtgttatcttctcgagatgcaacacttgcaacgcctacaaacggcactaccagcaccatacctagagtaagcacctccatcgatagaacctgacgccctgctacaagcacatcatggataatatccaatgccagtcatgatcacaaatgatcataatgactaccacaaccacattctcatgaccatgcactgaagaatcaactacctcacgagcaactaacgaaaagacca

SEQ ID NO: 40265 - DNA, 373 bp, Glycine max
  Clone ID: LIB3065-002-Q1-N1-H1
gaagtttttaaattttgtgaggttcattatgaagaaaagggacaagcttagttgtcaagttggaatcaacccatattctatggaatggactggtttggccaatagattactgagtaagggcaacgatattctgtgttgcgattatgctagttttgatggtttgattaccaagcaagttatgagcaagatggcagaaatgatcaacagtctttgtggtggtgatgaaaaactgatgcgtgaaaggacacacctgctgttggcttgttgttcaaggatggcaatttgtaagaaagatgtttggagagttgaatgtggaatcccttctggatttccgctcacagttatttgcaatagcatttttaatgagatgctc

SEQ ID NO: 40266 - DNA, 410 bp, Glycine max
  Clone ID: LIB3065-002-Q1-N1-H10
acacatggcataaagcaagctcatcctagagttttaaaaatggcagcagcctcctccatggctctctcttccccatccttggctggcaaggccgtgaagctgggcccatcagcccccgaagtcgggagggtcagcatgaggaagaccgtcaccaagcaggcctcctccggaagcccatggtacggcccagaccgcgtcaagtacttgggcccattctctggcgagcccccgtcctacctcactggcgagttcccaggtgactacggctgggacactgctgggctttcggccgacccagaaaccttcgccagaaaccgtgagctcgaagtgatccactccaggtgggccatgctcggggccttgggctgcgtcttccccgaactggtgtcccgcaacggggtcaagtttgg

SEQ ID NO: 40267 - DNA, 420 bp, Glycine max
  Clone ID: LIB3065-002-Q1-N1-H11
acctaaccctcacgaaagcccttttcgattccgataactctcgttgttccgaaaccctaaccctaaccgggttttttcgtttgtttggattgaattggcatcggagggaggcgatcgattggaaattggtagtagtagtttagcgttgaagaacgatgtctgctgctgtgtgcggaagcaagagatctttcttcgaagagcttcctccttctccgccactctccaagaggctccgttgttcctcttcgccgattcgattccctcctccttcttccatcgaccaacttcgccctctctttccccacatggacgacttggttcttgagagagctctccaagaatgtggcaatgatatagatgctgccatcaagaggttgaatgagctttgcttgggaactgccgatggaaatggaattgctg

SEQ ID NO: 40268 - DNA, 298 bp, Glycine max
  Clone ID: LIB3065-002-Q1-N1-H12
gcgagaacacttttgattttagatcctagcacgcagagcttgggtcggttttctattgaccttgttggtggatgaattttagtggacagaactggagattggatcacacttatacaaaattctccagttagtaacttgttgatgagttgctgcttggaagaaaggctgcttaatggctaagattgcgacgtctgagaatgcaacaagcacaaggagtgattgggcctcattggtacaagggactctaacaaacagcaacaatgcatagcattttgatgcatgtcagtggactaaatcg

SEQ ID NO: 40269 - DNA, 376 bp, Glycine max
  unsure (1)..(376): unsure at all n locations
  Clone ID: LIB3065-002-Q1-N1-H2
tgataacactcgccatacccgttaacanacccggtagatgtgagagtttcttcctatctagcactcaagctcaacagtcctacttgcaagggttcagcaagaatattctagaggcctcatacgacaccaaattcgaggagataaacaaggttctgtttggtagagaggaggggcagcaacaaggggaggagaggctgcaagagagtgtgattgtggaaatctcaaagaaacaaattcgggaactgagcaaacatgccaaatctagttcaaggaaaaccatttcttctgaagataaacctttcaacttgagaagccgcgaccccatctattccaacaagcttggcaagttgtttgagaataccccagagaaaaaccc

SEQ ID NO: 40270 - DNA, 263 bp, Glycine max
  Clone ID: LIB3065-002-Q1-N1-H3
aaaaaaaaatcattctaccaaaaacaccaacacactaacaggaagaaaatcaaaaacaagaaataatcaacaaaacaataagcaacaagcacaaagcaaaaccaaactgaaagaaacaaactaccaatcaacaacaactgaataaacaacaaaaagaaaaaccacacaaaaaaaaaaaggggggcccccccgccatcggctcttacacccccagaaaaattttcgcaccatcctttctgggctaacacaattttccttaaaag

SEQ ID NO: 40271 - DNA, 345 bp, Glycine max
  Clone ID: LIB3065-002-Q1-N1-H7
tgacaaatttgcttgctactgtcttgatcttcctaattgtgatatacttccaaggtttccgcgtggtcttgcctgtaagatcaaagaatgctcgtggacagcagggttcatatccaatcaaattgttttatacctccaacatgcccatcattcttcagtctgcccttgtttccaatctctacttcatctcccagctgctccaccgtaagtacagcggaaacttcttcgtagatctattgggaaaatggaaggaatctgaatatggaggtggtcagtctgttcctgttggtggcattgcatactatatcactgcaccatccagcttagctgatatggcagccaatc

SEQ ID NO: 40272 - DNA, 438 bp, Glycine max
  unsure (1)..(438): unsure at all n locations
  Clone ID: LIB3065-003-Q1-N1-A11
tcgagcccttaaagcttgattcttactagagttccgaatcctcgacgtaagcgtgaaaaacactacgaattggtgtcttattcatattctagaaaaaccaatttttgaggaatncgatgaatagttcattcgccggccctactcttcacttatcgacgactggcggttgtaggcccggcggtggtggtggcggcggcagcagcaaccgccactgtttccattgacgattttcatctcccgtgtgatcccatctcgtcgcaagagcgtaaagacgaggccatgctagttttaaaatcagatctcatggctgcactcaacaaggaggttaaatcattggttgaagataactggaagtttgaagggccacgttcgcggatccacctcgtatcacatcgaggtggtggtcatctctataggcccacagaaatttcaaagaat

SEQ ID NO: 40273 - DNA, 343 bp, Glycine max
  Clone ID: LIB3065-003-Q1-N1-A12
atgggaactatttttcctcctcactctctctctccactcctcaacatcaaaccttcaccctcaagaattctcttggctccctctccgcaacccaagtcaaattctctcttttgctcgaaacccattgtttctagtctcagaaagaaccaaactttatctcctaaaccttcatcaggcacaagctggttggctcatgctcaacaaggcctagcagctttggctatctccttggcactcaactttagcccagttttgttcaatggcaatgcactggcatctgagtttgatgtacttaacgagggtccacccaaagattcttatgtgtttgatgatgcaagagtgc

SEQ ID NO: 40274 - DNA, 336 bp, Glycine max
  unsure (1)..(336): unsure at all n locations
  Clone ID: LIB3065-003-Q1-N1-A4
cagaacagggactcactctcttcgcagcggcactctcggtggctttcatcttctcggngtgagttgtcaagatgtacacatcgaggaagaaaattcacaaggataaggatgctgagccaactgaatttgaggaatcagttggacaggcattgtttgatctagaaaataccaacaatgagctgaaaagtgatctgaaagatttatacataaactcagctgtccaaaatgatgtttctggcaaccgaaaggctgtggttatccatgtccnctacagactaaggaacngggattccgaagattcatgtcaagcttgtgagagaactttgagaaaagttt

SEQ ID NO: 40275 - DNA, 400 bp, Glycine max
  Clone ID: LIB3065-003-Q1-N1-A6
taagaaatgaagagtactatcttctttgctctctttctagtttgtgccttcaccatctcatacctgccttcagccaccgctcagttcgtgctcgacactgatgatgatcctcttcaaaacggtggcacatactatatgttgccagttatgagaggaaagggcggtggaatagaagtagattcaactggaaaagaaatatgccctctcactgttgtgcaatcacccaatgagctcgataaggggattggactagtctttacatctccattacatgccctttttatcgccgaaggctatcctttgagcattaagtttggttcatttgcagttataacgctgtgtgccggcatgcctactgagtgggctattgtggagagagagggtctacaagctgttaaac

SEQ ID NO: 40276 - DNA, 408 bp, Glycine max
  Clone ID: LIB3065-003-Q1-N1-A7
tgcgatctgttgagtactatcttctttgctctctttctagggtgtgccttcaccatctcatacctgccttcagccaccgctcagttcgagctcgacactgatgatgatcctattcaaaacggtggctcatactatctgttgccagttctgagaggaaagggcggaggaatagaagtcgattcaactgggaacgaaatgtgccctatcactgctgagcaatcacccactgagctcgatcaggggattggactaggctctacatgtacattacatgccctttttatcgtcgtaggctatactctgagcattaagtccgagtcattagcagctataacgctgagtgcccgcatgcgctactgagtgtgctattgtggacagagagggtctacaagctgataaacttgctgg

SEQ ID NO: 40277 - DNA, 413 bp, Glycine max
  Clone ID: LIB3065-003-Q1-N1-A9
gagtttttcttctgtttttttttttttttttttctgtctatgatgcatttgactgaactctgattcttttttctttttacatcaactcttggcttcttagtgtgtcacagtgacttcagtcctttctactaagggtgtgtttgacttaagagcaagcctaaattggaaaaggggattttttttttctttcattttggccattcatctctctctggggacattttgttctctctgcaactatggaaaagctaggtttaactgaatctccattccccaagctctcttcagatgagattctggaattggaaagaatatacgaagacatgggaggaaaagtgctaaatcggaagtcatgcctggagattgctaaacgttttagttcctcatcaaatggtgcttgtaaaacttcctta

SEQ ID NO: 40278 - DNA, 408 bp, Glycine max
  Clone ID: LIB3065-003-Q1-N1-B1
gagagagcgagcagtttcagacacagagagaggggtttgggattggagggattgacgctgcgtctcttcctcttctctttcgatccatccctcattcctaatcctccaatccaaccacctcagcctcacactcacatatacacatatctgaacgcgtatcgtccctcctatggcttcaaagcgcatcctcaaggatctcaaggacttgcagaaagacccaccaacttcttgcagcgctggtccagtagctgatgacatgttccattggcaagcatcaataatgggtcctgctgatagtccttatgctggacgtgtattcctagtcactattcacttccatacggattatcctttcaagccttctaaggttgcctttaggactaacgtgtttcacccgaacatcaatag

SEQ ID NO: 40279 - DNA, 408 bp, Glycine max
  Clone ID: LIB3065-003-Q1-N1-B10
cactcactcacactctcttctgtcatagctgtaccacgtttgtcttctccatctcagcctctgtcccaacaccattctcatggctgctctagctctagcactgcttcttctggctttcactggcacttcaagtgctacatggtgcgtttgcaaggatggaagcgacgcgatcctgcagaaaaccttggactatgcttgtggagctggtgctgactgtaatcctctccaccaaaacgggccttgtttccagcccaacaccgttagggcccactgtaactacgccgtgaacagctacttccaaaggaagggtcaagctcaagggtcctgcgactttgcgggaacagccattgttactgcatctgaccccagctctggcggtacttgtgtctacccttctagtgtcagcgc

SEQ ID NO: 40280 - DNA, 400 bp, Glycine max
  Clone ID: LIB3065-003-Q1-N1-B3
aacattctgttgacggatacattgactcaaaccggggaaggtttactagatgcttaccttatttatgcggacacacactctgctctcttggagctctttcaccaccccacattctatggactaaagtataataccagaacatgttgtggctatggaggcggtgtctacaactttaaccctaaaattttgtgcggtcatatgctagcaagtgcttgtgatgaaccccagaactatgtgagctgggatggcatccatttcacagaagcagcaaacaagattgttgcacatgccattctaaatggctctcttttttatcctcctttccctcttcataaacactgtgatctccaacctattggttgatccagtgcttgcagctaggggtctttcgtatttaccg

SEQ ID NO: 40281 - DNA, 405 bp, Glycine max
  unsure (1)..(405): unsure at all n locations
  Clone ID: LIB3065-003-Q1-N1-B4
ctgccagcgtggcagagagagaaactagagagagagagagagcgaacacaccgttcatttctccttcgtcgtcgtcgtcgtttcgccgtcgcattttccggcgaggtttctctgttttgtttaaccgaaatggaggatccgtacgttctcggttggattctgtgctccgtcctgagcctcttggcgctctacagcctggccttcggcggagcgggccgtcgccgcgcttcgccggagaagaggaacgagttatcggagaccgtgacgacctncgccggagaatgcagatcggagaaacgaaacggcgacgctgacgtcatcattgtcggagccggcgtcgccggcgcctgcctgtcgcacactctcggaaaggatgggcgtcgagtacacgtcattgaaagagac

SEQ ID NO: 40282 - DNA, 346 bp, Glycine max
  unsure (1)..(346): unsure at all n locations
  Clone ID: LIB3065-003-Q1-N1-B5
gaagatccctagctcgtaacatgcaaacaccagtgccaacagcaacggcaatacactgagagtgacaagcgaacatgcttgcaacaatgtgacagtatgaagcaagagcgagagaaacaagtcgaagaggaaactcgcgagaaggaagaagaacatcaagagcagcatgaggaggaggaagaccaaaatccctacgtttttgaagaagataaggatttttcgaccagagtcgaaacagaaggtggcagcattcgggttctcaagaagttcactgagaaatccaagcttcttcaaggcattgagaatntncgtttggccatcttagaagctagagcacacacgttcg

SEQ ID NO: 40283 - DNA, 348 bp, Glycine max
  Clone ID: LIB3065-003-Q1-N1-B6
gaagatccctagctcgtaacatgcaaacaccagtgccaacgagcaacggcaatacactgagagtgacaagcgaacatgcttgcaacaatgtgacagtatgaagcaagagcgagagaaacaagtcgaagaggaaactcgcgagaaggaagaagaacatcaagagcagcatgaggaggaggaagaccaaaatccctacgtttttgaagaagataaggatttttcgaccagagtcgaaacagaaggtggcagcattcgggttctcaagaagttcactgagaaatccaagcttcttcaaggcattgagaatttccgtttggccatcttagaagctagagcacacacgttcgt

SEQ ID NO: 40284 - DNA, 348 bp, Glycine max
  Clone ID: LIB3065-003-Q1-N1-B7
aacaaactgttgagggatacattgactcaaaccggagaaagtttagtagatgcttcccttatttatgcggacacacactctgctctcttggagctctttcaccaccccacattctatggactaaagtataataccagaacatgttgtgggtatggaggcggtgtctacaactttaaccctaaaattttgtgcggccatatgctagcaagtgcttgtgatgaaccccagaactatgtgagctgggatggcatccatttcacagaagcagcatacaagattgttgcacatgccattctaaatggttctcttttttatcctcctttccctcttcataaacactgtgatctc

SEQ ID NO: 40285 - DNA, 292 bp, Glycine max
  Clone ID: LIB3065-003-Q1-N1-B8
ctcgagctgtttcgggacgcactcgctccaaccggacaaggggtgcccaaagcttgattcattgatgcgtgctcacactatgatcactaggagctcttacaccaccatacattgctatggactcaaccataatcccatatcatgcatagggtctggaggcggtgtctacaagttctaccctaaaaggcaccgctgccatatgcaagccagagcttgctaggaacaacaaaactatgtcagctgggacggcattcaattcacataatcagcagacaagattgttgcacatgcc

SEQ ID NO: 40286 - DNA, 438 bp, Glycine max
  Clone ID: LIB3065-003-Q1-N1-B9
ccgaacggctttatccttctgctcctggcaggactgacccgggctggaactctcaccgggcaggatgtggctacttattacgcctatactgaaacccaagggcatgagatcgtaattcctccggtaattcctatttcacattttcaagaaataaggaggcaaaaatgttcatatatgaattggaattatttgttttcttattaggcctatcctgaagccaaaggaaatgagatcggaattactcggggaattccaatttcacattttcaagaaataaggaggcaaaaatgttcatatatgaattggaattatttgttctcttattaggcctatcctgaagccaaaggaaatgaaaacggaattcctaggggaattccaattccacattttcaagaaataaagaagcttaaatgatcgtatatgaaatggcattatttt

SEQ ID NO: 40287 - DNA, 391 bp, Glycine max
  Clone ID: LIB3065-003-Q1-N1-C1
atcgagaaagagaagaagcatatatatcaaaatggctgcagagatggagagggagtcattgataactgaagctcctaatgcaccagttactgcacagagaagggtcagaaatgacttagaaaattctctaccaaaaccatacttgccaagagcattgaaagctcctgatacgggtcacccaaatggaacagcaggccacaggcaccacaacttatctgttcttcagcagcattgtgctttttttgatcaagatgacaatggaatcatttacccttgggaaacttacatggggctgcgttctattggatttaatgttgttgcatctgttattatggctattgttatcaatgttggattgagttaccccactctacctaattggttcccttct

SEQ ID NO: 40288 - DNA, 422 bp, Glycine max
  Clone ID: LIB3065-003-Q1-N1-C10
cactttccttagttcaatatggggaagcccttcttcactctgtctctttcttccctttgcttgctactcttgtcgagtgcatgctttgctattacctccagcaagttcaacgagtgccaactcaacaacctcaacgcgttggaacccgaccaccgcgttgagtccgaaggtggtcttattgaaacatggaactctcaacaccctgagctgcaatgcgccggtgtcactgtttccaaacgcaccctcaaccgcaacggcctccacttgccatcttactcaccttatccccaaatgatcattgtcgttcaagggaagggagcaattggatttgcatttccgggatgtcctgagacgtttgagaagccacaacagcaatcaagcagaagaggctcaaggtcgcagcagcaactacaagacagtca

SEQ ID NO: 40289 - DNA, 422 bp, Glycine max
  Clone ID: LIB3065-003-Q1-N1-C11
gcgctgcttcactattctccctatggagtttaatcttgtggtccgtcaaaagtttttaaattttgtgaggttcattatgaagaaaagggacaagcttagttgtcaagttggaatcaacccatactccatggaatggactggtttggccaatagattactgagtaagggcaatgatattctgtgttgcgattatgctagttttgatggtttgattaccaagcaagttatgagcaagatggcagaaatgataaacagtctttgtggtggtgatgaaaaattgatgcgtgaaaggacgcacctgctgttggcttgttgttcaaggatggcaatttgtaagaaagatgtttggagagttgaatgtggaatcccttctggatttccgctcacagttatttgcaatagcatttttaatgagatgctca

SEQ ID NO: 40290 - DNA, 422 bp, Glycine max
  Clone ID: LIB3065-003-Q1-N1-C12
ctcgagccgaatcggctcgagcttaagcttgctactgagttgccacactgcataccttaggtcttccgaattcgaagttaatttgcaagatggctaaggaaaaggctcagatcaacattgtggtggttggtcatgtggaccctgaggaggcaaccaccattaacgagctgaagaagcctgttgtggagaaagaagctccagggcatgccatatgagggcatgcacgtacggcctctgaggggaaccagaaaattatgttaacaaaataatctggaaccctaatgtatcagtgtcatcatcagagtgtagtttaagctagctttgctatggttacgttctttgagatgagagtcttgatgaacagtgccattcttatgtattgctttccttgaaagttaatgcatgcttcttatcttcaggct

SEQ ID NO: 40291 - DNA, 409 bp, Glycine max
  Clone ID: LIB3065-003-Q1-N1-C3
ggaagagtgcgaaagaaagatcgttctcgatgacagaggggaacggtgacaaaactctgcgaaagatcgcagacgcattcaatgaccttgcaaacgttttcaccgattctcagagcgcagaagcagaggtcaaggttgctcccttctctcatgcctgctctctcgtctcccctctcttcggttgcttgggcgtcgccttcaagttcgccgaaatggattacgtcgccaaggttcatgatctggcaaaggcgttcaagtctattcagaatctgcagtctctgattgagctggatgtgcaagctaacactgttaggaaaggaagtagccatacgcggaatctgctcagagtgaaacgcggacttgacatggtcagagtgctccttgagcagattctagttacagagtatgt

SEQ ID NO: 40292 - DNA, 387 bp, Glycine max
  Clone ID: LIB3065-003-Q1-N1-C4
gttgaattgaatcaggttgtctatgctaaaacagacataactgctggggtcaaaaaggctttactgcattcaatcattgaaaagggaatggcctggaattcaatactgcccaaaaatggattaacttggaatgcgaggaagtgatacgtgtgagcttgtctttgagaattgctttgttccagacgaaaatattcttgggaaagaagggaaaggagtctatgtcatgatgtctgggctggatctggagagacttgttttggcagctggtcctcttggtattatgcaagcatgtcttgatgtcgtccttccttatgttcgacaacgagagcagtttggtcgtcctattggggagtttcagtttatacaggggaaaattgctgacatgta

SEQ ID NO: 40293 - DNA, 410 bp, Glycine max
  Clone ID: LIB3065-003-Q1-N1-C5
caaaagtgttccacttgagtgaaaagtagtgtgttaagaactaaacaatttttcaatggcgtccaagaaacaagaggagcgagctgaggcagctgcgaaagttgctgccaaagaactcgaacaagtcaacagagaaagaagagaccgtgatttcggtgttgttgctgaacaacaacaacaacatcatcaggaagatcaacaaaaacgtggtgtaatctggtccatgtttaaggcggtgcaagacacctactagatcgccaaggaagctgtcgttgtcaagaaagaagctactaataacgcgtacagtaatacagaggttattcacgatgttaacattcagcccgacgacgtgtcgactacgggggaagtaagggacatatcatccacatagactgatgatatctacgatt

SEQ ID NO: 40294 - DNA, 205 bp, Glycine max
  Clone ID: LIB3065-003-Q1-N1-C6
aagaaatgaagagtactatcttctttgctctctttctagtctgtgccttcaccatctgatacctgccttcagccaccgctcagttcgtgctcgacactgatgatgatcctcttcaaaacggtggcacatactatatgttgccagttatgagaggaaggggcggtggaataaaagtagattcatctggaagagaaatatgccctct

SEQ ID NO: 40295 - DNA, 284 bp, Glycine max
  Clone ID: LIB3065-003-Q1-N1-C7
tggaaatgcaagaagcttatcttgtcaatctcgtaaatgtgttacgagaactgtatttgcacagtccagaggaagctcgccaactgagaaggaaagctctctctcgtattgaatggctgcaaaaagctgatgtgcctaccatagcacagattgaagagttccattcgatgcagagaatgatgaatgctcctgattcaaatgataatattgatctactgttgaacattgattttgtggtttacaaggagcaggtaaaagcttttccaaataagatcgttttgatg

SEQ ID NO: 40296 - DNA, 377 bp, Glycine max
  Clone ID: LIB3065-003-Q1-N1-C8
tggaaatgcttgaagcttatcttgtcaatctcgtaaatgtgttacgagaactgtatttgcacagtccagaggaagctcgccaactgagaaggaaagctctctctcgtattgaatggctgcaaaaagctgatgtgcctaccatagcacagattgaagagttccattcgatgcagagaatgatgaatgctcctgattcaaatgataatattgatctactgttgagcattgatttgttgggtttacaaggagcaggtaaagcttttccaaataagattgtttttgatgataagctcgtgttggctaacacacaggaattctttgatggaaattttccagtggattcttggttaccaatttttgtgaatggtctttatcct

SEQ ID NO: 40297 - DNA, 232 bp, Glycine max
  Clone ID: LIB3065-003-Q1-N1-D1
gcaatggtgagagagtgtttgatggagagctgcaagagggaggggtgctgatcgttccacaaaactttgcggtggctgcaaaatcccagagcgataactttgagtatgtgtcattcaagaccaatgatagaccctcgatcggaaaccttgcaggggcaaactcattgttgaacgcattgccaaaggaagtgattcagcacacttttaacctaagaagccagcaggccagcca

SEQ ID NO: 40298 - DNA, 392 bp, Glycine max
  Clone ID: LIB3065-003-Q1-N1-D10
atcaacatcactgctagcagtgatagtagaaacaccatcctgactattaaaatatccttcttaatttctggcttgaaatctgcagccatggttccctggtggctttgttttgttccaaggattgtatctttaggaatagaagctgaattatccgagggaagatattcattgtgtcctaatgttgagaccatcaaaatcatcctgggacaataattgtagttaaagtttgcttcccaatttcaataaattaagcttttaccattctatttcaagcaatcctatgtccatcttataataagattgtggttttaaatcacggttttttagatttatttgaggttaaaattttctgatttatataaccaaaagcttgaagcatgcttggcaatctg

SEQ ID NO: 40299 - DNA, 383 bp, Glycine max
  Clone ID: LIB3065-003-Q1-N1-D11
agacaacaagaagtttacatttgcagggaaggacaacattgtgagttctctggacaacgttgctaaggagcttgcctttaactatccttctgagatggtgaacggagtattcgaccgaaaggagagtttctttttcccttttgagttgccgagagaggagcgtggtcgtcgcgctgatgcgtgagaggtttagaacaatcaagaaaaggtgtgcatgtggctgaagatcacggggaatgtattaagcttcagagactctttaaattaaattttctgtattttgtgttatatgttactagttctttaaattagccagatggagtttatgtgtatctaaatgcagggatgctaatggaataaaatggccacttgtattgttagct

SEQ ID NO: 40300 - DNA, 389 bp, Glycine max
  Clone ID: LIB3065-003-Q1-N1-D12
caacacccatgccgctgttgccgcaacaagaacgcttatatcatgggtggccatactcggtcttgcttcaatattcctctatgccaatatgcttagacttttgggcaaggaaccaccgaacttgttggggttggaagtgagtgaaaaaacaacaacgagaatagcacacacagttcgagcatggattgaagaaggaataaggtggttgttccttgtgggcgcagagaaagagtggcccgtgtttgtgggggctgtggctggattgttatcactatcttatttaggaagttgcatggacctcctaacactagtttatatgggtacgttagtgggaatggcagttccattaacttatgtgaagaacgaggacaagattaaaaggtttgtgg

SEQ ID NO: 40301 - DNA, 404 bp, Glycine max
  unsure (1)..(404): unsure at all n locations
  Clone ID: LIB3065-003-Q1-N1-D3
tgataagcttgtgttggctaacacacaagaattctttgatggaaattttccagtggattcttggttaccaatttttgtgaattgtctttatcctgtaagtcaattaccttcagaagctgtcgttgtaaatgtcacatgtggtagtggacgtgtggtttacccaccactgcttggattagttctgcagttaacaatcgctcctcagatatcaacaaaaggattcgcacagcacttgggaaaggtaagaaaattgtttttcttactagagttgacccttttccagtagctttactggctgttctttttggtgttaagaatgaaattctgagttctaacgccactaatcctatgctgacgcgacttcttgaaaactgtaagagtctcaaatatctggntgatgagtg

SEQ ID NO: 40302 - DNA, 409 bp, Glycine max
  Clone ID: LIB3065-003-Q1-N1-D4
tcgagacttgctagcatgcatgcacgcctactctagatgatcctctcggtgaagtccaattcctcattttcaagaaatactgaggcaaaaatgtgcatatatgaatcggaattatttggtgtcttattaggcctatcctgaagccaaaggaaatgagatcggaattcctcggtgaattccaattgcacattttcaagaaataaggatgcaaaaatgctcatatatgaattggaattatttgtggtactcattaggcctatactgaagccaaaggagatgagatcggaattcctcggagaattccaattccacattttcaagaaataaggaagcgaagatgttcatatatgaattgcaattatttgttttcttattaggcctatcctgaagccaaaggaaatgagatcgg

SEQ ID NO: 40303 - DNA, 359 bp, Glycine max
  Clone ID: LIB3065-003-Q1-N1-D5
cgctgcaattgtcaacggagctgggcgtatttgacgtgtggcaagatgcgggggctaagctgtctgcgaaagagatagcatccatgcttacctgctacatctaccctgaagcagactcaatgctggatcgccttctagcccttctagcctctcacttcattcttaactggtctctcattctcgaccaccaaaacctggggacctttcataggctctacaccatgaataccgtcgccagattctttgctcggaattctgatggggttttcatgggacccttgatggccctgcgttaagacaagatctttctacataactggtcggagcttaaagattcaattcgggaatggggtattcca

SEQ ID NO: 40304 - DNA, 353 bp, Glycine max
  Clone ID: LIB3065-003-Q1-N1-D6
ctcctttactgctatctgtatctctctctctctatgggggagcttgcttgaagcaatggccaaagccttggcatcagagctgctgttcctactagcagctgcaagtaatgtgcatgctgaacagcttgaacttgaaactgatatcaacctctctaccattaccctcaacctgttcactaccccacaccatcaactcttcacccaccagcaaatgctcatcacgcacactaacattaccagcaccaccaccattcagcaccagcaccatcaccagcacatgttgcttgaccttctcaccacaataacactgctacccctagccctgctaagcctactactcaccatcatcacca

SEQ ID NO: 40305 - DNA, 388 bp, Glycine max
  unsure (1)..(388): unsure at all n locations
  Clone ID: LIB3065-003-Q1-N1-D7
aactgcagttgtaagagcgcatgatggccgtggtccaagtacaatgcttacgagtagtattttacaaacgcttggtctttcttctgcagaagaattaatcgggtggacctatgcagatccctcttgggcccggatcgctgcccttgttccagttgtagtgacctgtgcagaggctggggatgaggttgcaaataagatcttgctagattctgtacaagagctagcttcaagtgtcaaagctgttgtagagagacttggattgtgtggtcaagatggaaagagtgcctttccccttgttatggttggcggtgttctcgaagcanataggaggaggtgggatatagganaagaagtaatgaatggcatttccaaatccttttctggggta

SEQ ID NO: 40306 - DNA, 242 bp, Glycine max
  Clone ID: LIB3065-003-Q1-N1-D8
cactatcctagtataccttaataaataatttaagatactatgatgagagcacggttcccattactgttgctgggacttgttttcctggcttcagtttctgtctcatttggcatcgcttactgggaaaaagagaaccgctgacacagcaagtgtctccagagccgcaatagcgacagagactcatgcaggaaccaagcatgccacgctcgttgcaacctacctaacgtggagaaagaagaatg

SEQ ID NO: 40307 - DNA, 407 bp, Glycine max
  Clone ID: LIB3065-003-Q1-N1-E11
gctacttcggctccatcttctccgatctcctcaaactctatgagcgcagaaccaagcctctatcaccatggggaagacacatggaatgggagctgcccgcaagctgaagtctcaccgtaggagacaaaggtgggctgacaagtcatacaaaaagtctcatctgggaaatgaatggaagaagccttttgctggttcatcccatgccaagggtattgttcttgaaaagattggtattgaggctaagcagcccaactctgccattcgaaaatgtgccagggttcaactcatcaaaaatgggaagaagattgctgcatttgtgccaaatgacggttgcttaaattatattgaagagaatgatgaagtcttgatagctggatttggacgaaaaggtcatgccgtgggtgata

SEQ ID NO: 40308 - DNA, 347 bp, Glycine max
  Clone ID: LIB3065-003-Q1-N1-E12
catgaaggaaggaagcagcattatcaacacgacatcggtgaatgcatacaagggaaatgcgaaactattggactacacgtccacgaagggagcaattgtggcctatacaaggggacttgctcttcagttggtgagtaagggaattcgggttaatggggtggctcctgggcctatttggaccccattgataccctcctctttcaaggaggaagaaacggctcaatttggtgcccaggtgccaatgaagagagctggccagcctattgaggttgctccgtcttatgtttttcttgcttgcaaccaatgctcctcttacataactggacaagtccttcaccccaatggtg

SEQ ID NO: 40309 - DNA, 408 bp, Glycine max
  Clone ID: LIB3065-003-Q1-N1-E2
aatcggtcggcactgatattaagaagcatttatacacctagaaatgagagcactactggtcgtatcttctacttggggctttaacttatacctacctttcggcaacggccaagacgtgcttgacgtggatggcgatccgattcggaacgggttcatataccacggtttggcggcaattagaagaaaccgtggccgaatagaacgagccgcacttgggaaagacacttggcctataactggaatggcaatctcccaatccaaactctaaggggttagaaattaagttggaatctgcatacccggcctattacataaacgaaaccctaattttgcaaataaagttcagttacccacagcagtgtgaaagaaagaatccttggtgggccatttctaaggatatatctgaag

SEQ ID NO: 40310 - DNA, 112 bp, Glycine max
  Clone ID: LIB3065-003-Q1-N1-E4
cttgggaatcaagtttgagttgtttctggataatgaatttccacatactgacactgagtattagggttaatggtcacgttatatgcaaatggggataaaacatcacaggaaa

SEQ ID NO: 40311 - DNA, 410 bp, Glycine max
  unsure (1)..(410): unsure at all n locations
  Clone ID: LIB3065-003-Q1-N1-E5
ctcgagccgttccattctctctgtgtatttccctacctgtcccttcaagatgcagatcttcgtcaagaccctcaccggcaagaccatcacccttgaggtggaaagctctgacaccatcgacaacgtcaaggccaagatccaggacaaggaaggaatccccccggaccagcaacgtctcattttcgccggaaagcaacttgaggacggccgtacccttgctgactacaacattcagaaggagagtactcttcacctcgtcctccgtctccgtggtggcatgcagatcttcgttaagacactcaccggcaagaccataaccctagaggttgaaagctccgacaccatcgataacgtcaaggccaagatccaggacaaggagggtatccncccggaccagcaacgtctcatct

SEQ ID NO: 40312 - DNA, 404 bp, Glycine max
  Clone ID: LIB3065-003-Q1-N1-E6
ctcgagccgtttcattctctctgcgtatttccctacctgtggcttcaagatgcagatcttcgtcaagaccctcaccggcaagaccatcacccttgaggtggaaagctctgacaccatcgacaacgtcaaggccaagatccaggacacggaaggaatccccccggaccagcaacgtctcattttcgccggaaagcaacttgaggacggccgtacccttgctgactacaacattcagaaggagagtactcttcacctcgtcctccgtctccgtggtggcatgcagatcttcgttaagacactcaccggcaagaccataaccctagaagttgaaagctccgacaccatcgataacgtcaaggccaagatccaagacaaggagggtatccccccggaccagcaacgtc

SEQ ID NO: 40313 - DNA, 337 bp, Glycine max
  Clone ID: LIB3065-003-Q1-N1-E7
tgagatgctcattagatatagctatgaaaaattactgcgccaggctaaagctccaagtatgtttttacaatctttcaaaaattttgtttctttgtgtgtgtatggtgatgataacttaattagtgttcatgaatatgtcaagccttactttagtggttctaaattgaaaagctttctagctggtcataatatcaccattactgatggtattgacaaaactagtgcaactttgcaatttagaaagttagcagattgtgattttctcaagagaaactttaggcagatgtctaatgttttgtgggtggctcctgaggacaaagggaagttatggtcacaa

SEQ ID NO: 40314 - DNA, 379 bp, Glycine max
  Clone ID: LIB3065-003-Q1-N1-E9
tggtccttaaacactcatcagtcatcaccatggccaagctagttttttccctttgttttctgcttttcagtggctgctgcttcgctttcagttccagagagcagcctcagcaaaacgagtgccagatccaaaaactcaatgccctcaaaccggataaccgtatagagtcagaaggagggctcattgagacatggaaccctaacaacaagccattccagtgtgccggtgttgccctctctcgctgcaccctcaaccgcaacgcccttcgtagaccttcctacaccaacggtccccaggaaatctacatccaacaaggtaagggtatttttggcatgatatacccgggttgtcctagcacatttgaagagcctcaacaacc

SEQ ID NO: 40315 - DNA, 366 bp, Glycine max
  Clone ID: LIB3065-003-Q1-N1-F10
gatgctcattagatatagctatgaaaaattattgcgccaggctaaagctccaagtatgtttttacaatccttcaaaaattttgtttctttgtgtgtgtatggtgatgataacttaattagtgttcatgaatatgtcaagccttactttagtggttctaaattgaaaagctttctagctggtcataatatcaccattactgatggtattgacaaaactagtgcaactttgcaatttagaaagttagcagattgtgattttctcaagagaaactttaagcagatgtctaatgttttgtgggtggctcctgaggacaaggcgagtttatggtcacaacttcattatgtttcgtgtaataatctggaaat

SEQ ID NO: 40316 - DNA, 390 bp, Glycine max
  Clone ID: LIB3065-003-Q1-N1-F11
ctgaatcgaacacacgtgagtatgtctgatcacgaagaccatgcagactacgcagacaatgaatcctttgcaaagcgtaggttcagggataggtccaaggaggcattgtccaaacaagccgttaagttagccaaacaagctgaagagcatgaaaggttcatcaacaaggtgactcatcttttgggggttcttggctttggttggttttgcttcatctttggggcaaggccacaagccgttcccttggtatattgtttgttctatgtggtatttgttcctctccgttggatatattacaggttcaagaaatggcattactatctcctggatttttgctattatgccaatacaatcttcttggtttacctccttttctacccaagcaatgaa

SEQ ID NO: 40317 - DNA, 277 bp, Glycine max
  Clone ID: LIB3065-003-Q1-N1-F12
tagctgactactaatataatttaccatagatcatatcgtataccggcaagcttcacatacaagaggtcaatctccaaaacatatgtccacggatcgttccaagccagaattgacgaaacaaccccaatcattaaccttttattctctactacatgaaatgccaatcaatttgtatactaattcaacttcggcatttgcctttacactgtttctcgcgttttttcagaaacatagataacctgattcaccacactataaacagtcctataagagacac

SEQ ID NO: 40318 - DNA, 214 bp, Glycine max
  Clone ID: LIB3065-003-Q1-N1-F3
aactattaactcgcattcaccccttcctaaaccccgaaatccgctccagaaaaaaattaaagatattctcaacttaaaaaaaaaaaaaaaggggaaaaaaaaaaaaaaaaaaaaaaaaaaaaaaaaaaaaaaaaaaaaaaaaaaaaccaaaaaaaaaaaaaaaaaacaaacaaaaaaaaaaataaaaatatacccaaaaaataaaattattaaa

SEQ ID NO: 40319 - DNA, 318 bp, Glycine max
  Clone ID: LIB3065-003-Q1-N1-F4
gttcaatatcctagtataccttaataaataatttaagatactatgatgagagcacggttcccattactgttgctgggacttgttttcctggcttcagtttctgtctcatttggcattgcttactgggaaaaagagaaccccaaacacaacaagtgtctccagagttgcaatagcgagagagactcgtacaggaaccaagcatgccacgctcgttgcaaccttcttaaggtggagaaagaagaatgtgaagaaggtgaaattccacgaccacgaccacgaccacaacacccggagagggaacctcagcaacccggtgag

SEQ ID NO: 40320 - DNA, 331 bp, Glycine max
  Clone ID: LIB3065-003-Q1-N1-F5
cttgtactgtgcatgtaactgaggttgaatgggaccaatagaaagaagcagctcacatgggtaaggcagaggagtatgtcgtgtatctcaatcatgctgaggaactgcatttcatgaccccaaagtctgaaccactccaatttactattcaaccttgcacttttgagatctacaactttgtcccagttgaaaagctaggtggcagcatcaaatttgcaccaattgggctcacaaacatgttcaacagtggagggacaattcaagaattggagtgcgttgaggaaggtgcaaaggttaacgttaaaggtgatgggagattccttgcttactc

SEQ ID NO: 40321 - DNA, 272 bp, Glycine max
  Clone ID: LIB3065-003-Q1-N1-F6
gaaccagtcccgtggtgaaaccaaaacagctaagcgattcatcaatgacaccatcaggaatgatttccatagaaaatttctgcataaatacatgaagtaagtccttgtgccagaagtccgagttgtttggattttggtctcaacagaacttattaatttgcagtttgtatctaaatgtatgattcaatgttgatggatatatttgtttctcttataaccgtattttaacatgttactcgtagttgctgtaacatggtgtatgcttgttaatg

SEQ ID NO: 40322 - DNA, 375 bp, Glycine max
  Clone ID: LIB3065-003-Q1-N1-F7
ctctttctccgagaacaaaacaaaaacaaataaaaatccgcgattcgctcttctcttggaaaagtgaaatccagaagtacgaacgaaagacatgagatcagcgatttagaagtgagagaagatggggttgtcgttcacgaagctgttcaccaggttgtttgcgaagaaggaaatgaggattctgatggtgggtctcgatgctgctggtaagacaaccatcttgtacaagctcaagcttggagaaatcgtcaccactatgcctaccatcggatgtaatgctgagactgtggagtacaagatcatcagcttcactgtgtgggatgttggtggtcaggacaagatccgtccactgtggaagcattatttccagaacac

SEQ ID NO: 40323 - DNA, 290 bp, Glycine max
  Clone ID: LIB3065-003-Q1-N1-F8
aattgatgaggcacttgctaaagaaattcgagaatttagaagccccacagatggggagacaaggatgttttatgaaatagtggttgcgcccagctatacagagaagggacttgagattctctgtggaaagtctaagactctaaggattcttgaagcgaagaagaatgaagctggaaagctttcactcagacaagttggtggaggatggttagctcaggattcagatgacttaaccccacaggacatcaagttcaacgtagtctctgagaaggctccacaggatgatgagc

SEQ ID NO: 40324 - DNA, 317 bp, Glycine max
  Clone ID: LIB3065-003-Q1-N1-G11
cttgtactctttttatttactaaaacagcatatgatattcaggtggagttcttaccaagtccattttggatgatggtcatgatttctcttgctgaaaaaggtattaaaaatgagtccacacaagaagactctcttaacaagagccctttgttcctcaaaatgaaccccccttacaagaaaaaccccgatctcatacacaattacgcacacacttttgaataactcgatgctattcaaaacacttaggaaatctctaatgacccaaatccctagttgacttctgacacttatcacaaagctcatactaaatatttggc

SEQ ID NO: 40325 - DNA, 387 bp, Glycine max
  Clone ID: LIB3065-003-Q1-N1-G12
cacgaaaccatcgtttttaaacgcggctttctactgccacgtcttctctcgctccttaaccttaaaccctaaccctctgctcctcgtttccccgtttcggaaacccgaaacgtttcgcctcgcttcacccgtttcgtgcttatcctcctcctcaatggcggtgcctccgtcttcgctggagaagcaattcgatgactttagggttcagctggaagaatctggaaccttgcgcgaacgaattcgaagcgtcgtttcggagattgagtcctccactaggctcatctatgccacacttcttctcgttcaccagtctcgtaccactcccgagctattagagaaggccaagtctcatgttaatgtgttaaagaagcagttttagcaacttgc

SEQ ID NO: 40326 - DNA, 136 bp, Glycine max
  Clone ID: LIB3065-003-Q1-N1-G2
tttctttcgcttgttcgtttgtttaattcaataaaggaaattaggcatgaccctcttgttgagtatgctctgcctatttgaaaatttccacacctcttttaattgtcgtaatgatgtgtgaagtgtgtgttatttt

SEQ ID NO: 40327 - DNA, 387 bp, Glycine max
  Clone ID: LIB3065-003-Q1-N1-G9
cttgaactcgaatattcactatggcagatgaggtggttctgctagatttctggccaagtccatttgggatgagggtcaggattgcacttgctgaaaagggtatcaaatatgagtccaaagaagaggacttgcagaacaagagccctttgctcctcaaaatgaacccggttcacaagaaaatcccggttctcatccacaatggcaaacccatttgtgaatctctcgttgctgttcagtacattgaggaggtctggaatgacagaaatcccttgttgccttctgacccttaccagagagctcaggctagattctgggctgactttgttgacaataagatatttgatcttggaagaaagatttggacatcaaagggagaagaaaaagaag

SEQ ID NO: 40328 - DNA, 402 bp, Glycine max
  unsure (1)..(402): unsure at all n locations
  Clone ID: LIB3065-003-Q1-N1-H12
gtgagaacaccattgaattttgatcctagcaagcagagcttttgtcaattttctattgaccttcttggtggaggaattttagtggacaaaactggagattggatcacacttatacaaaattctccaattagtaacttgttgagagttgctgcttggaagaaaggctgtttaatggttaagattgtgatgtctgggaatgcagcagtcaaaaggagtgattgggcctcattggtacaagtgtttctaacaaacagcaacagtacagagcattttgatgcatgtaagtggacaaaatcggaaccacattcctgggaattgatcttcccaatagaggtatgtggtcctaataatggttntgaaatgtggagttctgagtgggcaaatcaaacttcatggcatttg

SEQ ID NO: 40329 - DNA, 239 bp, Glycine max
  Clone ID: LIB3065-003-Q1-N1-H2
ctcgagccgtggttatagagggaaggaaaaataattagagtaataataattagagtagcaaatcatacacaaagtaataataattagagtagcaaatcatacacaaattattattactttggttatagagggaaggaaaaatgagttaatgctcatagtttggaggacatgtataaaatcattttgggtatcgtgactatcatgttaattacttgaatgtaatttgtcttaattataat

SEQ ID NO: 40330 - DNA, 417 bp, Glycine max
  Clone ID: LIB3065-003-Q1-N1-H3
atccttttcctgataaatgactgaactttaaggccacttgccatagagttgagtttgccacatcctcagggagatcaatctggtgcttttagtcaagtttttctgcctgcagatgaaggtgttgaaagttctatttggctgctagcaaaggcttatgtagttgtgaatgactcgtgctatcatcaacttgtcagccattggttaaacactcatgcagttgttgagccattcatcatagcaacaaacaggcatctcagtgttgttcaccctatttataaactccttcaccctcactatcgtgacaccatgaacataaatggccttgctcggttatcactggtcaacgaccgtggcgttttagaacaaacatttttgtggggaaggtattctgtggaaatgtctgctgtaatttacaag

SEQ ID NO: 40331 - DNA, 256 bp, Glycine max
  Clone ID: LIB3065-003-Q1-N1-H6
ctggcggctcgagctcgagccgtggctcagagggaaggataaataattataggaaggataattagagtagcaaatcagacacacagtaataataattagagtagcatatcatacacaaattattattactttggttatagagggaaggaaaaatgagttaatgctcatagttaggaggacatgtataaaatcattttgtgtatcgtgactatcatgctaattacttgaatgtaatatatcttaattataataaatc

SEQ ID NO: 40332 - DNA, 327 bp, Glycine max
  Clone ID: LIB3065-003-Q1-N1-H8
ggaaatggctgaagcacaactacgagaccagcatggcaaccctgtcccactcaccgatcaatacggtaatccggttatcttaactgacgagcgcggtaatcccgtccaactcactggtgtcgctaccaccgctaccggcacagcaggttctgggtttgggtcctatggtaccggtgcttacggtggtggtgcaagtgcaaccaccgttgcagatcttttggcaacccaaccaaggagtggcagggaggctagagagcttcgtcgttcctccagttcaagctctagctcgtctgaagatgaatggcaaggtgggaagaagaagaaagg

SEQ ID NO: 40333 - DNA, 388 bp, Glycine max
  Clone ID: LIB3065-003-Q1-N1-H9
caagaaataacgaagcacaaggctgcatatataaattggaatgatttgcacacttattaagcctatccttaagccaaaggaaatgagatcggaattcctctgggaattccaattccacattttcaagaaataaggaggccaaaatgttcatatatgaattggaactatttgttttcttattaagcctatcctgaaaccaaaggaaatgagatcggaattcctccgggaattccaattccacattttcaagaaataaggaggcaaaaatgttcatatatgaattggaattatttggtatcttattaagcctatccttaaaccacaagaaattagatccgaaatcctctggtgtacccagcttcaatttcctatttttgagtccatttaa

SEQ ID NO: 40334 - DNA, 367 bp, Glycine max
  Clone ID: LIB3065-004-Q1-N1-A1
gcaagactagtccactacccgtgcttaaggaaatcttccgaactgatggtgaacaggcccttaagtttactcctactaaagtaattcaagtgagtaagtctgcatggatgactgatgaagaatctgcaagagaaatgcttgctgctgtaaatccaaacttgattcgctgtcttaaggatttcccttcacgaagcaagctaggtagccaagtctatggtgatcatactagtcaaatcaccaatgatcacctagagcccaacttataagggctcactgtagatgatgcaattcactacaagagattgttcctactcgatcatcatgacccaatcatgccctatttgaggcgaatgaatgcgacctccac

SEQ ID NO: 40335 - DNA, 187 bp, Glycine max
  Clone ID: LIB3065-004-Q1-N1-A10
aaaaaaatttaaaaaaaaaaaaaaaaaaaaaaaaaaaagaaaaaaaaaaaaaaaaaaaaaaaaaaaaaaaaaaaaaaaaaaaaaaaaaaaaaaaaaaaacaaaaaaaaaaaaaaaaaagaagaaaaaaaaaaataaaggggtgcccacagattagatactaggccatccagaatttaaaacagatac

SEQ ID NO: 40336 - DNA, 360 bp, Glycine max
  Clone ID: LIB3065-004-Q1-N1-A12
aaacagtttgctgtgaaatagactgaggaatggtgcccaaaagacgagaacctgaaataccaggattgagcccatatgcacacatattgtttatttcacagcaaactgtttggaatcaaatggcaacagtgagaacaccattgaattttgattctagcaagcagagtttttgtcaattttctattgaccttctcggtggaggaattttagtggacaaaactggagattggatcacacttatacaaaattctccaattagtaacttgttgagagttgctgcttggaagaaaggctgtttaatggttaagattgtgatgtctgggaatgcagcagtcaaaaggagtgattgggcctcattgg

SEQ ID NO: 40337 - DNA, 97 bp, Glycine max
  Clone ID: LIB3065-004-Q1-N1-A2
ccgagtatcgagcctcagagacttcgaaattaagtgcggaacgaaacctgcaggactgcgggctatcacgctatagagagtcgccttatactcgagc

SEQ ID NO: 40338 - DNA, 390 bp, Glycine max
  Clone ID: LIB3065-004-Q1-N1-A3
agaacctgtcaatcttcagtttggtttttatgggatcagtgcatggccaagtgatggtggcactagtcgtgctggaagtgttgatgagtctagagctgatgggactgatactggtagtagatatgtatcctcttgctgtagctcgccaaggatgtcggatgttgctgcaaaggagctcaaggaagatttctcagtgcatggtagtgatgaagagattgacgatcaaccagaggtgggcagtgatgaggattttagtgatgatggcggcaaacatgcccttgaagaggtaggatcagttgatgaggaatcaacaaaatccgacgaagagtatgatgatcttgcgatgcaagacgtgctggaaactggatattggtcagatgatgaagagta

SEQ ID NO: 40339 - DNA, 419 bp, Glycine max
  unsure (1)..(419): unsure at all n locations
  Clone ID: LIB3065-004-Q1-N1-A5
tgcacaaattatatctgctagcattgccggcgatttagttcttgctacagcatattcacatgagctgccacgatatggtcttgaagtaggacttacaaattatgcagcagcttattgcactggtctcctgttggcccgaagagtcctcaaaacacttgaaatggatgaggagtatgaaggaaatgttgaggctactggagaggattattcagtggaacctgccgagagcaggaggccattccgtgcactccttgatgttggtcttgttaggactacaacaggaaatcgcgtctttggtgcccttaagggagctctggatggnggtttggatattcctcacagcgacaagaggtttgctgggtttgataaggagaagaaagagcttgatgctgaggttcatcgcaaatatgtttttggtg

SEQ ID NO: 40340 - DNA, 413 bp, Glycine max
  Clone ID: LIB3065-004-Q1-N1-A6
gggaacatgagttggcggtcggtgaggggaagccgtaagaggaagatggatttcgaactggacctcaaccgtgatccgccgctggttcgagaagaggaggaggaggaggaggagggggggccctcaaggcatcagcagcaccaccaccaccaacaagaacctcaaactcccattgtcgatgtcgacgccattgacgacgatgttgttgaaagctcgcctaggtctttcgctcaggctaagagcaatgctgatgagaggaggagagttcgcaggaggacgactattgttgatttggactcagaagatgggaccggaggagttcctcaaaaccaaacaatcatcaatggcgatctttatgtaaatttggccaacaacagcagttctgcgagtgaaaatgctaagaagacacctga

SEQ ID NO: 40341 - DNA, 438 bp, Glycine max
  Clone ID: LIB3065-004-Q1-N1-A7
cggtatttctagatatataactaaaaagaatcgacagaatacgcctagtcgattggaattgagaaaattttgtccccgttgttgcaaacatacaattcacgcagaaataaagaaatagatcaaattgatcgcttgtgtgttacccttcgaaccaaagaacttaacatgtaaaatgatctatttttcttatctatatagatagatctatctgtattctatcatttacagttgaatatatacgaatatcagtatataacaacatatattaaaaaaatgacaacgtatattaaaaaagtcagaatataaaaaccaatcctttatagtattcttggaattaaatgggttttttgaaatagggattaataacccatggaaaaatctaggcgactctctatgaaatccaagcgatctttttcgaggcgattgcccccgatccaa

SEQ ID NO: 40342 - DNA, 327 bp, Glycine max
  Clone ID: LIB3065-004-Q1-N1-A8
caagtacttccttacaatcaaaaccaacaacaactatggcaagttatcaaaagcactacgatgatcagggtcgcaaggttgacgagtatggcaacgttgagaagcaaaccgacgaatacggcaaccctgttcatgctgctagtgtcacctatgtagccaccagaactgctgctggtggttacagtgatgacattaataagcaacatgataccaccaatgcctacggcgtagacactggtagacagcattctagtggtggctacgatggtgacactaataaacatcatggaactactggtggctataatgatgacaccaatagacatc

SEQ ID NO: 40343 - DNA, 341 bp, Glycine max
  Clone ID: LIB3065-004-Q1-N1-A9
gaacgagggagctcttcttctaccacacttcaattcaaaggcgatagtgatactggtaattaatgaaggagatgcaaacattgaacttgttggcctaaaagaacaacaacaggagcagcaacaggaagagcaacctttggaagtgcggaaatatagagccgaattgtctgaacaagatatatttgtaatcccagcaggttatccagttgtggtcaacgctacctcaaatctgaatttctttgctattggtattaatgccgagaacaaccagaggaacttcctcgcaggttcgcaagacaatgtgataagccagatacctagtcaagtgcaagagcttgcat

SEQ ID NO: 40344 - DNA, 410 bp, Glycine max
  Clone ID: LIB3065-004-Q1-N1-B1
caaaacaaattgtttacgttacaaatcgcataataaccgtcctaagtttattgagagaattttgcaagtgtgagaaacatggcatctcgtcaaaacaacaagcaagagcttgatgaaagagcaaggcaaggagagactgttgtcccgggtggaactggtggcaagagcctggaggctcagcaacaccttgctgaaggaaggagcaagggagggcaaacaaggaaggaacagctgggtacagaagggtaccaggaaatgggacgcaaaggagggttgagcactgtggacaaatcaggagaagaacgtgctcaagaagaaggcattggcatcgatgagtccaagttcaagactggtaataacaagaaccagaatcagaacgaagaccaggataagtgataatgtaacaccct

SEQ ID NO: 40345 - DNA, 338 bp, Glycine max
  Clone ID: LIB3065-004-Q1-N1-B12
gtgcggttttctttgttggtgttgctgggaactgttttcctggcatcagtttgtgtctcattaaaggtgagagaggatgagaataaccctttctacttgagaagctctaacagcttccaaactctctttgagaaccaaaacggtcgcattcgtctcctccagagattcaacaaacgctccccacaacttgagaaccttcgagactaccggattgtccagtttcagtcaaaacccaacacaatccttctcccccaccatgctgacgccgatttcctcctctttgtccttagcgggagagccatacttaccttggtgaacaacgacgacagagacttcta

SEQ ID NO: 40346 - DNA, 416 bp, Glycine max
  Clone ID: LIB3065-004-Q1-N1-B2
agaagaaatggcattgacgagaccatatgcaccatgagacttcgccacaacattggccagacttcatcacctgacatctacaaccctcaagccggtagcgtcacaaccgccaccagccttgacttcccagccctctcgtggctcagactcagtgctgagtttggatctctccgcaagaatgcaatgttcgtgccacactacaacctgaacgcgaacagcataatatacgcattgaatggacgggcattgatacaagtggtgaattgcaacggtgagagagtgtttgatggagagctgcaagagggacgggtgctgatcgtgccacaaaactttgtggtggctgcaagatcacagagtgacaacttcgagtatgtgtcattcaagaccaatgatacacccatgatcggcactcttgc

SEQ ID NO: 40347 - DNA, 264 bp, Glycine max
  Clone ID: LIB3065-004-Q1-N1-B5
taggaggcaaaaatgtggataggtgaattggaataatgtgatttcttattaggcctatcctgaatccaaaggaaatgagaacggaattcctcggggaattccaattccacatgttcaagaaataatgaggcaaaaatggtcatatatgaattggaagtagttgttttcttattaggcctatacaggagccaaaggaaattggatcggaattcctcggggaattccaatttcacattgtcaagaaataaggaggcaaaaatgttc

SEQ ID NO: 40348 - DNA, 422 bp, Glycine max
  unsure (1)..(422): unsure at all n locations
  Clone ID: LIB3065-004-Q1-N1-B6
agaaaacctctcgttttctttctctctctctaaaacacgatttccaattttctttctctagaaatgggaacagcaatccttcgttcccacgattgcctccaaggccggttcctccacaacgaagccttcgcgatcgccacgtcacgtgttgcatcgcgaagaaaccctaactctaacaacaataaccataatagcttcgcctcctccgcaaaccagaattgccgccggaagcggagtccggtcaccgatcgagagcgccgtcgatcgccgccgaatctcgtcacgggacacgttaagatcctgaagcgaggcgagaaattgagcctncagaataaaaaccaaagactcgctgtttccgcggagaaccgtttggtgaagaacgatgtgggccctggatttgttatggggttcacggatcgatt

SEQ ID NO: 40349 - DNA, 437 bp, Glycine max
  Clone ID: LIB3065-004-Q1-N1-B7
aacatacaatcatggaacaagatcgaaggtttgagctcatcgaccaagcaattcagaagcttgtacacgacaacaccaacaaagtccaagaatccctccataacaatgatgctcaataccaacaccctctttcccaccttctctctgtctctcagttgaaaatgttgaaaggagaagagatacttgagcaattcgaagcttctagttcttctgagccggtggcttctataactcaggaaacagaaagtgaaaatgaggatgctggggaaagtaagggaagtgaaaatgatgagataatcaaagaactgaagaagttgaagaggcagaacttcgtgactcattgtcttctttcggtgatgattgttctcactgtggcttggcaactatcggaggtttctcttattttgaaagtcaaagatggaataagccaccctttt

SEQ ID NO: 40350 - DNA, 402 bp, Glycine max
  Clone ID: LIB3065-004-Q1-N1-B8
aaataattgatctttgaaaatgcagggaggaaagaaagctggagagtccatcaaggaaacagctgcaaacattggtgcttctgccaaggctggcatggagaaaaccaaggccactgtccaggagaaggcagaaagaatgacggcacgtgatccgatgcaaaaggagttggcaacccagaagaaagaggcaaagatgagccaggcagagctggacaagcaagcggcgcgtcagcataacacggcggcgaagcaggctgccacggcagggcacatgggacaacccatggggacccatcagacgtcagctatgcccggtcatggaaccggacagcccacgggccatgtcaccgaaggagtggtgggctcacaccctattggaaccaacagaggcccgggtgggac

SEQ ID NO: 40351 - DNA, 197 bp, Glycine max
  Clone ID: LIB3065-004-Q1-N1-C11
accccgcatactagacccagaaaaacaacaagggtcaaaggtaaatttgcaaaaaggacagaatctcgcatattataacatttaaagtaaccaggatattcaaaatcctctatttcgagaacatatccttcaacaatttcaccgctactttctatctctaatgtgcaaacagacagtccataacggatgaataatat

SEQ ID NO: 40352 - DNA, 318 bp, Glycine max
  Clone ID: LIB3065-004-Q1-N1-C12
ggaataggtgcaagcagcaagtcctatcccaaccctagcgcctaacttcgaaccttcgtcctttctctcttcttccttcagattcatccgtaccgttagttactactggattcgcggttgattgctgctaccgggtttctcctctttcacgtataagatgcacttccggtcatcattttaccaacatgcagattttgagttggtttctgaatataaatggacgccaaacggttcatccagctggttgaggagaagaagaagaaaattatggagagaaaggaagctcctttgaaatgggagcagaagcttgaagctgct

SEQ ID NO: 40353 - DNA, 390 bp, Glycine max
  Clone ID: LIB3065-004-Q1-N1-C2
ccgccaccctcggcgcccacgtgactctcacggaccttcctcacgtggttcccaatctccgattcaatgcggacgccaacgccgcggttgtggggcccaccggaggggtaataaccgtcgcgccgctccgttggggccacgctgctgacgtggaagcgattgggcgggagtttgatctcgttctggcgtcggatgtggtgtatcacgatcacctgtacgagccactgctcgaaacgctgcgtttaatgatgctaagtgaaaggaatgggaagatggtgtttgtgatggctcacatgaggaggtggaagaaggagtctgcgttttttaagaaggcgaggaagcacttcaacgtcgacgttttgcacactgacacgccttgtgatgggtcta

SEQ ID NO: 40354 - DNA, 372 bp, Glycine max
  Clone ID: LIB3065-004-Q1-N1-C3
gcttctttctgatctttgattttggcacaaaacttaccttgcttcattgcttggcgccttaacttcgtgttcatctaatgcatttttaattgttctacacaaataaatgttttggagttcatttttggttgatttgattgctttgtgttagcaattcagggaggaactgttgaagtggattgaccctgcactgctctcaatttgctgccgaaggaaagggttgggatgggttgtggcttttccaagtacacagcgtgctgcacgggttctgagcaagatggtctggctgctgaggctcaagttgatggtggaaacgaagacaatgttgttgagggtgttgacttgccgtggtttcatgaattcacaattgat

SEQ ID NO: 40355 - DNA, 418 bp, Glycine max
  Clone ID: LIB3065-004-Q1-N1-C5
atatcctagtacaccgtattaaagaatttaagatatactatgatgagagcgcggttcccattactgttgctgggagttgttttcctggcatcagtttctgtctcatttggcattgcgtattgggaaaagcagaaccccagtcacaacaagtgcctccgaagttgcaatagcgagaaagactcctacaggaaccaagcatgccacgctcgttgcaacctccttaaggtggaggaagaagaagaatgcgaagaaggtcaaattccacgaccacgaccacaacacccggagagggaacgtcagcaacacggtgagaaggaggaagacgaaggtgagcagccacgtccattcccattcccacgcccacgccaacctcatcaagaggaagagcacgagcagaaggaggaacacgaatggcatc

SEQ ID NO: 40356 - DNA, 416 bp, Glycine max
  Clone ID: LIB3065-004-Q1-N1-C7
cttttctgccttagcagagaagttgcgttctgattatgactttggtcacactctgaatgccaaactccttccaagaggagagtcatcagtttctgggcccgtagttaggctgttcaagccattcgatgaactttttgttgacttccaggatttcaatgtggaagctctagagaagtttgttgaggaatctagtacccctgttgttactgtctttaacaatgaaccgagcaatcaccctttcgttgtcaaattcttcaacagtcccaacgcaaaggcaatgttgttcatcaacttcactgccgaaggtgctgaagctatcaaatcaaaataccgtgaagctgctgagcaatataaacaacagggtgtcagctttttggtgggagatgttgagtctagtcaaggtgctttccaggttt

SEQ ID NO: 40357 - DNA, 416 bp, Glycine max
  unsure (1)..(416): unsure at all n locations
  Clone ID: LIB3065-004-Q1-N1-D1
cgtgaaagatgatgcgagacaagaaacggggttgaggaaaatatctgcaccttgaagcttcacgagaacattgctcgcccttcacgcgctgacttctacaaccctaaagctggtcgcattagtaccctcaacagcctcaccctcccagccctccgccaattccaactcagtgcccaatatgttgtcctctacaagaatggaatttactctccacattggaatctgaatgcaaacagtgtgatctatgtgactcgaggacaaggaaaggttagagttgtgaactgccaagggaatgcagtgttcgacggtgagcttangaggggacaattgctggtggtaccacagaacttcgtggtggcggagcaagccggagaacaaggattcgaatacatagtattcaagacacaccacaacgc

SEQ ID NO: 40358 - DNA, 367 bp, Glycine max
  Clone ID: LIB3065-004-Q1-N1-D10
ctgaaacataaacaactcaaaccactcaaacaaggaatcaattaaagaacacaggcaatgagaaaccttcaacaatctcatcagcaacctctgcaatagctgataaagctgtctcagccaaaaacaccgtagcttcgaagcttggttttggcgacacagcaacaacaacacaacaagagaagagaactgaccatgctgctgctcctacagaatatggaaaaagtgttgctcagtccctgacagagaaactagctccagtttctggaaaagatgctggtgtaggaagtggtgtgaagtccaaagtttctggaactcaaactagtagtatgggtgtggaacaggacaagggggtttctgtgaaagacta

SEQ ID NO: 40359 - DNA, 420 bp, Glycine max
  Clone ID: LIB3065-004-Q1-N1-D2
ggagtcctcaaagatctatgcttacctcttcctctgcatgatctttctctcttccgccactcccattctcggttgtggctactgtggcaaaccccccaaaaagcacaagcctggtaaaacaccaaagacacccaaaacacccgttgttaagccaccagtcaccatccctcccattaatgttcctcccgttgttcttccaccaatagtgaagcccccaggtattctccctccaattccaattattaacccaccaaccacaccagggaagggagggaacactccatgcccaccaccaaagtctcctgcgcaggctacgtgccccattgacacgctcaaacttggtgcctgtgtggatcttcttggagggttggttcacattggtttgggtgaccctgttgcgaaccagtgctgccccgtgct

SEQ ID NO: 40360 - DNA, 376 bp, Glycine max
  Clone ID: LIB3065-004-Q1-N1-D3
ttccttcacttgcagcactgttgcatcatcatcttcattgcaaaaccctaaacttcaccttcaaccatgaccacacaagtaccaccacacagtgtccaagtccacacaacaacacaccgctacgaagctggcgtcgtcccccccggagcccgtttcgaaccgccgcgttatgaagccggcgtcaaagcgccctccatttaccattccgagagaggtccaacgactttccaggtcctcgtcgtcctcgccggcctcccggtcggtggcatcctgctcctgctggcgggattgaccctggcaggaaccctcaccggactggcagttgccacgccggtcttcgtcctcttcagcccggtgctggttccagccacggtcg

SEQ ID NO: 40361 - DNA, 412 bp, Glycine max
  Clone ID: LIB3065-004-Q1-N1-D5
caaacacttatcatattactaacaaaaatggaactaacattccctcatcaagacgaagatgattccgttgtttctgattgcgagagcggtgtttcgggcagtggagtcgtggtggcaccaccaccaccaccaccacaacaacaacaacgtggttttttcgttaggcttggagaaggtgacgtggttcacgatcttatcaagacaaggtttattcgtggcctcggcatgctcgggcctaaaaccgaggttgtctccgttcgccgaaacgcgtgctccgacgtcgtttcacaggcgcgccttcactcgtttcatgctcacgccagggcggtggcgaggctccgcggcggcgggaatcatgccaacgtgaagtacgcctggtatcgtacgaacggcgaggacgacgtgaacgaca

SEQ ID NO: 40362 - DNA, 287 bp, Glycine max
  Clone ID: LIB3065-004-Q1-N1-D7
ctgctgcactttggcttctgctgcgctttcaggtccagagggcagccgtagccatacgagtgccacatccacacactcaatgcactcgacccagatcaccgtatcgagtcagaaggagggctcatagatacatggaaccctaacagcaagccattccaatgtgccggggttgccctctgtcgctgagaccctcaacctgtacgaccttcggagaccttcctacgccaacagtgcccaggaaatctacatccaacaacgtgacggtatttttcgcatgatatacccgg

SEQ ID NO: 40363 - DNA, 378 bp, Glycine max
  Clone ID: LIB3065-004-Q1-N1-E1
ctgcttttcagtggctgctgcttcgctttcagttccagagagcagcctcagcaaaacgagtgccagatccaaaaactcaatgccctcaaaccggataaccgtatagagtcagaaggagggctcattgagacatggaaccctaacaacaagccattccagtgtgccggtgttgccctctctcgctgcaccctcaaccgcaacgcccttcgtagaccttcctacaccaacggtccccaggaaatctacatccaacaaggtaagggtatttttggcatgatatacccgggttgtcctagcacatttgaagagcctcaacaacctcaacaaagaggacaaagcagcagaccacaagaccgtcaccagaagatctataacttc

SEQ ID NO: 40364 - DNA, 352 bp, Glycine max
  Clone ID: LIB3065-004-Q1-N1-E11
cgaacatttttgctaatgccaaggctggcatggacaagaccaaggccactgtccaagagactgcagaacgagtgacagcgcgtgatccgttgcaaaaggagttggcaacccaaaagacagaggctaagatgaaccaggcggaactggacaagcaggcggctcgtcagtataacacggcggccatacagagcgagaccacggatgtgcacatgggacatgcccaccacaccaccggaaccgggactggaaccgtcacgtattgcaccatcggagaatatggtcagcgcatagtggccgatcagacgtcggcaatgcctggccatggaatcgagcagaccatgggccatgtcac

SEQ ID NO: 40365 - DNA, 364 bp, Glycine max
  Clone ID: LIB3065-004-Q1-N1-E12
ctcgagccgctcgagcggctcgagcaagagttgaaggaaatggctgaagcacaactacgagaccagcatggcaaccctgtcccactcaccgatcaatacggtaatccggttatcttaactgacgagcgcggtaatcccgtccaactcactggtgtcgctaccaccgctaccggcacagcaggttctgggtttgggtcctatggtaccggtgcttacggtggtggtgcaagtgcaaccaccgttgcagatcttttggcaacccaaccaaggagtggcagggaggctagagagcttcgtcgttcctccagttcaagctctagctcgtctgaggatgatgggcaaggtgggaggaggaaaaaaggag

SEQ ID NO: 40366 - DNA, 273 bp, Glycine max
  Clone ID: LIB3065-004-Q1-N1-E3
ctcttgcgctctacgtccggggcgattgtcacaactgcacgattattcctctatggatcctgcatgcgtaccacgttttcctacagtgtgtagtcctaaagctcggcgtactcatggcaatagcagcctaccgtgagacattgacacccaattacaatcacggacgcctactaaacggctgcctactgtgtgagacctcagatgcccaatgactgagctacctgacattcgttccgttgcggtcactgcaggctctgaagcgctgaaacatgc

SEQ ID NO: 40367 - DNA, 384 bp, Glycine max
  Clone ID: LIB3065-004-Q1-N1-E4
cactaacaattccttcacttgcagcactgttgcatcatcatcttcattgcaaaaccctaaacttcaccttcaaccatgaccacacaagtaccaccacacagtgtccaagtccacacaacaacacaccgctacgaagctggcgtcgtcccccccggagcccgtttcgaaccgccgcgttatgaagccggcgtcaaagcgccctccatttaccattccgagagaggtccaacgacttcccaggtcctcgccgtcctcgccggcctcccggtcggtggcatcctgctcctcctggcgggattgaccctggcaggaaccctcaccggactggcagttgccacgccgctcttcgtcctcttcagcccggtgctggttccagccacggtc

SEQ ID NO: 40368 - DNA, 410 bp, Glycine max
  Clone ID: LIB3065-004-Q1-N1-E7
ctttcgcaccttcgaaaatcaattttctgtcttctctgcgtcttcttcctctatcaatcgttttccatggctcgtaccaagcaaaccgctcgcaaatccaccggtggaaaggctcctaggaagcaactcgccaccaaggctgcaaggaaatctgcaccgacaaccggtggagtcaagaagcctcatcgctatcgccctggaactgttgctcttcgtgagatccgaaaataccaaaagagcacagagcttctgatccgcaagctccccttccagcgtcttgttcgtgaaattgcgcaagacttcaagaccgatttgaggttccagagtcacgctgttcttgcgcttcaagaagctgcggaagcttacttggtgggtttgtttgaggacaccaacttgtgtgcgattcacgc

SEQ ID NO: 40369 - DNA, 407 bp, Glycine max
  Clone ID: LIB3065-004-Q1-N1-E8
atcttaaaccgtccaactcttagtaggcgattcatgcctgagaaaggttctgctgagtatgaggagctgaggaagaatccccagaaggcttacttgaagactattacaccaaagtttcagacccttattgacctttctgttatagaaatcttgtcaaggcatgcatctgatgaggtgtaccttggggagagggacaatccaaattggacatctgatacaagagcattagaggcttttaaaaggtttggaaataaactggcacaaattgagaataaactctcagagagaaacaacgatgagaaactgagaaaccgttgtggaccagttcaaatgccttatactctgcttttgccttctagtaaggaaggattaactttcagaggaattcccaacagtatctctatctg

SEQ ID NO: 40370 - DNA, 369 bp, Glycine max
  Clone ID: LIB3065-004-Q1-N1-F10
caccattgaattttgattctagcaagcagagcttttgtcaattctctattgatcttcttggtggaggaattttagtggacaaaactggagattggatcacacttatacaaaattctccaattagtaacttgttgagagttgctgcttggaagaaaggctgtttaatggttaagattgtgatgtctgggaatgcagcagtcaaaaggagtgattgggcctcattggtacaagtgtttttaacaaacagcaacagtacagagcattttgatgcatgtaagtggaaaaaatcggaaccacattcctgggaattgatcttcccaatagaggtatgcggtcctaataatggttttgaaatgtggagttctgagt

SEQ ID NO: 40371 - DNA, 363 bp, Glycine max
  Clone ID: LIB3065-004-Q1-N1-F11
tttcaattatcctcaatccctctagcaattggagcatttcttggtgctacagcccagagtgttcagccaatgatcattggtcgcttacttgctggtataggaattggtgttacatctgctatagtaccactatacatatctgagatttcaccaactgaaattcgtggtgcgctaggatctgttaatcaactttttatatgcattgggattcttctggcactggtggctgggctgcctctggcaggaaaccctatatggtggcggtcaatgtttggcattgcaatagttccatctgtgctgttagcactaggaatggcaatttctccagaaagtccacgctggcttgttcagcaaggcaaaatc

SEQ ID NO: 40372 - DNA, 337 bp, Glycine max
  Clone ID: LIB3065-004-Q1-N1-F12
aaaacactttctctctctctctcttactttcgctctctaaaaaaaaaaactcaaaaacaaaacgaagctctcgaccactcgtcgcgacgttgcctttttgaatcgtctcgaatttcactttttcgtttcccttcgttgtttgtatatatatctatcaccgatcaccgatcaccgatcatcgattattaattgctgttgtttttaaaattattgttattattttggtggttgcgattctattttgtgctgtactgtacgacgtcgttggagcgatttcatcgccgtcgcgctggtacggagagattgtttgctgcgtcgtggtgtcggtgaaggatga

SEQ ID NO: 40373 - DNA, 394 bp, Glycine max
  Clone ID: LIB3065-004-Q1-N1-F2
gaaggcgaatgaaacgaaggacaagacaatggagaaggctggagagtacacagattatgcttcgcagaaggcgaaagaagccaaggacaaaaaaaccggttccaaggtcggagagtacgcagattatggttctcagaaggcgaaagaaacaaaagatgcaacgaaggaaaaagctggagagtacacagattatgcttcgcagaaggcgaaggaaacgaaggacaagacaatggaaaaggctggagagtacactgattatgcttcgcagaaggcgaaggaaacgaaggacaagacaatggagaaggctggagagtacacagattatgcttcgcagaaggcgaaagaagccaaggacaagacaatggagaagggaggggaatataaagactatgct

SEQ ID NO: 40374 - DNA, 408 bp, Glycine max
  Clone ID: LIB3065-004-Q1-N1-F3
gtgacgaattgcatcacacaggctggaattcatgcagctcttgccatggagacccctcagcagaccgacgatttctcatcgtacctgcactcgtatcaggtcgagtatatgtggttgatgtgaaaacaaatccaagggctccatctttgcacaaagttgtcgagcctgccgatatcatacagaagactggattagcttatccacacacatctcactgccttgcttctggtgatataatgatctcgtgtcttggagataaagatggaaatgctgcaggaaatggatttcttcttcttgattctgagtttaatgtgaaaggaaggtgggagaaaccgggtcacagcccactatttgggtatgacttttggtaccaaccacgtcacaataccatgattagcacatcatggg

SEQ ID NO: 40375 - DNA, 407 bp, Glycine max
  Clone ID: LIB3065-004-Q1-N1-F4
gctgtagagtaaggctatggtgatttgaaagacaagccatggtggcctaagttgcagacacttgaagaccttgttgaagtttgcctcattatcatatggattgcttcagctctccatgcagccgttaattttggtcagtatccttatggaggtttgataatgaaccgcccaactgcttctagaaggttgcttcctgagaaaggcaccccagaatatgaagaaatgattaataaccatgaaaaggcttatttgagaacaattacatcaaagttgccgactctcattagcctttcagtgatagagatcttgtcgacacatgcttctgatgaggtctaccttggccagaaggacaacccacattggacctctgatcaaaagcattacaagcctttcaaaagtttggaaac

SEQ ID NO: 40376 - DNA, 138 bp, Glycine max
  Clone ID: LIB3065-004-Q1-N1-F5
caatttgcttttaccaagctaagggttaccttgaggcgcggggagactccctataaggactgcccattaagctcagcctatcaactcgaatagccgtattgtacctggacctagccaaggctaccacacagacacagg

SEQ ID NO: 40377 - DNA, 199 bp, Glycine max
  Clone ID: LIB3065-004-Q1-N1-F7
tagtaatttactttcaccacgcgaggggcagccacggggggccggggagacccctcagaggaccgtctaatagttacagcacatgaactcatatgaccataagggaccttgacctaaccaagaacaccacccagggccacgtgtttgcactgaagcaactatgctagcgagatcatacacaagactaccataacctcta

SEQ ID NO: 40378 - DNA, 322 bp, Glycine max
  Clone ID: LIB3065-004-Q1-N1-F8
atcttaaattttccaactcttactaggcgattcatgcctgggaaaggttctgctgagtatgacgagctgatgaagaatccccagaaggcttacttgaacactattacgccaaagtttcatacccttattgacctttctgctatagaaatcttgtgaaggcatgcatctgatgaggggttcctcgaggagagggacaatccaaattgacatctggtccatgagcattaaaggcttataaaatgtttgggcataaactggctcaaattgagaataaactctcatagacaaacaacgattataaactgacaaaccgtgctggacc

SEQ ID NO: 40379 - DNA, 382 bp, Glycine max
  Clone ID: LIB3065-004-Q1-N1-G2
cacaaaatgtatcgcgttcttcaccgcgctttctgcaccggcaccgagcccgccaccaccgccaccgtcaccgtttccatcaagtccatttcggaggatctgtacaaggaagtgaagctaaagaatgtggtggagaagttcaagaaagcctcggacatcgaccgcttccgcaaaaaaaccggcatctacgaagacaccgtccgccgcctcgccggcgcccgacgcttccggtggatccgcgacatcctcgagcaccagaagcagtactccgacatctccaacgagggcttctccgcgcgcctcatctccctgtacggcaagtccggcatgaccaagcacgcgcgcaaggtgttcgacgaaatgccgcagcgaaactgcagcc

SEQ ID NO: 40380 - DNA, 374 bp, Glycine max
  Clone ID: LIB3065-004-Q1-N1-G3
aagggtatcccctgggacaaacaagatcctggggaagaggctatcgaatcactctcagcagaactcaagctttatgggaagagaggagtctataaagataccaagttgcaggaacaaggtggaaagatatttgaaagagatgggatactatacaactgtgccttctctgtttgtgaccaagggcgaggactgaatgactactgtgtcatgcaactgattgttgtcccagagaatcgtttgcatctgtactttaagaaagggagagttggggatgatccaaatgcagaggagcgattagaagagtgggacaatgtagatgttgctctgaaagagtttgtgaggctctttgaagaaataacaggaaatgagtttga

SEQ ID NO: 40381 - DNA, 411 bp, Glycine max
  Clone ID: LIB3065-004-Q1-N1-G4
cccaaacattatgatgggattcctgaatgtgggttgttgatgcaaagcattgaagaattggcactaagatatccttcaacaaaatttgtgaagataatatctactgattgcataccgaactacccggatcggaatcttcccactttgttggtgtacaacaatggagcagtcaaaggaaattatgtgggtttgcatagtttcgggcgaagatgcactcctgaaggtgttgcattagtgttgtgccaatcagatcctgtacttaatgatggccataatggaaatgaggctatcattgaaggagtccgcaaacggtttatagagaaagttgttgctgatcatgaagagggtggtgatgatgattactctagcgattaacattgtttcttgtatttgttgtgttgctttctttgg

SEQ ID NO: 40382 - DNA, 264 bp, Glycine max
  Clone ID: LIB3065-004-Q1-N1-G5
aaaaaaaaattcaaaaaaaaaaaaaaaaaaaaaggggaacgggtaaaattaacatcaaagccaaaactaataaaaacagcatagaaactttaaagatccatattgaaccatagccctagccaagtttaccacaacagaaacaggtgtctacactgctccaactatggaagagtgagcatggacgagtctaccatagccaccaggaagacgcaaataggcattggatgatctagaataactcgaacgatatcagggacatgaatg

SEQ ID NO: 40383 - DNA, 410 bp, Glycine max
  Clone ID: LIB3065-004-Q1-N1-G6
aacttattaacactttccttagttcaatatggggaagcccttcttcactctctctctttcttccctttgcttgctactcttgtcgagtgcatgctttgctattacctccagcaagttcaacgagtgccaactcaacaacctcaacgcgttggaacccgaccaccgcgttgagtccgaaggtggtcttattgaaacatggaactctcaacaccctgagctgcaatgcgccggtgtcactgtttccaaacgcaccctcaaccgcaacggcctccacttgccatcttactcaccttatccccaaatgatcattgtcgttcaagggaagggagcaattggatttgcatttccgggatgtcctgagacgtttgagaagccacaacagcaatcaagcagaagaggctcaaggtcgc

SEQ ID NO: 40384 - DNA, 377 bp, Glycine max
  Clone ID: LIB3065-004-Q1-N1-G7
cgagaggaacaccaggtatgttgatgctgttcttaccattcccaaaggaacattgttccccatgtgtggtatgaatttggcattcgatcgtcagctgattggacctgcaatgtactttggactcatgggtgatggccaacctattggacgatacgatgatatgtgggctggatggtgtgttaaggttatatgtgaccatttgggcttgggagtgaagactggccttccatacatctggcacagcaaagcaagcaacccttttgtcaatctcaaaaaggagtacaagggcatcttctggcaagaagaaatcattccattcttccaaagtgccactctttcaaaagagtgcacgtctgtccaaaaatgttacattgaac

SEQ ID NO: 40385 - DNA, 433 bp, Glycine max
  Clone ID: LIB3065-004-Q1-N1-G8
cttaaacactcatcagtcatcaccatggccaagctagttttttccctttgttttctgcttttcagtggctgctgcttcgctttcagttccagagagcagcctcagcaaaacgagtgccagatccaaaaactcaatgccctcaaaccggataaccgtatagagtcagaaggagggctcattgagacatggaaccctaacaacaagccattccagtgtgccggtgttgccctctctcgctgcaccctcaaccgcaacgcccttcgtagaccttcctacaccaacggtccccaggaaatctacatccaacaaggtaagggtatttttggcatgatatacccgggttgtcctagcacatttgaagagcctcaacaacctcaacaaagaggacaaagcagcagaccacaagaccgtcaccagaagatctataacttta

SEQ ID NO: 40386 - DNA, 355 bp, Glycine max
  Clone ID: LIB3065-004-Q1-N1-G9
caacgggattttgcagagcttccgcgttgaaaccatccaaccctcttagcctcatattcgttgtctatacttccctccttccttcgtgtaattacatttttttcatcagcagttccaggaccaaattgatacacaagatcactgtttttttagagagagattgagagaggatgtttggttcaaagaaaactcctctgagagatgctaaacctagttctgttggccatgcccataacccctttgattctgatgaagagacaaacgataaaaagtataattcctctaagaagactttgaccaacaccaacccctttgatgatgaagttgatgttgatgccactggccactcctcgtc

SEQ ID NO: 40387 - DNA, 415 bp, Glycine max
  Clone ID: LIB3065-004-Q1-N1-H1
gttactttcatttgttgtgcaatcttacaagttccaaacttctctattttgttattatttgttctcacttctcacacatacagatttgagccttttatattatcatggcttctaaggtggtttcggttttggttatagcgatgatgttgtttgccatgaactgtaactgcactagtgttggccacatgccttcaaccaaagaggaaggtcacgattttcaggagtctaaagccaagaccacacaaactgcgaacaaggccatggaaactggtaaagagggacaagaagccgcagagtcatggacagaatgggctaaagagaaactcagtgaaggtcttggcttcaaacatgatcaggaatccaaagaatccaccactaacaaagtctctgattatgccactgacactgcacagaa

SEQ ID NO: 40388 - DNA, 344 bp, Glycine max
  Clone ID: LIB3065-004-Q1-N1-H10
atgcatggttggcacgtactcatatatatgctaaagtaatttacacgctcaagctaaattatgtgaggagtgtattaaacgaaaaaaaaaaagacataaattagagacatcttcagcaaagtgttacggtctaccagaaaagaaattgactttgatttcaagtcttccagactaagaagatcttgagtctaaatacttctaagaggtatcacgttgttgttttattgatgtatcatgtagtttgtgttttctggcctgctgctttaattgattatcttatatcatggctgatgtggctggctgacgggaatattaggctactagatacatgcttaatggcagag

SEQ ID NO: 40389 - DNA, 342 bp, Glycine max
  Clone ID: LIB3065-004-Q1-N1-H11
ggaactctttgatataatatagaaagagacagagagagagagacagacaagaagaacaaagatgcaatcttcaaaggagaagctgaaaaacatgaccagtgctgccaaggagcaagtcgacatctataaagcaaaaatagacgagaagacagagaaagcaacggcaagaacagaagaggagagggtgattacccatgaacgtgcaaaggcaaaggaagctgaagcaaagatggagctgcatgaagcaaaagccaggcatgcagcagagaagctaagcaccaaccaatcacattatggtctccaccatggccacaacccttccctggtaggaacaactgagac

SEQ ID NO: 40390 - DNA, 330 bp, Glycine max
  Clone ID: LIB3065-004-Q1-N1-H12
attcaaattttgctctatactacacagtacacacactagaagactaatggcttccatcctgcactactttttagccctctctctttcttgctcttttcttttcttcttatccgactcagtcacctctacaaaaccaataaaccttgttgttctacccgttcaaaatgatggttccacagggctccattgggccaacctccaaaaaagaacccctctaatgcaagtaccagtcctggtggacctcaatggaaatcacttgtgggttaactgtgagcagcagtactcatccaaaacgtaccaagcacccttctgccactccactcaatgctc

SEQ ID NO: 40391 - DNA, 439 bp, Glycine max
  Clone ID: LIB3065-004-Q1-N1-H2
catccatgctttctgctcctttggattgtgaatctcattttgtgcaaaatgccaaccagcagcagcctaactctcagaatgtggtatctattgaagatgattctgcaaagacactctctgaggagcttgtggatattgaatctgagttgaagttctttcagatgccttatcttgaagggagctggggcgatacttcattggaatccttgctatctggtgacacaactcaggatggtggaaacctcatgaacctttggtgctttgatgacattccttccatggctggtggagttttctgaaccgctttttctttggtctccctgtgtgtaaataaagctacaagttgtttttctctgattttgatttttggtgcatttgttgatctcttgttggacacatccccccatgtgtctgaaaaaaaaaaagttattttcatttt

SEQ ID NO: 40392 - DNA, 380 bp, Glycine max
  Clone ID: LIB3065-004-Q1-N1-H4
taaaattcttccaccaagttatgggtttccttgtgttgcttcttttctccctcttaggtctctcttctagttccagcatatcaactcatcgttccatattggaccttgacctaaccaagtttaccacacagaaacaggtgtcttcactgttccaactatggaagagtgagcatggacgtgtctaccataaccacgaagaagaggcacagagacttgagattttcaagaataacttgaactatatcagggacatgaatgcaaacagaaaatcaccccattctcatcgtttaggattgaacaagtttgctgacatcactcctcaagagttcagcaaaaagtacttgcaagctcccaaggatgtgtcgcaacaaatcaaaatg

SEQ ID NO: 40393 - DNA, 280 bp, Glycine max
  Clone ID: LIB3065-004-Q1-N1-H5
cagcaaggatgttcccaaagccagaaaggaaagcaacaagaagaagaaaacgaaggaagcaacatattgagtggcttcgcccctgaattcttgaaagaagcgttcggcgtgaacatgcagatagtgagaaacctacaaggtgagaacgaagaggaggatagtggagccattgtgacagtgaaaggaggtctaagagtcacagcttcagccatgatgaagccacagcaagaagaagatgatgatgatgaggaagagcagtcacagctcgtggagacagaca

SEQ ID NO: 40394 - DNA, 407 bp, Glycine max
  Clone ID: LIB3065-004-Q1-N1-H6
ggaaggaatactttatcaaacatcctactcttgatcctttgagggaaactcttaagagcttcagtcaaaagaatgaaaaggccttggctaaggcggatgatgctgctcgccatgcattattgaaggatgcagacaagtactgcaaagcccttttgggaagattgtcacaagaccatggatgcatgaagagcgtgacaattctttctgttgtatttgcggttggtgccattttcgtgtaccagaacttgcatttatgggattatagtcaactgacagaaatgttgaacctatcctaggatgacagagttatcctgtggcttgctcggtgcttatgcccagcgtggaccacttcagccgatagtgaggagtgacgaggaatatttaatttattttagccttcaacatag

SEQ ID NO: 40395 - DNA, 409 bp, Glycine max
  Clone ID: LIB3065-004-Q1-N1-H8
gaaaggggtggtggctgcttcgaaagcttaataatttgtttatttccagaacatcatagttttcgcagcagcaaactaacaaattactcatatcatataataagatggcccgttctctctcgcaagccaaacgtattggtgtccttgttgctcaatctatctccctaattcccgttcatcggcgaggttacgcagtggcatccgatgtatcggtaagagttggattgggtaatattgggcgaaggaatggaatcgtgggaggtgtagaagagaagcctgatacaagagatggttcaaaagcctactcaactgattgggccccagacccagtaacaggttactataggcccattaaccacacccctgaaattgacccggtggagcttcggcataggttgctccgatcacc

SEQ ID NO: 40396 - DNA, 348 bp, Glycine max
  Clone ID: LIB3065-004-Q1-N1-H9
gagacgcatacataggaggttttccgccaaattcgaaaatggtgaaagaaatcgaaactctgacagaagatgaaagacgcgcacttcgtggaagcaaattcgcccctcttccccgcccttccaattccaaacctaggttggctcatccaggtggacccttggcgacgaataaagcagcggctttggccaagtttctggagagaaagctgaaagacccaaatggattggcgtctattaaccctgatatccttgaacttgctgtcaataatgccaaagaaactgtctatgcaagtggtacttctaattcacgaagaaatgttcggcatgtggactcctttggtgactctg

SEQ ID NO: 40397 - DNA, 230 bp, Glycine max
  Clone ID: LIB3065-005-Q1-N1-A1
cagggatctggagctttcaacccatcatagtcgtactacatcatctacagcccactgccatactttgtcattgctctatagtcatttttagtacctattaacacttttacctgaagcatcccaaaacacttaccctctacacatcaccatttgctatctttaatcaatttgcactaaagctttcaattctataggactcaattctgctacttctacataaatacctgctc

SEQ ID NO: 40398 - DNA, 365 bp, Glycine max
  Clone ID: LIB3065-005-Q1-N1-A10
atcttatcttagcagtagctacccctatcacaacaatactgtattaggcaaaaacaccaaatgggagaggaaaaagagcagcctaagaatgaaaccgagaagaagcccgaggaggtcgacgcagcccccaagaaagacgacggacccatccctgtcgtttacaaactcgacttgcattgcgagggatgcgtcaagaagatcaaacgcacatgtcgccactttcaaggtgtggaaaccgttaaggcagatctatcgtcgaacaaagtgactgttaccggcaaattggatgccgagaagctgcgagataagatcgtccagagaaccaagaagaaagttgacatcatctcagctccgcccaaaaaaga

SEQ ID NO: 40399 - DNA, 401 bp, Glycine max
  Clone ID: LIB3065-005-Q1-N1-A12
acaacacacacctctggctctactccgcacaactcctcacacacaagacacaacacacgctcatgttgttgatgagtggaggcaacagaaaacatatatccatcactcacaagaccaattgacctttgttcttggtacaattcgattcaaatttttcgcactaaggagagccactcaaggctctgggatgtactatacgccgttcggggttctgattttcggcggcgagaaggttcaagagacacagtgggagaaggagcgataagagagaccatggctgggaaggttttgaaagaaacgaaatcgctgtcggcggcggaagtagcggaggcggaggctgaaatgacggtgtcgacggtgaagtgctgctgctgtgggctgatggaagagtgcacgcacgc

SEQ ID NO: 40400 - DNA, 306 bp, Glycine max
  Clone ID: LIB3065-005-Q1-N1-A2
ggagcacttgctgagagggttgtcttttgggtcatccttggcccgattcaataactctctctctctctcttgctccctacattttcgatcactttaaagtctcaaacgtaatggctgaaagcgcggtgacgaacaggaagcgcagcagcggggacgacgccgtttcggagaatgacagaaagcggaagaatatggtggcacgcaacatggacccggctgaggcgttggccttgacgcggcacgagttcggggagcacggtggcgtaaacatgtcgatcgaggcctcggcgacgttcacggtgatgg

SEQ ID NO: 40401 - DNA, 338 bp, Glycine max
  Clone ID: LIB3065-002-Q1-N1-E11
cttttactttgtttaaaagtaaaagagcatataataggtagggccatcagactacggcggtccactggctgatgcttcgctgtcaggtccagagagcacgctcagctaaacgagtgccacatccaggggctcaatgccctcacaccggatgaccgcatagagacagacggagggctccttctgacagggcaccctaagcccacgccattgcagcgtgccagcgtcgccctctctcgctgcaccctcaatcgggacgcccttcatagaccttactacaacaactggccccaggcaatctacatgctacacggtaagggaattagtggcgcgatataccc

SEQ ID NO: 40402 - DNA, 371 bp, Glycine max
  Clone ID: LIB3065-001-Q1-N1-A1
ggctggacagcattctgatattctagagtctctgtcgcccaatgtcaggaagcgtgtggaggttcttagagagatccagggtcaacatgatgaattagaggcataattttttgaggagagagctgctcttgaggccatataccaaaaattgtatcaaccactttacacaaagcggtatgaaatagtaaatggtgctactgaagttgaagaaggggcagtgaaagaaacatcaccagatggtgaggaggatcaagagaaaggagtgcctgcattttggcttactgccatgaaaaacaatgaagtgttggctgaggagatctcagagcgtgattaaggtgctcttaagtatctcaaagatatcaagtggagca

SEQ ID NO: 40403 - DNA, 370 bp, Glycine max
  Clone ID: LIB3065-001-Q1-N1-A11
aaggttgtttcctcaggccaagagcttggaaaattagcctcacaaaagcaaagatcaaacaaaccaaggacgagaacacgatgttgcttgaacttgcacttggtttattggttttggctctgtttctgcacttgcgtcccacacccactgcaaaatcaaaagcacttcgccatctcccaaacccaccaagcccaaagcctcgtcttcccttcataggacaccttcatctcttaaaagacaaacttctccactacgcactcatcgacctctccaaaaaaacatggtcccttattctctctctactttggctccatgccaaccgttgttgccttcacaccagaattgttcaagctcttcctccaaacgcacg

SEQ ID NO: 40404 - DNA, 352 bp, Glycine max
  Clone ID: LIB3065-001-Q1-N1-A12
aaggctgtatatctaagccaagagcttggaaaattagcctcaggaaagcatagatgaaacaaaccaaggacgagaacacgatgttgcttgaacttgcacttggataattggttatggctctgtttatgcacttgcgttccacacacactgcaaaatcaaaagcacttcgacatcatccaaacccaccaagtccaaagcctagtcttgccttcataggacaccttcatctcttaatagacaaacttcttcactacgcactcattgacctcttcaaaaaaacatggtcccttattctctatgtactttggctccatgccaaccattgttgcctccacaccagagttgttcaagc

SEQ ID NO: 40405 - DNA, 382 bp, Glycine max
  Clone ID: LIB3065-001-Q1-N1-A2
cttgaagcttcacgagaacattgctcgcccttaacgcgctgacttctacaaccctaaagctggtcgcattagtaccctcaacagcctcaccctcccagccctccgccaattccaactcagtgcccaatatgttgtcctctacaagaatggaatttactctccacattggaatctgaatgcaaacagtgtgatctatgtgactcgaggacaaggaaaggttagagttgtgaactgccaagggaatgcagtgttcgacggtgagcttaggaggggacaattgctggtggtaccacagaacttcgtggtggcggagcaagccggagaacaaggattcgaatacatagtattcaagacacaccacaacgcagtcactagctacttg

SEQ ID NO: 40406 - DNA, 385 bp, Glycine max
  Clone ID: LIB3065-001-Q1-N1-A5
gtgcgccacaatccgccggtgccggaggtccggcgccgttccttctgaagacctacgacatggtggacgatgcctccaccaacgacatcgtttcgtggagctctaccaacaacagcttcgtcgtgtggaaccctcccgagttcgctcgcctccttctcccgacctatttcaagcacaacaacttctccagcttcatccgtcagctcaatacctacggatttcgaaaaatacatccagagcgatgggaatttgctaatgatgagtttctgaaagatcagaagcatcttcttaagaatatatatcgcaggaaacctatccacagtcatagtcatcctccaggttcacttgtagatccagaaagggcagcatttgaggaagaaataga

SEQ ID NO: 40407 - DNA, 354 bp, Glycine max
  Clone ID: LIB3065-001-Q1-N1-A6
aaactcaattataaaaacaatgcaaaaaagaacaaaaccgaatattatagaaaaccaaaaaaatggaggacgatgcctacaaccaacgacatcaattaataaaggtctaccaacaacaactgtcctcgtgtgccaccctatcaagttcggtcgggtccttgtagggacctattttaagcacatcatctgctccatcttaattcggcatctcaatacctacagatttcgacagatacatacagagcgatgggaatatgctaatgatgagtttctgccagatcctaaacatgttattccgaatatacatagcaggaaacctatccacagtcataggcattctgcaagttcacttgt

SEQ ID NO: 40408 - DNA, 330 bp, Glycine max
  Clone ID: LIB3065-001-Q1-N1-A8
ggaatttactctccacattggaacttgaacgcgaacagtgtgatctatgtgactcgagggaaaggaagagttagagtggtgaactgccaagggaatgcagtgttcgacagttagctaaggaagtgacatattgctagtggagcagatgaagttgctgatatgttcatataggaattgacatgatttgttatattattaggcctattctgaagccaaaggtaatgagaacggaattccttggggaattacaatttcacattttcaagatataacgaggcaataatgttcatatgtgaattggaattatgtggtctcttattaggcctattc

SEQ ID NO: 40409 - DNA, 332 bp, Glycine max
  Clone ID: LIB3065-001-Q1-N1-A9
aagagaggtttttttggtcctcactgaccaagccatggcgatgagaaccaaactttctttagctatctttttcttttttcttttagccttattttcaaacctagcctttggcaaatgtaaagaaaccgaggtagaagaagaagaccctgagctcgtaacatgcaaacaccaatgccaacagccacagcaatacactgagggtgacaagcgggtatgcttgcaaagatgtgacaggtatcatcgtatgaagcaagagcgagagaaacaaattccagaggaaactcgtgagaagaaagaagagggaagccctgaaaggggagaagaaccaccag

SEQ ID NO: 40410 - DNA, 372 bp, Glycine max
  Clone ID: LIB3065-001-Q1-N1-B1
ctcgagccgaatcggctcgagattttagcctctcttaattcataattcctcaccttcaaatctccattctgcttcattttctgcaaagaacaaacccctttctgaagaaagaatatagtcttcagctggacaaggatcatttattttgaaagacaagtttgtgtgacaatcttatagttctaagaagggtgcaagtgagagctttgctgtgatggcaacccgtagatattcttttggaagggctgatgaggccactcatccagactccatgagggccactttggctgaatttgcatccactttcatctttgtctttgctggagaaggctctagccttgctttggttaagatttaccaggattcagctttctc

SEQ ID NO: 40411 - DNA, 178 bp, Glycine max
  Clone ID: LIB3065-001-Q1-N1-B10
caccagggaaggttagggaacactccatgcccaccaccaaagtctcctgcgcaagctacgtgccccattgacacgctcaaacttggtgcctgtgtggatcttcttggagggttggttcacattggtttgggtgaaccctgtgcgaaccaatgctgccccgggcttcaaggggcttgtg

SEQ ID NO: 40412 - DNA, 329 bp, Glycine max
  Clone ID: LIB3065-001-Q1-N1-B2
ccgagcgaatccccaattaccaatccaatcctttccaaactcacaaagccatgtctccaggtccggttgtcgacgcttcccctgaggttgatgcagagcatcagcttccctccgtcgatgacgccactcacaagaagataccccaaccacaggaggacgatgctccccttgtcgaggacttgaaggatgatgacaaagacgacgacgatgaatacgacgacgacgacgacgaagatgacaaggaagacgatgctcaaggtggtgctgagggttcaaagcatagcataagtgagaagaagagccgaaaagcaatgttgaagctgggactg

SEQ ID NO: 40413 - DNA, 278 bp, Glycine max
  unsure (1)..(278): unsure at all n locations
  Clone ID: LIB3065-001-Q1-N1-B4
ccgagcgaattcctttataccaatccaatcctcttccaactcacagagccatgtctccaggtcccgttgtcgacgcattccctgaagttgatgcagagcaacaactgtactacgtcgatgacgccactcagaagaagataccccaaccacatgacgacgatgcttcccttgtcgaggacttgaangatgatgacaaagacgacgacgatgaatacgacgacgaccacgactaagatgacaaggaagacgatgctcaatgtggtgcttanggttcaaag

SEQ ID NO: 40414 - DNA, 385 bp, Glycine max
  Clone ID: LIB3065-001-Q1-N1-B6
cttaattattaacacttccttagttcaatatggggaagcccttcactctctctctttcttccctttgcttgctactcttgtcgagtgcatgctttgctattagctccagcaagctcaacgagtgccaactcaacaacctcaacgcgttggaacccgaccaccgcgttgagtccgaaggtggtttgattcaaacatggaactctcaacaccctgagctgaaatgcgccggtgtcactgtttccaaactcaccctcaaccgcaatggcctccacttgccatcttactcaccttatccccggatgatcatcatcgcccaagggaaaggagcacttggagttgcaattccaggatgtcctgagacgtttgaggagccacatgaacaatc

SEQ ID NO: 40415 - DNA, 388 bp, Glycine max
  unsure (1)..(388): unsure at all n locations
  Clone ID: LIB3065-001-Q1-N1-B7
gagattcatgaaaaagttgtattgaatctctccaaactgcaccagcttgtggggaaaagcctcaaaattgatggtgtagtttggagagattcaggaaaaagttgtattgaaattttcacaagaggaatttcttacagcttggtcaactcaggtgcgtcctgcaacaactctgttggctgatgggtgtccatatttgtatgctatggtgcatgatagttcagtgtctacaataccaggtgattttgtcattggtgttaagttgacaaccataaacaatatgtgtgcatatgggctcaatcctggtatttcaggttctcgtcttttgggcaccattcctcagtctatttcacagcanactgtttggaatcaaatggcaacagtgagaaca

SEQ ID NO: 40416 - DNA, 375 bp, Glycine max
  Clone ID: LIB3065-001-Q1-N1-B9
tggagaagcatcaacaacaagcaccatctaaggaaacaaaggcacagagtgatgaatcagttaaagaaagcagcactgaagggcttccaatggaggatagtccctatgtgaaatacaaggatttggaggattataagcgtcagggttatggtacacaaggtcatcaagaaccaaagacaggtcgtggagctggagccactgaagcacccactctctctggtgctgcagtttcatctgatgcacaagtcgctgccactgatgccattaacagtaaaggagtcccttaattattcacacttcctagaatagatcgttcctttgctaataagaaatcgttttcttaatttggggtggccgtttttaaatgtgtgaaca

SEQ ID NO: 40417 - DNA, 369 bp, Glycine max
  Clone ID: LIB3065-001-Q1-N1-C1
caacacctttaattttctaaaagtaattcagcggctgaataccaagcggagaagatgagtcaggagcagccacggcgtcccaaaggccaaaaccccatcaaatacggcgacgtttttgtcgtctccggcgaccttgcacagaagcccgtcgcaccggaagatgctgccatgatgcaaagcgcggaaactcgagtgctcggacaaacccaacccggcggagcagcttccgtcatgcaatctgccgtcaccaggaatgaacaggctggccttgtcggtcaccgggacgtcaccgacgttaccggcgaccgtggcgtcacagtcacagaaactaaagtccctggaagacgcattataaccgaggctgttggt

SEQ ID NO: 40418 - DNA, 422 bp, Glycine max
  unsure (1)..(422): unsure at all n locations
  Clone ID: LIB3065-001-Q1-N1-C10
ggaagatgaggatgaggagcagcagcgagagagcgaagaaggtgaagaatttgaggtaccaagacctaagaataagaacccttttctctttgggtttaacaaggtcgaaacttttttcaaaaaccaatatgggcgcattcgcgttcttcaaaaggtcaacccaaggttcccaaaactttagaatcttcgagactaccggattttgggagtcaaactccaaaccaacaaccttccttctccccaccatgctgacgctgattaccttatcgttatccttaacgggactgccattctttccttggtgaacaacgacgacagagactcctacagacttcaatctggtgatgccctgagagtccnctcaggaaccacatactatgtggtcaaccctgacaacaacgaanatctcagattaataacac

SEQ ID NO: 40419 - DNA, 371 bp, Glycine max
  Clone ID: LIB3065-001-Q1-N1-C11
ggatggaaactttgttgccattaaaaggttgacaagagggtgccaagaagaaatgactgcagatttcttgtctgagcttggcattatagtgcacgtggaccacccaaacatagctagattgattggatatggtgttgaaggaggaatgtttcttgttcttcaattgtctccacatggtagcctgtcatccatactttatggacccagagagaaactgaattggaacctcagatataagattgctttggggactgctgatggccttcgctatctgcatggagagtgtcaaagaaggatcattcacaaagacatcaaagcttctaatattcttctctcagaggattttgagcctcagatatctgattttgggc

SEQ ID NO: 40420 - DNA, 258 bp, Glycine max
  Clone ID: LIB3065-001-Q1-N1-C12
gtttgttaatgtttcaggttatgaagctgaaatgaattccatgttctctcagattgagtcccctaacagatcacttcatgatcatataattgaagctcttggcaagctcactgttgaacaaggaattcctcctacatcagattcttgggttttgagcaccattttggaaccggcactgctatctcaggctggttctgatttgaataagtccgtttttaaggagccattttggaaggaattaagattggtgccattgat

SEQ ID NO: 40421 - DNA, 192 bp, Glycine max
  Clone ID: LIB3065-001-Q1-N1-C2
gataagcttttgttggctaacacacatgaattctttgatggaaattttccagtggattcttggttaccaatttttgtgaattgtctttatcctgtaagtcaattgccttcagaagctgtcgttgtaaatgttacatgtggtagtggacgtggtggtttaccgatcacttgttggattacgtctgcactcaac

SEQ ID NO: 40422 - DNA, 338 bp, Glycine max
  Clone ID: LIB3065-001-Q1-N1-C4
aggacgaagatttattttctaccaacctagaagcaaatatgggcatatatgaattggaatttttagatcacttattaagcctatactggaaaccaaaggaaatgagatcgggacttcctcgggaattccaaatgccacattttcaagaaatacgggaggcaaaaatgttcatctatgaataggaattatttgctctcttattaggcctatcctgaagccaaaggaaatgagatcggaattcctcggcgaattccaattccacattttcaagacataacgaggcataaatgttcatatatgaatcggaattatgtggtgtcttattaggcctatcctga

SEQ ID NO: 40423 - DNA, 378 bp, Glycine max
  Clone ID: LIB3065-001-Q1-N1-C5
cggctcgagcaactacaagaaagaacttccttataaccaaaaccaacaacaactatggcaagttatcagaagcactacgatgatcagggtcgcaaggtcgacgagtatggcaatgttgagaggcaaactgacgaatatggcaacccggttcatgccactagtgtcacttatgtagccaccaaaagtgttggtggctacaatgatgacgctaataagcaacatgatattactggtgtctatcccgagaaagacaccggtagacatcattttggtcgtggttacgacggtgacactaacaagcaacatgatgctactggtgtttatcccggaatagacattggtagagatcatgggactaccggtgtttatggcctaaac

SEQ ID NO: 40424 - DNA, 418 bp, Glycine max
  Clone ID: LIB3065-001-Q1-N1-C6
gagtcactagagaaagagagagggaaatggctttcacgatatccagatctgaatctgctttgaaagatagagagaagaaggagtgtgtaacaacagagggtatgatatcgagccagctttgtcatcgtcgaaagcatcttctcatcaaagcatggacaaacatgcaatcctgcgacgcatcaggcaacgcaggtttaataacagagccaaaaccgctctggaagctctcataggcacctcagaagccaacaacaacaccaccactgggcaagaacacttgtggcttcaactgggtgactctttctcttctccttaactcatgaatcacccctcagctacccatctataaataccatccctagatcactacttatgcagctatgaccttgtgaataccacgttcaattggtattttaaa

SEQ ID NO: 40425 - DNA, 370 bp, Glycine max
  Clone ID: LIB3065-001-Q1-N1-C7
cggtttctttataaagcacaacgctaaaggtcagcactcagtactcttatgaagatgattacaaggtcatcatgacaatagcatgatgagctcaggaattagtgcttggagtgcggctactagcgctggagatgcgtaggcttatcaagtcatgggcatacattcaatgattcaacccataaggcaacgcaagcataatatcatagcccaaaccggtctggaagctctcataggcacgttagaagccaacaccatcaccaccactggtctagaacacttgtcgacttaactgggtgactctttctctactccttaactgatgaatcaccccttagctacccatctataaataccatccctagatcactac

SEQ ID NO: 40426 - DNA, 380 bp, Glycine max
  unsure (1)..(380): unsure at all n locations
  Clone ID: LIB3065-001-Q1-N1-D1
gttttcctcttctgaatccaccgccaccgcagcgtggacggaatcagagtgcagccatagcagcagcagcagcagcagcagcagcagtcattgaagtgctgctctagtttgaggcacaatgagattggagaaatgctggttttgctcttcaaccgtataccctggacatggaatccagtttgttcgtaatgatgcaaagatttttcggttttgtagatcaaaatgccacaagaactttaaaatgaagagaaatcctcgtaaggtaaagtggaccaaggcatatcgtcgagtgcatggaaaggatatgactcangactcaacctttgagtttgagagaaaacgaaacaggcctgaaagatatgacaggaatcttgcggaga

SEQ ID NO: 40427 - DNA, 318 bp, Glycine max
  Clone ID: LIB3065-001-Q1-N1-D2
gttttacttttattaatcaaccgccaccgcaccgtgacgggaagcacatagcagccttagcagcagcagcagcagcaccagcagcagtcattgaagtgctgctctagtttgaggcacaatgagattgcagaaatgctggttttgctcttcaaccgtataccctggacatggaatccagtttgttcgaaatgatgcacagatttttcggttttgtagatcaaactgccacaggaactttaaaatgaagagaactcctcgtaaggtaaagcggaccaaggcatatcgtcgagtgcatggaaaggatatgactcacgactc

SEQ ID NO: 40428 - DNA, 349 bp, Glycine max
  Clone ID: LIB3065-001-Q1-N1-D4
gttggagaatttttttaacagggccggattttgaccgaggagtcaacaccttttcccccgaaggacgttggtttcaggttgagtttgcaatcgaagccttcaagctgggatcaactgcgatggggttgaagaccaaagagggtgttgtcctcgcagttgaaaagcgcataacttcgccgttcctggagcctagtagtgttgagaaaattatggaaattgatgaccccataggttgtgcaatgagtgggttgattgcaaatgctcgaacacttgttgagcatgcacgggtggaaactcagaatcataggttctcctatggtgagccgatgactgttgagtccaccaccca

SEQ ID NO: 40429 - DNA, 394 bp, Glycine max
  Clone ID: LIB3065-001-Q1-N1-D7
aaaatgacctagttcacaatcctcctcatctctcttctcttctgcatcgcccacacttgcagcgcctccaaatggcagcaccagcaagatagctgccgcaagcagctccagggggtgaacctcacgccctgcgagaagcacatcatggagaagatccaaggccgcggcgatgacgatgatgatgatgacgacgacaatcacattctcaggaccatgcggggaagaatcaactacataaggaggaacgaaggaaaagacgaagacgaagaagaagaaggacacatgcagaagtgctgcacagaaatgagcgagctgagaagccccaaatgccagtgcaaagcgctgcagaagataatggagaaccagagcgaggaactggaagagaagcagaaga

SEQ ID NO: 40430 - DNA, 396 bp, Glycine max
  unsure (1)..(396): unsure at all n locations
  Clone ID: LIB3065-001-Q1-N1-D8
gtcttgctgcggtggtaactgtggttgcggaagctcctgcaagtgcggcaacggctgcggaggctgcaagatgtacccagacttgagctacactgagtcaaccaccaccgagaccttggtcatgggagtggcacctgttaaggctcaatttgagggtgctgaaatgggtgtgcccgctgagaacgatggctgcaaatgtggaccaaactgctcctgcaacccctgcacttgcaagtgaggtgttgggagagcaagcttcaagcagagatagcccttaattaggaataatgataaactattaatgtgtagctaaaaacttatgtattatgtctgtgatggttttcgtgcactctggtgttttgtgttaaacaaacatncttagaataaagtggtcat

SEQ ID NO: 40431 - DNA, 283 bp, Glycine max
  Clone ID: LIB3065-001-Q1-N1-E1
aaattaactttgctaacaagaacacccataactcgcctaggttaaatcgaccacaggcgaggcaacgcaacgaggaagaaccaggaacatagcaggcgcaagcaacgccaagacccgatcctaaaccgctacgagaaggacatcaacgagaacatcccacagaaggccaatgaccaggatgatgctgacgacaaccatcacacggacacgaccatgcatgagaagaaccaaacacataaggacgaacgaaggaaaacacaaagacgactaaaaagaaggacac

SEQ ID NO: 40432 - DNA, 465 bp, Glycine max
  Clone ID: LIB3065-001-Q1-N1-E11
ctcgagccgattcggctcgagaaaattcttccaccaagttatgggtttccttgtgttgcttcttttctccctcttaggtctctcttctagttccagcatatcaactcatcgttccatattggaccttgacctaaccaagtttaccacacagaaacaggtgtcttcactgttccaactatggaagagtgagcatggacgtgtctaccataaccacgaagaagaggcaaagagacttgagattttcaagaataacttgaactatatcaaggacatgaatgcaaacagaaaatcaccccattctcatcgtttaggattgaacaagtttgctgacatcactcctcaagagttcagcataaagtacttgcaagctcccaaggatgtgtcgcagcatatcataattgccatcatgataatgaagaaggacaatattcttgtgaccatccacctgcatcatgggattggagg

SEQ ID NO: 40433 - DNA, 143 bp, Glycine max
  Clone ID: LIB3065-001-Q1-N1-E12
gtgaggggtttttaaaataatttttttagaaatttataaatgatttgttttttgttaaaatatttgtttatttttttgaatgattgtatattataaaatgtggatatttattatttggttattgtttttttaaagataatttt

SEQ ID NO: 40434 - DNA, 399 bp, Glycine max
  Clone ID: LIB3065-001-Q1-N1-E3
gggtgacttttatttcctgggagaaaaagatgagccacggctggtacgccgttcgtgcatttttgaggtgccgctgtcatgtttgggcgttgtgcaccaaggtggagtgataactccaaatattatgatattctcgggatttccaaaaatgccagtgtagatgaaatcaagaaggcctatagaaaggcggctatgaagaaccatccagataagggaggagatcctgaacagtttaaggagttaggtcaagcatatgaagctctaagtgatcctgagaagaaagaactgtatgaccagtatggtgaagatgcccttaaagaagggatggggggaggaggctcgtttcataatccatttgatatatttgaatcattttttggaggagcaagcttttgttgt

SEQ ID NO: 40435 - DNA, 406 bp, Glycine max
  unsure (1)..(406): unsure at all n locations
  Clone ID: LIB3065-001-Q1-N1-E4
ttgaaggggttccttttcttccttggagaaaaaggagaagccacggttggaacgccgttcgtgctttttgaaggtgccgttgtaatgtttggccttggtggaccaaggaggattgataactccaaatattatgatattctcgggatttccaaaaatgccagtgaagatgaaatcaagaaggcctatagaaaggcggctatgaagaaccatccagataagggaggagatcctgaaaagtttaaggagttaggtcaagcatatgaagttttaagtgatcctgagaagaaagaactgtatgaccagtatggtgaagatgcccttaaagaagggatggngggaggaggctcgtttcataatccatttgatatatttgaatcattntttggaggagcaaagctttgtggtg

SEQ ID NO: 40436 - DNA, 379 bp, Glycine max
  Clone ID: LIB3065-001-Q1-N1-E5
aaaacactcaagttaacttcaacacctttaattttctgaacgaaattcagccacagaatatcaaagggagcgaagatgagtcaggagcagccaaggcgcccccaaggccaagaccccatcaaatacggcgacgtttttgacgtctacggtgaccttgcacagatgcccattgcaccggaagatgctgccatgatgcaaagcgcggaagctcgagtactcggaaaaacccaacccggcggagcttcttccgtcatgcaatccgccgccacaaggaatgaacaggctggtcttgtcggtcaccaggacgtcaccgacatcaccggcgaccatggcgtcacagtcacagaaactacattccatggaagacgcataataaccg

SEQ ID NO: 40437 - DNA, 385 bp, Glycine max
  unsure (1)..(385): unsure at all n locations
  Clone ID: LIB3065-001-Q1-N1-E7
acgcgcttcccacttaccagaccatgatcaacaaccttgatggagtgaaagatgacagcggcacgagcccgagcccgtgggccgtgtggacccgggcctggaccgccgaggaaaacagacacggggatctgctcagaacttatttgtatctctctgggagggttgacatggctaaggtcgaaaagaccgtacattacctcatttcagctggcatggaccctgggacagacaacaacccatatttggggtttgtgtacacgtcattccaagagcgagcaacatttgtggcgcacgggaacacggctcggctcgcgaaggagggcggngatccagtgctggcgcgcctatgcgggaccatcgcagcggacgagaagcggcacgagaa

SEQ ID NO: 40438 - DNA, 394 bp, Glycine max; identical to SEQ ID NO: 6202
  Clone ID: LIB3065-001-Q1-N1-E8

SEQ ID NO: 40439 - DNA, 384 bp, Glycine max
  unsure (1)..(384): unsure at all n locations
  Clone ID: LIB3065-001-Q1-N1-F1
aagagtgtgttggggttgaacacctgaacacaactttaaccctgcttgtcgaatctgtgcattgcttgaacgattgaaccctaatggctgctctcttgaggaggtttgcgagcgccactccgatcccatccaattcctctcacaccaatctccgccttcccttcaccgccatcgccgccatttccggcggagtctccttccttttctaccattcctctcccaacttcgctcattcacaagaagcagaacaagtggaaagtaaaaacatcgcactcgttccggataaatgggtcgagtttaagttgcaggatactgctagggttagtcacaatacccagctattcaggttttcatttgatcccactcagaaattgngtctggata

SEQ ID NO: 40440 - DNA, 469 bp, Glycine max
  Clone ID: LIB3065-001-Q1-N1-F12
atttcttttgattgattagaaattaaaacatgattttttatcgactaaattaaacaatctctaaaaataaaaaaagttatacttttcattaaaacttatgattcaaagagagtttgagaacatttatattatttaaaccattatgagtcatgaaatacccaacacatcaatctcataataaaataggtgttctatcccaatatcatagttcatggttatggagacatcactacttcttgtccctaatttcttggaaaaaatattctgaattttacaacttaccacatatccatagaaagataaatcataaaatcttcatacatataaagcacgcctcttataaagctaatatattaaaacacatccctaggtcataacacatcaaccatccaatttcaattccaaataaaatcatgactgtccaataacattctattctcacttcattcagatggttggactggccact

SEQ ID NO: 40441 - DNA, 377 bp, Glycine max
  unsure (1)..(377): unsure at all n locations
  Clone ID: LIB3065-001-Q1-N1-F2
aaaaaatcctaaccttggcacccatttctactgttcaaccaagaggttcctactcctatggaacctcctatggagcaccctttggaaccacctatgagaccaacagcagcattaacaaccctccttcacgccaaaccgtgaagttcataactgctgcaactattggcatcacactcttactcctgtctgggttgaccctcacaggcactgtcataggnttgatcattgcaacccctcttcttgctatcttcagccccatccttgtccctgctgcgtttgtgctgttactggttgcttctggctttttgttctctgggggctgtagtgtggctgccattgctgctttatcttggatttacaactacgtttctgggaac

SEQ ID NO: 40442 - DNA, 386 bp, Glycine max
  Clone ID: LIB3065-001-Q1-N1-F7
agaaaaaagtataagaagatgggtttgaagaacaacatggtggtgctaaaggtgtgtttggtgctacttttccttgtggggggtactactagtgccaacttgaggctgagtaagcttggcctgctcatgaaaagtgatcatcatcaacactcaaatgatgatgagtcttcaaaaccatgctgtgatcaatgcgcatgcacaaagtcaaaccctcctcaatgccgctgttcagatatgaggctgaattcgtgccattcagcttgcaaatcttgtatttgcgcattatcgtatcctgcacagtgtttttgtgttgacataaccgatttctgctatgaaccttgcaaacccagtgaggatgacaaggaaaactactaatgaacaagtgt

SEQ ID NO: 40443 - DNA, 270 bp, Glycine max
  Clone ID: LIB3065-001-Q1-N1-F8
actaaagctgataagaaacatttatcaagtatgggtttggacctttcgcaagggaaaatcagaaacaacttgtaggccggagtcattgagcctgcaatgagcaaagtaaaaatcattcagtgcgcaactgaagctgctattaccatcattcgaattgataacatgatcaagctcgacacggatgtcagtgcacatgctcatagctgaacaacggtttataccgatgattactattatcggatccttcgaaactttcaagtttctatgatc

SEQ ID NO: 40444 - DNA, 448 bp, Glycine max
  unsure (1)..(448): unsure at all n locations
  Clone ID: LIB3065-001-Q1-N1-F9
ttctgctctgatagctgctggtggttctgaccctgtccttaggatctgggatcctcgtaagccaggcacttctgctcctgtttttcagtttgcttctcatacttcttgggtttcagcttgcaaatggcatgatcagtcttggtttcatttactttctgcatcctatgatgggaaagttatgttgtgggatctgagaactgcgtggcctctttcagtcattgaatcccacagtgataaggtattgtctgctgactggtggaaaagtgacagtgttatcagtggtggagcagactcgaaactttgcatttcgtcagagatccctgtacagtgaggcaaactttaatcatactatcatagtatggtgattnttttgagatggtgggatagaggcagatttttcttaaattgcttcagaatcagatgcaccaaatttgcagtctcgtaaaat

SEQ ID NO: 40445 - DNA, 334 bp, Glycine max
  unsure (1)..(334): unsure at all n locations
  Clone ID: LIB3065-001-Q1-N1-G10
tatgactcgcatgcacctactaactcggattattcccgggcagagattantnnaagnatttactgcctaaaaggggactttacagggatagtgctaggctagctatctagaaacccaacaaggctgctcctgtgcatgcatcagcccatggtatctggataatgtttgtctttctacatagttatgttttgtttatttttttcattttttacatactgattatttcaactatcctatgatattcatcttttatcttgatatttatctttcaagtttaacttttttccttatattttattaatttatgattctcttattttcttctattttatat

SEQ ID NO: 40446 - DNA, 443 bp, Glycine max
  Clone ID: LIB3065-001-Q1-N1-G12
gcttaagccttttaaaaacctgttatggcctatttcttgaaggtgtacaatcacaaaaaaaaaatcgtctccttttctctctgcatttgagcaaagccaaaccacgtctgagtgagtgagttccgttggatggcgacgagcaccaccagcagcggtggcggcggcaccggcacccaaacattcaagccgtaccgtcacctgaaaaccctaaaagaccacgagaacgcggtatcgtgcgtgaagttctcgaacgacggaaccctcctagcctcggcctccctggacaaaaccctaatcatatggtcctccgccaccctcaccctctgccaccgcctcgtgggccactccgagggcatctccgacctggcctggtcctccgactcccactacatctgctccgccttcgacgaccacacccttcgcatctgggacgccaccggcgg

SEQ ID NO: 40447 - DNA, 372 bp, Glycine max
  unsure (1)..(372): unsure at all n locations
  Clone ID: LIB3065-001-Q1-N1-G2
taaatnatgtttgcttaaattatgcaccagctactcacacgggtgttgcatctttaccaggaatgtgggacagaactcttactgggaatggatttttcaagggccttgcaatgactggttgtcggcttggatatattgctggtcccaaagcattttgttgcaacatgtggaaagatccatagtcagttcacttcatgggccagtagtatagctcagaaagctgcagttgctgcattaggactatgccatgctgatggggaggcagtttctaccatggtgaaagcattttaggagcgaaaggatctcttggtaaaaagtcttagagaaatagatggtgtcaagatatctgaaccccagggagcatttcatcta

SEQ ID NO: 40448 - DNA, 342 bp, Glycine max
  unsure (1)..(342): unsure at all n locations
  Clone ID: LIB3065-001-Q1-N1-G4
tccttgacgatcgacgtaaatgaaacaggctttggtggctggctgttcctgtggaaccgttttgggttaactttaacaaaattagttcttaaactgcttgaaccagtaccacactggcccaaaaaaaaaattcatgtgcttaatttctagctgtgagagacaattaagtgtatgaccaataaaatggttttgttgtaggaccaagtctgagagacgccaagcaccacatgaataaaataaccaaagcttggtttgtattgtagccttctctaatgctattggtctggttacatcatctntaattcccctttatatatgcatatgtntattatttattgattt

SEQ ID NO: 40449 - DNA, 416 bp, Glycine max
  Clone ID: LIB3065-001-Q1-N1-G5
gttcagcatcgcgcagagaggctcttcctcacaaagcacacacctcttgaaaagttggacaggaagcattttgctaagggtgcatgtggtgtagaaaagaatggggttgctgcagttccacaagaagatggaaattctaaagaaattgcattgatggaagccaaaatgacaaaactttgtcatttgttagaggagacaattgctcgaacaaaagacaatgttgtaaagaagcaagccctaacatatgaggaaatggaagcagaacgtgaggaggaagagacacaagaggactctgaaagcgaagatgaggagcagcagatatataatcccctaaaattaccaatgggatgggatgggaagcctataccttactggctgtataagctacatggtctgggtcaggatttaaagtgtga

SEQ ID NO: 40450 - DNA, 416 bp, Glycine max
  Clone ID: LIB3065-001-Q1-N1-G6
gttcttcatcgcgcagagaggctcttcctcacaaagcacgcacctcttgaaaagttggacaggaagcattttgctaagggtgcatgtggtgtagaaaagaatggggttgctgcagttccacaagaagatggaaattctaaagaaattgcattgatggaagccaaaatgacaaaactttgtcatttgttagaggagacaattgctcgaacaaaagacaatgttgtaaagaagcaagccctaacatatgaggaaatggaagcagaacgtgaggaggaagagacacaagaggactctgaaagcgaagatgaggagcagcagatatataatcccctaaaattaccaatgggatgggatgggaagcctataccttactggctgtataagctacatggtctgggtcaggaaattaagtgtga

SEQ ID NO: 40451 - DNA, 408 bp, Glycine max
  Clone ID: LIB3065-001-Q1-N1-G8
caaacagcatcagtacagagcattttgatgcatgtaagtggacaaaatcggaaccacattcctgggaattgatcttcccaatagaggtatgtggtcctaataatggttttgaaatgtggagttctgagtgggcaaatcaaacttcatggcatttgagtttccttattgacaatcccaaacagtctacagtttttgatattctcttgggaatttctcaagattttgaaattgctggtaatactcttatgccagctttttctgttccacaggctactgccagatcttctgaaaatgcggaatcctctgcatgatctggaacttgtgttctctttcgcttgttcgtttgtttaattcaataaaggaaattaggcatgaccctcttgatgagtatgctctgcctatttgaaa

SEQ ID NO: 40452 - DNA, 97 bp, Glycine max
  Clone ID: LIB3065-001-Q1-N1-G9
tgaaggatgatttttctatagttaaagagctgcctaaagagtggagcttttgcacaagagagttctatggcttggctattcgagaaacccgaatcaa

SEQ ID NO: 40453 - DNA, 404 bp, Glycine max
  Clone ID: LIB3065-001-Q1-N1-H1
ccggtcggcggcatcctcctgctcctggcaggactgaccctggctggaactctcaccgggctggtggtggcaacaccgctcttcatcatcttcagcccggtgctgattccggccacggtcgcaattggcctggccgtggccgggttcctgacgtcgggagtctttgggctcacggcgctgtcgtccttctcctggatcctgaactacatccgggagacccagccggcgtcggagaatctggccgctgcggcgaagcaccatctggcggaggcggcggagtacgtggggcagaagaccaaagaagtagggcagaaaaccaaggaagttgggcaggatattcagagcaaggcacaagatacaagggaagcagctgcaagagatgcaagagatgcaaggggagcagc

SEQ ID NO: 40454 - DNA, 449 bp, Glycine max
  Clone ID: LIB3065-001-Q1-N1-H10
gtctttactgactaagtaaacattaggtcaccacctgatctcacataaataatgctttaactagcaccgtcacagtggaaggctgttcaaaactatgacaagcgatagccttctcctttaccatactccccctatggggatgcagtacttataaccaaagctgatcttgaatgctatcatagcacaggtgatgctagtatggaactggcgatagttcctaaaatgctgaagactaagcccatgattgcaagattatctagtctgtttgcatccttaaaagtatccggcagtagtgtaccaatgaccaggcggttgccgagttctgagtcacgtgcttgctaagtcatcttgatatgctgtcaagcaggtggcctgtacagaagatgatgatgaagataagtgaaatttgataatttgccaaagtcggtacaattgtgtttcatgaatag

SEQ ID NO: 40455 - DNA, 441 bp, Glycine max
  Clone ID: LIB3065-001-Q1-N1-H12
gaggatatattgaagaaggatccaacatgtagtgacaccttagcaaaacttatcaagatgcaccaaaatggagactatagtcttgtatctctgctggaaatgattgctttacatttagatgctacagatgcagagtacaatacgtggaaggtgttctcttcatgtttcttgagactgtcttcctacgaagaagactgcatgtcttcatgccccattcaaaatgaagatggacataagcaacattttccccttaacaaaacccctaaaatatttacggatggtatatcaggaaaatcttggaggcttcgctgtaggtggtggctaactaaacatttcagcaatagcaagcttgaatccgagattaatactggtgacttgcagttactcacatacaaagcggcatgtgcatcgtatatgtatggacgggaattcagctatgtt

SEQ ID NO: 40456 - DNA, 141 bp, Glycine max
  Clone ID: LIB3065-001-Q1-N1-H4
tatgacatcccatgctccctaacctaagcatttggctcgagccttcctttaaacctaagccgttagcctgaatgggtggtgaagaccttttggcaatggccttccaaaggccttcctgccaaggttggttggtaccttcct

SEQ ID NO: 40457 - DNA, 414 bp, Glycine max
  unsure (1)..(414): unsure at all n locations
  Clone ID: LIB3065-001-Q1-N1-H5
agagagactcgtacaggaaccaagcatgccacgctcgttgcaacctccttaaggtggagaaagaagaatgtgaagaaggtgaaattccacgaccactaccacgaccacaacacccggagagggaacctcagcaacccggtgagaaggaggaagacgaagatgagcaaccacgtccaatcccattcccacgcccacaacctcgtcaagaagaagagcacgagcagagagaggaacaggaatggcctcgcaaggaggaaaaacgcggagaaaagggaagtgaagaggaagatgaggatgaggatgaggaacatgatgaacgtcaattcccattcccacgcncacctcatcagaaggaagagcgaaagcaagaggaagatgaggatgangagcaacagcgagagagcgaagaaagtg

SEQ ID NO: 40458 - DNA, 371 bp, Glycine max
  Clone ID: LIB3065-001-Q1-N1-H6
aaacaatttaattcaatctgcctcgatcatggagaggaaaacatttgggtttttgttcttgctcctacttgtcttagcttctgatgtgacggtgaagagagcagaggctaaagattgcttgacaaggaggcacgggttccagggtagatgcttattcgacaggcaatgtgcacatgtgtgcatgagcgatggtttcatcggtggtcagtgccgaggccctcttcgcaaatgcttttgcagcaggccatgttgatcgaaattactactgccaaagaggccatgaaatatacagacagacatatagatcaatagctctaaccgacacatatgtacgtagtgtcggagttctagctagctaggtagcgacgtgt

SEQ ID NO: 40459 - DNA, 379 bp, Glycine max
  Clone ID: LIB3065-001-Q1-N1-H7
gttggagatctcgtctttgaagtttctaagatgacttctccctacattaaatgtacagtctctttcttcatagcatttggaaatttggctgatgacaccatcaattttgaggcttttccccacaagctggtgcagtttggagagattcaggaaaaagttgtattgaaattttcacaagaggaatttcttacagcttggtcaactcaggtgcgtcctgcaacaactctgttggctgatgggtgtccatatttgtatgctatggtgcatgatagttcagtgtctacaataccaggtgattttgtcattggtgttaagttgacatccataaacaatatgtgtgcatatgggctcaatcctggtatttcaggttctcgtcttt

SEQ ID NO: 40460 - DNA, 393 bp, Glycine max
  Clone ID: LIB3065-002-Q1-N1-A1
gagaatttctcagttagtgtaagcaaatcagcaaatgagattgttgctacttataccaaggatgaaacgggaatggatctagtcattcgtctccctgcatcttatccactaaggcctgtagatgttgattgtacaaggagccttgggattagtgagaccaagcaacggaaatggttgatgtcaatgatgctatttgttcgtaatcagaatggagctttagcagaagctataggaatttggaagcgcaattttgataaagaatttgaaggtgttgaggagtgcccaatctgttacagtgtaatccacaccacaaaccacggtcttcctcggcttgcttgcaagacatgcaaacataaatgtcattctgcttgcctttataaatggttttcaact

SEQ ID NO: 40461 - DNA, 361 bp, Glycine max
  Clone ID: LIB3065-002-Q1-N1-A10
gagaaaacatgtaagtagtgagaagaagggagagaatggaggaaaaggcaaaagctgagcagaagaagataggtatgaccgagacttggttgaagaagcaccgtcttctttacaatggagccactagacaccctcttattattagcattcgcgatggcaccatcaacactgcttccttcaaaacatggctcgcacaggattacttgttcgttcgggcgtttgtcccatttgtggctagtgtgctgataaaagcgtggaaggaatcagattgcagtggtgacatggaagtcatattggggggcatggcttctctggaggatgagattttatggttcaagacagaatccaacaagtggggtat

SEQ ID NO: 40462 - DNA, 110 bp, Glycine max
  Clone ID: LIB3065-002-Q1-N1-A2
acttacaccaatgacgcatcgtcaatcctgctagaccaaagaatgctcgcatacaatacactacatactcaatcaaatgattgtacacctacaacatgcccatcattcta

SEQ ID NO: 40463 - DNA, 300 bp, Glycine max
  Clone ID: LIB3065-002-Q1-N1-A3
tatcacacgcactccacacgtagctcgcaattcaactcgatagtatcccattatcttaaaactgaataccctaaaaccatatgaccgtattattttaaagtatgatcattcatacctgcaaccctaacaacaatccatatcataataccacattttccctctatccctgcaaccataaacacaatgcccttattagacctacctacacccacattccccaatacacatacatacaacaatgtaaagatatttattgcatcataatcccaacttttcctaacacttaatcacaaccataat

SEQ ID NO: 40464 - DNA, 362 bp, Glycine max
  Clone ID: LIB3065-002-Q1-N1-A4
ttcaagcggttatgaaccgcctttatattaaacgtcgttgaaagtcaagtacatttaaggaggattccaactacaaccatcataaaaaagttgacatattctaagatgattctttgttacgaaccgtcttagaaagtacgctttctaagatggttcttaataaataatcgtcttagaatatgcacattctaagatgtttcttaggaaagaatcgtcttaaaaagtgagcttggtcatgaagttcttggtcatgaattttgtacataatgcattacataacatggttatactacaactatatcatatacaatgcatttgatgaactaaacttgaaaacaaaaatccaaggtcccaacatttta

SEQ ID NO: 40465 - DNA, 366 bp, Glycine max
  Clone ID: LIB3065-002-Q1-N1-A5
gccagatccaaaagctgaatgccctcaaaccggataaccgtagagtcggaaggtgggatcattgagacctggaaccctaacaacaagccattccagagtgccagtgttgccctctatcgctgcacccttaaccgcaatgccctacggagacctttctacaccaacggtccacaggacatctacatacaacaaggtaatggtatttttggcatgatattcccgggttgtcctagcacttatcaagagccgcaagaatcttagcagcgaggacgaagccagaggcctcaagaccgataccatacggtacatcggttcagagagggtgatttgatcgcagtgcctactggtgtagcatggaggatgcac

SEQ ID NO: 40466 - DNA, 369 bp, Glycine max
  unsure (1)..(369): unsure at all n locations
  Clone ID: LIB3065-002-Q1-N1-A6
agctagtgatcaatcatcaacacagagctgagtgtgttggtctgtgaatccaccttcttcttccattggaggaccatttcctcctggaatagaaatactaccacacttttcttttttcacttctctaagttgctaagttaattgctccttcattttttcactcttcgttctcgcgtacccgtgtcacggtaactcgtggtgaagtgttcgaaaatgactgtcacacctaagatctcagttaacgatgggaaacttgttgtccatggtaagaccattctgactggagtgccagacaacgttgtgctgactccaggttctggaaggggtcttgtgactggntgcttttgtggtgccacagcttcacacagc

SEQ ID NO: 40467 - DNA, 377 bp, Glycine max
  Clone ID: LIB3065-002-Q1-N1-A7
agctagtgttcaatcatcaacacagagctgagtgtgttggtctgtgaatccaccttcttgttccattggaggaccatttcctcctggaatagaaatactaccacacttttcttttttcacttctctaagttgctaagttaattgctccttcattttttcactcttcgttctcgcgtacccgtgtcacggtaactcgtggtgaagtgttcgaaaatgactgtcacacctaagatctcagttaacgatgggaaacttgtcgtccatggtaagaccattctgactggagtgccagacaacgttgtgctgactccaggttctggaaggggtcttgtgactggtgcttttgttggtgccacagcttcacacagcaaaagtct

SEQ ID NO: 40468 - DNA, 346 bp, Glycine max
  Clone ID: LIB3065-002-Q1-N1-A8
aaagcttcatcatcatcttcttcttctctgcatcatcacgagtggctgaagtacgttcacaacaacaacaaccccagcatgtgcaagtccacgcaaccacaacacacaccccacaacaccatggcggtgaaggtggcagcggcattctgaacctcatcccggagatgtccctcacgggttcccaactcctagctctcctcgccggcgttccccttggtgcaatgctgctcctcctctccggcatctcgctcatcgccagcctcttggggctggcggtggcgacgccgctcttcatcttcttcagcccgctgctggtccccgccgccttcgccataggaatggcggt

SEQ ID NO: 40469 - DNA, 311 bp, Glycine max
  Clone ID: LIB3065-002-Q1-N1-A9
gagtttttcttctgtttttttagttttttttttctgcctatgaggcatttgactgaactctgattcttttttctttttacatcaactcttggcttcttagtgtgtcacagtgacttcagtcctttctactaaaggtgtgtttgacttatgagcaagcctaaattggaaaaggggattttttttttcttctcattttggccattcatctttctcttgcgacattatgttctctctgcaactatggaaaagctaggattaactgaatctccattccccaagctctcttcagatgaaattctggaattggaaag

SEQ ID NO: 40470 - DNA, 370 bp, Glycine max
  Clone ID: LIB3065-002-Q1-N1-B1
gcctgcatgtctactctggaggatccccttggggaattccattactttattctcaagaaataaggaggcaaaggtgggcttatatgaattggaagtatgtgttttcttattaggcctatcctgaagccaaaggaaatgagatcggaattcctcggggaattccaattccacattttcaagaaataaggaggcaaaaatgttcatatatgaattgcaattatttgttctcttattaggcctatcctgaagccaaaggaaatgagatcggaattcctcagggaattccaattccacattttcaagaaataatgaagcaaaaatggtcatatatgaattggaattaattgtattcttattaggcctatcctta

SEQ ID NO: 40471 - DNA, 317 bp, Glycine max
  Clone ID: LIB3065-002-Q1-N1-B10
cgaatacacacgcacgcaaactctagattcggctctagatggataccatttccctgtctcactcactatctccactcctgagcagggaaccttcaccctcatgaatgctctcgtcttcctcctctcatcccacctcaaatactgtcatctgctctaaacccatcatttctagtctcaaaaagaaccaaacaatatctcctaaaccttcatcaagcacaagctattatgctcatgctcaacaaggcctaccagctttcactatctcctagacactcaaccctagcccaattctgatcaatgacaatgcactggcaatc

SEQ ID NO: 40472 - DNA, 402 bp, Glycine max
  Clone ID: LIB3065-002-Q1-N1-B11
agtttctgtctcatttggcattgcgtattgggaaaagcagaaccccagtcacaacaagtgcctccgaagttgcaatagcgagaaagactcctacaggaaccaagcatgccacgctcgttgcaacctccttaaggtggaggaagaagaagaatgcgaagaaggtcaaattccacgaccacgactacaacacccggagagggaacgtcagcaacacggtgagaaggaggaagacgaaggtgagcagccacgtccattcccattcccacgcccacgccaacctcatcaagaggaagagcacgagcagaaggaggaacacgaatggcatcgcaaggaggaaaaacacggaggaaagggaagtgaagaggaacaagatgaacgtgaacacccacgcccacaccaacc

SEQ ID NO: 40473 - DNA, 401 bp, Glycine max
  Clone ID: LIB3065-002-Q1-N1-B12
agcggttctcggcctctgtatccgatgatgctcgagagccctgaactgcggtggtcgttcatcagaaaagtgtactccataatcgccatccagttgctcgtaaccatcgtcgtcggcgccgtcgtcgtcaccgtccgcccaatcagtgtcttcttcgccaccaccggcgccggactggctctctacatcgtcctcatttttgttccctttataacgttgtgtccactttactactattcccagaagcatcccgtcaattacttgctcctaggggttttcactgtgtctcttggatttgtcgttggattgagttgcgcctttactagcgagaaagttattctggaagctgtcatattgactgctggtgtggtggattggtctgactctatacacattttggc

SEQ ID NO: 40474 - DNA, 419 bp, Glycine max
  unsure (1)..(419): unsure at all n locations
  Clone ID: LIB3065-002-Q1-N1-B2
aataaagatgagtttgaagaacaacatggtggtgctaaaggtgtgtntgttgcttcttttccttgtgggggttacagctgcacgcatggaactgagcttcttcaaaagtgatcagtcatcaagttatgatgatgatgagtattcaaaaccatgctgtgatctctgcatgtgcacacgctcaatgcctcctcaatgcagctgtgaagatattaggctgaattcatgccactcagattgtaagagctgtatgtgcacacgctcacagccaggacagtgtcgttgtcttgacaccaacgacttctgctacaaaccttgcaagtccagagatgactagaaaaactaatagctctctcaaatggacgaagcccctttaggcttttgttgtatgttaggggagacaaattaaacaagaaataaaa

SEQ ID NO: 40475 - DNA, 371 bp, Glycine max
  Clone ID: LIB3065-002-Q1-N1-B3
gcccgcatacctactctggaagatcccctcgagtaattccaatacctatattgtcacgacaataatgatgctaaagtgggcatatatgaatcggaagcatgtgttatcttattatgcctatcctgaaaccaaaggaaatgagatcggaattcctcgcagaattccaattccacattttcaagaaatcatgctgcaaacatgtccatatctcactcgcaattatttgtcatctcattaggcctatcctgaagccaaatgaaatcagatcagaattcctcagcgaattccacttacacattctcaagaaataatgacgcaaaaatgaccatatatgaattggaatcatacgttttcttattatggctatcctg

SEQ ID NO: 40476 - DNA, 234 bp, Glycine max
  Clone ID: LIB3065-002-Q1-N1-B4
ctactgggattcttcaaatcaaatggcacgtatgtcactgagaaagggaagttcttcttgacctggtattctaacaaattgctgaatcatggtgatcaaatactagatgaagccaacaaagctttcctgggctgtaaagtcaaattagcaatcaaagtatctggaattcactggtggtacaaagttgaaaatcatgctgcagagcttactgctggatattacaaccttaatgat

SEQ ID NO: 40477 - DNA, 311 bp, Glycine max
  Clone ID: LIB3065-002-Q1-N1-B6
aaaaatgactggagagacagtgaacccaaaagcttacccgttggccgatgcgcaactcgcaataacaatcttggatcttgtgcaacaagctgccaactacaagcaactaaaaaagggtgctaatgaagcgactaatacactgaacagaggcatttctgagttcgtagagatggccgcagacactgagcctcttgagattctttatcatcttgctctccttgctgaagataagaatgttccctatgtattcgttccatcataacaagcacttgggcgagcatgttgagtctcactgacagggaatgcatggt

SEQ ID NO: 40478 - DNA, 384 bp, Glycine max
  Clone ID: LIB3065-002-Q1-N1-B7
cccatttccaaccccacattgaacctaaaaaagcaatgtcacctccaccattttccccccctctctctatttcccttctctttgtcttcctgttagcaccattactcttagctcaatctccaccttctccttctccttcttcttcttcttcttcttctgttgcctgcaaaggcacactatatccaaaactctgccgttccattctctcagccattcgttcatccccttcagacccttatggctatggcaagttctccataaaacaaagcctcaaacaggcaagaaaactagccaaagtctttgaggactttctccaacgccaccaaaaatcaccttccctcaaccatgctgagactgcatcacttggtgactgcagagacctaa

SEQ ID NO: 40479 - DNA, 358 bp, Glycine max
  unsure (1)..(358): unsure at all n locations
  Clone ID: LIB3065-002-Q1-N1-B8
aaaaaaaataaaaaaacaaagaacctaaaaaaagcaaagggaactacaacataaaacaaacctatatataatttacattatctatgacttgctgttagcaccattactcttagctcaatctccaccttctccttctccttcttcttcttcttcttcttctgttgcctgcaaaggcacactatatccaaaactctgccgttccattctctcagccattcgttcatccccttcagacccttatggctatggcaagttctccataaaacaaagcctcaaacaggcaagagaactagccaaagtctttgaggactntctccaacgccaccaaaaatcaccttccctcaaccatgctgagact

SEQ ID NO: 40480 - DNA, 403 bp, Glycine max
  Clone ID: LIB3065-002-Q1-N1-C1
agcaaaatgtaccaagttcacaatcctcctcatctctcttgtcttctgcatcgcccacacttgcagcgcctccaaatggcagcaccagcaagatagctgccgcaagcagctccagggggtgaacctcacgccctgcgagaagcacatcatggagaagatccaaggccgcggcgatgacgatgatgatgatgacgacgacaatcacattctcaggaccatgcggggaagaatcaactacataaggaggaacgaaggaaaagacgaagacgaagaagaagaaggacacatgcagaagtgctgcacagaaatgagcgagctgagaagccccaaatgccagtgcaaagcgctgcagaagataatggagaaccagagcgaggaactggaggagaagcagaggaagaaa

SEQ ID NO: 40481 - DNA, 383 bp, Glycine max
  Clone ID: LIB3065-002-Q1-N1-C10
gtccttaaacactcatcagtcatcaccatggccaagctagggttttccctttggtttctgcttttcagtggctgctggttcgctttcagttccagagagccgcctcagcaaaacgagtgccagatccaaaaactcaatgccctcaaaccggataaccgtatagagtcagaaagagggctcattgagacatggaaccctaacaacaagccatttcagtgtgccggtgttgccctctctcgctgaacctcaaccgcaacgcccttcgtagaccttactacaccaacggtccccaggaaatctacatccaacaaggtaagggtatttttggcatgatatacccgggttgacctagcacatttgaagagcctcaacaaccttaacca

SEQ ID NO: 40482 - DNA, 421 bp, Glycine max
  Clone ID: LIB3065-002-Q1-N1-C11
gttgttttttacatagttaaccaggttggttggaccagtccaaccgggacccggtggcataaccgggccagtttgatttattggaccggcatgcatttggcccggttagatccggcctttttggggtaaacatggcgacccaagcctgattttaaaacccatttcgcgtaaaaaaaaaatgctccaaaaatagcctggtacttgtgtaattgtgttattgaattattatttgtggacttgtgttattaactttaatactttaattgttattttggattttggagtatgaatgaacttttcttaatcaaataatgttagttatatacttatatataatagatacatatataattttaaattttttaatatataccatgaattattgacccaccggttggactattgatccactaccttaagc

SEQ ID NO: 40483 - DNA, 404 bp, Glycine max
  Clone ID: LIB3065-002-Q1-N1-C12
gggaatcaaaagggagagatataccaacaataattagcaaggaactacttagtggacccagggaggtacttgttcctcaggcctctccaagtttacgttccgttgcagctgattcaattgaaggccgatcaacattacatcagtatttcaagctgtttcatgaaacttatgtggagtatgcacataaggtgtacctggagctcaagcatcacgcacctcagttgaagaaaatcattaatgaccaacattctcgaataggtgatgcacaacagaaacttttgaaagttgacgagaaagaggctatattacagaaaacgatagatcgtgcaattcaaatgcacaattctttggaagagcgcttgcaacaattaaagaacttaccctgcgtgcacaaaaaaacactg

SEQ ID NO: 40484 - DNA, 402 bp, Glycine max
  Clone ID: LIB3065-002-Q1-N1-C3
ggttatttaacacaaagatcctggtataatgttttctgatgctcttggaataattagtttttattacaatttggcttgcacttaattcctcctagatcttgttttattgaccagttgaaaatgtgttccacttcagtgtcctttaaatgcaattttattactgttataaaacatgtctgcaaacttcctgatcccaattgacattttggcagaattagatttgatattgtcatattgataatgagatggaagaggagcaaaattgttggacatgattcccaccttatggcactgattgtttttctcttcttttttctttctcagggtatttgaaaagtcactgcagtatgtgaagcgcttcagccgctataaaaatcccgatgctgttagacaagttcgaga

SEQ ID NO: 40485 - DNA, 381 bp, Glycine max
  Clone ID: LIB3065-002-Q1-N1-C5
cacagcgtatcctctgctctcgaagatggctcctcccagaggtggtggtgggttcaggggtggtaggggtgacagaggtagaggaaggggtggcggtggaggaagaggaggagacaggggtacgccgttcaaagctagaggcggtggccgtggtggccgcggaggaggcaggggtggtggccgtggcggcggcagaggtggaatgaagggaggtagcaaggttgtggttcagccccataggcatgatggcattttcattgccaagggtaaagaagatgctcttgttactaagaatcttgttcctggtgaagctgtttacaacgagaaaaggattaccgttcagaacgaagacagttccaaagatgagtacagagtttggaa

SEQ ID NO: 40486 - DNA, 328 bp, Glycine max
  Clone ID: LIB3065-002-Q1-N1-C6
gaagagggctcgcgggttacttgagcggcaagaaagaggaaactaaagagatggctacggagaccgccgaggcgacagctaataaggcaggtgagatgaaagaggcaacaaagaacaagactgcggagaccgcagaggcagccaataataaggctggccagatcaaggacagagccgctgagacggccgacgccgcaagtgcaatgaccggagagaccgcggatgtggttcagactcatatgcatgatagcattatgattgccaaagataaagaagatgctcttgctactaagaatcttgttcctggtgaagctgcttacaacgagaa

SEQ ID NO: 40487 - DNA, 365 bp, Glycine max
  Clone ID: LIB3065-002-Q1-N1-C8
ctcgagcctcgttcgtacacacaccctgcaccttcattgagttgagttcaaaactctgttctttcctccatgaattcaatgtctttaggttccttcatcctcacaccatgcaagttccgcccttttcttcaaaccaaacaccaacccatattccacacactctccccaattcccctgacacaaaaacccacttttcttcgagccacagactcgaacatcgacgcccccatttccctccccgagggcgcgtccttcgtttccatcccagaaatcatcgagaaggactggtccgtgcttgattgcgccgaacaccgaaccactgaccgcattatagcttccggaaacatcgaacagagttcgagggt

SEQ ID NO: 40488 - DNA, 106 bp, Glycine max
  Clone ID: LIB3065-002-Q1-N1-C9
ccgactagcgagcgcgtttacctgaaaacaaataccaacttgcttagcgagagggttacttaaaaacccgatcattacaaaggtctactatataaccgtttttcat

SEQ ID NO: 40489 - DNA, 378 bp, Glycine max
  Clone ID: LIB3065-002-Q1-N1-D10
gaaaaaagttacctgtttgcgatctcattacaatctccccagtttctaatctcagctaagaaaaaccaaaagatgtctctgattccaggtttcttcggtgcccgaaggagcaacgtcttcgatccattctcactcgacatttgggatcccttcaaggattttcatgttcccacttcttctgtttctgctgaaaattctgcattcgtgagcactcgtgtggattggaaggaaaccccagaggcacacgtgttcaaggctgatattccagggctgaagaaagaggaagtcaaggttcagattgaagatgatagggttcttcagattagcggagagaggaacgttgagaaagaagacaagaacgacacgtggcatcgcgtg

SEQ ID NO: 40490 - DNA, 395 bp, Glycine max
  Clone ID: LIB3065-002-Q1-N1-D11
ctgaatcgaacacacgtgagtatgtctgatcacgaagaccatgcagactacgcagacaatgaatcctttgcaaagcgtaggttcagggataggtccaaggaggcattgtccaaacaagccgttaagttagccaaacaagctgaagagcatgaaaggttcatcaacaaggtgactcatcttttgggggttcttggctttggttggttttgcttcatctttggggcaaggccacaagccgttcccttggtatattgtttgttctatgtggtatttgttcctctccgttggatatattacaggttcaagaaatggcattactatctcctggatttttgctattatgccaatacaatcttcttggtttacctccttttctacccaagcaatgaaaagct

SEQ ID NO: 40491 - DNA, 77 bp, Glycine max
  Clone ID: LIB3065-002-Q1-N1-D2
atgctttggttgtacgaaatcattacactaaataaaataatcaaagcttagatatgccttccgctaaagccgaatgc

SEQ ID NO: 40492 - DNA, 386 bp, Glycine max
  Clone ID: LIB3065-002-Q1-N1-D3
actaactaagaaagtcttccatagccccccaaaaatgaagagcaccatcttctttgctctctttctcttttgtgccttcaccacctcatacctaccttcagccatcgctgatttcgtgctcgataatgaaggtaaccctcttgaaaatggtggcacatattatatcttgtcagacataacagcatttggtggaataagagcagccccaacgggaaatgaaagatgccctctcactgtggtgcaatctcgcaatgagctcgacaaagggattggaacaatcatctcgtccccatatcgaatccgttttatcgccgaaggccatcctttgagccttaagttcgattcatttgcagttataatgctgtgtgttggaattctaccgagtg

SEQ ID NO: 40493 - DNA, 300 bp, Glycine max
  Clone ID: LIB3065-002-Q1-N1-D4
acaaacatttatttcctacatagcctcccaaaaatgaagagcgccatcttgtttgctctcgtatctcttttgtgccttcaccatctcatacctaccttcagccatcgctgatttcgtgctcgattatgaatgtaaccctcttgaaaatggtggcacatattatatcttgtcagacataacatcatttggtggaataagagcagccccaacgggaaatgaaagatgccctcttactgtggtgcaatctcgcaatgagctcgacaaagggattggaacaatcatcttgtccacatatcgaat

SEQ ID NO: 40494 - DNA, 352 bp, Glycine max
  Clone ID: LIB3065-002-Q1-N1-D5
gaaagctgttaacctatttcccaacaaaacattggctaagcagttgtttctagttgatgcatttaggaaaaatccagtttccgatttgcttgattgaggcatattcagtattctgcaagggttgtcaatactacatttttacatgctactgttattattatgtagatatatgagttatagttctttgaggtcttattgagtctatcctgaagccatgcgaaatgagatcggaattcctcgcggaattccaatatcacattttcaagaaataatgtggctaagatgttcatatatgaattggaattatttgttttcttattaggcctatcctgaagccaaaggatatgagatc

SEQ ID NO: 40495 - DNA, 406 bp, Glycine max
  Clone ID: LIB3065-002-Q1-N1-D7
gaatgttgctgttaaggatctcaagcgtggttatgttgcctcgaactcaaaggatgatcctgccaaggaggctgctaacttcactgcccaggttatcatcatgaaccatcctggtcagattggaaatggctatgcccctgttcttgactgccacacttcccacattgctgtcaagtttgctgaactcatgaccaagattgacaggcgatctggcaaagagcttgagaaggaacccaagtttttgaagaatggtgatgctggttttgttaagatgattccgaccaaacccatggtggttgaaactttctctgagtaccccccacttggtcgctatgctgtcagggatatgcgtcaaactgttgctgtgggagtcatcaagaacgtggagaagaaggatcctactgga

SEQ ID NO: 40496 - DNA, 342 bp, Glycine max
  Clone ID: LIB3065-002-Q1-N1-D8
cgctgcaattggcaacggagctgggcgtatttgacgtgttgcaagaagcgggggctaagctctctgcgaaagagatagcatccaagctttcctgcgacaacaaccctgaagcagactcaatgctggatcgtcttctagcccttctagcctctcacttcattcttaactggtctctcattctcgaccaccaaaacctggggacctttcagaggctctacaccatcactcccgtcgccagattctttgctcgcaattctgatggggtgtccttgggacccttgatggccttgcttcaagacaagatctttctacatagctggtcggagctgaaagattcaattc

SEQ ID NO: 40497 - DNA, 367 bp, Glycine max
  Clone ID: LIB3065-002-Q1-N1-E1
aagcagatgtctaatggtaggtttgtggctcctgaggacaaggcgagtttatggtcacaacttcattatgtttcgtgtaataatctggaaatgcaagaagcttatcttgtcaatctcgtaaatgtgttacgagaattgtatttgcacagtccaaaagaagctcgccaattgaaaaggaaagctctctctcgtattgaatggctgcaaaaagctgatgtgcctaccataacacagattgaagagtttcattcgatgcagaggatgatgaatgctcctgattcaaatgataatattgatctactgttgagcattgatttggtgggtttacaaggagcaagtaaaagctttttcaaaccaggattgtttt

SEQ ID NO: 40498 - DNA, 396 bp, Glycine max
  unsure (1)..(396): unsure at all n locations
  Clone ID: LIB3065-001-Q1-N1-C3
tcggggaattccaattccacattttcaagaaataaggaggcaaaaatgttcatatatgaatgggaataattggttctcttattaggcctatcctgaagccaaaggaaatgagatcggaattcctcggngaattccaattccacattttcaagaaataaggaggcaaaaatgttcatatatgaattggaattatttgttttcttattaggcctatcctgaagccaaaggaaatgagatcggaattcctcggggaattccaattccacattttcaagaaataaggaggcaaaaatgttcatatatgaattggaattatttgttttcttattaggcctatcctgaagccaaaggaaatgagatcggaattccttcggggtaccgagctcgaattcccta

SEQ ID NO: 40499 - DNA, 86 bp, Glycine max
  Clone ID: LIB3065-001-Q1-N1-D3
aaaaaaaattattttaaaaaaaaaaaaaaaaaaaaaaaaaaaaaaaaaaaaaaaaaaaaaaaaaaaaaaaaaaaaaaaaaaaaaaa

SEQ ID NO: 40500 - DNA, 171 bp, Glycine max
  Clone ID: LIB3065-001-Q1-N1-F11
cataaggttcgtcccccttaccagccttaccaaaattcacccttaagttcaaagttgccaaaccccgcacggcctttaagatacccagcgttttccccctgaaacttccttaggcccctttccttttccgacctttccgttaaccggatccctgtccgcctttctcccttc

SEQ ID NO: 40501 - DNA, 372 bp, Glycine max
  Clone ID: LIB3065-001-Q1-N1-F4
agaagatctatgacgtcgcacgctcgcgtacgttcgcgaaattggtctagtgttgcgtattgttgacacacagggatatcccgggcccctctgtgcgacgggtaatatacgtgtccgtatatgggacccacacgcggtcccggggcctgtctcctggttttggggtaagaatgggtatgggttctggtttctgacacaaggggcattcgcggtattaccaggacaccaaaaaggttttaaccccaaagaagaagttgaagctgctcaagggtttctccaaattagggcttgcatcggatcccgagaaactcgccatgttctatgatcttcaacaaaacctgacctcggatgctggagatgtattactgagag

SEQ ID NO: 40502 - DNA, 581 bp, Glycine max
  unsure (1)..(581): unsure at all n locations
  Clone ID: LIB3065-001-Q1-N1-H11
gctatgaccgtcgcatgccacgcgtaccgtaagcctcagtgaattcggcttcgagtactatacctatgcatgtagaagtgcgagttgtccttttgttaggtagttgcttagggaactaggttttcctaggccattcagtttgtagtcttcatctaaagggtgaagagacggatgacgaagtaacccgtttctacccttgatgaagctctaacccagcttccaaacctcttctttgagaacccaaaacgagtgcgcattcgtcgtccttccagaagattcagaccaaaccgctttccccgacaacttggagaaccccttcgagaactacccggattagtcccaaagtttcagtcatgaaacccaacaccaagtccttcttcccccaaccatgccctgacgccgatttccttcctctttggtccttatgcgggatgagcncanntacttaccttaggtgaaccaacgaccgacatgagaccctcctacaacnncttcaccctgggcgattgcccanngagaatcccagcttggaacccacttnactatnttggggttaaccctcacgacccaccaggaatctc

SEQ ID NO: 40503 - DNA, 438 bp, Glycine max
  Clone ID: LIB3065-002-Q1-N1-B9
tcggggaattccaattccacattttcaagaaataaggaggcaaaaatgttcatatatgaattggaattatttgttttcttattaggcctatcctgaagccaaaggaaatgagatcggaattcctcggggaattccaattccacattttcaagaaataaggaggcaaaaatgttcatatatgaattggaattatttgttttcttattaggcctatcctgaagccaaaggaaatgagatcggaattcctcggggaattccaattccacattttcaagaaataaggaggcaaaaatgttcatatatgaattggaattatttgttttcttattaggcctatcctgaagccaaaggaaatgagatcggaattcctcggggaattccaattccacattttcaagaaataaggaggcaaaaatgttcatatatgaattggaatta

SEQ ID NO: 40504 - DNA, 338 bp, Glycine max
  Clone ID: LIB3065-003-Q1-N1-B12
tgccttgaaaggagtttttttattagaagggaagcacacagaaattaagcacaacaaaaaccaaaaccttccgggccacattgcaatacttacaaaagaaggaccatgctcatacaccttggtgttcatgcttctcaccagaagcattcaaagccaaaacctcatcacctaataatctacataaagtctaaatgttctttgaacaccttcaacatattagaaaaagtgacaattccaactaagctacaatcatcctcaataacccacaagtagttcactctatgtgcaatggcctggatcatcacagcaaccagggagctctttggatgacacactat

SEQ ID NO: 40505 - DNA, 307 bp, Glycine max
  Clone ID: LIB3065-003-Q1-N1-C2
ggccgctttgctggcgtaattacataggctacgtatatcctgacgagcatcagagaaatcgacgctgcaatcagtaagctgcgatcctgacgggactataactgtaccaagcagggtcagatgtgagctacaatatgcgctactatagtcatactctgaagagcatcgaagctgtgatctgttacctaaagaagcatgacgctacatatacctcacgctatatgttattcaacatcattgtacgtcgttcgatcaaaactacgctgtgatcacgtacccttgggaaactcacatcgctctgcgttat

SEQ ID NO: 40506 - DNA, 68 bp, Glycine max
  Clone ID: LIB3065-003-Q1-N1-E10
gaattaaatcctgaccgataccgtcaggcgtaccagctatctctatatttagtcctattagagcttgg

SEQ ID NO: 40507 - DNA, 385 bp, Glycine max
  Clone ID: LIB3065-003-Q1-N1-F1
tcggggaattccaattccatattttcaagaaataaggaggcaaaaatgtgcatataatgaattggaattatctgctttcttattaggcctatcctgaatccaaaggaaatgagatcggaattcctcggcgaatgccaactccacatgttcaagatacatagtctcaccattcgtcatatatgtgatgtctttattcgttcctgtagaagccctatgctccatcctgaacattttccacatgactttcaacattcttgtgagtgtcgcactgtacaatgtatgttactcaatctactacttcaatgcaatgcttgatctttaccaatgcagtagtattatcttatctctggttttgacttattgtgtaattctcttgatgcaagtt

SEQ ID NO: 40508 - DNA, 58 bp, Glycine max
  Clone ID: LIB3065-003-Q1-N1-G3
aaaaaaaaaataaaaaaaaaaaaaaaaaaaaaaaaaaaaaaaaaaaaaaaaaaaaaaa

SEQ ID NO: 40509 - DNA, 269 bp, Glycine max
  Clone ID: LIB3065-003-Q1-N1-H1
ctagtggaagcaactagttgtatcaaaatatgagtgttattaatagctttttgtgtatctaaatataagggtatgcttgtgttttcttttgtttttgcaaccacccttttgcttgagtggccactaggctcctgcatgtgcatttttatttttcttgttttggggtcacaactgccaaagcctagttgagtgtgtagctgttgtattttgtcttctacacatattgaataaaatgtgtgaaaccctattttgtatagggatgctaaaaa

SEQ ID NO: 40510 - DNA, 309 bp, Glycine max
  Clone ID: LIB3065-003-Q1-N1-H11
tgaaactttcttacccagagcatgtattggtcaaacgggtatcatcagctgaagaaagttttgatagagcgctacaatcattttcctcatgagtgtcgatgattgaatttctttcaagagttgaatggtgtgaggtcttcccgtgcaatttttacaccttatcgtggctattgtattggttgcgtatcttagaacataatcaactgggtaatgtgtcatagtattcaaatttgttatgtttttggtttacttgagtcttgatgttgtaaaagctacatctgacattaatttttaaacatgttcatttaa

SEQ ID NO: 40511 - DNA, 95 bp, Glycine max
  Clone ID: LIB3065-003-Q1-N1-H5
cgactagtgatctcgtcttacttgggaattaattactgaccggtacctgcgggggtaccagctcatggtatagcgagtcgtattaaagcttgtca

SEQ ID NO: 40512 - DNA, 418 bp, Glycine max
  Clone ID: LIB3065-004-Q1-N1-B11
tcggtgaattccaattctacattttcaagaaataaggaggcgaaaatgttcatatatgaattggaattatttgttttcttattaggcctatcctgaagccaaaggaaatgagatcggaattcctcggggaattccaattccacattttcaagaaataaggaggcaaaaatgttcatatatgaattggaattatttgtttttttattaggcctatccttaatctatttgtaaagtgttcggaattctttgttttattcttttttctactattgtttttattattttttgtttattttatttatttttttaatttattttatattattttttttatgttttttatttttttttatttttttttttaaatttttctttattttttatttttttttttatttttattttttattatttattt

SEQ ID NO: 40513 - DNA, 418 bp, Glycine max
  Clone ID: LIB3065-004-Q1-N1-C8
ttcgtcgagaacactcttttaacttcaacacctttaattggctgaacgaaattcagccacagaatatcaaagggagcgaagatgagtcaggagcagccaaggcgcccccaaggccaagaccccatcaaatacggcgacgtttttgacgtctacggtgaccttgcacagatgcccattgcaccggaagatgctgccatgatgcaaagcgcggaagctcgagtactcggaaaaacccaacccggcggagcttcttccgtcatgcaatccgccgccacaaggaatgaacaggctggtcttgtcggtcaccaggacgtcaccgacatcaccggcgaccatggcgtcacagtcacagaaactacattccatggaagacgcataataaccgaggctgttggtggccaggtagtggaacagtatg

SEQ ID NO: 40514 - DNA, 403 bp, Glycine max
  Clone ID: LIB3065-004-Q1-N1-E5
cagctatgacgtatgactgcacgcgtcacgtcagctcgggcttcgcgagcttggatcgcgctctagcggtcgacgactagggagattgtcacacctgcgcattaattctctgtacgtatcctgaatgcgtaccacgatttcctacagagtgtagtccgaaagctcgaagtacccatggcaatagttagcaaatgcgagaactcgcacaccaatctaagatcatggacgccgactaacaacgctgcctactgcgaagagagaacagatgaccaagaactgaactacctgaaattcgtgcaattggggaccatgcaggctctgatgcgctgagacatgctgtactaatacgcctaggaacgcgcggatcctgcgaagccaggcgtctacaccgtggaggacgccg

SEQ ID NO: 40515 - DNA, 275 bp, Glycine max
  Clone ID: LIB3065-004-Q1-N1-G12
aacttcactaatcttgaatgtgctttaaatctagctatgtactagatagtctcgttcaatgttagtgttcaaattgtggatgtgatttctaatattagtctactactctatatgtagaggcctttctttatgtggaataggtataacatgctgttatgcccgttttgtacttgaaaactatcttataatgaataagaatatgtgaattttgagtattaacaaactggtaaatcctactaataattaaattgcatctctatgttcataaacacgag

SEQ ID NO: 40516 - DNA, 249 bp, Glycine max
  Clone ID: LIB3065-005-Q1-N1-A11
ggcaatacatatgtcatacagaatcagatcaataaggttgggcttcaatttcttttgagacatctgcatgattacaattgcttctcagaattctggcttcaaactctttcttctttccatgtacatgattaatttgcgctctatccagcagaagaaaaggccaaaatctagtagtacatgagatgatatgtcatgctatacatgtatctttttgttttggcttcttatatcaatataagaaattcttca

SEQ ID NO: 40517 - DNA, 219 bp, Glycine max
  Clone ID: LIB3065-005-Q1-N1-B6
ttaatatacacctggtgataattaattgtttgttgttctgctctatagttgttcctagaaattctcaattccttatgttgttatgaatagtttcaagtgtaggaaattaattgatctacttagttgtaattagtaaatggtgcgtaatgatccatccctcatttctgcatctaactgtattaatggtaatgaattcaagcacattattgtttgtgataa

SEQ ID NO: 40518 - DNA, 160 bp, Glycine max
  Clone ID: LIB3065-005-Q1-N1-F4
aataatttctctttcctttttccaatttctctgtcgtccttaggctccgtggtgtccctgtctagtttcggtactgtggaatcttgttaatgatgtgtacttcaattttattaatataatttcttcgttatgtaatagcaaattgttatttgtgtctgaa

SEQ ID NO: 40519 - DNA, 285 bp, Glycine max
  Clone ID: LIB3065-005-Q1-N1-F5
tagacgacgttgaccctaggcttttatctctgtgtcgggggctctgaatgtgtcgtttctttcggtgtcgtttttgccttttttttctctttcccatgtcgtttatgggattgcggtgttatggatatcatttcgaaacccttcccctttgaatccttcctttcctttctaaaatatcagtatcatgtggttcgttcatagagtgaatggagtctgttatgagaaacatatcataatatgatgagctaccttcactaaacattaggacctctattattcgcctaa

SEQ ID NO: 40520 - DNA, 77 bp, Glycine max
  Clone ID: LIB3065-006-Q1-N1-A1
aaaaaaaaataaaaaaaaaaaaaaaaaaaaaaaaaaaaaggaataaaaaaaaaaaaaaaaaaaaaaaaaaaaaaaaa

SEQ ID NO: 40521 - DNA, 246 bp, Glycine max
  Clone ID: LIB3065-006-Q1-N1-A2
gaaaataagttcatataccatctatatttttcacattatgggcaccatcttcgagatttatactattaagctaatgcccattaagtgtacgacttttgcttttaaaactcgttgaaaatcagttttcatctgtttacaaatgcatgtggatatatgatacggaggtgatgtattacaccagtgtattgaataaacagcctgtaccaattaatgacatggtagatgcaaattgtacaagagcaacaa

SEQ ID NO: 40522 - DNA, 227 bp, Glycine max
  Clone ID: LIB3065-006-Q1-N1-B6
gagggatggaattcatcgtttgcccaccaaatgaaaatgaaattgtttagaaaataagttaagagataaaatatctagagtttaatgctcagtctactttatgaatggtgcagtttgactcttatttagtagttgaattcagtagttcatgtgatactttatatttaaatatattttttatttttaataaatatttaatgttatgtttgtttttttaaaaaaaagac

SEQ ID NO: 40523 - DNA, 67 bp, Glycine max
  unsure (1)..(67): unsure at all n locations
  Clone ID: LIB3065-006-Q1-N1-E3
aaacaataaangcgttacagggaaacaaagccccaacagaggaagaatacatggaaatcaaaagatg

SEQ ID NO: 40524 - DNA, 317 bp, Glycine max
  Clone ID: LIB3065-006-Q1-N1-E6
tcggggaattccaattccacattttcaagaaataaggaggcaaagatggtcatatatgaattggaattatttgttttcttattaggcctatcctgaagccaaaggaaatgagatcggaattcctcggggaattccaattccacattttcaagaaataaggaggcaaaaatgttcatatatgaattggaattatttggtttcttattaggcctatcctgaagccaaaggaaatgagatcggaattcctcggggaattccaattccacattttcaagaaataaggaggcaaaaatgttcatatatgaattggaaattat

SEQ ID NO: 40525 - DNA, 298 bp, Glycine max
  Clone ID: LIB3065-006-Q1-N1-E7
cagctcctgattgcatgtgccaagcttagtagtgactagtagtagtatatacttaaattattattattgctcacggatgtagcctgtgtattttatagttcggtgtcttattatttaacattatatctagtgaaaataaaaaagctatttccactcctattcctaatggagtttgttatgttgttcttgataagagtgcttgagagttagttgtgtattgtgtgggagatgtatttatcagatgatggcattcttagcaggagccagccatattattaatttataattttataattca

SEQ ID NO: 40526 - DNA, 379 bp, Glycine max
  Clone ID: LIB3065-006-Q1-N1-F2
tcggggaattccaattccacattttcaagaaataaggaggcaaaaatgggcatatatgaattggaattatttgttttcttattaggcctatcctgaagccaaaggaaatgagatcggaattcctcggggaattccaattccacattttcaagaaataaggaggcaaaaatgttcatatatgaattggaattatttgttttcttattaggcctatcctgaagccaaaggaaatgagatcggaattcctcggggaattccaattccacattttcaagaaataaggaggcaaaaatgttcatatatgaattggaattatttggtttcttattaagcctatccctaaacccaaagaaattagaatcgaattcctcgggggtac

SEQ ID NO: 40527 - DNA, 330 bp, Glycine max
  Clone ID: LIB3065-006-Q1-N1-G2
caaggaactcaagaacggtcgcttggctatgttctccatgtttggtttctttgttcaggctattgtcactggcaagggccctattcagaacctttacgaccacgttgctgatcctgttgccaacaatgcttgggcttatgccactaactttgtccctggacaatgaggatgcctacatgcaatgcaatcttctgctcccttttgcagttcccttgtgtttaactccattttcactaatgtaactacacctgtgtagcagaaaaatctgtatgagaaccattatatttttatatattagaaatttgggtccccagaaaatatcaactctta

SEQ ID NO: 40528 - DNA, 95 bp, Glycine max
  Clone ID: LIB3065-006-Q1-N1-H1
attttaagcagttattgttagtcttttctggttcagcttgtgtcaaagttcgttgtttatttggcaatgaatatctagaatcttgattttgaaaa

SEQ ID NO: 40529 - DNA, 221 bp, Glycine max
  Clone ID: LIB3065-007-Q1-N1-B5
gaaagctgataacctatttcccaacaaaacattggctaaccagttgtttctagttgatgcatttaggaaaaatccagtttccgatttgcttgattgaggcatattcagtattctgcaagggttgtttctactttctctttccatgcaactattattattagttagttgaattgtagattgcacatttaggttgaatgaatgttttgtcttgcactgcaaaa

SEQ ID NO: 40530 - DNA, 393 bp, Glycine max
  unsure (1)..(393): unsure at all n locations
  Clone ID: LIB3065-007-Q1-N1-C6
acaacatatagccaacgtaacagaacccgttaatttgtgtattgaattaaaaattgagaggaatcgtgggtatcgtataaaaacactaaaaaactttcaagatggaagttatcctatagatgccacatttatgcctgttcgaaatgtaaatcatagtattcattcttatgtgaatgggaatgaaaaacaagagatactctttctcgaaatatggacaaatggaagtttaactcctaaggaagcgctttatgaagcctcccggaatttgattgatttatttattccctttttacacgcagaagaagataactttaatttagaaaacaatcaacacaaagttactttgcccctttntacttttcatgatatattggctaaggaaaaactaaggaa

SEQ ID NO: 40531 - DNA, 123 bp, Glycine max
  Clone ID: LIB3065-007-Q1-N1-C7
cactgggtttcctgcttggtgtcacattcagtaactgaatgtgacagtgggtttcctgcttggtgtttctgttataactttatgatggtgggaatgctatactgttgatttgcagaatttaaa

SEQ ID NO: 40532 - DNA, 129 bp, Glycine max
  Clone ID: LIB3065-007-Q1-N1-D8
tcttaagccattttgatttaggggttcctgatcaattcgggggggtctgaattggacgtcctcatttcttgtaacgaagctaattgaattttttttattatatatagtaatctttttagtgtataaaaa

SEQ ID NO: 40533 - DNA, 427 bp, Glycine max
  unsure (1)..(427): unsure at all n locations
  Clone ID: LIB3065-007-Q1-N1-E1
ttttctctttttacacttaaccatgggccgacttttaaccacaggaagcgacttcgccaccactccccagagcacccncgactntgttctaactcctncgacactcacccacttgactcgccccagtttcaactctcccgcgtcgacccggaccttctcaacatgctcaatgatgccgagaacgtcacggagcgtgaccctaccatgcagggtcttgactctgttattaagagtttcgaggaagaaatactttctccgcttccgaacccgaatctagcgtccgaagcagaggtgtttaatccgaacctagggtacttgttggaagcatccgacgacgagctagggttgcccgccgcggtagcgccccgcgaggatgcgacaaatccccaaacacttgattcgggccgggttggatctgacggaatgg

SEQ ID NO: 40534 - DNA, 233 bp, Glycine max
  Clone ID: LIB3065-008-Q1-N1-A9
gttgagacaagctttaaattgtttgaactatttaacttacttttgaacttaggcgaagttatttctcatatgaacaatgttactttagatttaagttttgtcgagttttgtttgtggttttgtccgtgaatgttgtacttctgttatttggtccttgcatcggtgtattttttatccataggattttgcatcggtgttggttcgaactatttgggaattttgcttgaaagata

SEQ ID NO: 40535 - DNA, 224 bp, Glycine max
  Clone ID: LIB3065-008-Q1-N1-F4
ctcgagccgattcggctcgagatgcactctagtttattccgtggtcatcactcatcagtggtgctacaaattacttttggcttttatgtaatcacccttaccaaggtgaaactctaattcagatagtagatcaacacccaaagcacctaagaaacagtatccaagttttgtccttagtttatctcttttcaatcataatatattagggtaatatcttggtctta

SEQ ID NO: 40536 - DNA, 59 bp, Glycine max
  Clone ID: LIB3065-008-Q1-N1-H11
aaaaaataaaaaaaaaaaaaaaaaagaaaaaaaaaaaaaaaaaaaaagaaaaaaaaaaa

SEQ ID NO: 40537 - DNA, 169 bp, Glycine max
  Clone ID: LIB3065-008-Q1-N1-H6
aaaaaataaaaattaaaaaaaaaaaaaaaaaaaaaaaaagagaaagagaaaaaaaaaaaaaaggtcaaaccaaaaaataaagacataaaaaactcattaattaattcctgaccgattcctgcaggcttaccaagctttccctttatcgagtgcgattacaactttacgc

SEQ ID NO: 40538 - DNA, 310 bp, Glycine max
  Clone ID: LIB3065-009-Q1-N1-B12
tacgcctttattgttttacttaatggacaatggctgatttaacaatgactcaccacgggtagataattgtaatacttcaatatatctatggacgccacactagttacacagctacattgaatgtaaagtaacacttagcaaaacagcattcaagaccacttattaaacaaatatccgaacggtcgatgaatcgacagcagcttatatacctaatggtgtagcatctgaagcctttttcctgaaattcacagcaggactctttaactgggactatgatgcaaattatgatgcataaaatagccaagattat

SEQ ID NO: 40539 - DNA, 199 bp, Glycine max
  Clone ID: LIB3065-009-Q1-N1-C6
gcaggatccactttgagcatttactttgctttttgtaggctatttttcagtgtttccggcagacttttaaatatttctttttgcaatgtactcagaagtgcaggccatatgattatgaatgtaagagaatctttacattgatctatgcttatttgagatgtacactcgcaataaaactgtattcccgtgtgccctttaa

SEQ ID NO: 40540 - DNA, 378 bp, Glycine max
  Clone ID: LIB3065-009-Q1-N1-E9
tcggggaattccaattccacattttcaagaaataaggaggcaaaaatgttcatatatgaattggaattatttgttttcttattaggcctatcctgaagccaaaggaaatgagatcggaattcctcggggaattccaattccacattttcaagaaataaggaggcaaaaatgttcatatatgaattggaattatttgttttcttattaagcctatcctgaagccaaaggaaatgagatcggaattcctcggggaattccaattccacattttcaagaaataaggaggcaaaaatgttcatatatgaattggaattatttggtttcttattaagcctatcctgaagccaaaggaaatgagatcggaattcctcgggggta

SEQ ID NO: 40541 - DNA, 298 bp, Glycine max
  Clone ID: LIB3065-009-Q1-N1-H3
cactgttggacaaaaaccaagtatggccgaatactatttggatgatactagcgaagtaatcaagttacttgaaggacttgcaactgcagcaggaccttctgcgtccataatttatcaggatttgtgaggaacattatagaaactgatacagaaaaacaatcttgtacagaatgatatactttcataggtggattttaaaaggtcaatacttagaaatttacagattagcttattcatgtttttcacataaaaaaaaaaataaaaaagaaaagaaaagaagaaaaaaaaaaaaataaaa

SEQ ID NO: 40542 - DNA, 339 bp, Glycine max
  Clone ID: LIB3065-009-Q1-N1-H5
aaacaggccttcttcggcgaaacacaagctgagggtggttttgatccaaatgcagtggccacggctaacatcttagagactgcaacacctgtgattgacgggaagccatactattttttgtctgtgttgacaagaactgctgatggagatgaaggtggcaagcaccacataattagagcaactgtaaaagatggaaaactgttcatttgcaaggctcaagctggagacaagaggtggtttaagggagcaagaagatttgtggagagcgcagcaagttctttcagtgttgcttaaaaaacttcaacagcgggttatatatatatatgctatgtgtaaatc

SEQ ID NO: 40543 - DNA, 140 bp, Glycine max
  Clone ID: LIB3065-010-Q1-N1-C1
ggattctttaaaacgggcggcgacttatgaacttggtgacccgggaattaaatcccggccggtacctggaaggcttccaacttttccttatatgaagcggattaaaagcttggccggaattcatgggtcataagttggtt

SEQ ID NO: 40544 - DNA, 223 bp, Glycine max
  Clone ID: LIB3065-010-Q1-N1-C2
tcgatcctgggccccttagagcggcccttccacttatgacctcctcaactgggcaattaattacggaccgtaacctgcaggcgtacgagcttgtgctatatggagtgcaattagagctcgacatagccagggacatagccattacccgtcataaagtgtaatacactcacaatttcacacttcatactagccttaaacagcatacgtgaagtctgtggtgcct

SEQ ID NO: 40545 - DNA, 364 bp, Glycine max
  Clone ID: LIB3065-010-Q1-N1-F3
tcggggaattccaattccacattttcaagaaataaggaggcaaaaatgttgatatatgaattggaattatttgttttcttattaggcctatcctgaagccaaaggaaatgagatcggaattcctcggggaattccaattccacattttcaagaaataaggaggcaaaaatgttcatatatgaattggaattatttgttttcttattaggcctatcctgaagccaaaggaaatgagatcggaattcctcggggaattccaattccacattttcaagaaataaggaggcaaaaatgttcatatatgaattggaattatttgttttcttattaagcctatcctgaagccaaaagaaatgagatcgga

SEQ ID NO: 40546 - DNA, 109 bp, Glycine max
  Clone ID: LIB3065-010-Q1-N1-G4
tgtcagttgattcatgcacagggtgttgcaagtgtgtttgttgtacatgtaaactataatgtagtttgttattttcctgcactgtgtatgaaatgtttgttttgccaaa

SEQ ID NO: 40547 - DNA, 204 bp, Glycine max
  Clone ID: LIB3065-010-Q1-N1-H5
tgaaaatcaagctgagttggaaattaaaaggccaagttgacaacaggtttaggttatcatttagcaaaacatttaaggtttgtatatgacctaacagaacaggacattagttaaagatgaaaacccatccaaacagggggttacacacgtacttctcttttcctatgtattgcggtgccttatataaaatttatcaattattga

SEQ ID NO: 40548 - DNA, 337 bp, Glycine max
  Clone ID: LIB3065-011-Q1-N1-A7
ataatttcctttaccatatccaccttcccactaactcgaatgtgatccttacaagatgggatccccattacaattttatatcactctttcatgatcacactgataagtctctacactcaatattaacctactgactcctctccacatatatacccatacctctctcaatctcctacatttcatccatctcctgtaacactttttccactcatgaccactacaccatactcatctactttaacaaccccgaaaccttctcataaaatacacatacttactatgatacatcgtataacattactcgcttcacattctccaccctaaaatgactctctta

SEQ ID NO: 40549 - DNA, 292 bp, Glycine max
  Clone ID: LIB3065-011-Q1-N1-B1
tcgttgaattccaactccacttaatcaagagatatggaggcttaaatgttgagatgtgaatcgcaattatttgagttctcatatagcctatcctgtaaccctaggatatgagatcggaattcctagtcgtattacaactccacatgatcaagaaatatggatgccatactgtccatatattaattggaatctatactttcacatattaagcctatcctgaagccgggcgaactgcgactagagtgcttggcgacccgggaattaaatacggacctgtaccttcaggcctacc

SEQ ID NO: 40550 - DNA, 372 bp, Glycine max
  unsure (1)..(372): unsure at all n locations
  Clone ID: LIB3065-011-Q1-N1-B2
gaaggatctcaaaagtggttgcaaaatcctcataggaggtgatagcagatgggcaagaataatgctgttctcttaacactggtttgttgtatgtgttcataaacaggttagggtccatgtcaaaaccttattgtcccacttagtatgtattatattaaatgattgtaagagtttcagagttatgctgcccttttgcaatgtattcttttgatttacttaaacttgtttccaaaataggagtaataggatattctgttttctttctctttaaggtttatgtgttcaacacatgcaataaatctaaagggtatggtcattattggccttaacgaanaaaaaaaaaaaagggcgggccgccactagtgagctcgt

SEQ ID NO: 40551 - DNA, 196 bp, Glycine max
  Clone ID: LIB3065-011-Q1-N1-B5
ctgggattaattttttgctttccagtattgggaattgagaagtaggacaacgggatttgatttttcagataaagatgtactatgattctgtcatccaccaacaaattacagaatcatagtacatctttatctgaaatttgttggtggatgacattcaatctgtctaataataaaattctatactttcacatttaaa

SEQ ID NO: 40552 - DNA, 210 bp, Glycine max
  Clone ID: LIB3065-011-Q1-N1-E6
ctggatgaggcgtcaatgtgtcattctgatccttccgtccagcattctctaattgccttatatactaatccaccatcctccaaatagatcagcgcttttgcaaccattgattcgagtgattcatagtccactctgctcatctgctctctcttcttacagcctacgactcaggaccgccgccgactagtcgagctcgtccacccgctaatt

SEQ ID NO: 40553 - DNA, 420 bp, Glycine max
  Clone ID: LIB3065-011-Q1-N1-G3
caccaatgttgccgtaaacatgttgttcacttttgctattgctcaagttttcctagccatgctttgccacttgaagtttggccttttcttcttctttgctgcatttgtgctcatcatgaccctcttcattgccctgttgttgcctgagacaaagaacatccccattgaagaaatgcatttagtgtggaggtcacattggttttggtcaaagattgttccacaggttgataatgatcgcaagccaactactgctcagagttgaatcaaggatgcccattatactgtatgtatatgtgtatgtatatgtgtatgtatatatgtatatgtatatatatatatattgtatatatatgtgtgtatatatatatatataaggactgaaaatgaaaagaaaaaatagagcttgagtccctatgtatc

SEQ ID NO: 40554 - DNA, 286 bp, Glycine max
  Clone ID: LIB3065-012-Q1-N1-A6
ataaataaccattgatgtgatttagttcccattatgtgctggtttccgtatattatgtgttgtttcttgattgtagttttcgtagattcttcgttccttgttgtaatgttcttctaggcaatgaattgcatatttcaaacattatccaaaacaccaaagtgtcacaatagctcgagccttctcttgcattttgatttcaatcaaggaactggctcgcattggtagattaaaaaaaaaaaaaataaaaaaaaaataaattaatataaactaaaataaaaaaaggagt

SEQ ID NO: 40555 - DNA, 204 bp, Glycine max
  unsure (1)..(204): unsure at all n locations
  Clone ID: LIB3065-012-Q1-N1-A7
agtagatcgacttagcaactgaagaagcaaggttaagctgcagcagacacagatcgacagagcagggtgttaaaaatatagttaattaaatctgtgtatcattaattatggtttgttatgtaatatatatttcaaacaaagttgtgagatgtcttaagtataaattatgaacagaaacgataataactctaaattatgttgcan

SEQ ID NO: 40556 - DNA, 66 bp, Glycine max
  Clone ID: LIB3065-012-Q1-N1-F6
aaaaaaaaaaaaaaaaaaaaaacaaaaaaaaaaaaagaaaaggaaaaaaaaaaaaaaaaaaaaaaa

SEQ ID NO: 40557 - DNA, 291 bp, Glycine max
  Clone ID: LIB3065-012-Q1-N1-G2
gtgcaagtcactgagaagttgctagctatcaatctcaactttctggcagccctgataatattccaaatgtatatcacgataggcttatcaggcaagaccctttcagattccatttaggggaaatagaatttgctaccttcttttccattcccccttttttgtacagtgcactctttttaccttaattcaggatttaaggtgtgtgtgtgctggtgtttgttaatttctaacatgtgcaagtatataatataatacaatggagtggatttcttattaaaaaacagaaactgc

SEQ ID NO: 40558 - DNA, 402 bp, Glycine max
  Clone ID: LIB3065-012-Q1-N1-H1
aaaaaaaagcctcgtctctcgtgccgattctgcaggacaattgcgttcacccaacctaattgcaattagtgtataagatgagtacgttggatgcaacaagggctgaacttggtcttcttgttttatatttgggcaaggctgaagcaagggacaaaatatgcagggcaatacaatatggttccaaacttttgagtaacggggaacctggtactgctcagaatgtcgacaaaacaaccagcttggcacgaaaagtcttgcgtctttttaaagattgtcaatgacctacatgctttgataagtccaacaccacagggcacttgcctaccgctaattctgttgggaaagttcaagaatgcactactctgcactttcttggttcttgatcaatttgagtggcttggc

SEQ ID NO: 40559 - DNA, 185 bp, Glycine max
  unsure (1)..(185): unsure at all n locations
  Clone ID: LIB3065-013-Q1-N1-A1
tcggngaattccaattccacattttcaagaaataaggaggcaaaaatgttgatatatgaattggaattatttgttttcttattaggcctatcctgaagccaaaggaaatgagatcggaattcctcggggaattccaatttcacattttcaagaaattaggggggcaaaatggtccttttttgaat

SEQ ID NO: 40560 - DNA, 161 bp, Glycine max
  Clone ID: LIB3065-013-Q1-N1-A11
tatgacgtcgcctgccctcagcctcgaattcgggttcaggtttttttttttttttttttttttttttttggataatatttggctctgtacttctcattgatcgattatggccgaatgccaatcgaaattagtatatcaatgaagtcttctgtttacattaa

SEQ ID NO: 40561 - DNA, 258 bp, Glycine max
  Clone ID: LIB3065-013-Q1-N1-A2
cccgtttgagtcccagaactgcctatacatagtcgcggcagagaccccaaccaagatggccgttatcaagtatctggggtaaaatgagactaaccctcacatcttacacacatacacactatcccaatccaactctcgaaccgtctcacctgcctactaactccactaactcacattaattccctttcgatcactatcccatgtccatcaatgccacctgtcgtacaatcttcattaatgaatcaggcaacacacctg

SEQ ID NO: 40562 - DNA, 299 bp, Glycine max
  Clone ID: LIB3065-013-Q1-N1-B11
aatgccgcattacactctatctcataatgcacgccttgcattcctatttattcaacatctcactcatattcagccaccatattgaccacatgatcactatatcattctcttactcactgcactcaaacattccggtcctctactcgttatcatgtcaatcacagacttaattacggacctgtacctacacacgtaccaactctccatataacatgtcatcttacagcttggcgtagtcctggacctagctaaatgccgtgttaaattcgtatccccatacaattccacacaacatacaa

SEQ ID NO: 40563 - DNA, 172 bp, Glycine max
  Clone ID: LIB3065-013-Q1-N1-B9
gccaactctttgtattataatgaatgtggttgtcctaaggaggattgggttggatcattttcgttcattacactttatctcattattttcggcttgaagtcctattaattcaacatgtaactcatttttagccacaaaattgacaacatgatgagcataagattttcttaaa

SEQ ID NO: 40564 - DNA, 300 bp, Glycine max
  unsure (1)..(300): unsure at all n locations
  Clone ID: LIB3065-013-Q1-N1-D1
caaactcccaaagtggcgaagcaagacaagaagaaaaagcgacgcggacgcgctcacaagagaatgcaatacaaccgccgattcgtcaccgccgtggtgggattcggaaagaagcgtggaccaaactcctcggagaagtgagggaggcgtgttgaagatcatggtttttcttagtttgtgaaatgtatcacttgttttgatttgattgatgaactcaaacttttatgatagttcttattatggttcaatgaaggagttttttgctaaaaaaaaaaannnnnnnnnnnnnnnnnnnnnnnn

SEQ ID NO: 40565 - DNA, 171 bp, Glycine max
  Clone ID: LIB3065-013-Q1-N1-D10
gtaattcggttattggattcatgctacatgagtgtgtaaagaggtaatgggggtgatgactttcttggtcattgtcgtggctttgtgatttctattgcaaatgttgtcttgtaactttgttgtattttcagcaatatatgatatatgatatctatcttaatttctatctta

SEQ ID NO: 40566 - DNA, 469 bp, Glycine max
  Clone ID: LIB3065-013-Q1-N1-F12
ctatgacgtcgaatgcacccttccttaacctcggaattggcttcagccaaaattaaaattcattcaagttaatcccttcatgaaggttggctaagggaatgttggcttaagccctttcgtttgcccttcttttaactgcattaaaaaccaaaaaggctaaatcatggcgtaatggtcccggttggcttggaagcctaatagctgactatggggtgcctcttatggcccaagttggaacaggtgtatcctacataccagctggaagtgttccacatggtatttcaaggcgtctgtttagcccaaatccatggtcaccgggtgcatatgagaattggactgttattaaggatatggttcatgttcctgttgtgtacataatcggagcatttatcccagcaaccatgattgcagtactttattactttgaccatagtgtggcttcccagcttgcccagcagaaagagttcaa

SEQ ID NO: 40567 - DNA, 418 bp, Glycine max
  unsure (1)..(418): unsure at all n locations
  Clone ID: LIB3065-013-Q1-N1-F9
tttttctctctctacactcaccaatggacgactctcacaacaggaagcgacttcgccaccactccccaaagcacccccgactttgttctaactcctccgacactcacccacttgactcgccccagtttcaactctcccgcgtcgacccggaccttctcaacatgctcaatgatgccgagaacgtcacggagcgtgaccctaccatgcagggtcttgactctgttattaagagtttcgaggaagaaatactttctccgcttccgaacccgaatctagcgtccgaagcagaggtgtttaatccgaacctagggtacttgttggaagcatccgacgacgagctagggttgccgccggcggtagcgcccggcgaggatgcgacaaatccncaaacacttgattcgggccgggttggatctga

SEQ ID NO: 40568 - DNA, 204 bp, Glycine max; identical to SEQ ID NO: 40547
  Clone ID: LIB3065-014-Q1-N1-A12

SEQ ID NO: 40569 - DNA, 308 bp, Glycine max
  Clone ID: LIB3065-014-Q1-N1-C7
ggattccaattccacattttcaagaaataaggaggcataaatgttgatatatgaattggaattatttgttttctcattaggcctatcctgaagccaaaggaaatgagatcggaattcctcggggaattccaattccacattttcaagaaataaggaggcacaaatgttcatatatgaattggaattatttgttgtcttattatgcctatcctgaagccaaaagacatgatatcggaattactcggcgaattccaattccacattttcaagagataaggaggcaaaaatggccatatttgaataggaat

SEQ ID NO: 40570 - DNA, 97 bp, Glycine max
  Clone ID: LIB3065-014-Q1-N1-F12
ggtataaattgtgggaactggggagggtttatgttctatgttgttttgtactccaatcttttatgaatgtactggggaaacttgttttgtttgatta

SEQ ID NO: 40571 - DNA, 372 bp, Glycine max
  unsure (1)..(372): unsure at all n locations
  Clone ID: LIB3065-015-Q1-N1-E1
tcggggaattccaattccacattttcaagaaataaggaggcaaaaatgttcggtgtgaattggaattatttgttttcttattaggcctatcctgaagccaaaggaaatgagatcggaattcctcggggaattccaattccacattttcaagaaataaggaggcaaaaatgttcatatatgaattggaattatttgttttcttattaggcctatcctgaagccaaaggaaatgagatcggaattcctcggngaattccaattccacattttcaagaaataaggaggcaaaaatgttcatatatgaatnggaaattattgttttcttattangcctatcctgaagccaaaggaaatgagatcggaattcctcgg

SEQ ID NO: 40572 - DNA, 231 bp, Glycine max
  Clone ID: LIB3065-015-Q1-N1-E10
ccgatatcctcttctattagctacacactggtactaatatcgtggcattattgctgtgtactgggctgtattataccggggtggactgataggtttaacttcatgctgtctaagatggttatcggcacatagattgaactcagatactaagccggtcgcgtagagattgatttatgatgagactaatgatttaaagaacttatattaattccagaagacttattgctcacc

SEQ ID NO: 40573 - DNA, 54 bp, Glycine max
  Clone ID: LIB3065-015-Q1-N1-E8
aaaaaaaaaaaaaaaaaaaaaaaaaaaaaaaaaaaaaaaggggggaaaaaaaaa

SEQ ID NO: 40574 - DNA, 257 bp, Glycine max
  Clone ID: LIB3065-016-Q1-N1-A11
gagcttctgctacaatctagcgtctagtgatcctctaaacactccggacaacaggtccccaccgtacctgcgaacactccaacttttcctatcgcgattctgattatagctaaccctattcatacacataactacaccctgtctgaaaatgatgtccactcacaatttcacacaacatactatccggaaccatacagtgtcacccctggatatcctaatcagttatctaacttacacttatctacttacactcactg

SEQ ID NO: 40575 - DNA, 73 bp, Glycine max
  Clone ID: LIB3065-016-Q1-N1-A6
cttccatgtatatttgagagtggctttgatttcagtgaatgtgggcccttttgtattaaaaaaaaaaaaaata

SEQ ID NO: 40576 - DNA, 350 bp, Glycine max
  unsure (1)..(350): unsure at all n locations
  Clone ID: LIB3065-016-Q1-N1-B2
tcggtgaattccaattccacattttcaagagatatggaggcanaaatgttcaggtatgaatcggaatctattgtcctcttattatgcctatcctgaagccaaaggaaatgagatcggtacttctcggagaattccaattccacattctcaagatataaggaggcatacatgttcatatatgaatgggaattacttgtatcattattaagcctatcctgaagccaaatgaaatgagatcggaattcctcggagaattccaattccacattctcaagaaataacgaggcagatatgttcatatatgaattggaattattagttaacttattaagcctatcctggaacccaaa

SEQ ID NO: 40577 - DNA, 261 bp, Glycine max
  Clone ID: LIB3065-016-Q1-N1-B4
tccattgaacatggcaagtttagaggaaaagggaatccactttgattcccagatcatgatgtgctcttcaaatttttggaaaccttctactgaagcccaaattagagatgacatggcttttaaaaaatagaagacatgttttagataacagttgaacctaaaacctggagtggaatatgatgagagcgattttaaccaaataaaaataaaaaaaaggccggcgccgaattagtgagctcgtcaacccggaaattaattccg

SEQ ID NO: 40578 - DNA, 261 bp, Glycine max
  Clone ID: LIB3065-016-Q1-N1-C10
gcatgcacgcgtacgctagctgatcctatcgctggaggccaacacgacattatgaagacaccacgaggcgtaaatgatcatagatgaagggcaaggatgaccgatcatataaggcctatacagaagccaacggatatgaaatcgtgcttccttggggaacttcaatagcacatttccaagagctaacgaggccctactgtccatatatgacttgccattatgatgacacctaatacgcctaatctagatccatacgcaatg

SEQ ID NO: 40579 - DNA, 347 bp, Glycine max
  Clone ID: LIB3065-016-Q1-N1-C11
tatactgaagccaacggaaatgaaatcgtacttcactcgcgaactccaataccatattttcaagaactatcgagagcacaactgttcatatatgacttgccattatgagaacacctattacgcctattctaaatccaaacgcaatgagatcggaattactaaggaaattgcaattccacatttacaagcaatatggatgcaaaacttttcatatatgaattgatcacatatatgctcttattaatcctatactgaatccaaatgatatgagatcagaattactcgtagataccgagctcaaataatctatgtgagacatattaaattcgtaatcatatcatatctga

SEQ ID NO: 40580 - DNA, 413 bp, Glycine max
  Clone ID: LIB3065-016-Q1-N1-D3
gacaaaggcagcaaatgattcgggtgcggagctgcagaagcagatgggaaggctctctgctgagtttccacatgacaacaaaagggctgccaaaggcagagccaaaatcaacaccaaagttggcataggtggtggtgtctattcagcttcacacagagtgactccactgaatggaacatatgagtatgggttagctgcaccatatgactatcttgttgacaacatgggtgactattattggacatgatctatatggaatgatctgcaagatgctgcattcaacttggctatacactattttgtgctggttttttattttgcccgcctaaatgcttggtctttttgtactacttttttaaagttacaagagatcaaagtcattttttgcgttgtcaagatatcttgtgaatagc

SEQ ID NO: 40581 - DNA, 399 bp, Glycine max
  Clone ID: LIB3065-016-Q1-N1-E3
tgcgtcccttctaaggaccttgatggggccggagctttcggcggcgttcggagtgagcgaggacacgttgcggcgcgctgttgatgctcagcatgaggctgtgatactgccatcagcatgggctgcaccaccggaaaatgcagggaagctgaagatggaagaagagccaaatgctattagaagctttgccaatgatgtggttatggatgttttttaatttgaacacttgatttggaataggggttatttggtagtgctagtgcctagtggaattctgtgttgagttttttgttctttatatttagttgagatgtgtgttgtgttctcgagttgtgaataaaatctactttttttgtccaaaaaaaataatattcgatggtgtcaacggacatgccgatt

SEQ ID NO: 40582 - DNA, 179 bp, Glycine max
  Clone ID: LIB3065-016-Q1-N1-E7
cttctatcgagatcttcaactaggtatcttcacaacctctattttggggacttgggccacaatgtcttgcagcttggacactttcaatgttaagtataattgaactatactcacgtcaaaattctctccacttgcacaaattacatgcatgctgaaactacactaatagccaaatgcta

SEQ ID NO: 40583 - DNA, 457 bp, Glycine max
  Clone ID: LIB3065-016-Q1-N1-F1
attcccgggtcgacccacgcgtccggtaatgaaaaacaagtgctaagaagctccgtgtctctattctcaaacatgtagcaccaaacggaagttggcgtccaagttttataacactaatactgcatataatattattataatatacataacaacagttattgatattgttgtgattgtgtgtgattttggtgtcgtccctttttcttatgtttaaggttgtacggagtttatgtgttgattcaattcgtcgataagaaaccttagtttgatattttgattggttctgtggagagtttttttttctttggtgtggattttggtttgtgctgtttttggttgtgaataacaatggccgatgaaggaaacaaaagcaataacttctattcgatcttggggttgaagaaggaatgcactgaaatggaactaaaagatgcttataggaaacttgcaaaggaat

SEQ ID NO: 40584 - DNA, 263 bp, Glycine max
  Clone ID: LIB3065-016-Q1-N1-G1
gtgttattttaaaaaaaaacacacacttcacacatcattacgacaattaaaagaggtgtggaaatgatgtgtgaagtgtgtgttattttaaaaaaaaacaagaagtgccgatggtcagagctgaaaaacgcgtgcaatcgacgtcatgagcacaattgtagagaagatactaaccgataaaaaaaaaggggcgaccaccaattagggagctattggacccgggaattatttccggaccggtacttgaaggcgtacaagttttc

SEQ ID NO: 40585 - DNA, 92 bp, Glycine max
  Clone ID: LIB3065-017-Q1-N1-C1
actaaaaaactcataaacccataaattaattccctacctttaccttcaaccataccatctttccctatagtgagtccaattatatcttctct

SEQ ID NO: 40586 - DNA, 264 bp, Glycine max
  unsure (1)..(264): unsure at all n locations
  Clone ID: LIB3065-017-Q1-N1-E3
ctaacctcacacattcttccactccncttcgttctattatcgacaccaccactcttncaccccgctcgttttttataaacttactcgccaccacaatttcctaccattcntacantctcatactttatgtaacaactccaatcaccaaccactttttacccaccatttcttataccacccatttttaaatctaattcacctccatcatcacctcttccacttttttccccttttatccacaaacatatcttcacttcatcacca

SEQ ID NO: 40587 - DNA, 277 bp, Glycine max
  Clone ID: LIB3065-017-Q1-N1-E5
tcggtgaattccaattccacattttcaaaaaatataagagccaaaatgggcgtgttttaatttgaaataattcgtttcttaataaaccctttcttgaacccaaagaaaataaaaccgaaatccccggggaatttccatttcacattttcaaaaaataaagaagcaaaaattttcatatattaattggaaatatttggtttcttattaagcctattcttaaacccaaagaaattaaatccgaatttcttcgggaaatcccattccacatttttaaaaa

SEQ ID NO: 40588 - DNA, 330 bp, Glycine max
  Clone ID: LIB3065-017-Q1-N1-G5
tcggggaattgcaattccacattctcaagaaataaagaggcagaagcggtcatatgtgaacaggaattctaggttgacttattaggactatcctgaaaccaaacgaaatgagatcggaattcctgggggaaattcactgccccatttccaagaaatgacgcggcaaagctgttcatatatgaattggaattatttgaatccttattaggcctatcctggagccaagggaaatgagatcggaagtgcttatggaattacaattgcacattgtcaagaaataacgaagctaaaatgtgcatatatgaagtgggaatagttggtttcttatta

SEQ ID NO: 40589 - DNA, 123 bp, Glycine max
  Clone ID: LIB3065-018-Q1-N1-B10
ccttaagtcagttctggcaaacatgcatggccctgctcttacttacactctggctatttgtaaatctgtacagctctttgaattatcgaaatgatctacgcactgtgagttgttttaaacgta

SEQ ID NO: 40590 - DNA, 146 bp, Glycine max
  Clone ID: LIB3065-018-Q1-N1-B5
tcactcactgacttcctacaccactttcaccattttcactcaacttcttcataacgcttattttgaaaaatatccatatcatgatactccctttacatctcataactactctataatattctattcacttaactaaaacacattac

SEQ ID NO: 40591 - DNA, 167 bp, Glycine max
  Clone ID: LIB3065-018-Q1-N1-B7
tgaaattctgagttctaacgccactaaccctatgctgacgcgacttcttgagaacgtgtaagaggctcaaatatctggttgatgagtgtccttttgcatttgtgaactagtatgtaatattttattcacttaaataaagcgcattactatgtgcaatgagtgtgttt

SEQ ID NO: 40592 - DNA, 146 bp, Glycine max
  Clone ID: LIB3065-018-Q1-N1-C1
tgaaattctgagttctaacgccactttccctattctgactcgacttcttgagaacgataagtgggtcaaatatgtggttgatgagtgtcctcttgcatatatgaactagtatgtaatattttattcacttaaataaagcgcattac

SEQ ID NO: 40593 - DNA, 96 bp, Glycine max
  Clone ID: LIB3065-018-Q1-N1-C10
gccgactagtgagctggtttacccgagaatcaatgctggaccggtacatgaagcgtgacaagctttgattatagtgagtcgcattatagcttgcct

SEQ ID NO: 40594 - DNA, 368 bp, Glycine max
  Clone ID: LIB3065-018-Q1-N1-E11
ctgggaaccagcctgcgggttatgacacccttgactatgcaaaagggtaccttgccgataaggcaagggatgtaaaggagagggcaaaggattatggaagttatgctcaaggtagaattaatgaggccacacaaggagcttattagtcatgcctgcttatatatgcatgagtgtatgaggttgaattgaaggtggtgatggtggtggtacccttgtggatttgcatgttcaagttctgcagtttattttgaatcttgtttgcattgctctatgtagttctggtttttgtaatctcgtttgtttttgaagctaaatcgttcgccttatttgtgtaaccatcatgttaataaatctcttttgtagctaaa

SEQ ID NO: 40595 - DNA, 286 bp, Glycine max
  Clone ID: LIB3065-018-Q1-N1-E6
ttacattagctctggcaggcttctactcctcttcgttctatcatctacaccaccactctttgacccatttgatcttttctagatttaatctcctctacaattttctactgctcgtgcatgtccagactttatgtggcaactccaatcatcaactacttttttccctccagtttttgttccactctgtttttaatttaattcaacttctccatcgtcatttccacttttttcctcgttttctcataaactttgctttcctggttcaccactcttgaaaccttcttat

SEQ ID NO: 40596 - DNA, 377 bp, Glycine max
  Clone ID: LIB3065-018-Q1-N1-E9
ggtcctgaattcccggatcgacccacgcgtccaaaaaaacgcacaggttgaaattgatgctctatccatacgtctcaacatcaatgggtgcaaagtgatcatatcccttggtttcagggctccagcatgtgtccgagtcgcaaatgaacttgcaagaggaagtgccaaagctgcaaagatctctattattgactcagtgctcacatcattggccatcgaattccttctgcttatattcttcttatcttttagagaaagacttgcatatatatctacctcaaataaagacgtcgcctttgctgttggggatttgacaccttcgacgtcggtctctatattactgaacagtgttcaacctgtactctcacgagtcgcta

SEQ ID NO: 40597 - DNA, 78 bp, Glycine max
  Clone ID: LIB3065-018-Q1-N1-G4
aaaaaaaaaaaagattaaaaaaaaataaaaaaaaagaaaaaaagaaaaaaataaaaaaaaaaaaaaaaaaaaaaaaaa

SEQ ID NO: 40598 - DNA, 74 bp, Glycine max
  Clone ID: LIB3065-018-Q1-N1-H2
aaaaaaaaaaaatatttactaaaaaataatattaaagacataatagaaaattataataagaaaaaaaagaataa

SEQ ID NO: 40599 - DNA, 449 bp, Glycine max
  Clone ID: LIB3065-018-Q1-N1-H5
cccaatcacgtaatatctccatattccaccaaaaatgaatatcagcatcttctggactctctaactgttatgttccttcaccacctcatacctaccttcatccatcacttatttaatactccataataaaaataaccctcttgaaaatgctgccacatattatatcttgtcagacataacatcatttgatggaataagatcaaccccaactttaaattaaatatgccctctcactgtgatacaatctctcaatgagctctacaaatggattgcaacaatcatctcgtccccatatcgaatccgttttatcgccgaatgccatcctttgagccttaagttcgattcatttccacttataatgctgtctgttggaattcctacctaatggtctcttttggaagatctaccacaaagacccttgctttgttttaaaaaaaatttttgtttta

SEQ ID NO: 40600 - DNA, 86 bp, Glycine max
  Clone ID: LIB3065-019-Q1-N1-A1
aaaaaaaaaaaaataaaaaaaaaaaaaaaaaaaaaaaaaaaaagggaaaaaaaaaaaaaaaaaaaaaaaaaaaaaaagaaaaaaaa

SEQ ID NO: 40601 - DNA, 95 bp, Glycine max
  Clone ID: LIB3065-019-Q1-N1-A2
caactagggagctccccaacccggaaataaattccgaaccggaacctgaaggcgtaccacctttccctatagaaagccgtataaaaacttggcgg

SEQ ID NO: 40602 - DNA, 474 bp, Glycine max
  Clone ID: LIB3065-019-Q1-N1-A5
cgacccacgcgtccgcccacacattttaccaaatacttttataggttttatgcgtcccttctctctttgtcttgcgccatattttccaaccaaaataattattaaaaccaaacgtagctaggcaccacttctaggaatggcaagtgagatatttcttgcccttctgatcacaacctttgtggttgcagcctctgctggtaacttcaaccaagactttgagataacatggggtgatggtcgtgccaaaatcctcaatagtggggaacttctcaccttgtccctagacaagacctctgactctggatttcgttctaagaatgaatacttgtttggaaaaattgacatgcaactaaaactcgtgcctggtaactctgcaggcacaatcacagcttattatctatcttctcttggggatactcatgatgaaattgattttgaatttcttggtaacttgagtggtgatccttatattct

SEQ ID NO: 40603 - DNA, 311 bp, Glycine max
  Clone ID: LIB3065-019-Q1-N1-A7
aaaatttaaaaatttaaaaaaaaaaaaaaaaaaaagggaaaaggggaaaaaaaaaaaaaaaaaaaaaaaaaaaaaaaaaaaaaaaaaaaaaaaaaaaaaaaaaaaaaaaaaagggccgccccccaactagggaccccgtcaacccggaaataaattccgacccggaccctgcaggcgacccacctttccctataggaagtcgaataaaacctgggcgaaaaaatggaaaaacctgtttcctgtgaaaaattgttatcccttaacaatcccacacaaaatacaacccgaaaccataaagtgaaaaccctggg

SEQ ID NO: 40604 - DNA, 134 bp, Glycine max
  Clone ID: LIB3065-019-Q1-N1-E10
cgctactggagcgacattcaccaccctttttagattctaatccaggcgctattattccagagcacgaaaggtatttcgccaatctaaggtgtcaacgtaaaagccgcttttccttctcgcgcgaaatgtaagct

SEQ ID NO: 40605 - DNA, 352 bp, Glycine max
  Clone ID: LIB3065-019-Q1-N1-F11
aacgtacgacataacatgttagaattttgccagcgatagggcagaaaccgggataaggtggtttagcaggcgggatacgatatgctaagagacactgacgtgcattacaaaattggataatgatgctggatgtagattaaccagactggattgtctatataccaggcgctatcatgtgatagctcgatagggcgcgcgccagttgatagtgtgaacgtaaatggagatttgtcttcgtgcgtgaattgcaagagctggattaatgaatatagctaaggctgtagagatgtgagttgcgtatagggcgctctttcgaagcttggctgagtgaactaatgcgctggtgagttcg

SEQ ID NO: 40606 - DNA, 71 bp, Glycine max
  Clone ID: LIB3065-019-Q1-N1-G9
aaaaaaaaaaaaaaaaataaaaaaaaaaaaaaaaaaaaaaaaaaaaaaaaggaaaaaaaaaaaaaaaaaaa

SEQ ID NO: 40607 - DNA, 172 bp, Glycine max
  Clone ID: LIB3065-019-Q1-N1-H8
ccgggtcgacaaaggtaccattaccttgatgtgcaaaacacaaatagtgcctgaaaatactagaaacgatacgcgccttcactatgatgatacaccatgtgtaatcatggacgatcgctattgcgctttgcacgcaagaccttgactatcacctggatacctgctcgatctt

SEQ ID NO: 40608 - DNA, 319 bp, Glycine max
  Clone ID: LIB3065-020-Q1-N1-A10
tcttgaagagcattcactaagttgattgttgtgttgtagtgtgatttactagacttgcctgctgttacacaactggagaaggatgccaaatatgctctgttatatcagcttcttaagatttttcttacccagaggctggatgcatacttagactatcatgctgccaattccaccttgttgaaaagttatggtaagcactgtttatgaatgattatcatttatcaatagttacatatacagggttcttttctactttatgttactatctaaatgttttgatgttatgatgctcttttaggccttgtgcatgaagaatgca

SEQ ID NO: 40609 - DNA, 356 bp, Glycine max
  Clone ID: LIB3065-020-Q1-N1-A11
ctcgagccgctcgagccgtgcgattatgctagttttgatggtttgattaccaagcaagttatgagcaaaatggcagaaatgataaacagtctttgtggtggtgatgcaaaattgatgcgtgaaaggacacacctgctgttggcttgttgttcaaggatggcaatttgtaagaaagatgtttggagagttgaatgtggaatcccttctggatttccgctcacagttatttgcaatagcatttttaatgagatgctcattagatatagctatgaaaaattactgcgccaggctagagctccaagcatgtttttacaatccttcaaaaattttggttctttgtgtgggtatggggatga

SEQ ID NO: 40610 - DNA, 336 bp, Glycine max
  Clone ID: LIB3065-020-Q1-N1-A12
attctgtccttgtccttgtacaggttactagatatagttgaataatgatgctaacaaaacagtgacttgttcttaaaaccaatttttttatgcagtgccacaacggtcacacactttgctcaacttgcaagacaagggtacacaatcgatgcccaacttgccggcaggaactcggtgatataaggtgtttggcattagagaagatagcagaatcacttgaactgccttgcagatacatttctcttgggtgtccagagatatttccctattacagcaaacttaaacatgaggctatttgtaacttcagaccatacaactgcccttatgccgggtcag

SEQ ID NO: 40611 - DNA, 266 bp, Glycine max
  Clone ID: LIB3065-020-Q1-N1-B10
aggaaaaccatcgagaaaccaaaaaccaaaatcaatttagaggaaaaagttggaagaagcatggattctaggcggcgtggtaaaaacgcatctatgcaacgcaagttgcaacaacttcgatcggttacaaattccagtgctgtgaacaaagcctcaattattgtggatgccaccagatacatagaggagctgaagcaaaaagtggatggattgaactcaaagctaggaaccgcggaatcatcaatctcccaagacgaactacccat

SEQ ID NO: 40612 - DNA, 370 bp, Glycine max
  Clone ID: LIB3065-020-Q1-N1-B11
cattcttgtttgcttcccaagtctctcgaagcatctttctttctcttcctgcagaagctatccgtgttacttgttcccaagtctccaacaagcaaagtacatggttgatttggaaatccaggtccccagcgcattcgacccgtttgccgaggcgagagaatcagatgcccccggggcaaaggagtatgtgcacatacgaattcagcagaggaatggaaagaagagtctgacaacagtgcaagggctgaagaaggagttcagctacgagaagatcctcaaggacctcaagaaggacttctgctgcaacgggactgtggtgcaggacaaggagcttggcaagattatccaactccaaggcgaccagcgcaag

SEQ ID NO: 40613 - DNA, 333 bp, Glycine max
  Clone ID: LIB3065-020-Q1-N1-B12
cattcttgttctctttccaagtctctcgaagcatctttctgtctgttccttcagaatctatgggcgttactcgttcccaagtctccaacaagcaaagtacatggttgatttgaaaatccaagtccccagcgcattcgacccgtttgccgaggcgagagaatcagatgcccccggggcaaaggagtatgtgcacatacgaattcagcagaggaatgaaaagaagagtctgacaacagtgcaagggctgaagaaggagttcagctactagaagatcctcaaggacctcaataaggacttctgctgcaactggactgcggctcatgacaaggagct

SEQ ID NO: 40614 - DNA, 378 bp, Glycine max
  Clone ID: LIB3065-020-Q1-N1-B9
tcggggaattccaattccacattttcaagaaataaggaggcaaaaatgttcatatatgaattggaattatttgttttcttattaggcctatcctgaagccaaaggaaatgagatcggaattcctcggggaattccaattccacattttcaagaaataaggaggcaaaaatgttcatatatgaattggaattatttgttttcttattaggcctatcctgaagccaaaggaaatgagatcggaattcctcggggaattccaattccacattttcaagaaataaggaggcaaaaatgttcatatatgaattggaattatttgttttcttattaggcctatcctgaagccaaaggaaatgagatcggaattcctcgggggta

SEQ ID NO: 40615 - DNA, 376 bp, Glycine max
  Clone ID: LIB3065-020-Q1-N1-C10
agcgatagctgataagagagataccaacaagaaaagaaaaaaagaagagttgagattccctttgaagaaaagatggcatcccataggcaaagctatgaagctggtcaaactaagggccgaactgaggaaaagacgaaccagacgatgggcaatattggagagaaggctcaagctgcaaaggagaagacccaggaaatggcccaagctgcaaggagaagacccaacaaacagcccaagctgccaaggacaagacttgcgacacttcccaagcggcaaagggagaagacccaacagaatacaggagctgctcaacaaaagacctcagagatgggccagtccacgaaggaatcggcccagtcagggaaggacaacaccc

SEQ ID NO: 40616 - DNA, 234 bp, Glycine max
  Clone ID: LIB3065-020-Q1-N1-C7
gagaaacaaactagtacaatatgtaagctgaaatacaaatatattcataaattctgagatgcaaataaaattgaattacatcaacaacaataataataataataacatacttggatgaacatcaaagcatagacaacacctagaaggctagaagtcattctcccaggccaagcaagaaaaaaaaaaaaaaaaaaaaaaaaaaaaaaaaaaaaaaaaaaaaaaaaaaaactaaaa

SEQ ID NO: 40617 - DNA, 349 bp, Glycine max
  Clone ID: LIB3065-020-Q1-N1-D11
agaaatcagcacaccacacctccttggctcctccggcatggccaaaaagcgcaagcccaagaagaaaccccacaatcacaatgtaaacctaaaccaaaatcaaaaccaaaaccaaaatcaaaaccaaaacgtcgccgctttgatttcgcgagtaacacatgcagtacagtccttcctctcccaaaacgacctcgttctcctaccttcccaatccctccgtctcgaatccctaatctcatccatcatctcccactctccctcgccgcctctctcttcgccgcacagcgactcctggttccgccgctttcgctccgtctccgattccctatggctccacgccttccgcatg

SEQ ID NO: 40618 - DNA, 288 bp, Glycine max
  Clone ID: LIB3065-020-Q1-N1-D12
aattgtttttcttactagagttgatccttttccagtagctctactggctgttctttttggcgttaagaatgaaattctgagttccaacgccactaaccctatgctgacgcgacttcttgagaactgtaagagtctcaaatatctggttgatgagtgtccttttgcatttgtgaactagtatgtaatattttattcacttaaataaagcgcattactatgtgcaatgagtgtgtttaaattttaaaaaaaaacaaaaaaaataaaaaaaaaaaaaaaaaagaaaaattt

SEQ ID NO: 40619 - DNA, 248 bp, Glycine max
  Clone ID: LIB3065-020-Q1-N1-D2
gacagatcagatattttacttcacccatttttattagtcttcgttacccaggccatttgtattctacagtatcttctattttgtgcttcgtgctctggaaataaataagataataaaataaaggaatgggtggatcttctattttcttcttgtacgtatttcaagtatgaactaagcttatgcttaactttctgtatggtgtaaagtatatggacattaggatataataattgtgctttattaagaaa

SEQ ID NO: 40620 - DNA, 358 bp, Glycine max
  Clone ID: LIB3065-020-Q1-N1-D9
gaaaatttatttctcgttaaagattgtacttttttggtaatactctagctagcggtggcagcgaattgtttaggctcgcgccaccggcgataagcatcgaggggtagttacctgttaactacactgactaagtcactcgttcgaaaaagaacatatcctcttcgttggagtgttacatcactcccaaggggtccaagacccttgccctcattatgggggttatcgatggatcatcatctgatgggcacaccatgccatggacgcgatgcgtcaaaagaaacattccatccacagttataatactgcctgagggattctcaagcattgctaaaatacatggtctgagattacgcggcga

SEQ ID NO: 40621 - DNA, 324 bp, Glycine max
  Clone ID: LIB3065-020-Q1-N1-E10
gggagtcagagaaaccctaggtaagaagaaaagatgccggctggtcatggtttgagatcccgcaccagagattccttctctcgtcctttcaggaagaagggaaccatcgccctcaccacatacctgagaacctaccacgtcggcgactatgttgacgtcaaggttaacggtgccgttcacaagggaatgccccacaaattctaccatggccgcaccggacgcgtctggaatgtcaccaaacgtgctgttggcgtcgaagtcaacaagcaggttggcaacagaattataaggaagaggattcatgtgcgggtagagcatgttatg

SEQ ID NO: 40622 - DNA, 376 bp, Glycine max
  Clone ID: LIB3065-020-Q1-N1-E11
tcggggaattccaattccacattttcaagaaataaggaggcaaaaatgtgcatatatgaattggaattatttgttttcttattaggcctatcctgaagccaaaggaaatgagatcggaattcctcggggaattccaattccacattttcaagaaataaggaggcaaaaatgttcatatatgaattggaattatttgttttcttattaggcctatcctgaagccaaaggaaatgagatcggaattcctcggggaattccaattccacattttcaagaaataaggaggcaaaaatgttcatatatgaattggaattatttgttttcttattaggcctatcctgaagccaaaggaaatgagatcggaattcctcggggg

SEQ ID NO: 40623 - DNA, 303 bp, Glycine max
  Clone ID: LIB3065-020-Q1-N1-E12
gcacgcgacgtaactgggacatctttacttcgattctttttcattcacaccaccacactaacacccagttggtcttcacgagatttagtcaccacaaaaactttcctcaatgccttcaagaccaaactgaacatttctccaacaacaaacaactgctgcttgcccgcctgttgctgttccttccccatgggaatgtaatccaaatacaagatggtggcctacagcctcttccaaagtcacacactaacgtgcctggactttatcacaactcaaaaaaccgtctcattatacacaccgccgtac

SEQ ID NO: 40624 - DNA, 325 bp, Glycine max
  Clone ID: LIB3065-020-Q1-N1-E9
aaagattttgctcaaaagagcaaagactatgccggtgatgctctgcacgagatctaatattatgcacattatgcaacgcacaggagcagagaagatgctagggatgctacgccacatgagcaaagactgctttgactacacctgttgtgccagctcaatggaaaagtaactaatttgcgacatctgcgattatactctttaggctgtttaatatgtacgtgggtggcccggatgaccacacagtatactggctgttcagagacaccaggctactctgcgacatatcataacaatgatagggttagattgaccacactctattgac

SEQ ID NO: 40625 - DNA, 361 bp, Glycine max
  Clone ID: LIB3065-020-Q1-N1-F10
acaaaacttccacttgagagaaaagtagtgtattaagactacaaattttcaatttttcaatggcgtcgaggcaacaaaaagaggatcgagctgaggcagctgcgaaagttgctgcgaaagaactcgaacaactcaaccgagaaaaagaccgtgatttcagtgttggtgttgcagaccaacaccaacaagaagaacatcagttagatcaacaaaagcgtggtgtaatcggatccatgttcaaggcggtgcaagacacctacgagaacgccaaggaagctgtcgttggcaagaaagaaccttcgacgacgactaactcgtacagtaccagagaggttattcacgacgttgacattcaacccga

SEQ ID NO: 40626 - DNA, 407 bp, Glycine max
  Clone ID: LIB3065-020-Q1-N1-F11
gtgacatgcacccctcccgtacctcagcacggaattcgagctgaatgaacattacttaccctaatcaacacccaaaccccggttggtctaaatcgtcttggaaaatgactgatcctcaagacaagtccatgcttcactcttaaccacaaccagctgaaccaacaccaacctcatcatcctcaacgccttgtaacacaaccacctctctaccaccctaggctgcttgctcctaccaagattgaaccataacccagagcaaatatgcctccctggtactatccacaaacttaccccaaaccgtatgttgctaacattcacacacaactaaccgtatcgcctgatgatcatcatctcccaaggactaggagcacttaaagttgcaagctcatcataaactaaaacgcatg

SEQ ID NO: 40627 - DNA, 380 bp, Glycine max
  Clone ID: LIB3065-020-Q1-N1-F12
cttaattattttcacttccttagttcaatatggggaagcggttgactctctctctttcttgcctttgcttgctactcttgtcgagtgcatgctttgctattagctccagcaagctcaacgagtgccaactcaacaacctcaacgcgttggaacccgaccaccgcgttgagtccgaaggtggtttgattcaaacatggaactctcaacaccctgagctgaaatgcgccggtgtcactgtttccaaactcaccctcaaccgcaatggcctccacttgccatcttactcaccttatccccggatgatcatcatcgcccaagggaaaggagcacttggagttgcaattccaggatgtcctgagacgcttgaagagccacccaaa

SEQ ID NO: 40628 - DNA, 358 bp, Glycine max
  Clone ID: LIB3065-020-Q1-N1-G9
attagaaatgaaaagctgcatggtttttagatgcaggaagagcttctatgagctcaaacttgttgggcccactgtcatcttggttcaacaattaccaaggtagacattttcagggatgcagccaccattatgatcaactacattgaccaaatccgagatcagggttttgaagttgattacttaaatattggtggaggacttgggatagattattatcattctggtgccattcttcctacacctagagatctcattgacactgtacgagatcttgttatttcgcgtggtcttaatctcatcattgaaccagggagatctctgatcgcaaacacatgctgcttagttaaaccgggtgaca

SEQ ID NO: 40629 - DNA, 374 bp, Glycine max
  Clone ID: LIB3065-020-Q1-N1-H10
gaacaatctagcttgaaagacatttccaagtacagagctgaagctcaacaaaattcattcaatgctactgaagctgctaaggaaagatacgagagggcaaaccaagcgacaagtgaagctgccaaagagagaaacaagcaggcaaataaggaggcaacaaaggcaaaagatgtcacaagagaaatggatcaacaaggcaatcttaaaacagaaaatgagacacaggacaatgaccagaagggttatggtggagcaaagtacaccattggtagtgtggaccacattactacaccatttattgtagaggccaatcttaaatcagaaaatcagatacaagacaatggccaaaagggttatggtggagcaaaggacac

SEQ ID NO: 40630 - DNA, 194 bp, Glycine max
  Clone ID: LIB3065-020-Q1-N1-H11
ctgccccgccccacctcgaatttgctcgtgctagaagacattctctaagtcgactgttggaattacaggggcgctgacttgaaggggaacaccctgtagaaggatgcccactatgctatgtctctgaaattttaagatcttctcacccacggctggcgctttctagactatcacgctgcaattcaaccttgttg

SEQ ID NO: 40631 - DNA, 378 bp, Glycine max
  Clone ID: LIB3065-020-Q1-N1-H12
cccacttttgctccgcattgataagggggagttcaagtcaaccccttaccaacctggaacaagaggtcctgtagaagcagataaattactgctggaaaaagctggttatgttcaaacacatggttatagatggatccctccaacattgtagaaagaacaatgttacactagcttgcactaccttaaaatttgttgatgcgtgcacttaataagcttgggaaaatccccttggagcaagactcttccctaatgggtgattttatcaagcatatgaataaatgtggttgacattgtatatttaatattatctgcctacgaatgcagaagaataagtggttgacatggtgcatgtaacgttatttgcttgtgaataaagaa

SEQ ID NO: 40632 - DNA, 207 bp, Glycine max
  Clone ID: LIB3065-020-Q1-N1-H9
ccggccctcattccggccgtaactttggtcaatatccatatggggggttcattctgaatcggccaacctcttctagaagggtgcttcctgagaaaggcaccccagaatatgaagaaatggtgaaaaggcatcaaaaggcttatttgagaactattacatcaaaggttcaaactctagttgacctttcagtgatagagatcttgtcaa

SEQ ID NO: 40633 - DNA, 213 bp, Glycine max
  Clone ID: LIB3065-021-Q1-N1-A10
gagcaagacaaatagagccaagaaagtgaaggttctgagtctcaaagagaaccacgaagacataacaataagaacccttttcacttcaactctaaaaggttccaaactctcttcaaaaaccaatatggccacgttcgcgtcctccagaggttcaacaaacgctcccaacagcttgagaatctccgagactaccgcattttgtagttcaacttc

SEQ ID NO: 40634 - DNA, 249 bp, Glycine max
  Clone ID: LIB3065-021-Q1-N1-A11
tctgaatttagaagcgttgccgaaaacaagatgaggggaatcaagattgatatgaatcgtcttgcaactgaaaaccgtatataaagaaagaaaaatgaattggcttcatcaaatgtttttgtactgacaatattaagaaagtcattggttgggtaggctgagtcatttattggtatgatcgactttctaatttagacgcaaatagaattctgaaatatatatgcaattacttttcctgaaatactttac

SEQ ID NO: 40635 - DNA, 367 bp, Glycine max
  Clone ID: LIB3065-021-Q1-N1-B10
caagaaataaaaagagttctgactgaagttcttttgaaggttactgatgaattgtttgacgaaatcgcaaccagagttcttgctgaagatgatcttactgctgaagtgggccacaaggttgccacctcaaatcataaggcatcagcatctcctccctcagctacagttcctaaggcatctgcaaaagttttagttccaatcaaagagaaggtagaaaatgaagacaccagtgaaaactctaattccagctctcctggagatgttttaggtcttggaaattatgggtcctgatgctgatgatggagacaatgaaattgagagttccagtgtgccaacaccttgcaagagatgctgcctatcagtcagg

SEQ ID NO: 40636 - DNA, 365 bp, Glycine max
  Clone ID: LIB3065-021-Q1-N1-B12
cactcttcgttcttcgactgtctacgatctgctttctctgaattgtgaaaatgtcgctcggagaaactgcttgttcatacgcagctctcatccttcatgaagatggaattagtgtaactgctgacaagatcagcaccttgttgaaaactgcaaaggttccagtagactcttattggccaaccttgtttgctaaacttgctgagaagaaaaatcttggcgatttgatagcaaatgcggcaggcggtggtgcaccacttgctgttgcagctgccccaattgctgctgctgctggtggtgctgctgacgcagctccagctgctgaggagaaaaagaaggaagaaccggcagaagagagtgatgatgat

SEQ ID NO: 40637 - DNA, 161 bp, Glycine max
  Clone ID: LIB3065-021-Q1-N1-B9
gcggtttatgcataaatatatgaaggcatccctgtggatatatgaattggaagggctgcgcgtcgactattgagctcgtcttcccgccaattgatacgtgaccggtacctgctggcgtactcacctttccatattttcagtgatttcagagcgtgacaatg

SEQ ID NO: 40638 - DNA, 296 bp, Glycine max
  unsure (1)..(296): unsure at all n locations
  Clone ID: LIB3065-021-Q1-N1-C11
gagatattgatacaaacaaacaaactcctttgtatatattttggtggtggtgtctcctctagttttgttctgggacattagcaatgtgtagagagtaggaataaaattttgggagatttgttttgacaatgatcacaaatgtaatcatatactattatgttaatttcctttttttttttttaagttgctgcctgcatgtatacagtattagtggaatcagcaattagtaattttgtacgttgctgatgccaacaggaatttatgagaagaaaaaaagagattgaaaacgcctaanc

SEQ ID NO: 40639 - DNA, 354 bp, Glycine max
  Clone ID: LIB3065-021-Q1-N1-C12
gaaaattaaaagcacgttaaagattgtaataatttggaaaaactatggctagcgatggcagcgaacagtttaggctagtgtcaccggcgttcagcaacgaggggaagttacctcggaactacactgacgagggccagggtgcgaaaaagaacatatcccctacgttggagtggtacaacctgccggatgggaccaagaccctcgccctcgtagtggaggatatcgattgatccgattcacatgggaccatcatgccatggacacactgggtcgttgcaaacatccctgacactgttaagggcctaccggagggattctactgcaaggctgtcgagatgggcggtgattacgcga

SEQ ID NO: 40640 - DNA, 348 bp, Glycine max
  Clone ID: LIB3065-021-Q1-N1-D10
gtatttcgtttgttgttcaatctaacaaacttctctatatcgtttactttttcaacacaccttacacacttctttatttgagcctttcatataaatatcatggcttcgagggtggtttcggttttggtgatagcgatgatgttgtttgccatgaactgtaactgcactagtgttggccacatgccttcaaccaaagaggaaggtcacgattttcaggaggctaaagccaagacaacacatactgcgaacatggccatggaaactggtatagatgggaaagaagccgcacagtcatggacagaatgggctaaagagaaactcactgtatgtcttggcttcaaacatgat

SEQ ID NO: 40641 - DNA, 338 bp, Glycine max
  Clone ID: LIB3065-021-Q1-N1-D11
gggttgtttttttgtgtttgtttttgttgtttcttttttttttcttttttttttttttctaacaaaaaatcatagccggttttttccccttccgtttaccctatggttgactgacatgggcgggtacatacgacttcctcctttacgaggaacgtgcaacggtccttataaaaacctaaggctgggggggggaaatttaaacggaaaaaccgggggggggtgggagataattcttgggcacataaaacggcgtggaaagaaacctatgcgggggtcattcatttttcataggcaccaggggggggggtggttcaaaccctatggggattgcccccccc

SEQ ID NO: 40642 - DNA, 362 bp, Glycine max
  Clone ID: LIB3065-021-Q1-N1-D12
aaaaaattatatatctatataaatattacattaatacttatactcaaataattatattaaaagattttttaagcaatactaaagttaataaaaattctaatgtatactttaatgttaataggattttaatatacataaatttaaacagaaagtaatttatttaataagtgtaaagcataaattacatttattaaatgcaaaaaattatattaattacatttatagatactgcattaataatattaaatacattttatgaaaagtgataataaaataattaaggtttcatttaaaaatagcatttgactttttctaatttaaaattttttttatagacctatttttaaaacaacgcaattttt

SEQ ID NO: 40643 - DNA, 246 bp, Glycine max
  Clone ID: LIB3065-021-Q1-N1-E10
cgcttattggcagcagcagtggcggcaagcaactccatccgcaatgggaatcgatttgaaggcaggaggtaagtccaagaagaccaagcgaaccgcccccaaatccgatgatatctacctcaagcttctcgtcaagctgtaccgttttcttgttcggaggactgggagtaacttcaatgctgttgtcctcaagcgccttttcatgagcaaggtcaacaagcccccgctatccctctctagattgat

SEQ ID NO: 40644 - DNA, 367 bp, Glycine max
  Clone ID: LIB3065-021-Q1-N1-E11
gtccatggcctccctcatcgaatctggctggcagtacttgatcacacatttcagtgattttcaactggcgtgtttgggaagtttctttctgcatgaaggtgttttcttcttgtctggacttcccttcatatggcttgagagggcagggtggatgagcaagtacaaaattcaggccaaaaataacacccctgctgctcaggagaaatgtattgttcgcctgttgctttaccattttggtgtcaatctacctgttatggttttttcatatcccgtcttcagatacatgggcatgcggagtagtcttcccctaccgtcctggaaagtagttctaattcaaataatcttttacttcattttggaggacttt

SEQ ID NO: 40645 - DNA, 368 bp, Glycine max
  Clone ID: LIB3065-021-Q1-N1-E12
ggagaagcaacaacaacaagcaccatctaaggaaacaaaggcacagagtgatgaatcagttaaagaaagcagcactgaagggcttccaatggaggatagtccctatgtgaaatacaaggatttggaggattataagcgtcagggttatggtacacaaggtcatcaagaaccaaagacaggtcgtggagctggagccactgaagcacccactctctctggtgctgcagtttcatctgatgcacaagtcgctgccactgatgccattaacagtaaaggagtcccttaattattcacacttcctagaatagatcgttcctttgctaataagaaatcgttttcttaatttggggtggcgttttttaaatgtg

SEQ ID NO: 40646 - DNA, 369 bp, Glycine max
  Clone ID: LIB3065-021-Q1-N1-F10
gagaagccacaacagcaatcaagcagaagaggctcaaggtcgcagcagcaactacaagacagtcaccagaagattcgtcacttcaatgaaggagacgtactagtgattcctcctggtgttccttactggacctataacactggcgatgaaccagttgttgccatcagtcttcttgacacctccaacttcaacaatcagcttgatcaaaaccccagagtattttaccttgctgggaacccagatatagagcacccagagaccatgcaacaacagcagcagcagaagagtcatggtggacgcaagcaggggcaacaccagcagcaggaggaagaaggtggcagtgtgctcagtggcttcagcaaacatttc

SEQ ID NO: 40647 - DNA, 367 bp, Glycine max
  Clone ID: LIB3065-021-Q1-N1-F12
attagatatgaaaagctgcagtggtttttagatgcagtgaaggagcttactaatgagctcaaacttgtatgggcccactgtcatcttggttcaacaattaccaaggtggacattttcagggatgcagccaccattatgatcaactacattgaccaaatccgagatcagggttttgaagtagattacttaaatattggtggaggactcgggatagattattatcattctggtgccattcttgctacacctagagatctcattgacactgtacgagatcttgttatttcgcgtggtcttaatctcatcattgaaccagagagatctctgatcgcaaacacatgctgcttaattaaccgggtgacaggtg

SEQ ID NO: 40648 - DNA, 357 bp, Glycine max
  Clone ID: LIB3065-021-Q1-N1-F9
cttaattattaacacttccttagttcaatatggggaagcccttcactctctctctttcttccctttgcttgctactcttgtcgagtgcatgctttgctattagctccagcaagctcaacgagtgccaactcaacaacctcaacgcgttggaacccgaccaccgcgttgagtccgaaggtggtttgattcaaacatggaactctcaacaccctgagctgaaatgcgccggtgtcactgtttccaaactcaccctcaaccgcaatggcctccacttgccatcttactcaccttatccccggatgatcatcatcgcccaagggaaaggagcacttggagttgcaattccaagatgtcctg

SEQ ID NO: 40649 - DNA, 328 bp, Glycine max
  unsure (1)..(328): unsure at all n locations
  Clone ID: LIB3065-021-Q1-N1-G10
ctcgagccgcaggaagtcatgcagcttggtcagtccctttacaaccaaccaggagctgcaggcgcaggagggccaacaccaccacccggtgccgactctggcccctcagaatcctcaggcaagggacccgacggtgatgtcattgatgcagatttcactgactctaaatgagcaggcaactagttattaccaatagagagtatatgttagtattttttcccccattatatgttttcttctgttccaaattcttaataatttttgtcaatggagagtgggtgcgtgtttccttcaaatattagacacggatttcataggttcaaannnn

SEQ ID NO: 40650 - DNA, 363 bp, Glycine max
  Clone ID: LIB3065-021-Q1-N1-G11
aacccggcctttagggaaaaaagaaagaaagaaaaaaaaaaaaacccttctttcccctccttctctcttccatagagatttttctccaaagagaaaaaatggcggcagcttcaagaaaatcaagaagtgcagtaattggatccctttcctccaccgctaggttctgcaactctcactttcactcttactctccatcatcttcatcttattcctcagctttcgcctcttccacctccagcttcacttctcgctcctccaccttctttcaccgctcttcctctccgacacgtgtcaacctctgcggttcctccgctccctccgtccgcttctccctcgaccgctccgtctctccgaaccggtcca

SEQ ID NO: 40651 - DNA, 369 bp, Glycine max
  Clone ID: LIB3065-021-Q1-N1-G12
cacccgtcctctagggtaaaatgaaagccagaaccgagaagcaacccctctttcccctacttctctcttccatagagattgtcctccaaagagaaaaaatggcggccgcgtgaagaaaatcaatacgcgcacaatttgcatcccttacctccaccgatgcgttctgcatctctcactttcagtcttactatccatcatactcatattattcgtgagctgccgactgttccacctccagcttgactactcgctcctccaccttctttcaccgatcttcctatccgacacgtgtaaacctctgcggttcctccgctccctccgtccgcttctccatcgaccgctccgtctatacgtaccggtccatctctg

SEQ ID NO: 40652 - DNA, 399 bp, Glycine max
  Clone ID: LIB3065-021-Q1-N1-G2
tcggggaattccaattccacattttcaagaaataaggaggcaaaaatgttcatatatgaattggaattatttgttttcttattaggcctatcctgaagccaaaggaaatgagatcggaattcctcggggaattccaattccacattttcaagaaataaggaggcaaaaatgttcatatatgaattggaattatttgttttcttattaggcctatcctgaagccaaaggaaatgagatcggaattcctcggggaattccaattccacattgtcaagaaataaggacgcaaaaacgttcatatatgaattggaattatgtggtttcttattaagcctatcctgaaaccaaggaaatgagatcggaattcctcggggtaccgagctcgaattcctatagtga

SEQ ID NO: 40653 - DNA, 288 bp, Glycine max
  Clone ID: LIB3065-021-Q1-N1-H11
tgtttcgctgtctctcccatcctttcgcattctcaatacccttttgatttgtgaaaggaaagcaaacatggttgatcaggtccaacaccctacaatcatggacaaggttgctgatcagctccatctacggtctggtctctcatctggtattagaagctatgatggagcctaccgtcacccatctatgtaccaaagaccctcttttgagaatcactcatatgctgcatcgcattctgctgtgatgcccacatgcatagctaccatggatgtgtctgctactgcaacatc

SEQ ID NO: 40654 - DNA, 287 bp, Glycine max
  unsure (1)..(287): unsure at all n locations
  Clone ID: LIB3065-021-Q1-N1-H12
ctgcaaagacaaaggtaccacatgttgaaacgactgggaatgatgatggagggatagatagtgattcacaggcaaggttagacaatttaagaaagatgtaatctttcctctatgatatcatggactctagttttactgggaaaattgatgctcatttgtaccatatagcataattgagaagttgtgcgaagatttgatgaactcatggttataaaatgatggttttcttcanttaactgtgatgcccacatgcaaaagctaccattgatttgtctgctactgcaaca

SEQ ID NO: 40655 - DNA, 104 bp, Glycine max
  Clone ID: LIB3065-021-Q1-N1-H3
aaataaaaaaaataaaaaaaaaaaaaaaaaaaaaaaaaaaaaaaaaaaaaaaaaaaaaaaaaaaaaaaaaaaaaaaaaaaaaaaaaaaaaaaaaaaaaaaaaaa

SEQ ID NO: 40656 - DNA, 249 bp, Glycine max
  Clone ID: LIB3065-022-Q1-N1-B1
aaaaaaaaaaaaaaaaaaaaaaaaaaaaaaaaaaaaaaaaaaaaaaaggaaaaaaaaaaaaaaaaaaaaaaaaaaaaaaaaaaaaaaaaaaaaaaaaaaaaaaaaaagggggggccgccgactagggagctcgccaacccgggaataaattccggaccggtccctggaggggtaccagctttcccaaaagggaggcgtataaaagctgggggaaataagggccaaagcggttaccgggggaaaaaggta

SEQ ID NO: 40657 - DNA, 405 bp, Glycine max
  Clone ID: LIB3065-022-Q1-N1-B7
tcggggaattccaattccacattttcaagaaataaggaggcaaaaatgttcatatatgaattggaattatttgctttcttattaggcctatcctgaagccaaaggaaatgagatcggaattcctcggggaattccaattccacattttcaagaaataaggaggcaaaaatgttcatatatgaattggaattatttgttttcttattaggcctatcctgaagccaaaggaaatgagatcggaattcctcggggaattccaattccacattttcaagaaataaggaggcaaaaatgttcatatatgaattggaattatttgctttcttattaggcctatcctgaagccaaaggaaatgagatcggaattcctcgggggtaccgaactcgaaattcctatagtgagtc

SEQ ID NO: 40658 - DNA, 327 bp, Glycine max
  Clone ID: LIB3065-022-Q1-N1-F10
tcggggaattccaattccacattttcaagaaataaggaggcaaaaatgttcatatatgaattggaattatttgttttcttattaggcctatcctgaagccaaaggaaatgagatcggaattcctcggggaattccaattccacattttcaagaaataaggaggcaaaaatgttcatatatgaattggaattatttgttttcttattaggcctatcctgaagccaaaggaaatgagatcggaattcctcggggaattccaattccacatcttcaagagataacgaggcacatatgttcatatatgaattgaaattatctgtttcttat

SEQ ID NO: 40659 - DNA, 328 bp, Glycine max
  Clone ID: LIB3065-022-Q1-N1-F12
tcggggaattccaattccacattttcaagaaataaggaggcaaaaatgttcatatatgaattggaattatttgttttcttattaagcctatcctgaagccaaaggaaatgagatcggaattcctcggggaattccaattccacattttcaagaaataaggaggcaaaaatgttcatatatgaattggaattatttgttttcttattaggcctatcctgaagccaaaggaaatgagatcggaatttcctcggggaattccaattccacattttcaagaaataaggaagcaaaaatgttcatatatgaattggaattatttggtttctta

SEQ ID NO: 40660 - DNA, 375 bp, Glycine max
  Clone ID: LIB3065-022-Q1-N1-G5
ccaagagagatggaatgttcctcctccttgttctggtcctcggtatagtgaccgaggtgtgcctgctccttatggttgtcatcctagtgaatcagttggttttccaggtcatggatggagatttcctcccccatcaatgaattacagggactccttgccttttagaccccactttgaagatgcaattccagtagcaaaccgaggcccaggcttttggcagccaagatgacaaaaattaccaataaaaaaaaaaaaaaaacaaaactaaaaaccaaaataaaaaagaagaaacaaaaagacacaatagaaaataaataccaaaaaaaaggggcggccgccaactatggacctcgcaaacccgggaataaattccga

SEQ ID NO: 40661 - DNA, 366 bp, Glycine max
  Clone ID: LIB3065-022-Q1-N1-H8
tcggggaattccaattccacattttcaagaaataaggaggcaaaaatgttcatatatgaattggaattatttgctttcttattaggcctatcctgaagccaaaggaaatgagatcggaattcctcggggaattccaattccacattttcaagaaataaggaggcaaaaatgttcatatatgaattggaattatttgttttcttattaggcctatcctgaagccaaaggaaatgagatcggaattcctcggggaattccaattccacattttcaagaaataaggaggcaaaaatgttcatatatgaattggaattatttggtttcttattaggcctatcctgaagccaaaagaaatgagatcggaat

SEQ ID NO: 40662 - DNA, 238 bp, Glycine max
  Clone ID: LIB3065-023-Q1-N1-C1
gcaagctctgcattgatgagacttccaacttcccgtagagagtcacatagcggagcctgcgctcttccactgctcagctcactgacgatgtacactaggatgagctgctgctgcgagcagaccatacctgactcaaagacagtaatacggccatccacagaatcactagataactcacgtacgaacatgtcatcagactgactgctatcggtcaaataccgtaaaaatggccggccgc

SEQ ID NO: 40663 - DNA, 252 bp, Glycine max
  unsure (1)..(252): unsure at all n locations
  Clone ID: LIB3065-023-Q1-N1-G5
caagaagggggttctaaagaattcaccactggagctcctggatagccccaaaaggggctcctccagcaatgggtcataacatttgaggcaataatatagacaacctaataaaatatgtttacttttgtgtgttttgttctgccctttgtttcttttttatggcatatcatcaatcatgtatggggatgactccctaagtttttcttcgtctaataaagttgaatattttttgtaaggggttaaaaaatanaa

SEQ ID NO: 40664 - DNA, 348 bp, Glycine max
  Clone ID: LIB3065-023-Q1-N1-H3
gggagcttgggtagggatagggttttattcagcaacaggtcagagactaaaaatattatctgagaccattaaggcttcattggtttactaataggaaatggatgagaacatattgaccctcttatgcactctgttgactgctgtaataatcatgggctaatacactgtccttgcagattgttgttctagatgtttgatagttcaattttggattttgatgggtagtttcttgtgtacttttggaactaatgggttacaatcccttggcatgtacttatggcatgcataagttgcttcaaaaaaaaaaaaaaagggcggtcgacgactagtgagctttttaacccggga

SEQ ID NO: 40665 - DNA, 92 bp, Glycine max
  Clone ID: LIB3065-024-Q1-N1-A2
aactcagtaacaacattcttaactcaaaatggggtatcccgggggggctatcatgccataccgcgttaggttgcgacccatgtgatggggat

SEQ ID NO: 40666 - DNA, 385 bp, Glycine max
  Clone ID: LIB3065-024-Q1-N1-B11
ccgggttggtatatcagcaaggctaaccctaaatcgctcttactctgggcggtcgttcaggggaagagatccagcacccctgttgtacgtcaagctcacaaatcaaaagcctactttaagagatatgaagtcaagttcatgagaagaagagagggaaaaaccgattaccgtgccaggattcggttgattaatcaggacaagaacaaatataacactccgaaataccgatttgtggttcgctttagcaacaaggacattgttgcacaaataatatctgctagcattgccggcgatttagttcttgctacagcatattcacatgagctgccacgatatggtcttgaagtacgacttacaaattatgcagcatcttattgcactggtc

SEQ ID NO: 40667 - DNA, 234 bp, Glycine max
  unsure (1)..(234): unsure at all n locations
  Clone ID: LIB3065-024-Q1-N1-D12
gacacacactatanaatagctatgacatgcgctggtgcgtaagctcggacatcctctcacggctatcttatacaccatcaacaccaccacactttcacccaggtggggggccatcatttaatctgagttacaatctgccacggcgcgtgcaaggcagactggatgtggtaacgccactcatcatctattgtttgccagccagttcatgagccacgcggacgggaatgataattc

SEQ ID NO: 40668 - DNA, 235 bp, Glycine max
  unsure (1)..(235): unsure at all n locations
  Clone ID: LIB3065-024-Q1-N1-F12
gaagcttcctggaggacacagtgacaagtagatgcatcgtgcatgcatgcatatgtatatatataatattgttgtctttgaataaatttgctgatatgtccttggaggatatagcatatggttatagtatattatatagaggaataaaaaatgtatccctgtaatgtaagggttctcatatacatggctgaaatataaagcataatanaggcattgatgttgtgccaatacataa

SEQ ID NO: 40669 - DNA, 279 bp, Glycine max
  Clone ID: LIB3065-024-Q1-N1-G12
tctcctgtcttgataaataaaacaaaaaaaaaaaaaaaaaaaaaaaaaaaaaaaaaaaaaaaaaaaaaaaaaaaaaaaaaaaaaaaaaaaaaaaaaaaaaaaaaaaaaaaaaaaaaaaaagggggcggcccccaactattgacctcttcaacccggaatttatttccggcccggtccctgaaggcttccaacctttccttatagggagtcgttttaaacctgggcgtaacaagggccatagctgttccctgtgaaaaattgttttccgttaaaatttcc

SEQ ID NO: 40670 - DNA, 374 bp, Glycine max
  Clone ID: LIB3065-024-Q1-N1-G5
tcggggaattccaattccacattttcaagaaataaggaggcaaaaatgtgcgatatatgaattggaattatttgttttcttattaggcctatcctgaagccaaaggaaatgagatcggaattcctcggggaattccaattccacattttcaagaaataaggaggcaaaaatgttcatatatgaattggaattatttgttttcttattaggcctatcctgaagccaaaggaaatgagatcggaattcctcggggaattccaattccacattttcaagaaataaggaggcaaaaatgttcatatatgaattggaattatttggtttcttattaggcctatcctgaagccaaaggatatgagatcggaattcctcgg

SEQ ID NO: 40671 - DNA, 210 bp, Glycine max
  Clone ID: LIB3065-024-Q1-N1-H10
acttggagatcgagacgatcactccctcttgctgtctgtgctcctcttcctctcggaacgactttggaagttctttgagatcacccctgagaaaaacccacagcttcggacttggatatcttcctcagttctgtggatatcaacgaaggagctcttcttctaccacacttcaattcaaaggccatagtgatactagtgattaatgaagga

SEQ ID NO: 40672 - DNA, 170 bp, Glycine max
  Clone ID: LIB3065-025-Q1-N1-A10
ctctcaagcaaccttgttttttaatgttcatattctcacttttacgtcaggggtgatgactggaattttttgcactgactattattcacatctcatgagggcctgactggatgtggctcaaccacaacctagttctgtaaggcccccatgttggcggtccacgcggcggg

SEQ ID NO: 40673 - DNA, 63 bp, Glycine max
  unsure (1)..(63): unsure at all n locations
  Clone ID: LIB3065-025-Q1-N1-A11
natcaaataaattatatattttcaacgggaatgccgcttatccggcgggggcgattgcaagct

SEQ ID NO: 40674 - DNA, 259 bp, Glycine max
  Clone ID: LIB3065-025-Q1-N1-C3
gtctggtcagagacatcatgaaataacggctgatcatactagagttcatcgttttccagtatctttactggctgttctttttggcgttaagaatgaaattctgagttctaacgccactaaccctatgctgacgcgacttcttgagaactgtaagagtctcaaatatctggttgatgagtgtccttttgcatttgtgaactagtatgtaatattttattcacttaaataaagcgcattactatgtgcaatgagtgtgttt

SEQ ID NO: 40675 - DNA, 256 bp, Glycine max
  Clone ID: LIB3065-025-Q1-N1-C9
atcgcccaacgctcggggagaggcgctttgcgcattcggcgctcttacggttcctgctcactgactcgttgcactcagtcgctcggctaaggatgacggcatcagctaactcaaaggcgacaatactggtatacacagaatcaggggacagcgctggaaaaaccatgtaagcataacgccagaaaagggccaggacccgaaaaaaggcagcgtagatggcgttcatacataggctccgccctcttgtatagcataa

SEQ ID NO: 40676 - DNA, 232 bp, Glycine max
  Clone ID: LIB3065-025-Q1-N1-D1
attccctcaacctcaagatttctacccactgattcgattgatcgaataaaaaaactcttggggaattgaacatgatgccttttgtggtgaatgaatgccactattatcagtaatatgtatttctttgcttgtttctcttctcgctagcccgagaaccctctttaggaatttgttcaactttgagttttaggttttgatttttatggaatattaaatttctagtcttgattca

SEQ ID NO: 40677 - DNA, 397 bp, Glycine max
  unsure (1)..(397): unsure at all n locations
  Clone ID: LIB3065-025-Q1-N1-D11
atactaagagctatgacgtcncatgcacgcgcgcgtacgctagcaattcaactcgagtccatgccgtgccctcacgtgagcggcttacccgctctgggggaggcggctcccctgattggagcccatcctcggtccgatcggctcttatgcaacggcttacacagtttacaaaaccggtgagaagctgcaagacagcgcaacgggaaagccctccacgccgttcgatcacggttccggacacgtggaccccgtcgctgtcctcaatccaggactcgtctacgatctaacgggggatgattatttaggttttctctgcgcgttaaactactcagcttccgagatcaacacattggccaagagaaaatttcagtgcgacgcgggcaagcagtacagtgtg

SEQ ID NO: 40678 - DNA, 199 bp, Glycine max
  Clone ID: LIB3065-025-Q1-N1-E1
gcaactcagctacggcatcttccattccactttgtgccgcgtcatctccgaaacttggctggcctgcctcaccacacacgaaacggtctgatacgacacactgctatactatgtgacatcgcgtaactggactgacatcacattcactaccctgactcgactctgttcccgacgctgccatgccgtaccgggaaaggct

SEQ ID NO: 40679 - DNA, 436 bp, Glycine max
  unsure (1)..(436): unsure at all n locations
  Clone ID: LIB3065-025-Q1-N1-E9
tgacactatanaagagctatgacatggactgctaccttacctcatccctcagttcgagtccaatcccacatcatcctcatacattgtcgctacaacttgggcttgtggacaatgttacattggcgacgaattaaggctcatctgtaccctacgaaatgagatcaggattcctagcagagagagaatcacacagtgtcacgcaatgaggaggcactgcacgaccatagcataatgcgggttgtatcatgcattaataagacctatacagaatcctaaataccttgtatcgcaattctgtcaggctatccagctccgcacttctgctatattatgcagcacacttagacatatgtgggcgtggctttcatgttatctcttcagaactgtcctgaacccaagctgatggagacccgacttccttgatatgcccaactcg

SEQ ID NO: 40680 - DNA, 99 bp, Glycine max
  Clone ID: LIB3065-025-Q1-N1-G10
aaataacatgtgagcaaaatgccatcaaaaggcgaggaacgccttatatgaggagggggtgtcatttggaatatacttcacacccctgaccaggattat

SEQ ID NO: 40681 - DNA, 373 bp, Glycine max
  Clone ID: LIB3065-026-Q1-N1-B5
ttacgtgacactatcacaatagctatgacttcacatgcactcctacctaagctcggcattccgatcgcggtcctactggcataccaacaatcaggtctagtacccacgaatagaaccgtgtgcaaatggtcagcaatagggccggatcgcgtgaacgggctatatgctgacttctagccataggttccgatccggtgacctgtatctcaaatatcgacgctctatgatatatgtggctaaagcacgacaacgactcttaggactctctgtcgcatttcctgtgagcatgctagtacgctcatatgtattgacgcttccgattacgcgttacctgagtctgtatatgcctttggcaagctattagctatcccat

SEQ ID NO: 40682 - DNA, 357 bp, Glycine max
  Clone ID: LIB3065-026-Q1-N1-H5
tgggaaaaaaaatataatcaggtaattttatattgttcagacattcccattttgagattttatctgttaggaagaggtccttttgcttctgaatgagagtgtccaatgaaagtttggtccttgatgcataattaaattgttctattgagtggtggcaagtcaaaaaggtctcggctttttcgtaagagaatattgttttttttagtaagattatatatggtgttgttgctatatttaaattaaagaacctgcaaggccctgtgtgcttcttgtttcagcattgccattatcttcttcttcttcttcttgttcttcttctcatggctcttatgttaggctatgatccttgttcccatt

SEQ ID NO: 40683 - DNA, 399 bp, Glycine max
  Clone ID: LIB3065-026-Q1-N1-H8
tcggggaattccaattccacattttcaagaaataaggaggcaaaaatgttcatatatgaattggaattatttgttttcttattaggcctatcctgaagccaaaggaaatgagatcggaattcctcggggaattccaattccacattttcaagaaataaggaggcaaaaatgttcatatatgaattggaattatttgttttcttattaggcctatcctgaagccaaaggaaatgagatcggaattcctcggggaattccaattccacattttcaagaaataaggaggcaaaaatgttcatatatgaattggaattatttgttttcttattaggcctatcctgaagccaaaggaaatgagatcggaattcctcggggaattccaattccacattttcaaga

SEQ ID NO: 40684 - DNA, 146 bp, Glycine max
  Clone ID: LIB3065-027-Q1-N1-E5
caaacttccagagcgtttatcactcaccaaatatgcaagaacaaggggcgagacacaaaaatatcatctgctaattccatgcaatttaataaattgtggaattaatgatcaatcggctaataaatttgatgttttgtagtccaaaa

SEQ ID NO: 40685 - DNA, 92 bp, Glycine max
  Clone ID: LIB3065-027-Q1-N1-G5
gaaagacctatggtttgatacataaaaaattcatgttaataagaaaaatttttataaatatattacaagaacaagagatcaaaaaataacag

SEQ ID NO: 40686 - DNA, 240 bp, Glycine max
  Clone ID: LIB3065-001-Q1-N1-A6.F1
gttggagatctcgtctttgaagtttctaagatgacttctccctacattaaatgtacagtctctttcttcatagcatttggaaatttggctgatgacaccatcaattttgaggcttttccccacaagctggtgcagtttggagagattcgaggaaaagttgtattgaaattttcacaagaggaatttcttacagcttggtcaactcaggtgcgtcctgcaacaactctgttgggctgatgg

SEQ ID NO: 40687 - DNA, 70 bp, Glycine max
  unsure (1)..(70): unsure at all n locations
  Clone ID: LIB3065-001-Q1-N1-A6.R1
gcctttttttttttttntttttttttttnttttttttttttttttttttttttttttttttttttttttt

SEQ ID NO: 40688 - DNA, 338 bp, Glycine max
  unsure (1)..(338): unsure at all n locations
  Clone ID: LIB3065-001-Q1-N1-A6.R2
aaaaaaaacccacacttcacacattttttcgacattttaaggggggggggggttttttcaaagggggggggggtcctccacgggggggggcctgggcttattttccttttgggggattaaacccccggcccacggggggggaccccctntttcgggcggggggggggggttcggcttttttaggnagattgggggggagcctggggggacagaaaagggggggggtagggggttttccggggattttcaaatggggggggggtttcccgggggggttttcaaaactggggcacggggggggggggggcattggggggccccagggggctggggggggg

SEQ ID NO: 40689 - DNA, 577 bp, Glycine max
  Clone ID: LIB3065-005-Q1-N1-B11.F1
ggagaagggtgagtggaagatctctaaaggctcagagagaagatagcattagaagaacagtatatgtttctgagattgatcagcattcttttttcctggtgtaggttactgaggagcggcttgctgccttattcagcagctgtggacaagtaattgattgccgaatttgtggtgatccacattcagttctccgttttgcttttgttgagtttgcagatgagtatggtgcaaggactgctctaaatcttgggggtacgtgcttggatactatccggtcagggttcttccttcaaaaactgccattcttccggtgaatcctacattcctccctaggtcggatgatgagcgtgaaatgtgtgcccggactatctattgtacaaatattgataaaaaggtttctcaagctgaagtgaagaatttttttgaatcagcttgtggcgaggttatgcgccttaggcttttaggggacaagtgcattcaactcgaattgcttttgtggaatttgcaatggctgaaagtgccattattgcactaaactgtagtgggatgctcttggggaccagcctataaaggtgag

SEQ ID NO: 40690 - DNA, 564 bp, Glycine max
  unsure (1)..(564): unsure at all n locations
  Clone ID: LIB3065-005-Q1-N1-B11.F2
gggagaaggtgagtggaagatctctaaaggctcagagagaagatagcanttagaagaacagtatatgtttctgagattgatcagcattcttttttcctggtgtaggttactgaggagcggcttgctgccttattcagcagctgtggacaagtaattgattgccgaatttgtggtgatccacattcagttctccgttttgcttttgttgagtttgcagatgagtatggtgcaaggactgctctaaatcttgggggtaccgtgcttggatactatccggtcagggttcttccttcaaaaactgccattcttccggtgaatcctacattcctccctaggtcggatgatgagcgtgaaatgtgtgcccggactatctattgtacaaatattgataaaaaggtttctcaagctgaagtgaagaatttttttgaatcagcttgtggcgaggttatgcgccttaggcttttaggggaccaagtgcattcaactcgaattgctttttgtggatttgcaatggctggaaagtgccattattgcactaaactggagtgggatgctcttggggac

SEQ ID NO: 40691 - DNA, 538 bp, Glycine max
  Clone ID: LIB3065-005-Q1-N1-B11.R1
atcattaaattttttatctttactatttcattttattttctttatattatcttattatcaatttcttttttctatttattttatctattttatattttttatattctctctttttttttattattatctttttttatcattttaaattttttatatattttaataaatttatttttcatcacccttttctatataattctcaactttaaatttatccatatatcctcttctctcaattcttttttttattattttttatcttttaattatattccttactatttacccttttcctcactttattcttttaattactctccctttatatttcttttttccccaatattttcttattacattttattttcataattttctttttatccattttcaatttctcaaaatcatttctattttaattcactttttcccctaaaattctaatttcattaacctcttcacaattttttttaaaaaaattttttacttcatctttataaacctttttatcaatatttttttcaatatatattccttt

SEQ ID NO: 40692 - DNA, 447 bp, Glycine max
  Clone ID: LIB3065-005-Q1-N1-B11.R2
aacaaaaaaaactgaaactagaccatttcaatgtagatacggtataatacttcacgatcaaggactggatgctagaaagtttaactagtgcataatagttataagctctggcaacaaaaaaataactgctgttaacagaaaaaaaatggaaatactgaaacaaagggaagtttcaccaccctttctacacaagtctcaactggaaagttgaccaaatatcctctctctcaagtcttgttggatgatgttgatcggttaatgagatgccggacgagggacccttggcctcactggagtctttgaaggactcacccttataggctgggtccccaagagcatcccactacagtttagtgcaataatggcactttcagccattgcaaattccacaaaagcaattcgagttgaatgcacttggtcccctaaaagcctaggcgcataacctcg

SEQ ID NO: 40693 - DNA, 534 bp, Glycine max
  unsure (1)..(534): unsure at all n locations
  Clone ID: LIB3065-007-Q1-N1-B3.F1
cagcaataaaagacattataccactngttggagaaaaccactcagttgagagctcctttgcttatcattgccgaggatgtcactggtgaggctttggcacccttgtcgtgaataagctgcgtggtatccttaacgttgctgccattaaagctcctggctttggtgagcggcgaaaggccctgcttcaagacattgctatattgactggtgctgagttccaagctagtgatctgggtctgcttgttgaaaaacctcagtggagcagcttggtttggctaggaaaattaccatctccaaggattctaccactgtcattgctgatgctgcgacaaaggatgagttgcaagccagggttgctcagttaaagaaggagctgtctcagacagactcagtatatgatactgagaaactggctgagaggatagctaaactgtctggtggagttgcagtcatcaaggttggtgctgctacagagactgagcttgaggatcgggagctccgaatagaggatgccaagaatgcaactttttgctg

SEQ ID NO: 40694 - DNA, 329 bp, Glycine max
  Clone ID: LIB3065-007-Q1-N1-B3.F2
cagcaataaaagacttataccactgttggagaaaaccactcagttgagagctcctttgcttatcattgccgaggatgtcactggtgaggctttggccacccttgtcgtgaataagctgcgtggtatccttaacgttgctgccattaaagctcctggctttggtgagcggcgaaaggccctgcttcaagacattgctatattgactggtgctgagttccaagctagtgatctgggtctgcttgttgaaaacacctcagtggagcagcttggtttggctaggaaaattaccatctccaatgattctaccactgtcattgctgatgctgcga

SEQ ID NO: 40695 - DNA, 527 bp, Glycine max
  Clone ID: LIB3065-007-Q1-N1-B3.R1
agaatccaatattataatctcttttctctcatcaagcccaacaaatctaaaactgtttacaaatacatttttttttccgattgaacagaattcgaacacatacgcactttcaattttctgcacaaaactgttcttcgccgtagccctacagcctaaaaatcaaacggtaaggccttgtggggcacagctacaggtgcttgggcttaggtttctccaccacaatggcctgcgtggtcaacaccattccagcaactgaagcagcattctgcaaagcacacctagttaccttggcagggtcgataactccagcctccactaaattctcatacctgtctgccatggcattgtaaccgacctcccattcaccactctttattttctccacaacaacttcaccttctattccagcattttgagcaatcaatgctgcaggagctatcagtgccttttgcacaatgtcagctcctagcctctcatctgcatcctcaagcttgtccttgattgctgggacatgagtggagagatga

SEQ ID NO: 40696 - DNA, 469 bp, Glycine max
  Clone ID: LIB3065-007-Q1-N1-B3.R2
agaatccaatattataatctcttttctctcatcaagcccaacaaatctaaaactgtttacaaatacatttttttttccgattgaacagaattcgaacacatacgcactttcaattttctgcacaaaactgttcttcgccgtagccctacagcctaaaaatcaaacggtaaggccttgtggggcaccagctacaggtgccttgggcttaggtttctccaccacaatggcctgcgtggtcaacaccattccagcaactgaagcagcattctgcaaagcacacctagttaccttggcagggtcgataactccagcctccactaaattctcatacctgtctgccatggcattgtaaccgacctcccattcaccactctttattttctccacaacaacttcaccttctattccagcattttgagcaatcaatgctgcaggagctatcaatgccttttgcacaatgtcagctcct

SEQ ID NO: 40697 - DNA, 598 bp, Glycine max
  unsure (1)..(598): unsure at all n locations
  Clone ID: LIB3065-009-Q1-N1-B2.F1
cacaaacacacactgaactaaaaaacatcaaaagagacatggctgagcaaaccttcatcatgatcaagcctgatggcgnccaaagaggccttattggcgagatcattagcagatttgagaagaaaggtttctacttgaaaggtttgaaacttgttactgtggaccgtccttttgctgagaacactatgctgatttgtctgccaagcctttctttagtggtttggtggattacattatctctggccctgttgttgccatgatctgggagggcaagaatgttgttacaactggccgaaagattatcggagccacaaacccagctcaatctgagcctggaactatccgtggtgactttgccattgacattggaaggaatgttatccatggaagtgatgcagttgaaagtgctacaaggaaattgcattgtggttccctgagggccctgctaactggcaaagctcccaacactcttggatctatgagtaaatcatatgcctcaagttgatcttgaaattgccttaggttgatccagattatctacatgttttctgtttctgtccgttgttggacttttttgtttaagagtttggtaccttgg

SEQ ID NO: 40698 - DNA, 488 bp, Glycine max
  unsure (1)..(488): unsure at all n locations
  Clone ID: LIB3065-009-Q1-N1-B2.F2
gccgcgtcgtagctcgattggctcggccaacaccctgactaaaaactcaaagagactggctgagcaaaccttcatcatgatcaagcctgatggcgtccaaagaggccttattggcgagatcattagcagatttgagaagaaaggtttctacttgaaaggtttgaaacttgttactgtggaccgtccttttgctgagaagcactatgctgatttgtctgccaagcctttctttagtggtttggtggattacattatctctggccctgttgttgccatgatctgggagggcaagaatgttgttacaactggccgaaagattatcggagccacaaacccagctcaatctgagcctggaactatccgtggtgactttgccattgacattggaaggaatgttatccatggaagtgatgcagttgaaagtgctaacaaggaaattgcattgtggnttcccttgaggccctgctaactggcaaagctcccaacac

SEQ ID NO: 40699 - DNA, 538 bp, Glycine max
  Clone ID: LIB3065-009-Q1-N1-B2.R1
atcaataattgacaatttatctatagagatgaggatggaatattataatgtaattgcatctgcatcctcaaaaatggctcataggaaaaaacattaacaatcaacaaggtaaaagcaaaactggtctgggatttaatttatcaaactgtgacataaatagagcctgaaatgcaagccaaggtaccaaactcttaaacaaaaaagtccaacaacggacagaaacagaaaacatgtagataatctggatcaacctaaggcaatttcaagatcaacttgaggcatatgatttactcatagatccaagagtgttgggagctttgccagttagcagggccctcagggaaccacaatgcaatttccttgttagcactttcaactgcatcacttccatggataacattccttccaatgtcaatggcaaagtcaccacggatagttccaggctcagattgagctgggtttgtggctccgataatctttcggccagttgtaacaacattcttgccctcccagatcatggcaaaacagggccagagat

SEQ ID NO: 40700 - DNA, 505 bp, Glycine max
  Clone ID: LIB3065-009-Q1-N1-B2.R2
atcaataattgacaatttatctatagagatgaggatggaatattataatgtaattgcatctgcatcctcaaaaaggctcataggaaaaaacattaacaatcaacaaggtaaaagcaaaactggtctgggatttaatttatcaaactgtgacataaatagagcctgaaatgcaagccaaggtaccaaactcttaaacaaaaaagtccaacaacggacagaaacagaaaacatgtagataatctggatcaacctaaggcaatttcaagatcaacttgaggcatatgatttactcatagatccaagagtgttgggagctttgccagttagcagggccctcagggaaccacaatgcaatttccttgttagcactttcaactgcatcacttccatggataacattccttccaatgtcaatggcaaagtcaccacggatagttccaggctcagattgagctgggtttgtggctccgataatctttcggccagttgtaacaacattcttgcc

SEQ ID NO: 40701 - DNA, 600 bp, Glycine max
  Clone ID: LIB3065-018-Q1-N1-B1.F1
aaaagaaagcacgttgaagattgtaacttgtaacaacaactatggctagcgatggcagcgaaagttcaggctagtgtcaccggcgttcaaaaacggggggaagttaccgaggcactacaccgacgatggtcagggtacgaagaagaacatatcccctccattggagtggtataacctcccggaggacgaagactcttgccctcgtggtggaggatattgatgcgaccgattctggtgggcccatggtgccatggactcactgggtcgtcgcaaacatcttggccacggtgaagggcttgccaggaggattttccggcaagtcggccgagatggggggcgactacgcggcgatcaaggaggggaacaatgacctgaaggtgcctgggtggaatgggcccaggctgcccacgcctggacacaggattcagtttaggctctatgctttggatgatgagctcaagcttggtaacaagttgacgaaggagaagttgttggaagataccattgaaggacatgtgttaggagaagcgaccttgatggctatattctaatgtgacaacatattgtgggtgcattgtctttggctttatacatgtacca

SEQ ID NO: 40702 - DNA, 608 bp, Glycine max
  Clone ID: LIB3065-018-Q1-N1-B1.F2
aaaagaaagccgttgaagattgtaacttgtaacaacaactatggctagcgatggcagcgaagagttcaggctagtgtcaccggcgttcaaaacggggggaagttaccgaggcactacaccgacgatggtcagggtacgaagaagaacatatcccctccattggagtggtataacctcccggaggggacgaagactcttgccctcgtggtggaggatattgatgcgaccgattctggtgggcccatggtgccatggactcactgggtcgtcgcaaacatcttggccacggtgaagggcttgccggagggattttccggcaagtcggccgagatggggggcgactacgcggcgatcaaggaggggaacaatgacctgaaggtgcctgggtggaatgggcccaggctgcccacgcctggacacaggattcagtttaggctctatgctttggatgatgagctcaagcttggtaacaagttgacgaaggagaagttgttggaagataccattgaaggacatgtgttaggagaagcgaccttgatggctatattctaatgtaacaacattattgtgggtgcattgtctttggctttatacatgtaccattttaa

SEQ ID NO: 40703 - DNA, 58 bp, Glycine max
  unsure (1)..(58): unsure at all n locations
  Clone ID: LIB3065-018-Q1-N1-B1.R1
aaaatggtactgtnataaagccaaagacaatgcacccacaaatatgttgttacattag

SEQ ID NO: 40704 - DNA, 540 bp, Glycine max
  Clone ID: LIB3065-018-Q1-N1-B1.R2
aaaatggtacatgtataaagccaaagacaatgcacccacaatatgttgttacattagaatatagccatcaaggtcgcttctcctaacacttttaaaatggtacatgtataaagccaaagacaatgcacccacaatatgttgttacattagaatatagccatcaaggtcgcttctcctaacacatgtccttcaatggtatcttccaacaacttctccttcgtcaacttgttaccaagcttgagctcatcatccaaagcatagagcctaaactgaatcctgtgtccaggcgtgggcagcctgggcccattccacccaggcaccttcaggtcattgttcccctccttgatcgccgcgtagtcgccccccatctcggccgacttgccggaaaatccctccggcaagcccttcaccgtggccaagatgtttgcgacgacccagtgagtccatggcaccatgggcccaccagaatcggtcgcatcaatatcctccaccacgagggcaagagtcttcgtcccctccgggaggttataccactccaat

SEQ ID NO: 40705 - DNA, 592 bp, Glycine max
  unsure (1)..(592): unsure at all n locations
  Clone ID: LIB3065-022-Q1-N1-H5.F1
ctcgcagtncggagngnnaagaactaacaagaggcgaagtanaacttgtccgaagaataacaccgggaaagaaagagagtgaagaagggtataagcgtccttgtgaaggcactagggtgttctgaactgatcctctccctgggtctggcactgtaaaattcaacgtcaaccccataatatacttgaagaaacgcttccatcttctctctatttgtttcaacttcagttatgcgtttctctctctagccagccatcatcactatgtcatccccaaactccgtccctcagtcccacgcgccgctccttctcccgcgccccgatgccgccgcccgcctccccatcctagcgctcctcctcggccgccgcggcaactccgccgtggtccgggagacggcggcgcgtgacgtggaggagcgccggccgactggacctactcgaagccggtggtggcgctcgacatgacgtggaaatggcattcgtgctggtctcggcggtgatgctcgcctgcaacgtcaaagagaaccccaacacgccgatccgctggtggatctgcggctaacgctgcagtgcctcgtccaagtggccctcgtgt

SEQ ID NO: 40706 - DNA, 606 bp, Glycine max
  unsure (1)..(606): unsure at all n locations
  Clone ID: LIB3065-022-Q1-N1-H5.F2
ctcgagccgctcgagccgggnagnaactaacaagaggcgtaagcgtaaacttgtccgaagaataacanccgggaaagaaagagagtgaagaagggtataagcgtccttgtgaaggcactagggtgttctgaactgatcctctccctgggtctggcactgtaaaattcaacgtcaaccccataatatacttgaagaaacgcttccatcttctctctatttgtttcaacttcagttatgcgtttctctctctagccagccatcatcactatgtcatccccaaactccgtccctcagtcccacgcgccgctccttctcccgcgccccgatgccgccgcccgcctccccatcctagcgctcctcctcggccgccgcggccactccgccgtggtccgggagacggcggcgcgtgagctggaggagcgccgcgccgactggacctactcgaagccggtggtggcgctcgacatgacgtggaacatggcattcgtgctggtctcggcggtgatgctcgcctgcaccgtcaaggagaaccccaacacgccgatccgctggtggatctgcggctacgcgctgcagtgcctcgtccacgtggccctcgtgtggctc

SEQ ID NO: 40707 - DNA, 558 bp, Glycine max
  unsure (1)..(558): unsure at all n locations
  Clone ID: LIB3065-022-Q1-N1-H5.R1
aagctgaaattagactgccacactttccattgttttcttccatataaacaaatttgatacaagaaatatgacgattttcaaatgactaataaaggagaaataaggatcaaatgaaatcgttaacttatttaaaagatctctatacggcacctttccttcttacctctacctttttctctactgaagcaattaagcaacaaaacaatgacagctaaaccgagcaaattgggagacgttctattttttcatgtcttgatattatctacatatacgcatcaggggttgaaaacactgagctgttatataataaaactcagcttgatataatatatctttgatcgcctttagtattgtcacacctgttcatttcccttgagaatattatacttgcaaagaggacaagttgcattcatctttaaccatttcactatgcatgtagaatggaaatgatggttacaaggaagaacatgaagttcagctccatcctcataagaagagatgcatatacagcattctgcatcctctggtgnaagtgttcgttcattcaccgaataaccg

SEQ ID NO: 40708 - DNA, 569 bp, Glycine max
  Clone ID: LIB3065-022-Q1-N1-H5.R2
aagctgaaagttagactgccacactttccattgttttcttccatataaacaaatttgatacaagaaatatgacgattttcaaatgactaataaaggagaaataaggatcaaatgaaatcgttaacttatttaaaagatctctatacggcacctttccttcttacctctacctttttctctactgaagcaattaagcaacaaaacaatgacagctaaaccgagcaaattgggagacgttctattttttcatgtcttgatattatctacatatacgcatcagcggttgaaaaccctgagctgttatataataaaactcagcttgatataatatatctttgatcgcctttagtattgtcacacctgttcatttcccttgagaatattatacttgcaaagaggacaagttgcattcatctttaaccatttcactatgcatgtagaatggaaatgatggttacaaggaagaacatgaagttcagctccatcctcataagaagagatgcatatacagcattctgcatcctctggtgaaagtgttcgttcattcaccgaataaccgttgctggtct

SEQ ID NO: 40709 - DNA, 487 bp, Glycine max
  unsure (1)..(487): unsure at all n locations
  Clone ID: LIB3065-022-Q1-N1-H5.R3
cacgantgccatgttccacgtcatgtcgagcgccaccaccggcttcgagtaggtccagtcggcgcggcgctcctccagctcacgcgccgccgtctcccggaccacggcggagtggccgcggcggccgaggaggagcgctaggatggggaggcgggcggcggcatcggggcgcgggagaaggagcggcgcgtgggactgagggacggagtttggggatgacatagtgatgatggctggctagagagagaaacgcataactgaagttgaaacaaatagagagaagatggaagcgtttcttcaagtatattatggggttgacgttgaattttacagtgccagacccagggagaggatcagttcagaacaccctagtgccttcacaaggacgcttatacccttcttcactctctttctttcccggtgttattcttcggacaagtttacgcttacgcctcttgttagttcttcccggctcgagcggctcgag

SEQ ID NO: 40710 - DNA, 621 bp, Glycine max
  Clone ID: LIB3065-022-Q1-N1-H5.R4
ttgctggtctccataggaatcattgatcctcctccctcaccaggtgtttcctcattgcttaacaattgaaatctgtattttggaagatactgagatctgattctgatgcaccctcctgtcctgcaacagcatagagaatagcaataatacagggcaaacaacaacagagggcaattccaatcaagcatgccaaaacaacacaaaagatagcaaagaagacatcaaatgccaaaaagacaacagacaaccagtataaacgtggagcatcttgcagcagaatatcaccaccagagacaacccaataaaagcccaccatccaccaaagtaatgaaatcatggtattcaatgacgcacatcgttttgtgaatccggaggaagaggaactcccggaggttccaacatcgtcctcgtcgctatcgttgacgtcgtcgtattggaggctggcagcagattcctcgtccctgggagcgtcgttcctcctgcggtactcgagccacacgagggccacgtggacgaggcactgcagcgcgtagccgcagatccaccagcggatcggcgtgttggggttctccttgacggtgcaggcgagcatcaccgtcgagaccagcacgaatgccatgt

SEQ ID NO: 40711 - DNA, 642 bp, Glycine max
  unsure (1)..(642): unsure at all n locations
  Clone ID: LIB3065-022-Q1-N1-H5.F5
cgttgctggntctccatagnaanattgatcctcctccctcacaggtgtttcctcattgcttaacaattgaaatctgtattttggaagtatactgagatctgattctgatgcaccctcctgtcctgcaacagcatagagaatagcaataatacagggcaaacaacaacagagggcaattccaatcaagcatgccaaaacaacacaaaagatagcaaagaagacatcaaatgccaaaaagacaacagacaaccagtataaacgtggagcatcttgcagcagaatatcaccaccagagacaacccaataaaagcccaccatccaccaaagtaatgaaatcatggtattcaatgacgcacatcgttttgtgaatccggaggaagaggaactnccggaggttccaacatcgtcctcgtcgctatcgttgacgtcgtcgtattggaggctggcagcagattcctcgtccctgggaagcgtcgttcctcctgcggtactcgagccacacgagggccacgtggacgaggcactgcagcgcgtagccgcagatccccagcggatcggcgtgttggnggttctccttgacggtgcaggcgagcatcaccgccgagaccagcacgaatgccatgtnccacgtcatgtcgagcg

SEQ ID NO: 40712 - DNA, 140 bp, Glycine max
  Clone ID: LIB3065-022-Q1-N1-H5.R5
ctgcccatatgagggacttgcagagaaatggagagagaagccagaagagcatccatcatcttgtagttgctagacagtacaagttcttgcacagcctgtttgtattgtaatctttatcgtatactattctgtttatgggg

SEQ ID NO: 40713 - DNA, 371 bp, Glycine max
  Clone ID: LIB3093-058-Q1-K1-B2
ctacccatcgtcccactcgtgccattggattgtgctactagtgatgatgctataatcctcatcctaacattctcctgcttgatgggtataccagactctgcgctgggactgcctctttcacccgggactaccaacgttcatgtcagcacaccttgctgcacatgagcatctgcgccaatggtgtattccacgtgtatatctgtatatatcaatgccccgtattagcaacaacactgcctatctaatcactgaactgatgaacattgtcttgcaccatagctcttggtctcagaattagtgtactgacttccactcgttcaacctatcaagttctcttgacgtcactggcaacaatttctatccttcaacaa

SEQ ID NO: 40714 - DNA, 454 bp, Glycine max
  Clone ID: LIB3093-058-Q1-K1-B4
cccacgcgtccgctcaacaaatgaatattctcggacaatcattcaacgaatcaaacaacgggagctactcttgttcgtcgccggagactggtagctcctctaacattccaaacacttttcactccgacgaggaagtgcacacactagcttcggcgcgtgctaagaaacgtgcggggcgtcgaatttttaaggagacaagacacccggtgtaccgaggagtacgaaggaggaacaacaacaagtgggtctgcgaggttcgtgttcccaacgacaagtccaccaggatttggcttggaacgtatccagtgcctgagatggccgtacgtgcgcacgacgtcgccgcgctcgcgcttcggggcaagtcggcttgcctcaacttcgccgactcggcgtggcggctgcccttgccggcgtcgacaaatgcgaaggagatacggcgagtggcggctgcggc

SEQ ID NO: 40715 - DNA, 331 bp, Glycine max
  Clone ID: LIB3093-058-Q1-K1-B5
gcgggttgggacctagataggcttcaatgtcaatgtctgcgactactatgatcactggacatgagttccttaaacgactttacattaaaaatcaacaggttttgacttgatgaaggatctaatttaataacaccacaaaacagagaaaggtgaaggggttttctcctttcttttggataaatcatgtccttacattctttccaattgtacctttactttttctggctactttgacttttcctgaatgggattactgcttgatcaatgcaaagctattgtaacttgtaagtcaccttatgtgtatatttagaaaataaataaaaattcattc

SEQ ID NO: 40716 - DNA, 452 bp, Glycine max
  Clone ID: LIB3093-058-Q1-K1-B6
tccgcttggattgtgtctttagggatgatgctgaaatccctaacctaaaattcccctccctgatggctttaccagaggttgggttgagactgctcctttcacccgttacttccaaccttcttctccgcacagcatgctgttcaatagggcttgcgcttcccgtgtattccacgtttaaagctattgagaacaatgacccatatgagcaacaaaggtgcctattgtattgggcagcttatggttcttttagtgctgcagaaatgtttgctgaaaaattattttcctggattccactctatcatcacatgaagtttgcatttcttgtttggctacagctgcccactcttgatggtgcaagacaaatgtattctagtcacttgcagccattcctgttgaagcatcaagctagaatggatctgattgttgaatttgtgtatggtgcaatgagtaaa

SEQ ID NO: 40717 - DNA, 452 bp, Glycine max
  Clone ID: LIB3093-058-Q1-K1-B7
gttatcaacagattcatctcaacatgttcgctctgcactggcttctgttataatgggtatggcaccggtgttagggaaggatgctacaattgagcaacttctgcctattttcctttctcttttgaaagacgagtttcctgatgtcaggctaaatattatcagcaagcttgatcaagtgaaccaggttattggtattgatttgttatctcagtctctgttgccagccatagtagaattagctgaagatcggcactggagagttcgacttgcaatcatagaatacatacccttattggcaagccagttgggtgttggtttttttgatgataagcttggagctctttgcatgcaatggctaaaggacaaggtatactcaatccgtgatgcagccgctaataacatcaaacgcttggcagaagaatttggaccggattgggcaatgcagcacatta

SEQ ID NO: 40718 - DNA, 452 bp, Glycine max
  Clone ID: LIB3093-058-Q1-K1-B8
cggataccagcatggaggagattcagaaggatttgtctccattggttacgcagttggcacctgcagaaaatgagaatggagctaaaatacctttcatgatggcaagtgaggggatcaaggagcgaaacatcattcacaaggtcacatcttcattaactggatcaattattgttgaagatgtaatttatgaaaatgttgatagtgaagtcagttgtatttttccttctagagagttggtgtttcgacgccttgtatttgagagagctgcaaatttggtgcagtctgaagctctgctaaaagatgaacagtcacctactaaattggttagtgagacaggcaggaagaaaaacaatgcatcttccaaatctagaaaaagtggatctcagagacacagtattggagcaagcagccagttgaccgtctatcatggctatgtagctagttcttatcat

SEQ ID NO: 40719 - DNA, 359 bp, Glycine max
  Clone ID: LIB3093-058-Q1-K1-B9
tgcaaatcagccactgctaccttgtactgccgccccgacgcggccttcctctgcggcgcctgtgactctaaggttcatgccgccaacaagctcgcatcgcgccacccgcgcgtcgtgctctgcgaggtgtgcgagcaggcgcccgcgcatgtgacctgtaaagccgacgccgccgcgctctgccttgcctgcgatcgcgatatccactccgccaaccccctcgccagccgccacgagcgcatccccgtcacgccgttcttcgagtccgtacattcagtcaaggcctcctcgccgatcaacttccaccaccgcttcttctccgacgccgacgctgatgctgacgtcagcaccgaggaggc

SEQ ID NO: 40720 - DNA, 133 bp, Glycine max
  Clone ID: LIB3093-058-Q1-K1-C10
ttatgactacaaaccaattaagaagccaccagtgtacaagcctccagtgtacaagccaccagtgtacaaaccatcggtttataatcctataatatcggtttacaaacctgaaacaccggtttacaatctacca

SEQ ID NO: 40721 - DNA, 325 bp, Glycine max
  Clone ID: LIB3093-058-Q1-K1-C11
ataatctccaaaagaggactcccaaatataattacagttgtgtggagcacagttcgtccggtggtcaaatcatgctgatggaaatagagtttgcattgcttcaatacaagatatatacagaaaatagtatcaaatgtacaagcttctttaaattttgatgggcctcccctgccgttaaatttatgttctcacaactagcatacaatgaatcaacaactttttttattttattattactcacatgttagttcaaaaaaaaaaaacaataggaatatgaaaaacaataaaagaaaaaaaaaagaatagtaaaaataattttgaattt

SEQ ID NO: 40722 - DNA, 182 bp, Glycine max
  Clone ID: LIB3093-058-Q1-K1-C12
gttttgttagttattttttaagtagttacgttttcactcttgatcgttagttttagttatttatttatgaaagtgttaatttgtaattaaagaaaaagtgagacttgattggatttcttatgctagattttatcgtatctgtatggtataattaaaaaacatggaagatggatttgttcaag

SEQ ID NO: 40723 - DNA, 446 bp, Glycine max
  Clone ID: LIB3093-058-Q1-K1-C2
gtctgctgttagatctgtacccgcctagccattgatttggaaaagtccaacttcaaggatgagtaagcttcagagtgatgctctaagagaagctatctcaggaatcatggctgattccaaggaaaagaacaggaaatttgcggagaccattgaactccaaattgggttgaaaaattatgatcctcagaaggacaagcgtttcagtggctctgctaagttgcctcatattcctcgccccaagatgaagatttgtatgcttggagatgcccagcacgttgaggaggctgagaagataggattggactacatggatgttgaggccttgaagaagcttagcataaacagaaagttggtgaaaaaactagccaaaaaatatcatgcctttttagcctctgaagcagtcatcaagcagatttctcgtctcttgggacctggtctcaacaagg

SEQ ID NO: 40724 - DNA, 324 bp, Glycine max
  Clone ID: LIB3093-058-Q1-K1-C3
atttgcgcgaggatttatttgcagggaagcttaaataagggaatgtgataaaggaagcactgaataggcatgacgcggaattattaacctcctcggggagttatgctgaccatcaacttggatacaggaagccagctctaatattgatagttggtgttaactgtcgaaggatgactacatatccggcaaatgctgtcctatagattgaagaatgagcgtgctaagatatcgcaggctgctgatgatgcatgtagagcagctgctagcggtcaggttgaaatatcctccgaacggactggctgcgatattgatgtggctgagatc

SEQ ID NO: 40725 - DNA, 453 bp, Glycine max
  Clone ID: LIB3093-058-Q1-K1-C4
gtcggaaaagggatagatcgcctgaaacaagaagtgctgatggtatggatactgagggtgacacacctagcaaaaaacagcgtctgagtagatcactgtcacggtccaggtcagtgtcacgcccaccacatgaagttgtgcctggagaaggcttcaaggattctgctcaaaaggtcaaggcaatcaaacttgcaaagaaatctgtcaagaagagaaacaaggatgcccgtcgtggagaagctgatagagtcatacctaatctgaagcccaagcacttgttttctgggaagcgttccaatggaaaaactgagagacgctaggacaggggatgctgtttaatgcattttagaggacacctgttggcatttttcagggctgccaaaaaaaattgttatttaatgtaagtgttttgttggagtttaaggttctgtgctggcaacatagtttacttat

SEQ ID NO: 40726 - DNA, 443 bp, Glycine max
  Clone ID: LIB3093-058-Q1-K1-C5
acaaccttcagtggtgcatgttcatatcaagaggcatttgatgaaggaactgccagatccagatgaggctgttgctcaatggtgtcgagatatatttgtggccaaggatgctttgttagacaaacatatggctgagggtacttttagtgatcaagagctgcaggatactggtcgaccaataaagtctcttctggtagttatatcttgggcgtgtctggttgttgcggggtctgtaaagttcctgcaatggtcttcgttactctcttcctggaagggtgttgcattttcagcttttggtttggcagttgtaactgcacttatccaaattctgattcaattttcacagtcagagcgttcaaactcggccaagatcgcgcctgcaaagtcaaaaaacagggggtcttgatatatttggcgaacttaaagttgcatttatgtgtgat

SEQ ID NO: 40727 - DNA, 454 bp, Glycine max
  Clone ID: LIB3093-058-Q1-K1-C6
gtctgctgttagatctgtacccgcctagccattgatttggaaaagtccaacttcaaggatgagtaagcttcagagtgatgctctaagagaagctatctcaggaatcatggctgattccaaggaaaagaacaggaaatttgtggagaccattgaactccaaattgggttgaaaaattatgatccccagaaggacaagcgtttcagtggctctgttaagttgcctcatattcctcgccccaagatgaagatttgtatgcttggagatgcccagcacgttgaggaggctgagaagataggattggactacatggatgttgaggccttgaagaagcttaacaaaaacaaaaagttggtgaaaaaactagccaaaaaatatcatgcctttttagcctctgaagcagtcatcaagcagattcctcgtctcttgggacctggtctcaacaaggcagggaag

SEQ ID NO: 40728 - DNA, 301 bp, Glycine max
  Clone ID: LIB3093-058-Q1-K1-C7
cccaaacaagaatcctcaatatgagagatgccgaattgttggctgccaaagaagagatcagctctcttgagaaggaattttcttcatacaaagttcgtgcacatgcacttcttcaaaagaaggatgctgaacttgctgctgcttaagattctgaacaacttaaagctctaaaagaaactcttaaaggatatttgatcaatattttggaaaaaaacttggtttgataatggatattaaattattcaccattggcatccttaatttcttccagaaggtggaaattgaagtataatcattacca

SEQ ID NO: 40729 - DNA, 411 bp, Glycine max
  Clone ID: LIB3093-058-Q1-K1-C8
attgatactgggggtttggcacctttcaaaaaacatccttttaatataacactgtcactgtccatgttagtttcaagcccaccacatgaaatttttccttgaaaaagcttcatcgattttgctcaaaaagtcaatgctattaaacttgctaagaaatctgtcaagaatataaacatggatgcccttccttgacaaacttatagagttatacctaatcttaatcccaagcacttgttttctggtaagcaatttcaatttaaaaactgagagacgcttggacatgggatactttttaatgcattttatagtacacctgttagcatttttcaagtcttccaaataaaaatgttatttaatggtaattttttgttggactttaatgttctgtgctggctacataatttacttata

SEQ ID NO: 40730 - DNA, 385 bp, Glycine max
  Clone ID: LIB3093-058-Q1-K1-C9
cccacgcgtccgcaacattcaacaatggtacctcaagctttgtcagtgcctgcgagtgccagcttcactatcgcttctcgcaccagaagtccctcccacctcgtattttctcacagaaacccgtgctcgatagcttcttccttaccaaacccatatggccattcatcaggagttgggttatcaagtaaaagccgtggttttcctttaaaacttgatgagaaaaatatccatggtgcgagtacaagttatggtgcaattgaagccaaggggaatccaccaataacacccgcagtgatgactcctggaggacctcttgatctctcatctgttttgtttaggaatcgtataatattcataggacaaccagtcaattcacaagtggctc

SEQ ID NO: 40731 - DNA, 461 bp, Glycine max
  Clone ID: LIB3093-058-Q1-K1-D1
agcaaatgagagctatgactgagatgcaaggggttctttgctcaacaagacccatgaggatgggaccagcctctaataaaacccctgccactcagtcccagccaaaagcttcatatctgaattctcaacctcaaggctcacagaatgagaatgatccaaataatacgactatttttgttggcaatttggatcctaatgtaaccgatgatcatctgaggcaagttttcagccagtatggagaattagttcatgtgaagattccagcaggcaagcgatgtgggtttgtccaatttgcagacaggagctgtgctgaagaggcccttcgggtgttgaatgggacgctgttgggtggacaaaatgtgcgtctttcatggggtcgcagtccttcaaacaaacaggctcaggcagatccaaaccagtggaatggtgctgctggtgctggttctggtggtggatattat

SEQ ID NO: 40732 - DNA, 364 bp, Glycine max
  Clone ID: LIB3093-058-Q1-K1-D10
tgccacgcgtccgctccaatctgcacccacccccacttacctaccttatctctctgtgtctctctctctcaatcgttcttcacgagagagagagacatggacgccgtcggtcaaaccagaggccttctctctcttcccaccaaccccaaaaccagggtttcgcatcatctgcatccatctcacggcctcaaacaccgttttctctctctaaaacccaaacccctctccgacccttctctctccgacgacgtcgccaaatttcacccctttggcccaaagccccaaaatttattcatctgccgggccgaggccgctgctgccgcagatgggcctgcccagccccgcttcggggaagccgaggtcg

SEQ ID NO: 40733 - DNA, 315 bp, Glycine max
  Clone ID: LIB3093-058-Q1-K1-D11
ctttgaacgacgcagaaggttcatccaatctccgaatcctttaatcgcattgcaaccatgtcgaggagaaaggtcagagagccaaaggaggaaaacgtgactcttggcccagctgttagagatggcgaacatgtctttggcgtcgctcgcatatttgcctcctttaatgataccttcattcatgtcactgatctgtctgggagggaaacgcttgtccgcatcactggtggaatgaaggttaaggctgacagagatgaatcatctccttatgctgctatgcttgcagctcaggatgttgctgccagatgcaaggaa

SEQ ID NO: 40734 - DNA, 398 bp, Glycine max
  Clone ID: LIB3093-058-Q1-K1-D12
ttgccaggctgtagttgcagctgctataggagcaaagtttggaattgatggaaaccctggtgatttgccaaaatggtatgcagttgttgtggttctcttcatttgcatttacgtatcagcatttgcctggtcatggggtcccctaggttggttggtgcctagtgagatctttcccttggagatccgttcggctgctcaaagtataaatgtgtcggtgaacatgtttttcactttcttgattgcacaagtcttcttgacaatgctttgccacatgaagttcggcttgttcatcttctttgcctttttcgtgttgatcatgacattcttcatctacttcttcttgcctgaaaccaaaggcattcccattgaagaaatgaaccaggtttggaaggcacacc

SEQ ID NO: 40735 - DNA, 371 bp, Glycine max
  Clone ID: LIB3093-058-Q1-K1-D3
cacttgttcactcatttacacactcttcccttctccttcttcttattatatctcactctatggttctgggttatactccaccaaactaacctctattcacctctacatattcatacatctgtaatctcccatactactcctacattgcccatgaatcccataacccacacttctattaatacaattcttcccctaacttaccatttcctactaacttgctcttctctgcaccttcctcgctaattccttcattctaatattatcatccgccaactatgttgccttcttccatttgaactcaacaactaagcttcagacggaaacaactgtctccttattactcttacacgagtacactactttcattgtct

SEQ ID NO: 40736 - DNA, 452 bp, Glycine max
  Clone ID: LIB3093-058-Q1-K1-D4
cccacgcgtccggttttgcagccatggaaacaggcatagcatgctacactcgcgggcctttgctgcctagtgtttcttccaagcactctccaccctccatctctccatcttttggcttgaggagtctgaaatcgagctctttatttggagaatctctaagagtggcatccaaatcaacactaaaggtttcaaagacaaagaatacttcactcgtgaccagatgtgaaattggtgacagtctggaagaattcctcacaaaagcaacaccagataaggggttgatcaggttgttggtgtccatgggagaagcattaagaacaatttccttcaaagtgaagacggcttcttgtggtggaacacaatgtgttaatacttttggggacgagcagcttgcaatggatttgctagctaatcagcttctttttgaagccttaaattactctcatttctgc

SEQ ID NO: 40737 - DNA, 429 bp, Glycine max
  Clone ID: LIB3093-058-Q1-K1-D5
atgaaatgttcaaagatgtgagaatagagaatttagaatgtaattgaattttaacactatggtataccccctacctcatgtggttgaccttgtgtaaaaaaaaaaaaaaaaaaataaaaaaacaaaaaaaaaaaaaaaaaaaaaaaaaaaaaaaaaaacaaaaaaacataataaaaaaaaaaaaaaacataaaaataaaaaaaaaaaaaaaaaaaactattaacaaaaaataaggggcgaacttttaatgtgccaaacttaacatacacgaaaatgtggaacctaatccctcaaaaagtgtaacccaaagtcaattaaggagaacaatgtttaaatcattgaattttggaaaaccgggtgctttaaagatttaataaaggtcgtatatgtccataattagccattttgtgttaaagccaaagggatttt

SEQ ID NO: 40738 - DNA, 459 bp, Glycine max
  Clone ID: LIB3093-058-Q1-K1-D7
gatcaactgaggagagtgagagaaaagagaagagaagatgacaacacgcttcaagaagaacaggaagaagaggggccacgtcagcgctggccacggtcgaatcggaaagcacaggaagcaccctggaggacgcggtaacgccggaggcatgcaccaccacaggatcctcttcgacaaataccaccctgggttcttcggcaaggtaggaatgcgctattttcacaagcttcgcaacaaattctactctccgatcctcaacatcgacaagctgtggtccctggtcccgcaagaagtgaaggacaaggcctccaaggagaacaaggcgccgctcatcgacgtcacgcagttcgggtactttaaggttctcggaaagggcgttttgccgcagaaccagcccgttgtggtcaaggccaagcttatttccaagatcgctgagaagaagatcaaagaggctggcgg

SEQ ID NO: 40739 - DNA, 452 bp, Glycine max
  Clone ID: LIB3093-058-Q1-K1-D8
cccacgcgtccggttttgcagccatggaaacaggcatagcatgctacactcgcgggcctttgctgcctagtgtttcttccaagcactctccaccctccatctctccatcttttggcttgaggagtctgaaatcgagctctttatttggagaatctctaagagtggcatccaaatcaacactaaaggtttcaaagacaaagaatacttcactcgtgaccagatgtgaaattggtgacagtctggaagaattcctcacaaaagcaacaccagataaggggttgatcaggttgttggtgtccatgggagaagcattaagaacaatttccttcaaagtgaagacggcttcttgtggtggaacacaatgtgttaatacttttggggacgagcagcttgcagtggatttgctagctaatcagcttctttttgaggccttaaattactctcatttctgc

SEQ ID NO: 40740 - DNA, 279 bp, Glycine max
  Clone ID: LIB3093-058-Q1-K1-D9
cacaacaactccttctactgcctctctctagctagttccttcttcttcttcaaagattctgtgctatataaaatcaaaggaagaaaagaggcctaattaagtagctttcagttgtggaatcatcatattgcagcgttgatggggcatttttcatctgcgttcaataggttggcaaagtcttttgcaacgaagaaagggaggagttctgatgaatgtaatggaagagaagcggcggtagcaatggcaaaggaagcccaaagaaatcacttcatgttgcat

SEQ ID NO: 40741 - DNA, 245 bp, Glycine max
  Clone ID: LIB3093-058-Q1-K1-E1
cccactcgtccgatccgtacacctcaacatccgtgaattgcatgcaatatgaaactgcatcacgtcatgcttcacgaacaacaggatgatcaaattccacgaccagtctttcctaccatcgaatcagattgctcaagaagcactctccacgatacacaaacacctaactacttaaccatatacagcatctatgagacaagtactatcctacgttcttatgcaacgtaagaataccctatttttac

SEQ ID NO: 40742 - DNA, 386 bp, Glycine max
  Clone ID: LIB3093-058-Q1-K1-E10
cccacgcgtccggattagactcccgaagaaccggaccaggctatggctgggaacgttcgacaccgccgaggaagccgctctggcgtacgacaaggccgcgtacaagctccgaggtgacttcgccaggctcaacttccccaacctccgacaccagggttcctccgtcggtggtgacttcggggagtataagcctcttcattccgccgttgacgccaagcttcaggccatttgcgagggcctggctgagctgcagaaacaggggaagaccgagaagcctccgaggaaaacgcgatccaaactcgcttcttcgccagagaacgacaacaacaacgacaacaactcttgtaaggtcgaaactgcttcctctctctgaaggtcttcgccgt

SEQ ID NO: 40743 - DNA, 416 bp, Glycine max
  unsure (1)..(416): unsure at all n locations
  Clone ID: LIB3093-058-Q1-K1-E11
ctttcatttacacaaaatcatcaatggcaatggcctctcttgcatcctcaagtgttcttttgaacctcttgttcatcgtttctgcgctccattcgggagcagcagcagcaagaattctgagtgaaaaggaggaccaacaacagttgcagttccaataccacaaaggccctcttctcagcggcaatatctctgtcaatctcatatggtacggtagcttcaagccttcccagcgagccatcatctccgatttcatcacctncctttcctcttctccataatccacagcccaaaccatncgtcgccacgtggtggaaaggcactgaaaaatactaccaactcatcaagtcggaactcaaacccagccttacccttgctctcggtgcccaaatcctcgacgagaactactcccttggaaa

SEQ ID NO: 40744 - DNA, 359 bp, Glycine max
  Clone ID: LIB3093-058-Q1-K1-E12
cccacgcgtccgcccacgcgtccgtccacgcgtacgcccacgcgtacgctctctcacaataaccactaattctcccaactcaatttctctctcaaccggcccaatttagcataagcccagcatggccaccgcaacagcagcagccacctcgtccttcatggggacgcgcctcctggaggcccactccggggcggggcgggtgcaggcccggttcgggttcggcaagaagaaagccgccgtcccgaagaaagtttccagggggtcgggctctagctccgataggcccctgtggtatccgggcgccaaggcgctcgagtacctggatgggagccctgtcggagactacggattcgacccat

SEQ ID NO: 40745 - DNA, 204 bp, Glycine max
  Clone ID: LIB3093-058-Q1-K1-E2
atccctcctctctgctttcatgttttataaaatcatcttctacttttagaacatattcgaccgtgtcttggtgatgttcttctatttgccccttgtgaatcacccggaagaaacccaacttataatttttttaagctaaagccatcagtattcttctagacacttttaaaaaaatctctgatattgagactattgggatcaaaa

SEQ ID NO: 40746 - DNA, 218 bp, Glycine max
  Clone ID: LIB3093-058-Q1-K1-E3
attctacaacaactctcgagaaagtacgtatggctgcctacacatcgattagtccttccggctcagtgtgatcatctatcctttcatcctcaaaatccatatttgccgcaactagatcctctatctagctttgttgtcatcaatgcctatccttatccattttccacacgttctttcttaatgccttgccatactataccattttaccttgatggttc

SEQ ID NO: 40747 - DNA, 453 bp, Glycine max
  Clone ID: LIB3093-058-Q1-K1-E4
cttcttttctcttctttcttcttcttccatctctttttttctgcttaaggtctacaaaagttctcttcgtcttctcctcctattgaactttggtcatcacacgagaaaacccacgtctggatcttctggtgtaaaggccattagaagccttttagaaattttcaaattgagttggtgtatagtgttgaagggggtgaaatttggagcccagtttgttacttcatttgaaaggtcatagtttgaaccctctttttctggagatttacctgggaaaagatgatgatgtttgaagatatgggattctgtggcgatttggatatgttatgtggttctcttggggatggggatattgctgtgagacaaactgaaccggatcctgtagttgaagatgactacagtgatgaagaaattgatgtggatgaactcgagaagaggatgtggagggacaaaatg

SEQ ID NO: 40748 - DNA, 453 bp, Glycine max
  Clone ID: LIB3093-058-Q1-K1-E5
cccacgcgtccggtgagtgtgtgtgataataattgggatcaactaatcaatcaatttgaatggcatcatccaattcggctcagctagaagggaacaaacccgcaaagagaaaacccgtgttcaccaaagtggatcagctcaaacctggaaccaacggtcacacgttggtggctaaggtcttgtcctccgacaccgtcgtacacaaaccgcgaccctcttccgcccacaacctcaaacccactgtcatcgccgagtgcctcatcggcgacgacaccggcaccatcgtcttcaccgctcgcaacgaacaagttgatatgatgaaggctggagctacagtaattattcgcaatgcaaagattgacatgttcaaaggatcaatgaagatggctgttgacaaatggggccgtgttgaagtaactgatcctgcagattttgaagttaaagaggataaca

SEQ ID NO: 40749 - DNA, 451 bp, Glycine max
  Clone ID: LIB3093-058-Q1-K1-E6
caaggttggaaagtatgagaagaggatcgacgacatcttgaacaagttcgaccctgtcgttgaaagggtcatcaagaagcgccgtgagatcgtgaggaggagaaagaacggagaggttgttgagggtgaggtcagcggggttttccttgacactttgcttgaattcgctgaggatgagaccatggagatcaaaatcaccaaggaccacatcaagggtcttgttgtcgactttttctcggcaggaacagactccacagcggtggcaacagagtgggcattggcagaactcatcaacaatcctaaggtgttggaaaaggctcgtgaggaggtctacagtgttgtgggaaaggacagacttgtggacgaagttgacactcaaaaccttccttacattagagcaatcgtgaaggagacattccgcatgcacccgccactcccagtggtcaaaaga

SEQ ID NO: 40750 - DNA, 451 bp, Glycine max
  Clone ID: LIB3093-058-Q1-K1-E7
gggaaaaataggtgtttacttggtagtcatattaattgtcattggcaaatactgcctaagagactgtgaaggtctggttgttagaaatttggcatgtatttgatttttttcccacgcgtccgcgttttactacgctctcttggactcagttcagtttcacgaccgatcctacaatggcgacagtcacgttttccttttccgctaaaaccctaactctaccttatcaccccaaaaccccaatctccaactttaccccggtaacgaatcttcgcctccctccttctatcgtgacccgaacccgcaattgtaaccggattcgggcggcgctggatggggatttctcggcgaaaaggagcagcagcagcaacaacaacgaccagagggagacgataatgttacctggttgtgactacaaccattggctgattgtgatggagtttccaaaggaccc

SEQ ID NO: 40751 - DNA, 449 bp, Glycine max
  unsure (1)..(449): unsure at all n locations
  Clone ID: LIB3093-058-Q1-K1-E8
tgacgatggaggctcagagctcacattctatgctctcttaaaagcctccattttctccaaacattggttacctttctggagaagattcaatgttgaacctaagtcaccagaagcttttttcggtggccataaatgtagcaatagttgcactgagtataagccagcatgggtatttatcaagaatttgggcaaagacatgtaaagtgagattgaatcagccgtagcaaggggcgaggttccagataatgcgatgaatcagcacagaagattctcagaattgaatcccaaaaataccaagcagaatcatcaacctatcgtgcagataataattgatggaagagacactaatgctgtanatgaagacggatttcaactgccaagagtcgtatacatggcacgcgaaaaacgacacaactaccctnaccacttcaaagctggagcggttaatg

SEQ ID NO: 40752 - DNA, 356 bp, Glycine max
  Clone ID: LIB3093-058-Q1-K1-E9
caacctttctcttcctcctcactcaaacttcccctctctacgccgttcctcccaaatggatgcaccaatggagttttggggtgttgaggttaaggttggtcagaccgtgacagctgacccaatggatcctgtggattcatacatacacatatctcaggttgcgctcggagaggcgaaaaaggagaaacctaatgagtctgtggttttgtatttgaaagttggtgaacagaagattgtcttgggaaccctatctagggatggcattcctcatctatcgttggatttggttctggactccgattccgagctttcccacacttcaaaaagtgccagtgtctttttctgtgggtcagagt

SEQ ID NO: 40753 - DNA, 400 bp, Glycine max
  Clone ID: LIB3093-058-Q1-K1-F1
accacgcgtccgtcttcctgaacaaagaatatggaagcctcttttcatcactgatgacaggattgtatctggcatttaaactcacgtctgttgttgaaaaggtgcaatccttctttgctgcagtgaaagcattgtcgcgtaaagaaatgcactatggggcttatgcaacatcagagcacgtcaatgcatctggtgatctttgtgctatttgccaggagaagattcatgcttccatcttactacgttgtaaacatattttctgtgaagattgcgtatcagagtggtttgagagtgataggacctgcccattgtgcagggcttttgcaaaacccgcataccttatgtcatttggggatggctatactagcttgtttcttcagctattctgaagtcgtctata

SEQ ID NO: 40754 - DNA, 338 bp, Glycine max
  Clone ID: LIB3093-058-Q1-K1-F10
gctaaaacacaagcagtttctctcaaactgagtcgtgtgaattaaccaagcacatgaagtgaataattttcaaagtacaaacatgaccatggaccggttatcacaaagcagttcggactcacccacacgaggagaccccaaagtgttatccatagagtgtctcaagggaagttccaaagcccacgagtggaccggagacatgcttcaaaccggagacatcgtcgaaaagcttcgaatcggaacttcttctaacgcgcttatcaagcttagatcgccttttaaaaacggcaagagtggcgttaatagaatcctgcaagacttctacaagaagaaagaca

SEQ ID NO: 40755 - DNA, 218 bp, Glycine max
  Clone ID: LIB3093-058-Q1-K1-F11
aacacacacaaacagaggctacgtacgatcaaattaattaagatggcggaagtgaggaacaaacaagtggttctgagggactatgtgagtggttttcctaaggaatccgacatgaacatagttgaaggaaccacaatattgaagcttccacaaggttccaatgatgtgcttctaaaaaatctctacctttcctgtgacccttacatgagaatgctcat

SEQ ID NO: 40756 - DNA, 388 bp, Glycine max
  Clone ID: LIB3093-058-Q1-K1-F12
gttttctgttttctttccgtcgacgttctggctgcgtcccaagaatctctgacgccgttgtcggttttctccggccacggctacttccaacggatggcgacgacgaccacggagttcgatctcgattacgagttccccgatctcgattacgaccttcgctatctcagtctcgccggaatcgatgccctcaccgctttccaaaacctattaccggtcagttctctctctctctctctctctctcactcactcactcaattcacgttcgattggagccatctttgccacgccatcaaacatgttctatgacctatgacgtgccaaactgaaaatctattaccgctcgcgcctgacgcttccttaaccctaataacaatgagaataaataa

SEQ ID NO: 40757 - DNA, 444 bp, Glycine max
  Clone ID: LIB3093-058-Q1-K1-F2
cttctgtctatacactctatcttctcttcacgagctcttgagattttaaaaacccattaaggggggatctcaccgcgagtttttgcgcaatgccgttactatgaatctagcaccgaattagatttgatacactatctacaaccacatcgctagagataaaaacccttacttcttcaaatggagtcggtgccgtcaactccgcacaggggtggcacatactctcccaagacggcagagtatctgatctgaactttcttcggcgacacgcccttcccactctcatcgaagttctggcagacattgctggagctttatctcaatgatcaatggtccactcagcgtcgttaacacgcttgctagctattaaccaaaaacaattgtcacaccatgcatcttgcgaagattttgttacatctagcgtgctgcttgcaaaagtacatgtct

SEQ ID NO: 40758 - DNA, 295 bp, Glycine max
  Clone ID: LIB3093-058-Q1-K1-F3
atcccggtcgaccacgcgtccgggccaattctctcgctgctacatctgtctttccaacgcttgccactgtggtgttctcgagtggctgatggcaatatggttgttgactctttgaatgacgatttgagaatcaacggatcagttgaaccgctgcctgaggactttgatgccacagctgtgattatagatcccgggcctctggcagctgtagacgatgtcatttgtaaggaagaggcgctcatcatttaaggacatgcgaattgggtcattactctgtgaggaaatattcaatacc

SEQ ID NO: 40759 - DNA, 450 bp, Glycine max
  Clone ID: LIB3093-058-Q1-K1-F4
gcacaaagcacttgttactagactggttgaggttaaaactggctctacagctctagcaaccggtgatggagcaaacgatgcgggaatgcttgaacaatgccacttcgctgtatgtatcaccgaattagatttgatacactatctacgaccacatcgcgagagaaaaaaacccttacttcttcgaatggggtcggtgccgtcaacgccgcgcaagggtggcgcatactctccggagacggcggagtatctgatcggaactttcgtcggcgacacgcccttccccctctcatcggagttctggcagaaattgctggagcttcctctcaatgttcaatggtccactcagcgtgttcaacaagcttgcgagctattagccaaaaacaattgtcacaccaggcatcttgcgaagattttgttccatctagcgtgctgcttgcaagagtacatgtc

SEQ ID NO: 40760 - DNA, 449 bp, Glycine max
  unsure (1)..(449): unsure at all n locations
  Clone ID: LIB3093-058-Q1-K1-F5
cataacacaaagcacaaagcaaagctcatccttgagttaaaaaatggcagcagcttcttccatggctctctcatccccatccttggctggcaaggccgtgaagctgggcccatcaaccccagaagtgggaagggtgagcatgaggaagaccgtcaccaagcaggtctcctcaggaagcccatggtacggcccagaccgagtcaagtacttgggcccattctctggcgagcccccgtcctacctaaccggtgagttcccaggcgactacggctgggacactgctgggctttccgcagacccagaaaccttcgccaagaaccgtgaactcgaagtgatccactccaggtgggccatgctcggagccttgggctgcgtcttcccggagttgctgtcccgcaacggngtgaagttcggagaagccgtgtggttcaaggccgggtcccagatct

SEQ ID NO: 40761 - DNA, 452 bp, Glycine max
  Clone ID: LIB3093-058-Q1-K1-F6
cttctccctctacactctctgttctcttcacgagctcgcgagattttaaaaacccattccgttttgatctcaccgggagtttttgcgcaatgccgttaccctgaatctagcaccgaattagatttgatacactatctacgaccacatcgcgagagaaaaaaacccttacttcttcgaatggggtccgtgccgtcaacgccgcgcaagggtggcgcatactcttcggagacggcggagtatctgatcggaactttcgtcggcgacacgcccttccccctctcatcggagttctggcagaaattgctggagctttctctcaatgttcaatggtccactcagcgtgttcaacaagcttgcgagctattagccaaaaacaattgtcacaccaagcatcttgcgaagattttgttccatctagcgtgctgcttgcaagagtacatgtcttcttctgg

SEQ ID NO: 40762 - DNA, 341 bp, Glycine max
  Clone ID: LIB3093-058-Q1-K1-F7
cgataatgcaggagagaagaagaaaaagagaaagaagcagggagagcaggaagaatctcctgaaatgccaagcaagaagaaaggcaaaaaaaagaaaagtgaggactaaagtgaagtcatctactaatcaatcctgtggtgaatgacaaccatttttgtatactcctggcagctcagtagtttgtttggtataatttttgttttcatttttatgcattttgtagctttatacatcctttattattatttaatgggattcgttccatctttcgggacttgagtggataatttgatgcaatcatgtttatgaatggaagatggtggtgcgctaccttttttgt

SEQ ID NO: 40763 - DNA, 360 bp, Glycine max
  Clone ID: LIB3093-058-Q1-K1-F8
ctgatcatcaagctgagttagcgtcagttgtgctgaattttataaaggaaacattgaaactggacaagcttaatgctagtccttgatggaatctgcttcatgatgcaatattgcaacttggtaccttagagaactttgctcgtgctggagagagtcgtctttgattttattagagagaaccatttgtgctttgtggctgcaatatctatatcatatgataaataaggttggggacttggtgcctcctagttgtgtcctacgtttttaaagaatgaaaacattagcgtttgtttagtggatggactttgtagaatgatcctactcctacggtcgtaattagtcatgatatttttctttatt

SEQ ID NO: 40764 - DNA, 345 bp, Glycine max
  Clone ID: LIB3093-058-Q1-K1-F9
gataaggaaaatgggagtctcaggcaacaatgaagttttagtgacaacaaaggtagttgttgactatgatagagcaagtgagctcaaagcttttgatgacacacaagatggtgttatgggacttactgatgctggtgtcacaaagatccctcttatattccataaccccaaaaattctcatcatgatgaatctgatgatggttcaggtagcacacaactcagtgttcctttcatagaatcttgtggtggttgctgaagatccagctacaaggaaagtggtggttgagaaaatcagacatgcatgtgagacatggggttttttccaagttgttaatcatggaatac

SEQ ID NO: 40765 - DNA, 461 bp, Glycine max
  Clone ID: LIB3093-058-Q1-K1-G1
agaaaatgccgtctagtaactgggggtacagacaaccatttaatactttgggatttaaggcccctgggatggacaggtaagttttatgagaaggtatgtgaaacatgtcatattactttgaataaaattgctatttttggcgacaatggaactataattcctggaggtgtaagagtaggtacccctgccatgacgtcaagaggatgtctggaagctgattttgagacaatggctgaatttctcattagagctgcacaaattgcaagcatactgcagagggagcatgggaaattgcagaagacaacattgaagggacttgagagccatagggacattgttgagctccgggcacgggttgaagcttttgcaactcagtttgccatgccgggttttgacatttgaacatgaagtggctggtgaattgccattattgattatttacatattcaacaatggtgggt

SEQ ID NO: 40766 - DNA, 363 bp, Glycine max
  Clone ID: LIB3093-058-Q1-K1-G10
cttccttcctaaagaacagaaatgaaaccgtccgtttccgtattgaacgtagccccccaaaaatgccgtccaagttccgattcctaaaactcttcactcaccgtctctctcctagaaccgccgccgtcaatggctcgcaccgcttcctatacggcaaccctctctgcaccatggcggagtccccggagctccctccgtggctcaagttctccgacaccccgacccctccagacgctgactcagacgacaacttcgttatcccttcactcgctcactgggtcgacacccacatgctcactaccaagcccaaagtcctaacgcaatcacccaagcaagacaacctcgacgaactcgaagcaagta

SEQ ID NO: 40767 - DNA, 408 bp, Glycine max
  unsure (1)..(408): unsure at all n locations
  Clone ID: LIB3093-058-Q1-K1-G11
cccacgcgtccgggtaatcgtgagtggtactattcccgaatagcagcaagcaaggcaaggcgtgtgtccgagcagagcaggagtgaaggagaaaaggacccttgtccgtccagtccttattctcttttctcctccctccctcacgcaaccgccaattcctgaaccctaagctagcgccatggctgtcgtttcgcgaagtgcgacgacctatacgcgccactacttaatacgacacgagtttgataggaaaacgaaaacctgcgttgccaataatagtttgtgttactctgctaagaaggctcctncaccgcagaagattgttggtggccgtagagtgattgttgctgcaagccctcccaccgaagacgctgtagttgccactgaccctntcacgaagcaggatctcgt

SEQ ID NO: 40768 - DNA, 302 bp, Glycine max
  Clone ID: LIB3093-058-Q1-K1-G12
gatctcgaagccaccgtcatcgacgaagtccgctgctgctcccgccgtcaactcttgcatgccgaacaaggaagatgccgccaacaacttcgccagagatcactacaccggcaactatctaccgggaggagcataatgtagttgacttgtacatcattctccttagatttttaagagatcacgagctgtgttggatgagcttgaatctttgaagcccaaatttaaacatcgggtggaaaaaatgaatgactagcatgtaaaagctccattgcctgaagaaaatgggttcaataaagctttgc

SEQ ID NO: 40769 - DNA, 290 bp, Glycine max
  Clone ID: LIB3093-058-Q1-K1-G2
agacaaatccttatcatctataccggtacttgcaactatttcctaatttatgatatcaacaggctaacggggacaagttaatgctatcatatcataaacaaaactatatgtaacgagtcagctgcacagtaccattacagaactctactccaactatacatcgttcaattctaatctattatacatcatccattacgcctactggatgcattatatgtatcatatgaaaaattatcgatacttgccatactccctctactagatacatacatacttaatggatagaatca

SEQ ID NO: 40770 - DNA, 417 bp, Glycine max
  Clone ID: LIB3093-058-Q1-K1-G3
ggacgaccttcttgaactgataaaagttcactctgctagtcactacaatctgacttcagaaggtatccgagaacaagatgttcaccttcatcaacatgatggaattctgaaacgaaatcctcagatatcttgactcgaaaacataatcctaacatgattaagtggatgtacaaatcctctgatcctgctcacaatacttgagacttgcaatcatcgatacactctgacagaacctatggactacgcaagcaactatactcaaaaatagatacctagacatatcaatgtgctatagctgaagacctgaatcctagtgctgcgactgaacaatcatagggaggagctagcaactcaattgcactgctatgtatacagagagaacatataaggtctgagtattcaagatgaatctccatg

SEQ ID NO: 40771 - DNA, 449 bp, Glycine max
  Clone ID: LIB3093-058-Q1-K1-G4
aaaaaaataaataaaacactaagatccttataagtttccctcgatcggcgaaaatatgtctggtttccggagcaacctctttggtttcaacggaaacaacaatggcactgaggatgcctttaaaaactcaggaggaggaggacaagacttcaaggacgcggagttcaacactggtgtgcaagttgccaaggggtgacacgctccttgcaatggtaacagtaggtctaaaagagcttttaacaactctggttcgggaaaacaggatttcggaaatgctatgtgtaacactggtgctaggtactactaatttatataagaccttcctcttggaggggctggtcttgcaaaacatacatattaatcataggtatggggaataaaaatcacaagtgctcatttgtgggtcatgtgtaagatgtggatacgtatgttggtatatgctaataaat

SEQ ID NO: 40772 - DNA, 419 bp, Glycine max
  Clone ID: LIB3093-058-Q1-K1-G5
gggttttcgctcaccggtgtgcagtcgagcccccgaagaaaaagcgaaaatgccgtcgcacgggacattcagaatcaagaagaagttggcgaagaagatgaggcagaacaggcctatcccctactggatccgcatgaggaccgacaacaccatcaggtacaacgcgaagcgccgtcactggcgtcgcaccaagcttggattctgaggtgcttgctttgcctcggttctgtttatccaattaattagtgttttattttcttgagccaaaaacaatgctttggagattttaatattttgcattttgttccaagactatattgtgtaaggaacttattgtagttcagactaatggtggtgttggtcacctttttttaaaagtattttggaaaaaaaaaaaatacaaataaaattatcaatga

SEQ ID NO: 40773 - DNA, 451 bp, Glycine max
  Clone ID: LIB3093-058-Q1-K1-G6
ctcgaggaagagaactgagaagcagagcagcggtgtggttgattgggatgtcggatccgtgcgagcgggtgaaaggaggaagattagcattcaaaggaggaatccttgccagtcgctccaaatccattgacaaaaaggggaagaagaagaagaagaacaagggcaaggacaacgacaacaaccctaaccctaaccctaaccctgaagaacaggaactggaacaggaacagaaacaggagcaggaagaaacccccctcctcgaggacgagggcgagggatctgaatacaccatcgatgcggccaagcgtatgaagtacgaacaactgttccctgtcgaagccaagaagttcggttatcaacccaaaaccaacttcaagtcagttgaggatgccctcgatgatcgcgtcaagaagaaggctgatcgctattgtaaatagtaagtctatacttg

SEQ ID NO: 40774 - DNA, 446 bp, Glycine max
  Clone ID: LIB3093-058-Q1-K1-G7
gttctttttggctaagccttcaagcagatccaactagggaaatgtaaaattttcaatttttggtatcagtatcccttttccaaaaccttccctcatggtctagatttggaaatcttgtcattggcttacttctgggtgtgccaagatctgttctggtccgttccccccctttttctttttttagatcttgggcttctccatgatgtaatagaacctcaaatttgaaagctttacctttctgagattgctttttttttttttctatccccttccccttttggagtatgaaaattttcctggaaaattagtgagctaggatcactgagtgagagaaaagaaaaaaaaagatgatgaattatttcccggacgaggtaatagagcacatatttgactatgtggtgtcacacagtgatcgaaatgctttgtctttggtgtgtaaaagttgg

SEQ ID NO: 40775 - DNA, 450 bp, Glycine max
  Clone ID: LIB3093-058-Q1-K1-G8
cccacgcgtccgattcattcaagattcagcaagtgcgttttggaagcagagaccgaaatacttcgagatggcccgtacaaagcaaactgctcgtaagtcaactggaggaaaagctcccaggaagcagcttgcaaccaaggctgcacgtaagtctgcaccaacaactggtggtgtgaagaagcctcatcgttatcgccctggaactgttgctcttcgtgagattaggaaataccagaagagcactgagctcctaatcaggaagcttcctttccagaggttggttcgtgaaattgcccaggatttcaagactgatctgcgtttccagagccatgctgtgcttgcattgcaagaggctgctgaagcataccttgttgggctctttgaggacactaacttgtgtgccattcacgccaagcgtgtgactattatgcccaaggatattcagctggc

SEQ ID NO: 40776 - DNA, 460 bp, Glycine max
  Clone ID: LIB3093-058-Q1-K1-H1
cccacgcgtccggcagccaccactcagagccagcgagtgatgatcgcttcgccgcagtaatcgccggaagcgaattcgccgtttccctgccgagatctctcaatctccgacgactcagatacctctattaattttcctccggttaggttgttagggtataaatagtacgtagtttttccttatttatggcttcggagaatgtgaagaccggggattccgccgtcaccaccatcgtcaatctcgccgaggaggccaagctcgccagagaaggcgtcgtcaaagctcccagctacgccctcgccagcatctgcaagtcgctcgtcgccggtggcgtcgccggaagagtgtcacgtactgcagttgctcctctggaacgattgaaaattttgctgcaggtccagaatcctcataacattaaatacaatggaacagtacaaggcctaaaatatatatggaggac

SEQ ID NO: 40777 - DNA, 362 bp, Glycine max
  Clone ID: LIB3093-058-Q1-K1-H10
tctttcctcaaccttctttcttcttatatatcgaacatggctaagtatcattcaagtgggagaagctcttccatgactgctatagccttcctgtttatccttctaatcacttatacaggcacaacagatgcacaatccggggtatgttatggaagacttggcaacaacttaccaacccctcaagaagttgtggccctctacaatcaagccaacattcgcaggatgcgaatctacggtccaagcccagaagtcctcgaagcactaagaagttccaacattgagcttttgctagacattccaaatgacaacctcagaaacctagcatctagccaagacaatgcaaacaaatgggtgcaagacaa

SEQ ID NO: 40778 - DNA, 310 bp, Glycine max
  Clone ID: LIB3093-058-Q1-K1-H11
cccacgcgtccggaagatcgatctggtagaaacgatgaaggaactatgggcacaaatggggtcactaatggccactattgtgttcatgtacacaatctttgagcgcttcttccctccacacttgcgtgaaaaacttcaagcctatactcaaaaactcaccaaccatttcaacccttacattcaaataagcttccctgaattctcaagggaaccactgaagaagaatgaagcattcaccagcattcaaacctaactgagtgcgaacttattccagagaggccaaagggttaaagcttaagttgtgaatgat

SEQ ID NO: 40779 - DNA, 452 bp, Glycine max
  Clone ID: LIB3093-058-Q1-K1-H2
ctctctttttctatctccttctttctttgtttctgtgtgttcgagattgaagaagatgatggaggctgaacccgagggcatggcccatcatgcgaacctacactacgcacagaaacagcttcaaccctacatgatgatgccgacgcagactcagcccgcttatatgtgggccacatctgtccaaccttcgatccagtcggcggcttcttcacaacgcagcagctccgatgaagtccgtaccctctggatcggtgatttgcaatactgtatggacaaaaattatctctacacctgtctggcacacaccggcgaggtgacttcatgtaaagacattcggaacatactgactatgtcaatcggagggatatcggtttatcgagtttactagtcgtgctaaagctgagagagtgctttaaacatacaatggcaccattatgccaaatgcttggcag

SEQ ID NO: 40780 - DNA, 454 bp, Glycine max
  Clone ID: LIB3093-058-Q1-K1-H3
gtgggcatggattctctactggcgaactatgcctcttcagatgaagaagaagatcaacaacggccatcgtgacccaaaacgacttcgttttcctatctttctcagcccaaatcttctctctttcaatcccttccttaacccaaatcctctcctttatcttctctatttcaatctcttcctccacccaaacaacctttcagcgaaagcgcttcactttctaaccctaaccctaaccctaaccctaaaccccaaatcgaagaaccacggcccaaacgcgtcgtgcaattcatgcccccaatcattcctctcccaaaccctacccaactcgacgatgacgactactacgaataataagagcgaaacagacgaaagaacaagttagagtccttcacgcaaacctcatcggtcaaatccttcctcgacagcatatcggctccaaggaacaccggcactc

SEQ ID NO: 40781 - DNA, 455 bp, Glycine max
  Clone ID: LIB3093-058-Q1-K1-H5
aaaaaactgaattgtgtgaatcgaaaactaaacattgctattgtaaaagttgcaaatgcttataaacaccctaatattattgcagaatttatagctggacaattaaagaatagagtttcgtttcgtaaagcaatgaaaaaagctattgaattaactgaacaggcgggtacaaaaggagttcaagtacaaattgcaggacgtatcgacggaaaagaaattgcacgtgttgaatggatcagagaaggtagagttcctctacaaaccattcgagcgaaaatcgattattgttgctatacagttcgaactatttatggggttttagggatcaaagtttggatattttctaaataaagaaaaatatattattctttatcttaaatgtgctatattttatcttaaatgtgctatatttttttttagaaaacaaaaaatgaaaaattactcgatttttattt

SEQ ID NO: 40782 - DNA, 449 bp, Glycine max
  Clone ID: LIB3093-058-Q1-K1-H6
ctctctttttctctctccttctttctttgtttctgtgtgttcgagattgaagaagatgatgcaggctggacccggcggcatggcccaacaagcgaaccaacaatacgcacagcaacagcaacaaccctacatgatgatgccgccgcagcctcagccccctcagatgtgggccacatcggcccagcctccgtcccagtcggtggctcctccgcaacccaccagcgccgatgaggtccgtaccctctggatcggtgatttgcagtactggatggacgaaaattatctctacacctgtttggcacacaccggcgaggtggcttcagttaaagtcattcggaacaaacaaactagtcaatcggagggatatgggtttattgagtttactagtcgtgctggtgctgagagagtccttcaaacatacaatggcaccattatgccaaatggcgggc

SEQ ID NO: 40783 - DNA, 443 bp, Glycine max
  Clone ID: LIB3093-058-Q1-K1-H7
gatgggttattgatatagtattttttttcattacatttagagtaaaagttatgtctgttattgtatgattgatcatcttaatcgtaagttcttaaacctccttttaaagagaacaaaattggtctttttttcagttagactcccaaagtgaaagaaacatggtgcagaatattttgtgtctactcctgatgtaatatgagttgggcaaactgaatcttgaatttctggttttttcttgtataagctgtaattttctgtggtagtccttaccgcatttaatactttgtgcaattaaaaaatcacttggagttctaaattagtactctacagctcttcatctttgactggtacatattttttttttatatcataacagacatttgtaggaacaccattctggatggcacctgaggttattcagaatactgatggatataatgaga

SEQ ID NO: 40784 - DNA, 417 bp, Glycine max
  unsure (1)..(417): unsure at all n locations
  Clone ID: LIB3093-058-Q1-K1-H8
ggaaaaggagggtgaagaggagactgtagacacagctgctgcaaagaagaagaagaagaaggaggaaaaggagaaggagaagaaggcagctgcggcggcagcagcagcagcagcagcagtagcaggaactgtaccagaaaatgaaacagcagaagataaagctgaggtaattgaaccaaagaagaatgattcaaaggctaaaaaagcagctgataagaaagtgccaaagcatgttagggagatgcaagaggcactagctcgaagacaagaagctgaagaaaggaagaaaagagaagaggaagaaaggttaaggaaggaggaagaggagcgacgtatgcaagaggaacttgagagacaagcagaagaggctagacgtagaaaaaaaaatagaaaaacataaanaatgaaactatctag

SEQ ID NO: 40785 - DNA, 294 bp, Glycine max
  unsure (1)..(294): unsure at all n locations
  Clone ID: LIB3093-058-Q1-K1-H9
gttgaaacccgagctgctgatttgcttgacaagctgcggtatatacctagtcgtgaagctctggcacttcgagctgaggttgcttccatggcttcaaatttgaagcgtcagagatcttcgctgaacaaacggataatgaagatcaacgagttaggggtcctgtgtgattgattaaatggacaagtgtggcccttttttgatgcaccccaagtttaattgaataaatcttccggttaaagtaaatggtctacgtataatgcaaacccatgtnccggggcatctttttttggtttc

SEQ ID NO: 40786 - DNA, 383 bp, Glycine max
  Clone ID: LIB3093-058-Q1-K1-B12
agcttctctgttaaaaaaaaattaggcgtctaaagggccaaagaaagttgaagctttttttgttgaggtgaaagtgaaatggttggcaaggataatctgagggctgaggacttgaacttgtgctttaagaagcttatgatggtggccgggagtgggaacagtgagaaaggggtgaacttgaaggttggggtgatcaccgagtggaaggatattcctgtggagcttctgatgcaaattctgtcccttgtggatgatcagacggtgatcatagcttctggagtttgtcgtggatggagagatgctatttactttggccttgctcgtttatcactctcatggtgtagcaagaacatgaatatactggtcctatctcttggttctaa

SEQ ID NO: 40787 - DNA, 299 bp, Glycine max
  Clone ID: LIB3093-056-Q1-K1-B1
cgggcgcactcaatctgcgacatgatgagctctatctgggggtaccctggctatttgcataaactgcaatcgctgatcacttatggttgcaaagacgtcatcgcaccgctgaccatacagaggtcttacgacaacgatccacatcctcatgccatcctctactactactagagaacttccaactgaggccttctcattactgaagcctctggcgtctgtgacacggatcaaggctatccggacaccactggcatatggactaaaaaccatgatcaagcctggaaacccattgtcgatgc

SEQ ID NO: 40788 - DNA, 272 bp, Glycine max
  Clone ID: LIB3093-056-Q1-K1-B2
cacgcgtgcggcaaccgtgcgagctgccggacacattttaattaaatccagcgctccagcacttcaggcgctcacggcctgacagatacatcgtccgctccgctacttatggatgctgcaaagcttctaaatgagaagttccagttcgaattcctgatatctgcctgctgacactgttctcaactgctctattcattaagagacagcttttattctcttgcgcgacgaagaagactcactgctggactacttcgtggatagtatattatccc

SEQ ID NO: 40789 - DNA, 391 bp, Glycine max
  Clone ID: LIB3093-056-Q1-K1-B3
cccagcgtgcgcccaccgttcggcccgcatccgtcactcttgctaaattggctatctctatctattctctctgtctgccatggggctctccaaaaccacctccgaatacgacgactctgtccactcaaccttcgcttctcgatatgacagaacttcgcttcccaggtttaagatgccggacgagtcgataccaaaggaggcagcgtatcaaataataaacgatgagttgatgtcggatgggaacccaaggtagaactcggcatcatttgtgacaacctgtataggagccagagagtgataaactcatcaaggctgccattaatcagaactatgttgacatggacgagtatcctgtcaccactgagttacagaatcgatgtgttaacatgat

SEQ ID NO: 40790 - DNA, 346 bp, Glycine max
  Clone ID: LIB3093-056-Q1-K1-B4
tcgacacacgcgtccagccaaccatgcgcacaatcgtacacacatgcgttcaaattcctagaacttgcacctcaggcacttacggtgtgacatttaaacagtgagttgagctgatctgaattggcaccaaagaaaaaaatacagttttcaatcctaaaccactaacaacttcttgctttcacacttctctgttgccgtgataatctggttgcagaagtttgactcatgcttaataaacttcactaaccactcaacttatatttgccgactaaaatatcccttatataactactaattctcatatgtgagaaaaactgaaccctctaatatcaccatattttacttc

SEQ ID NO: 40791 - DNA, 320 bp, Glycine max
  Clone ID: LIB3093-056-Q1-K1-B5
gctactacgaccaagaggagggccacgtgtcctacgaggggatgaggttcgcctcggcggacctgggcacatggggaagcttctgacggcaatgcacaaagagcacgaacaacatgagcggggttttcacggggcagcacgggttggtgttcgatggcgatcacgtgaaggattgcgaaaaagatgagagaggaggggtttttgatattgatgtgaagctttacttaaacattaggcttaggctaggtgacttcataagaagtagctcaagggttagggcgaattgcgagcttcacgttactctggtttcgaggggagtg

SEQ ID NO: 40792 - DNA, 381 bp, Glycine max
  Clone ID: LIB3093-056-Q1-K1-B6
gtaactatgtgttgaattggaaacattattgttaaaaacagagaaattgttgtccaggagataacggtatgacagctagattgagagttttgcggggaaaaaattgcaaaaaataaataaatgaaaaattcagtttttaagttctaaaataaaaaaactttgactcttcttcgctgctgggataatttggtttcagttctctttcttctgcgttattaacctcaataatttctcaacttctgtgtcccttgcttattttccccctcatattaattagttctcattgtaaagaggaactgaaactccttcaatctctttgttttacttttttctcggacaccatgattttcgatcaaaggtcaatgcaatctaagtccaacc

SEQ ID NO: 40793 - DNA, 388 bp, Glycine max
  Clone ID: LIB3093-056-Q1-K1-B7
tggagattaacatgggaggggtcacagtagaagaggcacttagtactcagagattgttcatattagattaccaagatgcattcatcccatatttgacgaggataaacagcctacctactgcaaaagcttatgccacaaggacaatcctgttcttgaaagatgatggtactttgaagccacttgctattgaattaagcaaaccacatccagatggagataatttgggtcctgagagtatagtggtgttgcctgcaactgaaggtgttgatagtacaatttggctattggccaaggctcatgttattgagaatgactctggatatcatcagctcgtgagccattggttaaatactcatgcagtgatggaaccatttgccatagcaaccaa

SEQ ID NO: 40794 - DNA, 307 bp, Glycine max
  Clone ID: LIB3093-056-Q1-K1-B8
ctgatattctgcattttctcgcttacttttcttcagcattcaacaaacttcttcaccctatctatgttgcaatcctttttttccattccctactattccctatcatctctctttgtgttctcatctttttccttttcccaaggcacatgtcaacacatgaaatggatcccgatgtcgttcgctggggtcttcatctcctacatgtctgcacactttctcaccatggttcccctaatattgtaactcaatatgatcctgatttaagtcaacttgaatatgttaccgaaggcttttgccagcatgagta

SEQ ID NO: 40795 - DNA, 357 bp, Glycine max
  Clone ID: LIB3093-056-Q1-K1-C1
cgaagattaacatcaaacgtgccgcagacacaacaggcttcttataactcacagattggtaatattaggttaccatgaaacattgataccatatttgacgaggataaacagcatagctagtgcaaaagcttatgccacaaggacaaatctgttcttgaaagatgatggtacttagaagccaatagctatagcattaagcaaaccacatacagatggatataatttgaagcctgagagtatagtcatattggctacaactaaaggcgtcaatagaacaatttggatatcgatcacagctcatattattgccaatgactatggctatcatcaggtcatgagccataggttatatactaa

SEQ ID NO: 40796 - DNA, 148 bp, Glycine max
  Clone ID: LIB3093-056-Q1-K1-C2
tcgctcctcaacccacgcgtcgcgctcacacatccggagaaaagttagggttcacatcgatttctcttccttcttcttgcggagtttcatcaatgcatcaatcatccattcattattcatcatgtcgatcacgacacaaaatcacttc

SEQ ID NO: 40797 - DNA, 335 bp, Glycine max
  Clone ID: LIB3093-056-Q1-K1-C3
gttttcctgaacccttctgacatttccctgtcctttttttgtcaagggtgggttcggggatttggacttaaaagcatgaaaaaaactttggtaattggatttcctgaattagaagggttattatttcgacttctatgccttaaaatgtaaatttaggttgttattcatacgatgcatccttttccttgagtttttctgttactatggatggacattccagtggggctatatggtggcggataacacaaatgttgtcgagtcaaggtttatttatagatagactactcagattagatttgaaaaggaccacttacactcatgctatggaccaaaaa

SEQ ID NO: 40798 - DNA, 336 bp, Glycine max
  Clone ID: LIB3093-056-Q1-K1-C4
gtttggttcagttggggctttgtgttaatctgtttttcacttttccgattatgatggacccggtgaatgaggtgatggagagacggttcttcgggtccaggtactgcttgtggctgaggtggatgatggtcttgatcataagcttggtggcgcttttggttcccaattttgcggattttctgtcccttgtgggaagcagtgtttgtgttgttctgagttttgtgctgcctgcgatgtttcattgtttggtttttaaggaggagttggggtggaggtgtgttctctgggatggggctattgtggtttttgggtttggtattgctgttactgggacct

SEQ ID NO: 40799 - DNA, 370 bp, Glycine max
  Clone ID: LIB3093-056-Q1-K1-C5
cccacgcgttcgaccacgcgtccgaccacgcgtgcgctctcttaatttttttcttggatctctgcggtttgactgaattcttaggattgctctgaatcggtttagtcttcttcgttattcttcaaattcctcgtgacagatctaatctaatcaggcttttgggggtgtttcagacattgcatgcatatgggagcagtggttgtgttggatgctataaaaggcctacactgagagctactgtggatgtgccatcaaaagggttggctacacaaggtaacggattgaggaaaccaagttcatcataggatttttggaccactagcacgcatgatatggacaacagcgctgtccagtcgcaggggagcatcta

SEQ ID NO: 40800 - DNA, 110 bp, Glycine max
  Clone ID: LIB3093-056-Q1-K1-C6
ttgcatttccagcttttaacgttaaattgagtgcgccgaaacttgaaatgggttaaacggtgtgcctcagcttcgcatcattgaaattttgattgagacaataattagtt

SEQ ID NO: 40801 - DNA, 335 bp, Glycine max
  Clone ID: LIB3093-056-Q1-K1-C7
gtcacaatgtccagaatatgaaacacttaaattgagagcgcctaaagttgaaagcgggagacaacggtgttacagcatgctggacatcattgtgatgaagattgtgacaataattaatacaataataactatactataaagcttatattaaaatagctttaaatcatcctcattccagaaataattttgcttcaaacaattataaacatctgtattaacgatactaatacactaacttctgtgaccataacatcatatgcttcacatcatgaccaacgagaatcgctgatataaacggagctttgccgaatatggtttatgatggttacttcatt

SEQ ID NO: 40802 - DNA, 328 bp, Glycine max
  Clone ID: LIB3093-056-Q1-K1-C8
ctcccttctgcattgtgtttgctgtgctttggggaatttatcgccgtgtatcattggcttggattggtcaagatattcttggcatcacattgataatcacagttcttcagattgtgcggataccaaatctcaaggttggaactgttcttctcagttgtgccttcctatacgacatattctgggtgtttgtctctaaacggaggctccatgagagtgtgatgatagtggtagctcgaggtgatacgagtggataagatggtctccctatgctactcaagataccacgtatgtttgatccttgcggtggctacatgatcattgggtttgg

SEQ ID NO: 40803 - DNA, 262 bp, Glycine max
  Clone ID: LIB3093-056-Q1-K1-D3
cccactaggatccatgaacgcctcgaccaacatcctagctcaacaattctgaagagatgctgacacgtatgctaagacattgtcatacaggacattagatgtaaacatttgatatgaatgtagcatcaggaacatacatctgctataccagatgcaccactggcacttaattcctatgctacagagcactacatatgttaacatctctgaaacctacatgcgaatggactcaaggaatagctgagcttactactaccttttg

SEQ ID NO: 40804 - DNA, 390 bp, Glycine max
  Clone ID: LIB3093-056-Q1-K1-D5
ggcggctactttagaatcagccttcatcctcttcgcacctcaacggttctccaatagccatcgtggctctgcaaaagcaccgatctccatcaagctccatgcttccacctcccttttcttctcttccaagtcctccttcaaaacgggaagactctgcttccagttatgctccactttgcaagaggtagcagcaacagaagaaacacctgagctaacgcaaccaacagacaacgtaaagaagctgtacgtggttaacttgtcttggtctctgacggcggcagacatcaatgacctctttgcccaaagcggaaccgtaaccgacgtcgagataataaagagcaaagacgggaggagcaagggctatgccttcgttactatggcttcccggga

SEQ ID NO: 40805 - DNA, 355 bp, Glycine max
  Clone ID: LIB3093-056-Q1-K1-D6
cttactttttcgcgctcgctctgttgtgaatagagattcatcacttccactcggcccattctccggtttcttcaaatcgtaaacttttttgggattgaagaccgaatcgttagaaattttcagggtacaatggcttccaacatctcgcccgctgcctttgataaagaacagatatttggaatggctgaaaaggagatggaatatagggttgaattattcaacaagatgacccagacctgtttcaagaagtgtgttgacaataggtacaaggagtctgagctaaatatgggtgaaaatagttgcattgaccgctgtgtttcaaaatactggcatgtgactaatctagttggtcagc

SEQ ID NO: 40806 - DNA, 316 bp, Glycine max
  Clone ID: LIB3093-056-Q1-K1-D7
cccacgcgtccgcagaacgtaggtccacacataagtaccacaatcgcaatacggactcacaggtgtacagaacgatttagaagaacgattagaccaaatattctgaaaagcgctttagcttggataagaccatggaatacataaacttataactgaacacattatccgcaggggacatcaagaacgtagaccttttcttcaaaatggacatattccctatcattacaatgtaccacaacactatatatgctgacggctctaacacccacgtacacatagactccggcagcaacgagacgtggtactaccccgtgaa

SEQ ID NO: 40807 - DNA, 378 bp, Glycine max
  Clone ID: LIB3093-056-Q1-K1-D8
cccacgcgtccgcaagatttcaggtccaaacaaaacttatcaaaatctcatatactgattcagttggatacataaccatcgagatttactatcaaaccaaaaattctcaaaatctcttcacctctgtgatgaccatggaatacagaaccttagaactcaacatcatatccgcaaaggacatcaagaacgttaacctcttctccaagatggacgtatacgccgtcgttacgctctccggcgaccctctccaccctcagggcgccaccacccacgtccacaaagacgccggcagcaaccccacgtggaactaccccgtgaaattctccgtcaacgaatcgctggccaaagagaatcggttgtctcttgagatcaagctcg

SEQ ID NO: 40808 - DNA, 370 bp, Glycine max
  Clone ID: LIB3093-056-Q1-K1-E2
tcccctcctcaacccacgcgtcgagcccacccgtccgcacctccttcgaagtctcaactgttttcccctccgcatgaaaccgaaatccaaagcaccatcacactttcgctatcaactcaatggaaaatgcttcgccctctatcaacatctcctctctaaactttcacttttaccattgaaccatacatcgatgcacacaagaaggttgtccacgttaacctctgaatcttcaagaccaaaatcggaaaataatctctgtaactagttattgatattgaaaaacaagttcccgaatgctaccagggctaaatagggttgaacacatgacagtgagacgaacctaatttttgcgtacaaaaccctgtcataa

SEQ ID NO: 40809 - DNA, 333 bp, Glycine max
  Clone ID: LIB3093-056-Q1-K1-E3
acgaagatactccagacctgcatgaggaactctatacacacagacaagggggagctatgggatcaaaagaggaagaagacagagaataatccataagcaatcacatctatatgtagagcacatcatacaggagggctatcaaactcgcagatctaatataatcaggctctcgaggatactgcatacatttcatgcatatggcagcaacggctaggtatcatgctacaaaacgattacactgattgctactgtacatgttccatcaacagggatggcatcacaggataaactagtgactaaaccaagttcatcagacgatcttttgaccactat

SEQ ID NO: 40810 - DNA, 281 bp, Glycine max
  Clone ID: LIB3093-056-Q1-K1-E4
gccagccttccgaatttactccactctattcacgggcatacaaattatctaaggaaggttatctacggcttcagctcacaccggctattaactcactccaatatgattggaatatgaagctcatcttttccttataactgtcactaaataccataggccattactcttattccaagggactcttattaattgtttcatgatccttttacaggtaaaagatatgaaagtaaagtcagaaaaatgttaaaggtatagcctatcacatatcggtctgctacact

SEQ ID NO: 40811 - DNA, 423 bp, Glycine max
  Clone ID: LIB3093-056-Q1-K1-E5
aaagagctaacaagagattcaagaccggcatggctaatgaagaggaacagaaaaaccacctcttcggcatcaaagatctcggtcacaagactctccttcagagtgatgcactctatcagtatatacttgaaaccagtgtctatccaagagagcacgagtgcttgaaagagatacgcaagatgactgcaaaacacccactgaacatcatggcaacaccagcagacgaaggacaacttctgagcatgcttgttaagctcacgaattcaaagaacgccttggaaattggtgtattcactggttactctctgctctccactgccctggctcttccccctgatggaaagatcttggctttggatgtgaatcgcgaatactatgagttaggattgccaataattcaaaaagctggagtggctcacaaga

SEQ ID NO: 40812 - DNA, 417 bp, Glycine max
  Clone ID: LIB3093-056-Q1-K1-E6
cccacgcgtccgcccatactttcaagtttcaactgttttcccctccgcatggaagggaaatccagggcacaggcacactttctctatcaactgagtgggaaatgctttgccctctatcatcatcttctctctaaactttcacttttaccattgaaccatacaacgatgcacacaagaagggtgtccaggtaaaagtctcaatattcaagaggaagattggaaattaatttgtgtaagtggttattgatattgaaaaacaagttcctgaatgctgccagggctcaatagggttgaagacatgacagtgagatgaacctcatttttgcgtacaaaaccctgtcagaaaggcttatttcttctttgacagtgattttaattttgcaatcttatttattcaaattatgcacggataattgg

SEQ ID NO: 40813 - DNA, 368 bp, Glycine max
  Clone ID: LIB3093-056-Q1-K1-E7
gtaggccctcatgctgtggtctgaggtaacaatggatcccctggttctatgagtaaagcgaattcagagagttccatcaaacactaattaggacaatgaatccacagctaaaatcacgaatgaaaaagatgaccctgaaaatgcatgctcccctgacaggactagccaagaagttggtaaatctgctaaagtggagcatcataaagaggaaatggtggcacagataacagagattctatcggaatgacctactgaagaaagtttcaagtagcatatagcatattttctccagcatttcatacccgtgtacttatatacagtcttccaagtgagtgtttctacaatacttggcaaattttgattgaaac

SEQ ID NO: 40814 - DNA, 318 bp, Glycine max
  Clone ID: LIB3093-056-Q1-K1-E8
acgaccacgcgttcaaacagcacgcagggatcatcatgaaccaccgcctgtctataaagtgagaggagactatagcgccctcatgcataaacatgggacactgcaaccaattgctaacaaaccaactgttataatggccacaactgacaagctagccgactagaacttggcatagatcccaccgtttagaatataatcaatgcgttataacgtgcacatgattactctatacccctatattcgaaaccttattacaccataccacaacttctttaatacaatgtacacacacgcataaaactattacagatatagtca

SEQ ID NO: 40815 - DNA, 374 bp, Glycine max
  Clone ID: LIB3093-056-Q1-K1-E9
ttttccactcatttcaactcatttatatttaatccattttttctatcttatctattactcaatatcctacccactttcctttctttatcataattaaactatccaatcaaaaccaatccaataaataaacaaatccattcaataatcaaaaaattaaacatatttattctaaccctctatattaaactataccatttttcaaaaccatatctatcaaccactcatccatctctcctaaagacaatattatttaattcctccaaatataacataaccatattattatatacctccactatcatatatctcttattctattttaaatctatctatccccatatattaatatatatattatccaaacatcccttatt

SEQ ID NO: 40816 - DNA, 245 bp, Glycine max
  Clone ID: LIB3093-056-Q1-K1-F1
aatgctctggaaataaaatgcttattcactttaatgatcagggtttacatcagtaaaacttgttattcaaacacctgttactagcataccattaccataagcaccaactcctagcatttaatgtccactcacaaaatgaattatgagaattgacgcaaggcttatgcaatttttgttgcaaatattatcatgaatgctacagtgtaactgatagaacgtgctatcaagaaattttggcctattaa

SEQ ID NO: 40817 - DNA, 416 bp, Glycine max
  Clone ID: LIB3093-056-Q1-K1-F2
tgcagtaccgtccggaatcccgggcaaaattctggttcaaactgcaagcaagtttgtggtgtatatggctctctaaagtgagagagatgcgttgcggataaaagggtattgcaaccattgattagaaaaccaataattaaaattggtacaacttctaagtttgacgtacttgaattatgtcatattctcaaccgttgattttctaatcaatggttataactgcacctactgtactgtagaggagctatatttgtgatccttaatacaccaaatcaattttctttaatacaatgttcacatgcttatattgtgatgacagatatgttgttgacagaatggatggtgatttgtgcgctaaaggtcttgatcctgataatgaatatacaaggcaacttattgatcatgttgtatctact

SEQ ID NO: 40818 - DNA, 399 bp, Glycine max
  Clone ID: LIB3093-056-Q1-K1-F3
gttctctcacacactcattcggtgctccgaatctcagattctaggggtagggttcggaatttctccaccgatcagaaaatgagttcaactggtggttctaccaagggcggaaggggcaagcccaaagcctccaaatccgtttcaagatcgcagaaagctggtctccaattccccgttggaagaatcgctcgattccttaaggctgggaaatacgcctagcgtgttggtgctggtgctcctgtgtacctctctgcagtgctcgaatatctcgctgctgaggttttggaattggctgggaatgctgctagggataacaagaagaatcgtattgttcctaggcacattcagcttgctgtgaggaacgatgaggaactgagcaagcttttggggtctggtacc

SEQ ID NO: 40819 - DNA, 340 bp, Glycine max
  Clone ID: LIB3093-056-Q1-K1-F4
acgatcaccggtcgcaagatcatcatcgatacttacagccgatggcttgctcatggtgggggtgccttctgcggggaggatcctaccaatgttgatagtagtggtgctcacattgtgagacactctgctaagagcattgaggcaagtatactacccacaaggtgcattacgcaagtgtcttatgccattgctgggcccgagcctttgtctgtctgtgctgacacctatagcacctgcaagatccatgatgagtagattctcaacattgggaagctgaactatgatttcaagcccggtgtgatcttcatcaacccttatctcaacaggggtgggaattaca

SEQ ID NO: 40820 - DNA, 374 bp, Glycine max
  Clone ID: LIB3093-056-Q1-K1-F5
ccacgcgtccgccagcgtccgccacctccggaagtcttttgcatccattgggaatgcactgaagaaaatgctgctcccttcatgtgagggtttcccccgtgaaacttgttgaacacccgtgtttctagcatacctgcaccagaagcaccagctcctacattgaaagtccaccagaaaagaataatgagaatggagcaaggcttatgcaatatttgttgcaaatttgcccatgaatgcaacagtggaacagctggaacgtgctttcaagaaatttgggcccattaaacaggatggtattcaagttagaagtaataagcaacagcaatcttgttttggtttgtggatttgaatcggctacttcatgcaaagtgcac

SEQ ID NO: 40821 - DNA, 385 bp, Glycine max
  Clone ID: LIB3093-056-Q1-K1-F6
gaacaagcagaacaaacaattctaattccatgtctaggaaatgagcctctacctaatcctgagtggaagaatagcatgtttggtttcacatctcatctcagatatagtttttcacatttattgagaagctagtagttataactttagccttttatatcctaaacgtgatttcttacttctcaactggtttctaaacaggcatgtatgtaaggaattttggatcctcaaagaaaattgaatgccaccatccaaaagaataagattattcattaggggtacttaatcataatcaggagaaggaagaatacatactcggagcatgtggagacttttcttgaaattttggaccaaaagggggtgacagttcctgttctggtgttggttt

SEQ ID NO: 40822 - DNA, 279 bp, Glycine max
  Clone ID: LIB3093-056-Q1-K1-F7
gtctaatcactctagctgatgcaaatttctactatttttcaatggcttctgcataggtcaaattgggatactttcatgctgggcttgatatgttcaccggcatactattccctacataaagcctttacaatctactgctacatctatcaatctatagctatcaactaccgtgatactgtaaagttcagaggattccgatctgttacctttggctcatatcaatccatgaatgatactatctgcggaatgaacaaccaatacctttactgattcaacatc

SEQ ID NO: 40823 - DNA, 364 bp, Glycine max
  Clone ID: LIB3093-056-Q1-K1-F8
ggaaagttagaaaccctcatcgtcaaagcacgcgttttttctaatctctctctctggacaaatatgtgtggatagatgcaattcaccatgtcgagctcatcgcagtactctgaattttccggccagaaaccggcgaggtcgccggagaaatcgagcttatctcagacttgcagtctgttgagtcaatacatcaaggacaagggtagcttcagagatcttaccctaggaatgacatcatgtgggtcacctgagacatcttgtcaatctgctacaaccatgaacttgtttcctgccaaggaatacatcagggcaccaaagacacctgacagctatggatctgatctctacacaagcttacttctat

SEQ ID NO: 40824 - DNA, 272 bp, Glycine max
  Clone ID: LIB3093-056-Q1-K1-G1
tcttcctatcactcgtccaaatctcatgatgtctacataatcatatcaatcatgctattctgctgttctctatgactatgcatttccatccatagatccctaaatctacatttaaaaaggaaaccccaaatctaatgactaaactatcaatcaatcatattaataatccatcaatcaattatcgaataccatactcaaagacctcaatactatcacacacatctataaccgatacttcatcaaccatatctactaccgttcttttctgaatc

SEQ ID NO: 40825 - DNA, 396 bp, Glycine max
  Clone ID: LIB3093-056-Q1-K1-G2
cccacgcgtccgaacaaaacaacgacccaactaaccctaattcaacttttccgatgtgatcacttcgagtaaaaattccaaatgagtcgggcacaggatgcaaaccaatcattcttcccttttggaaatccttttaggatgatatcacctaaaagccctaaaatttcttcacagctgttgttaattctacatgcttttgaagcaactttggaagagaggctgaaaaagcttattcccaagagcaaggatgagatcctcagcttgtcttgcatgactttggctatgcagtcactttgtgagagccataatgacattaataccatcataacagagcttgagcttcctgtacatgattgggatgagaaatggatagacgtgtacttgacattagtgtga

SEQ ID NO: 40826 - DNA, 391 bp, Glycine max
  Clone ID: LIB3093-056-Q1-K1-G3
gcgcccacgcgtccgcttgtgtctacaatggacatatagcattttccccttcccactcagatccagtgggcgttttttgagccaacggtgctgattcgttcgcgcggaatcttgctcggcatcggcgtgtaagtcatctgtgaattcccttgggcaagatggctttggggaaatatgctacagtagatggtagaagatcgtcgagttggtgttcaacggtgactgttgtcatgtctgaggctctgtgcttggatgacgtctggatgatgacatcatcttcagatgatcctgtgcgtaacggacacgatacccaggagaataagaaccaagtgaaagaacaagcacaggtgatagaagcactgagtgacgtcagcaatagctatacgcggca

SEQ ID NO: 40827 - DNA, 188 bp, Glycine max
  Clone ID: LIB3093-056-Q1-K1-G4
tcgaacacacgtatacttctctctgctacttacttcaaatgcccttgtgtctcactggggctttcttaacctcaaaatttttaagaatctctaacccatcctgaacaatcaattccttctttcactcaattgccgacttaatttcttaaattttgcggaattagggtacactttaggaaaattccaaa

SEQ ID NO: 40828 - DNA, 387 bp, Glycine max
  Clone ID: LIB3093-056-Q1-K1-G5
gcggccagcgttcggaaagtcctcacttgttatcaaccctaaacgtttctgatctggttccccacgacgccaatgcgttttttcaacacaaccccctttccaaaacccttagggtttattatggatcccaagcatcagtatcgaaactccccgaatacgagatgccatcggtaacatggtgcgtaatccagggtctcaaggagaactcgtttcgcgagtaatcatcttcgattacctcaagtgtttgggaatcatccccgaccaactgcactacctttagctttcctccaccgtcgacgtcatgctcgagcgcgtctagtttctccaaaaattaggtcttaccgtctactacatttacaattacccttttaattttgggttcaattt

SEQ ID NO: 40829 - DNA, 394 bp, Glycine max
  Clone ID: LIB3093-056-Q1-K1-G6
attgcagctggaggaattgtggatgctcggggttatgttgctgctctagcacttggtgctcaaggggtctgtctaggcactaggttttgaaatattacttttacattaatcatatttgaggaaattgttctcatattgctgcagtaatttcttagcatatgcagtttttgtgttcaacttaagaatagttgttgcctacgtagaagcctctcatcaggctaataaattgcacagtttattcctcatgagactataattgtattcacttggttgtgaacagatgtacacagttcccccaacatcatcaccatgtccaacctaataatctcaatttatattcgacattttttctggaactattacaccttttcgtatatgtgtttcatgccaagat

SEQ ID NO: 40830 - DNA, 389 bp, Glycine max
  Clone ID: LIB3093-056-Q1-K1-G7
cccacgcgtccgcttgtgtctacaatggacatatagcattttccccttcccactcagatccagtgatcgttttttgagccaacggtgctgattcgttcgcgcggaatcttgctcggcgtcggcgtgtaagtcatctgtgaattcccttgggcaagatggctttggggaaatatgctagagtagatggtagaagatcgtcgagttggtgttcaacggtgactgttgtcatgtttgtggctctgtgcttggttggggtttggatgatgacatcatcttcagttgttcctgtgcgtaacggagacgaagcccaggagaataagaaccaagtgaaagaacaagcagaggtgaaagaagcagtgagtgaagtcagcaatagcaatacgcggcag

SEQ ID NO: 40831 - DNA, 337 bp, Glycine max
  Clone ID: LIB3093-056-Q1-K1-G8
cgcgttcttttctacggagcctcgaccaagaagaatcgcagtgagaagaagagggggtcagagtgggaaagagaaagagagaattcgtaaaccctaatttcggaaagatcggcgatgactgcctccaaggatcgcgagaacttcgtctacatcgccaaactcgccgagcaggccgagcgttacgaagagatggtggaatcaatgaagaacgttgcgaatctcgacgttgaactgacggtggaggagcggaatttgctttctgttgggtacaagaatgtgattggtgctcgcagagcgtcctggaggatcctgtcttccattgagcagaatgaagaaa

SEQ ID NO: 40832 - DNA, 369 bp, Glycine max
  Clone ID: LIB3093-056-Q1-K1-H1
gccacacgtccgcttgtgtctacaatggacatatagcattttccccttcccactcagatccagtgggcgttttttgagccaacggtgctgattcgttcgcgcggaatcttgctcggcgtcggcgtgtcagtcatctgtgaattcccttgggcaagatggctttggggaaatatgctagagtagatggtagaagatcgtcgagttggtgttcaacggtgactgttgtcatgtctgtggctctgtgcttggttggggtttggatgatgacatcatcttcagttgttcctgtgcgtaacggatactatgcccatgagaataagaaccatttgaaagaacaagctcaggtgaaagaatcattgagtgaggtca

SEQ ID NO: 40833 - DNA, 334 bp, Glycine max
  Clone ID: LIB3093-056-Q1-K1-H3
acgatcgttttcaatatgcagatcttcgactaaaccctaaccggcaaaacgattacacgggaggtcgagtcctccgacacaatcgattacgtgaaagctaaaatccacgacaaggaaagcattccaccgtatcagcagcatttgaacttcgacggtaaacaactcgaagacggcagaactctcgcagattacaatattcagaatgaatcgacgctgcatctcgttatacgccttaactgaggcatgcaaatcttcgataaaaccctaaccggtaaaacgattactctagatgtcaagtcctctgacaccatcagtaacgtgaaagctgagatcc

SEQ ID NO: 40834 - DNA, 293 bp, Glycine max
  Clone ID: LIB3093-056-Q1-K1-H4
ctcgctcctacagtgcatcacaggggcacgcccgaagctaaaagcgcattccgcgtgcattaaagaacctgcggtcactctaaactctgaagcattgaatactaactagataggctcaatatcgcctcatctgcggtacatcgtcaccggtatccacatccgtaacaaaaaatctagctgcactcacaatccccaaacatcttacagtctaacactatgacttcctataccttggacattacagagcatcatcctcatgttcaaacactagcccggtctctaccatgtgctgc

SEQ ID NO: 40835 - DNA, 401 bp, Glycine max
  Clone ID: LIB3093-056-Q1-K1-H5
ggaagaggaagatgaagtgggttggtgttcttctgattcgggcgacggcgacggcgacgacgatgtcgaagaacggaaatctcagaatgtggatgccttgctcaggggcaacctcgtggtgaagagacaatcgttgctaccgcgacttctatcagtatcgcaaggagcggctgtttgtagaaagcccttcaaacctccatgctctaaatctcatgcttccgcttccgcttacaatcaagaccttactcgtaagctttccgctcgcaaaaggtttgttccctggggttcttcctctcctattcctattcctattcctagatctgccttagacgactccaaattcaatgttgctgttgctggtgctgatgttgccgaggagctcaagccctctttgccttccg

SEQ ID NO: 40836 - DNA, 379 bp, Glycine max
  Clone ID: LIB3093-056-Q1-K1-H6
cagttcatcacaaaagaatgcttgaagttaaaatgacattcaggggccattaaagaaccttctgtcagtataaactctgaagcagtgaatattaaataaatagtatcaatttcgcctcatttttggtacatgggcacaggtatcaacatccgtaaaaaaaaattaagttggactcagcaaccaaaaacatcttacagtctaacactatgattttttataccttggaaattaaagtgcaacattctcatgttcaaacactagcccggtctttaccttctgctgcagcctctaatggctggagagctttgagaggattcataatgacaccatctatgagtccatattccttggcttcttttgcactcatgaaaaagtcacg

SEQ ID NO: 40837 - DNA, 375 bp, Glycine max
  Clone ID: LIB3093-056-Q1-K1-H7
attaacgttgggtctttcccgggagagttacctcaaagtccccaaaagcatcataggacacaacagcaacaaagtctcatcctgtgatgaccctcttgacttgtccacacagactaattcacctcatcacagtgctgtttcctccttctccagtggcagggtcaagagggagagggatctcagctgtgaagaagttgtggatgcaaaagagattgatcagagggatcttagctgtgaaggaataataagagccaccgaagaagaagaagacggcgccgccaccagaaagaaacttaggctcaccaaagaacaatctgctttgctagaaaaaagcttcaaacaacatagcaccctcaatcctaaacagaagcaagc

SEQ ID NO: 40838 - DNA, 356 bp, Glycine max
  Clone ID: LIB3093-056-Q1-K1-H8
cccacgcgtccggtcttcttcatcaacggtggcgtatggatcaatccgtttgataggaaaaccaggggcatttccaatggctaacgaaatccctcacgatgaggtagtgtgcgttaccggcgccaacggtttcatcggttcgtggctggtccgaaccctcttggagaaggagaacccacgctacaccatccacgccaccatcttccccggctccgacgccttccacctgttcaacctacacccctccgtcgtcagccgactcaccctctttcccgacgacctcctcgacgccgacgtcctctgccgcgccattaccgtctgctacggcgactttcacgtggcctccccctgcaccc

SEQ ID NO: 40839 - DNA, 411 bp, Glycine max
  Clone ID: LIB3093-057-Q1-K1-A1
cccacgcgttcgcaaacacgctgttcctacaatcattccaaatgtgcccttccggtcgcaccctcctgccttcctccgtctccgatttccgaccggcattcgacgtcctcgatgccgaccgcgacggcaaaatcagccgcgacgacctccgcgccttctacgccggagtcggcggcggaggagatgacgtgatcggggcaatgatgacagtggctgacaccaataaggacgggttcgtggagtacgaggagttcgagcgcgtggactctgcggagagaaagcccgtggggtactgaggggccatggaggacgtgttcagggtcatggacaaggacggcgacggcaagctcagccaccatgatctgaagacttacatggcctgcgctggttttccggccaccgacaacgaca

SEQ ID NO: 40840 - DNA, 256 bp, Glycine max
  Clone ID: LIB3093-057-Q1-K1-A11
aattgttgtaactctatgattcctaaattctctaaaattcgaaattctaatttcgttaggggaaagagattgtttgtgtgtgagtgagtatggctggaaaaggcgagggtcctgctatcggaatcgatttgggaacgacgtactcttgcgtcggcgtgtggcaacacgatcgtgttgaaatcatagccaacgatcagggtaacagaactaccccattctacgtgggttttaccgacacagaacggttgatcggcga

SEQ ID NO: 40841 - DNA, 410 bp, Glycine max
  Clone ID: LIB3093-057-Q1-K1-A2
cctaaatctgaacaaagaaagctttccgcatctgtcgttgcgtttcagttacgtgaagaccatcggcgtcaccgaccggagcaacctcgcctgcctgacagaacttaaaaaacccgactcttcaaatttactctacttcataccgaagctccatagtgaacaggaactcagaaacaaatgccattggatatcttaatcttgtgactgaaaaaatatataatgtctgaagaggctggatctatgttggtagttgatgatgatccctccgaccaacgctcactatctttggatgatgcaagcagcacagaggagtcacctgatgaaaccaggctctccttggaaacaacagatgatgctattccatatattggtcaaaggtttgccactcatgatgctgcttatgaattcta

SEQ ID NO: 40842 - DNA, 282 bp, Glycine max
  Clone ID: LIB3093-057-Q1-K1-A3
atgcagcgtcaccggtgcgcgactccacgcgtccgggacactttaacagcattctctctctctcgagtctcttcactccgacattgctcgccttcacaccccgcaacacaacggacacattctgagactatttatagttatccccattctggttatgttctttctttcttactccctctcaatcaaaccgtgttagggttagaactaagattagggtttctttactttacccgcgttatgtaatgcgtcgaaaacccgcaattctacccttctttcaacaac

SEQ ID NO: 40843 - DNA, 389 bp, Glycine max
  Clone ID: LIB3093-057-Q1-K1-A5
caacacgctatccccattgcttcttctcttctccctctctcgcttcctacttgacggcgccgtttcggtctccagaagatgcttctgagtacttcgcgcttgaactagacatgatgagttcaagtttcaagacatgggctgtgggatttgcacttggaaatgaacgagaggcaacgttggagagctgaagaggatgctttattacgttcttatgtcaaacagtatggtcctagggaatggaatcttgcgtctcagcgcatgaacacatatcttaacagggatgctaagtcgtgcttggagaggtggaagaactaccttaagcctggcatcaaaaaaggctctcttactgaagaagagcagcgccttgtcatccacctttaagcaaaata

SEQ ID NO: 40844 - DNA, 259 bp, Glycine max
  unsure (1)..(259): unsure at all n locations
  Clone ID: LIB3093-057-Q1-K1-A6
ttcccggggtcgacgccacgtcgtctcgtcccacgcccgtctcgtaattttgactggggctatttaatagcatataattgcttagcaaggggcttctannattttaaagggtgttggggttgaaggggtgttggctttaagtgtgcagaatttgcagatagcataggggttttgaaatacatctgcaananngttgtcctagngnnagcatttctttaactttgaatannacataattatgannaatttttttctttca

SEQ ID NO: 40845 - DNA, 333 bp, Glycine max
  Clone ID: LIB3093-057-Q1-K1-A7
ctttttctctctcttccctcttcaatcttcacattttctctatggagaatcatggcaacaagcgagtgtgggaccagtcctctgactccaacactcagcgggtcgactcgcccgagtctaagattcgtcgagttgactcgtccgattcgggtattaactcgtccgagtctcaactcgaatcggtcctcgactcgtcggaggtgcagctacaagacgacatttttaacatgcttgacgacacggacaatgtgcccgagcgtgactcggtgcaaggtcttgactcagtgatcaaaagcttcgaggatgagataaatgctccaggttcggattctg

SEQ ID NO: 40846 - DNA, 372 bp, Glycine max
  Clone ID: LIB3093-057-Q1-K1-B1
gtggaccattgcggattgagaaaagagaccatcagaataaggaataagagtcacttctataggaaatgaaagttaaattaaaacaaaaaaaagaacttctgttctgctaagaaaatttagcagtctcgagaattatttgtttttaatttaaaaattaagtaatgtaattttattttttttggatagaaaagtttaagtcatgttttttttactacatttggaagaagaaggtatattattatttactcatgatcattgttgttattattagcttggcaagatgtatgtaaatgtctttcctaatgattggaggcaatgaatcaagatttgatgctcttataataaaatgttattaattgctttttatcgctc

SEQ ID NO: 40847 - DNA, 142 bp, Glycine max
  Clone ID: LIB3093-057-Q1-K1-B11
cttccggaaatattggttaaaccggttgaaatttggtcaaggaccctgccaaatgaaaccgagggaaaatctaaggttgccctttttcaggattaaatggaaaagccattggtccttgccttggcaattggccaaaaccggt

SEQ ID NO: 40848 - DNA, 254 bp, Glycine max
  unsure (1)..(254): unsure at all n locations
  Clone ID: LIB3093-057-Q1-K1-B12
attcttacttagctcacactctgcactctcttttcaattctgcttccaacacactttactgcacattctccattttcgttctcacttaattggcgcgttaaacccttcttcattgctgcaacttcacgcgccagatctgcaaaaccattaagctatgcttcagcaccactacgcatagcttattccaaaaatgtgcaattccaatcctaacaaccgtaaccgacacgctccgtcgccgncggagcccaagccca

SEQ ID NO: 40849 - DNA, 296 bp, Glycine max
  Clone ID: LIB3093-057-Q1-K1-B2
cccacgcgttcgggtaattaggttatgtaggtaattaggcaatttaattgctggtttcagtgtacaggtttagttgaattaaaaaagatgggttgtcatattctctaactgttgaaggattcttgtttctatatgtatgggggagtgtgaccgcgaaatgatagggcaccgggtactcttgataagcgattggtctgtgtaatgccactggggtcattaaaatattgcttagattagacacaaagaatatttcatgctcaaaaaaaaaaaattatgatgcataagaagagctatat

SEQ ID NO: 40850 - DNA, 444 bp, Glycine max
  Clone ID: LIB3093-057-Q1-K1-B3
gccacccttatgaacattgctgataaccccaccaatgtgcagcttcctggtatgtatgacaaggaagagaatccccgtgtgcccatcatcggcaccggtaacgatttctccacactctatgcgcctctcatccgtgatgggcgtatggagaagttctactgggcaccaacaagggatgaccgcattggtgtctgcactggaatttttcgcaccgattcaattcctgaacaggacgttgtcaagattggtgacaccttgcctggccaatccattgatttctttggtgcactgagggccagagtatatgatgacgaagtgaggaagtggatttctggtgttggtgttgacggcattgggaagaagcttgtgaactcaaaagatggacctccaacctttgagcagcccaagatgactctggagaagctcttgacgtatggtaacatg

SEQ ID NO: 40851 - DNA, 63 bp, Glycine max
  Clone ID: LIB3093-057-Q1-K1-B4
tcggagccactttatgaaattacaccatgaatatggcggatgcaaattcctaatttctaagaa

SEQ ID NO: 40852 - DNA, 445 bp, Glycine max
  Clone ID: LIB3093-057-Q1-K1-B5
gccacccttatgaacattgctgataaccccaccaatgtgcagcttcctggtatgtaggacaaggaagagaatccccgtgtgcccattattggcaccggtaacgatttcttcacactctatgcgcctctcatccgtgatgggcgtatggagaagttctactgggcaccaacaagggatgaccgcattggtgtctgcactggaatttttcgcaccgattcaattcctgaacaggacgttgtcaagattggtgacaccttgcctggccaatccattgatttctttggtgcactgaaggccagagtatatgatgacgaagtgaggaagtggatttctggtgatggtgttgacggcatttggaagaagcttgtgaactcaaaagatggacctccaacctttgagcagcccaagatgactcttgagaagctcttgacgtatggtaacatgc

SEQ ID NO: 40853 - DNA, 490 bp, Glycine max
  unsure (1)..(490): unsure at all n locations
  Clone ID: LIB3093-057-Q1-K1-B6
ccacctccgatcgaagactagtacatggtgagccaagtaggaaagaggaggcgtcactcgagaggtcaccatgcaacctcacaaacgcttgcatggctgcacattcaagaagaaggctcctaaagcaattaaggagataaggaagtttgctcagaaagcgatggngacgaatgatgtgagagtggatgtgaagctgaacaaggctgtgtggagccagtggattcggagcgtcccgaggaggattagggttcgcattgcccgaaagaggaacgacgattaggatgcaaaggaagagctatattcccttgntactgttgtcgaaatcccccaagatgagctcanaggtttgggaaccaangttattgatgatgaagattgattatgtattgcttacatatctngtntattttatagttgatgcagaattgcgaatatcttttaattttgtgagacattggagatatttaagttgataatatcgattgctttc

SEQ ID NO: 40854 - DNA, 393 bp, Glycine max
  Clone ID: LIB3093-057-Q1-K1-B7
accacgcgttcgtccacgcgtccgggaaggtgatgaaggatcttgctatgaggctagagaaactaggagagcacctgctggacttgttgtgtgagaatcttggcctagagaaaggcgtcctcaagaaggctctctatggatcaagaggaccaacttttggcacgcaggttgccaactacactgcatgccccatctcagagactgtgaacggtctatggaccacactgatgccagtggaattatgcttgtatagatgatgacaaggtcagtggactgcagcttctcagagatggccagacagactgacgtgccttctatgcaccactggattgctgataacattggtgatcagctagaggttatcaccaatggtaagcacaagagtgtggagca

SEQ ID NO: 40855 - DNA, 309 bp, Glycine max
  Clone ID: LIB3093-057-Q1-K1-B8
aacatccccttttcttcttctcacttctctccaagttttttcttcacatttctctgcctttgatctgcacacacaacaacatccctctaaaaaacatagagggataaaataaaaacatgaagaaatttgtactcaagttagatttgccagatgacaaggcaaagcagaaggccctgaaaacagtttcaacactttcagggattgatgccatctctatggacatgaaggagaagaaattaacagtgataggaacagttgatccagtgaatgttgtgagcaaactccgcaagtattggcagacagacatac

SEQ ID NO: 40856 - DNA, 147 bp, Glycine max
  Clone ID: LIB3093-057-Q1-K1-B9
tcgcccacgcgttcgaaaaatatctcctaatgaaaggcggctttcttatgctcaaaaaagggtttcacatgttcctgatatcttttatcgaaagggccttacttaccgagatatttttgcactatcttgaggaccttcacttgggag

SEQ ID NO: 40857 - DNA, 408 bp, Glycine max
  Clone ID: LIB3093-057-Q1-K1-C1
aagaacttggttaagaagtgccttgagctcttctttgaaattgcagagaacaaggaggattacaacaagttctatgaggctttctccaagaacttgaagctaggtatccatgaggattcacagaacaagggaaagattgctgaattgctcaggtaccactccaccaagagtggtgatgaaatgacaagccttaaagattatgtgaccaggatgaaggaaggtcagagtgacatctactacatcacaagtgaaagcaagaaggctgttgagaactcttcattcttagagaagttgaagaagaatggatacgaggttctttatatggttgatgccattgatgaatatgctgttggtcaactcaaggaatttgagggcaagaagcttgtctctgccaccaaggaagggctc

SEQ ID NO: 40858 - DNA, 418 bp, Glycine max
  unsure (1)..(418): unsure at all n locations
  Clone ID: LIB3093-057-Q1-K1-C11
tccacgcgtccggtgctgcttaatactttttctcgcctataaaaggtccgccactgcggtacttgggcacttncagaacaactttttaatcatcgaagcccgcgcgagaagaactgtttgcgcggtccaaaacgcgtttccaagctccgtttcaaacccgtcgctatggctacgctcggcgctcgcatggtggccgccgcacccaccgtaactccgncggcctcgctcgacttcgaaaccttcgttttcaagaaggagagattacctcgctggacacgacgagtacatcgcgaaaggagggagggatttgttccctctgttgcagggtgctttcaaggggattaagcagattggcgtcattggatggggttcgcagggacctgctcaggcacagaatttgcgggactcgcttgctgat

SEQ ID NO: 40859 - DNA, 506 bp, Glycine max
  unsure (1)..(506): unsure at all n locations
  Clone ID: LIB3093-057-Q1-K1-C3
nccacgcgtncggatcatgagacctggaatgttcangtgtttagatccattgatggtggggctgctgttgggttcccggagactcctgaagatgctgccagagctggtcttattagtgggaaggataatatcattgatcgtagcattcaagatgcttatattaatgctattcgacgtgcaaagaacttcatctatattgaaaatcagtatttccttggaagctcttttgcctggagtgctgatgatattaagcctgaagacattggtgctttgcatctaatcccaaaggaactttcactcaagattgttagtaagattgaagctggggaaaggtttgctgtgtatgttgtagtcccaatgtggccagagggtgttccagaaagtgcatcagttcatgcaatattggactggcagaagagaacaatggagatgatgtacaaggacattattcaggcactcagagctaagggaatcgatgaagatcctcgaaactatttgacattctt

SEQ ID NO: 40860 - DNA, 171 bp, Glycine max
  Clone ID: LIB3093-057-Q1-K1-C4
gacacgcgtacggagattccaaacctcttggattggctgcaactagccttatcctaagggagacaaaggagtacctgaacaatgtaagccgcataatgatcactcattgctcgcgcaggataaagagtaggacagtcctatgaccgctaaggcgaaggccaagaagcacac

SEQ ID NO: 40861 - DNA, 362 bp, Glycine max
  Clone ID: LIB3093-057-Q1-K1-C5
gcgctcgaaaattcctacagagagagcgagaaggatgctgaagagagagcaaggcaagtacggctccgggggacctccttggtccttccgttgacgttcacaactcctttgccgatcagaacaataaaagaattgtcttggctcttcaaagtggtctgaagagtgagctgacctgggcgctgaatattcttacgctgctctccttgaaagaaaaggatgacatgcgcatggacgcaactcccattgcaaaaattcccggtttgcttgatgcgctccttgaagttatagatgataggcgtgatatagcactcccaaaggaattagccaagacaacgagggtgaggacgttaggtgcaagttct

SEQ ID NO: 40862 - DNA, 358 bp, Glycine max
  Clone ID: LIB3093-057-Q1-K1-C6
tttgcctgtatgtaatcctcaaatacttctctagatcgcggctggccttgtgcaactattctgtctgtatgggtattccctgtttgtctttattccggccctgtgtatgtccgttgtgccactggatatatttagatgggtggttgcaggtgtggcagggttcatgtcagcaacatttgtggcactgaaactgctggcacatattaaatcagcaggtgaaaagtggttcttgattgttgctggcatttctcctgtgcagctggctctagactgtgtactaaaaaattaccttttcacagtatcagtttaagaggaaactggacagtatgaatgaaatatatacagaacgcaagtatag

SEQ ID NO: 40863 - DNA, 393 bp, Glycine max
  Clone ID: LIB3093-057-Q1-K1-C7
ctcttctcttcgctcctgcacttgttgtttctttgcccttcatggcatctcaggctagccttctccgtgaaaagcagctcaaagatctttgcaaaaaccccgtcgacggcttctctgccggtttggtcgatgaaaccaacatttttgaatggagtgtcaccataattgggcccgccgatactctctacgaggggggatttttcaatgctattatgagtttcccatccaattacccaaatagtccaccttcagtgaagttcacctcagaaatatggcaccccaatgtatatcctgatggccgggtttgcatatcaattcttcatcctcctggtgaggatccaaatggttatgagcttgcaagtgagcgctggacacctgttcatacggtagaga

SEQ ID NO: 40864 - DNA, 362 bp, Glycine max
  unsure (1)..(362): unsure at all n locations
  Clone ID: LIB3093-057-Q1-K1-C8
caacacactagacaattttccaattcaattatcgattcccctactcacaaaaactaacatgcaatccatttctttgttcaattcctcaccaatattattccatccattttcaccatctaggccatgttctaatggcaagaaaatgaattcgtttgctccaactaaggcttccatgagaggatcagcggatcagaacttcagtggaaggttggtggatgagagcatgataatactgaggaagaggatccatgagatgaacatgatagataggaactatgagcctncttcagattggatggattgggagaagcgctattataacaagtatgactccatcatatgtgaagcagtgggagttttgc

SEQ ID NO: 40865 - DNA, 111 bp, Glycine max
  Clone ID: LIB3093-057-Q1-K1-D1
tcgtccacgcgtccgaaaataagacattgtttggtttgggtacttgctcgaatttccctcgatcgcttaaagtgtatttgattaggtaaaccgaacgcggaaatctctttc

SEQ ID NO: 40866 - DNA, 427 bp, Glycine max
  Clone ID: LIB3093-057-Q1-K1-D10
attacatgttttgatgtacataggtttattttaccgcttttataggtccatgataggattaacacatgacatgatctgaacttgtcttgatccggactaactctcatgtaagatcattatatctgatgcacttacggctgatgtcaatgttactttattaccatgtctaaacgaatcagctattgaaaaattagtagcttcttggtgcgctattgattttgtttgtgtagagataaatgcgattatttggtcgatattgttttgtggtttatgaatgatatgatggacgtaggaggatatttgatgagaacgcagggtcatacgcctgatggtggagataaatggtactagtatagctgcttactaaaatgtaattattggtgctagataatacacgagactagatctctttccatgctcccttttg

SEQ ID NO: 40867 - DNA, 398 bp, Glycine max
  Clone ID: LIB3093-057-Q1-K1-D11
agccttcgggaagaggggaaatggaaatgagtacggggtcggggggggatttggacaccacaaccaggtggaaagttcataacctaaccggcatcggttcaagaactttcgaggccaaaagatgaggaaaccgcaaatttaagcattggtaggagcacttgtttgcttcctcttactcaggatcggaacctcagcatttcccaagtcacaggactaccatgattttgccgaccacggtaccttcctcggaattcccaatgcacttaacgtgatatccaatgtcccttgtctgggtatatggcctggttggacttgtactctgccatcatggaaataactttaggctcagcttgcaaggtgaactatggggctggacatgcttctatgttggcgtggct

SEQ ID NO: 40868 - DNA, 245 bp, Glycine max
  unsure (1)..(245): unsure at all n locations
  Clone ID: LIB3093-057-Q1-K1-D12
ttagatcctgtggctgaaaaacttcgccaacaaagattaatcgaagaagcagattataagggcactaaagaatngttcagtgggggaaaagaaaaagatgaaaagaaccttgacactttcatacccaaatctgagagtgatttcttggagtatgcacagctcatctcacacaagctccgagcttttgagaaaagttatcattatattggcttgctgaaggcagtaatgagactatcaacgatatc

SEQ ID NO: 40869 - DNA, 295 bp, Glycine max
  unsure (1)..(295): unsure at all n locations
  Clone ID: LIB3093-057-Q1-K1-D2
gcgnccacgcgttcgggaacaacagcaggtacaaagggctggccctcgacgacgccgttttggcggacaacaacgccgaagcgaaggccgttagagatgacggccagggtgactgaacggaaaggcagaccggaaactgggttttgaagattctgcatgtgaagtccgtgtgggaagggaaacagcgcaatgaaaaggatggtacggctcatgatcaaactcaaaccaatttcgacgaggaggaggtgtgtgaatgtgatgcttgcggggttgatgaaaatgacagctactgtga

SEQ ID NO: 40870 - DNA, 170 bp, Glycine max
  Clone ID: LIB3093-057-Q1-K1-D4
cccacgcgtccggcatcacgtcccttttcaaaccaagttccacagacaccaacaacgctttagctctgtgttctctccgtcaccggcaccggcgatctacatctgaacccggtccaagcaatagatctcagaaatccaaatggagaacctaatgcttttggtcaaccaaa

SEQ ID NO: 40871 - DNA, 364 bp, Glycine max
  Clone ID: LIB3093-057-Q1-K1-D5
gttctattctctgaacaatggcgtctctctctcacctcaacaaactcctctgcatgcccccgctcaactcttcaccctctatttcggcaccacgcagcagcgtcggaatttggaccaaacctgtcggaaggccgaggctactggtgcgtgtccgagcggtcacgagcgacgacgagtgggggccggagaaggaggaggcgtacggcggcggcgtagcggtggaggagaaaccgacgaagtcggagacggagacggagaagctgaagaaggccttggtggattcgttttatggcaccgatcgtggactgaaagcaacgagcgaaacgagagcggagatcgttgaactcatcacacagctcgaggc

SEQ ID NO: 40872 - DNA, 406 bp, Glycine max
  Clone ID: LIB3093-057-Q1-K1-D6
gttttggagcttatatatgagttagcagagattgaacatggtacagaatttttgtcaaagactagcatgtttcaattgctttcgtcaatgatcagccacaattctatggaatcaattttaagatcaagagcaatgatgataagtggaaggctactgtccaaggatattatatactccttcacggatgaaccttgtgttaaaagctgtatttcgtctattgatggtagacttcagtcattggaagcttcagatagagatgaatgtgaaactgcactagaatcattgagtcatatgggatcatctatccagggagctacattactactctcagggtcatgacctgctgctcgacatgttataaatgctgctattgaacgacaaggaccaacagggcatggtaaacagc

SEQ ID NO: 40873 - DNA, 410 bp, Glycine max
  Clone ID: LIB3093-057-Q1-K1-D7
cccacgcgtccgcaacaaccaaccatcaagggaagttagtgagagagagagagagagagagagagcggaagatgaatggtggtgaatcttatggtgctattgagacacagtacataagaaggcatcacaaacatgaaccaagggaaaaccagtgcacctctgcacttgttaaacacataagagctcctgttcaccttgtgtggtcgctggttagaagatttgatcaacctcagaaatataaaccatttgttagcaggtgtatcatgcaaggggacctaggcattggaagcgttagagaagtgaatgttaaatctggccttccagccacaacaagtactgagaggttggaacaactggatgatgaggagcaacaatcttggaataaggataagttggaggtgaccacaggc

SEQ ID NO: 40874 - DNA, 350 bp, Glycine max
  Clone ID: LIB3093-057-Q1-K1-D8
tttttgcattctcaaaccaaggacaaatcctagagtttctgctttggttgaaagagagggacctgtgagtgtcacaaacatgggagaggagaatgttaaacaaccgttgttggagaggaagtactacaaggactgcccaggttgcaaagtggatcaagccaaagagttgagtgagggaaagggtgtacctgttaaaaatctttttatcatgtggatggtggtgctgagtgctgcactgactatattcatctgtctctagattcctctatttcatggtgagggatttcaatattgcgaacacagaagctgatattagctcttatgctggatatggtggctctttattcatg

SEQ ID NO: 40875 - DNA, 417 bp, Glycine max
  Clone ID: LIB3093-057-Q1-K1-D9
cccacgcgtccgcccacgcgtccggctacttcaccactccaaacccaccacaccaccagtgttcatatctcattctctaacctttcactctgccttactcactctctactttgctcatcatcgtagatgaaccaacacttctagtctctcttactttataaccatgtaaaaatgagtcacctaatgaaaaattagtagcttcttggtgtgctttttattttggttgtgttgagataaatttgtttgtttgtttggtattgttttgtgttttatgaattatttgatgggtgaagaaagagaagtggtgagaaagccaggacaaaggggtgttggtggagataagtgggacttgtatagctggttacaagactgtaaatattggggctgtgtaatacacgagactagttctctttcgat

SEQ ID NO: 40876 - DNA, 470 bp, Glycine max
  Clone ID: LIB3093-057-Q1-K1-E1
gttccaaacttcttcttggaatgtcccttccttaatacccctcaaagaaaagccaccttaacatctggtctctgaaaattctctttagagagatagagagaggaagaaagaatggcagcttgcactgtctactcaacacaatctctgagcacaaattgctccatctcaaccccatcaaagacgcaactcagttttttccaccaaaagcaggtagttttctggaggaacagcaagaagggcagctgcagcagcagaagaagctatgtgataacatgtgcagcaggtgactcacagacagtggtgattggcctggctgcagactcagggtgtgggaagagcaccttcatgaggaggctgaccagtgtgtttggaggagcagcagagccaccaaagggtggcaaccctgacttcaacactctcatcagtgacaccaccactgtcatatgcttggatgattaccactctttgga

SEQ ID NO: 40877 - DNA, 191 bp, Glycine max
  Clone ID: LIB3093-057-Q1-K1-E10
gaaagaataagggttaatttggcctaattgaaattcggagtgaaactcgggatctcgtccaggcttgcatggaattgaattaataattcaattccatttctattaataaaagagtgaaagcagaaatttaaatggaatgtatagggtggggccaccattatcataaaaaatacttagttaaaaaaacgaaa

SEQ ID NO: 40878 - DNA, 367 bp, Glycine max
  Clone ID: LIB3093-057-Q1-K1-E11
gcggacacacgtgctgccacgcttccgggtgaaaggaaagccatttccaatccaatacgcgcaggataggaccctgttggggatacacgcgtacaggttcataccgatcaacttggctcatgggtagtcatgagaactaaattgccatatatgatgcctttaaatgggacgcattcggcagtgggtttcctcaagatgttctgtcttgtccccatatcatatgcagcttatttcctgcacagtcaggtaatatatgctacatcttgtgatgccaacattggtgtttttgatgctgatagcttgaggctcagatgtcgcattgcttcatcaatatgcttgtcaccggcagctttaagtggaagtcaag

SEQ ID NO: 40879 - DNA, 256 bp, Glycine max
  unsure (1)..(256): unsure at all n locations
  Clone ID: LIB3093-057-Q1-K1-E12
cccacgcgtccggcttctgcagaagtagagttccgatgctttgttggtgggcttgcttgggccaccgaccacgatgctctcgagaaagccttctctcaatttggcgaaatcgtcgaatcgaaggtcatcaacgatcgtgaaactggaagatccagagggtttggatttgtgaccttcgccacagagcaagcgatgagagacgcaattgaaggaatgaacggccagaacctcgacngtcgtaatataaccgtgaacg

SEQ ID NO: 40880 - DNA, 410 bp, Glycine max
  Clone ID: LIB3093-057-Q1-K1-E2
cccacgcgtccgtccacgcgtccgtcgcaccagtttcaccgcacgaatatcttggtgtttggagcgatccgagaaaaactcttgtaacatgttggtttaccaggacctccttacaggtgatgagcttctctctgactacttccgttacaaggaaattgagaatggaatgctgtgggaagttgaggggaagtgggttgttaaaggagcagttgatgtagacattggtgcaaaccactttgctgagggtggtggagaagatgatggagttgatgatgcagctgttaaggttgttgacattgttgacacattcagactttaggtagcacccgcattcgataagaagcagcttgttacctttcatgaataggtttatcaagaatttgacttccaagctcgatgcagagcaacag

SEQ ID NO: 40881 - DNA, 304 bp, Glycine max
  Clone ID: LIB3093-057-Q1-K1-E3
agtaatcattctgtggcaatatagttgatattttggagacaagattcatttcaacttgccttaattgtcaccattggattcacaggttctacatctgcaccaatgagcatgtcatggatcagtttgcctccaataggtcgatgctttgggaaaaattttccctggattttggtaatcgagattgtaacttatgggcttaatccatgcactatgttttaatctgaataatgattggctgacacctatggcaaatctataccttgagagagagacttagaagagagataatttgatgagtgacatg

SEQ ID NO: 40882 - DNA, 137 bp, Glycine max
  Clone ID: LIB3093-057-Q1-K1-E4
tcggcttcatagaagtgctttaatgatcacttcaccttcctttgaagttaaaggctccttacttccttcgtgcttagctatttctatgaagctttcagtttcactggaaaatagtgaatacttaacaaggtgatata

SEQ ID NO: 40883 - DNA, 413 bp, Glycine max
  unsure (1)..(413): unsure at all n locations
  Clone ID: LIB3093-057-Q1-K1-E5
gaaaaagctttgaaagatgctggcttgggaagtagacaagtcacaccttttatgaggttacgggtagttggattaacttataaaactagacaagacaaacctaaagaaggcatagtagcaatctggaatccaactgagacacagcgtcaggagttggtggaaggaggagcatatgccatttcaggactcatgccatcaagttctgattctgatatccttcacttggatactagaggatcttctaccaagtggttgccattatcttataattcaaggaaacagtttaagccatttttctgcaatagaaaatcgatcccattgactagcttgggtgacatncctctttccaacgagtttgacattactgcataatgtgtgcatgttggaaggggttatatatcaaatcaacaaag

SEQ ID NO: 40884 - DNA, 368 bp, Glycine max
  Clone ID: LIB3093-057-Q1-K1-E7
cccacgcgttcgcaaaggtgctcagatttttgaagctctgggtctttcatcagaagtgattgaaaggtgctttgctggaaccccaagtcgagttgagggtgcaacatttgagatgcttgctcgtgatgctcttaaattgcatgagttagcatttccttctcgggttttctctgctggaagtgctgaagcaaatgcattaccaaatcctggggattatcattggagaaaaggcggtgaaattcacttgaatgatccacttgccatatcaaagcttcaagaggctgccagaactaacagcatagatgcatatgaacagtactctaagctcattcacgagttaaataaagcctgtaatttgcggggacttc

SEQ ID NO: 40885 - DNA, 412 bp, Glycine max
  Clone ID: LIB3093-057-Q1-K1-E8
agccaagctaccagtggattaagaaaagttgactcggcaaatgattcagctactggagttacccccagaaaaggaatgattctacctttccaaccacttgcaatgtcttttgacactgttaattactacgtcgacatgcctgcagaaatgagagatcaaggagtgacagaagataggctacaactgcttatgggagtaactaggtcctttaggcctggagtcctaactgcactaatgggagttagtggagctggcaagacaactgtaatggatgtgttagcaggaagaaagactggtggctacatcgaatgagatattataatctctgggtccccaagaaccaagaaatctttgcatgagtctctggttactgtgaacatactgatattcattcaccccaagttactattag

SEQ ID NO: 40886 - DNA, 415 bp, Glycine max
  Clone ID: LIB3093-057-Q1-K1-F1
tcgtcaggttgtgtctaatgctcttgatatgaagctcagggatgacttagagagacttaagaagatcaggaaccaccctgggttgaggcactactggggccttcgggtcccgggtcaggacaccaagaattcctggcccaagggaaaaaactgttggggctttaaaaaaccggtaaccattaaggtttgggctggaaattaaaatttggttaagaaggcatgttggaagtacactacatgttttgaataataccaactttgtatccgtggttaaatggcttgacaatttcaatttggtttgttatttgcatctgagattccgattagttaaataatgttggttttcttagttgtagagaaccttgaatagtatttttgaaatacgaattcagtttgatccgggaaggaaaatttc

SEQ ID NO: 40887 - DNA, 272 bp, Glycine max
  Clone ID: LIB3093-057-Q1-K1-F10
tccacgcgtccgaccacgcgttcggcataagcgcgtgtaaccctaattagggtttggaggccgattggagattcacctttcgcgtaatcacagcgctggatccgtaccgtgttcctgcgtctacggaagcgccttttgctcggtccttcgcctgaacacggaagcatgtacggatcccgaggggcaatgttgggaagcggaggggtttcagacggttacaaggttggctcatagagacatagaatgatggaatccaatcgatacttcgcagt

SEQ ID NO: 40888 - DNA, 133 bp, Glycine max
  unsure (1)..(133): unsure at all n locations
  Clone ID: LIB3093-057-Q1-K1-F11
cgaaaacattggttaacacgaggatgtgatacgcggatcangctaaatacacattcatagccaacatgcgaagactcatgagagagatcacatggctgaatacgaacaaggttcttacaggcacgtaagctat

SEQ ID NO: 40889 - DNA, 355 bp, Glycine max
  Clone ID: LIB3093-057-Q1-K1-F12
ctcaccttacctcttattccaaatcttaattcaaatggcatcggaaactgagacgtggggctttcatgctctatatcaaccagctcctcagtctaatcatcaacaacttgtacagcaacatggacatctttcttagtgagctcatcatcaatgcatctgatgcttagtacaagacccgatttgagagttttacatactaaatcatgcttgatgctcatccagagtcgttcattcccattttttctgactagaccagctccacattgtctatcattgacaggagcattgccatgactaatgcctaatggatgaatatcactaggtactattgcaaggactggtaccaaggaattta

SEQ ID NO: 40890 - DNA, 360 bp, Glycine max
  Clone ID: LIB3093-057-Q1-K1-F2
cgagaggtactttgctcacagatatattttttttttggtctccatcattttctccagagctttcagtttctgtggttcatctttcttcttcttaatctttccccccctctctgtaacatcccgcttctctgaatccctttctgctaatcatctgtctttcaagctaagattttctggtttgtcttttaattcaccaaaaagcacacttagaacgatttttcgaaagccaggtgttttcagaaacgagatccacgttttattgtcgaatttcgctagtcatattaatatttcatcatttttttttcctttgaaaccacccaagagggttatttttgatccctcaaagctaatttctcattt

SEQ ID NO: 40891 - DNA, 395 bp, Glycine max
  unsure (1)..(395): unsure at all n locations
  Clone ID: LIB3093-057-Q1-K1-F3
cccacgcgtccgctcatcaactcatgattacatggtggtagcgatagtaaaatcgagactacccacgcgagtccattggttttctcttagaaccaattcctggagcttgtattgatcagtatccttttaaatccggtcgcagcttgctcttgaatggagctattcattggttggttcaaccctatgatagactctgtgttataattgcatttgatgtgatggaaaaagcgtttctttaaaggcactattctcttccactgcaacacgcacaatcatgttcttcttcttgtgaatatttaaccaaaaagggtgttctgttctgtgcttcaacagttttactgttttgaacatgtgattgtttcttgagagacttctagattgntctgtatatatag

SEQ ID NO: 40892 - DNA, 364 bp, Glycine max
  Clone ID: LIB3093-057-Q1-K1-F5
caggactatacctatctatatagtgtatgaaaattctggggggtgaagtcgtttttggggtagttgatggatgttgaaatccttgacggttgtttggtgaaatgagggatgttatcggggttgatgaacttattgagggcctgctttcggccgggttcggatggatttacacgtgcaggttcctatgccggtggtagacaggatggactattgtggtacatggactctgtgcagcacttgtatggggatgcactaatggctgtaatcgaagccaataacatgctggaagatcagagccagattgaatcacgctgtttgagctccaatgaatgcgtaccttatggtaccttcatcggtgtctatg

SEQ ID NO: 40893 - DNA, 509 bp, Glycine max
  Clone ID: LIB3093-057-Q1-K1-F6
gcctaaccatatggctacccatctacgaccgaatcctcgtgccgtcgctccaaagggtcaccaaaaaagagggtggcatcacagttcttcaaagaataggctttggcatgttcctctctatactatgcacaatggtgtctggtgtagtggaagaaagaagaaggacattggctttgaccaatcctattggattagagccaagaaaaggtgccatttcttcaatgtcaggtctatggttggttcctcagctaacactggcagggttatctgatgcattcgcgattgtgggacaagttgagtttttctacaaacagtttccagagaacatgaaaagccttgcagcgtctctatttttctgtggcctcgcgggatcaagttatttgagtagtttgctgatttctattatccatagggcgacagctaaatcttcaacttgggaatggttacctcaggatctcaataaggggagattggattatttttattacattataactgctctagaagtc

SEQ ID NO: 40894 - DNA, 443 bp, Glycine max
  unsure (1)..(443): unsure at all n locations
  Clone ID: LIB3093-057-Q1-K1-F7
gctcaacaaggggaaactggtgcaccggatgaggtttggagaaactggtctagtaagaacgcaggcttggaatcattttcaacaacgagcagcatttgaaaaagatcacccgacaaggaataaaagtcaacttttttagagggtggaattttcagctgatttggtcgttatgtgcttctttttctttaactaattaatcctccctttcggccacatatatagaatagaaatcgtgcgacaaacgactgaacgtgtctttctaaagaggaagacgcattgagtcgtcgacagtgtggtcgagtttcgcagcaccagccagtgcaacagtgtagacccatatncttagaggatctcataaatgtgagttcaaatgttaaaattaaggataatgtcaatttctgaaacacttttttatagttcatttttttaatctctcttttaat

SEQ ID NO: 40895 - DNA, 369 bp, Glycine max
  unsure (1)..(369): unsure at all n locations
  Clone ID: LIB3093-057-Q1-K1-F8
cgccgcctcaacatctcaactttcccttcgatctcattctcaggtgttgttgaagcttcctgtgttggcttggtatccctgcaagttctgctgtagcagattccaaggtgaaggtgtcacgttaaagtttctttcatgtttgaacaggctactatccatttgggagcaactgagctgcttggagagtatttttcttcctctaggaaaaattacagaccctcaccacagagacttagttgtatgaacggttggccaccttccattatccttgaaggagattgttcaaggatacagactacctttgaggttgaaattgcnngctgcatataattgaattcagcattttcttgctctgaatatctctggaac

SEQ ID NO: 40896 - DNA, 388 bp, Glycine max
  Clone ID: LIB3093-057-Q1-K1-F9
cccacgcgtccgcccacgcgtccgcggaaattgaaggcagatgatctgtttttgatctgtgcaacagatggactttgggagcatttaactgatgaagtggctgttgaaatcatctccagaagtcccagaataggaatagcaaaacgattggtgagagctgcactagaagaggttgcaaagaaaagagaaatgaggtatgaggatctaagaaaaactgataaaggtctaaggcgtcattttcatgatgatattacagtgatcgttctatatctcgatcattcaaaagaatctcaaaatggtagatcaaaacataaaggagtttatgattgcattaatactcctattgatatcttctctctgaactcagatgaagctgatctttaaaatg

SEQ ID NO: 40897 - DNA, 207 bp, Glycine max
  Clone ID: LIB3093-057-Q1-K1-G11
atgaaacttattagttcacctcaaccagaatgacctacttatataattatgattcccaggtcactaggtgataggtacttagagtgataatttgagtggacaccactcgaatttctgactgactgactttctaaaaatgccgttcttatattaccattcatacacgatccatcccattgaatcgatttttcataacccgaatgcttt

SEQ ID NO: 40898 - DNA, 229 bp, Glycine max
  Clone ID: LIB3093-057-Q1-K1-G12
accacgcgtccgcaataacttcgatgctaaccacttagcatggccactaccattcgaagcctgataggcactaatgggctcatgtgccaagtcatcaccatacggacatgcgtcgtgcacggactcattctaatcatggccggctcctccgccacctacatgttacgcctctactccggagacctctgattcgacccggcctacgaccaaaccgcctcaaacctcctta

SEQ ID NO: 40899 - DNA, 275 bp, Glycine max
  Clone ID: LIB3093-057-Q1-K1-G2
ccactgataggcgtcgttttgccccccaaaacccaagaagaaatggcgagttgcatcagcaacactcctaaggaaagcgtggttgacgatcggtgaaggcgtgcgacctcttgtggctattgcagatcctctcgtgacaatagcatctctcatggcatgtgggcacatatccttacagtggatgactaccaagatcttcttgattgtggctggagaaggtctggatgatttctttataaaccacagattgaaaggacatgctgcccttcttatac

SEQ ID NO: 40900 - DNA, 362 bp, Glycine max
  Clone ID: LIB3093-057-Q1-K1-G5
ttcttgagtgttttctcagttcctcacatcatgtaccgctttgcaacctccctcgcctccaaagctagaattgccaggagcagcactcatcagattggaagtagggtcacttggaacaggaattatgcggccaaagacattaagtttggtgtggaggctcgggctctgatgcttaagggtgtcgaagagctcggtgatgccggtaaagtaacaatgggccctaaggtgcgtaatgtggttattgagcaaagttatggagcacctaaagtgacgaaagatggagtaaccgctgctaagagcattgaattcaaggacatagtcaagactatcggtgccagtcttgtaaagcaggttgctaatgc

SEQ ID NO: 40901 - DNA, 392 bp, Glycine max
  unsure (1)..(392): unsure at all n locations
  Clone ID: LIB3093-057-Q1-K1-G6
atcacttctgagtttctctcttcacctacactttcctctttcaattcaattcaattcttctttttgggtcagaaactctgtacagttaatcaaaccctacctcacctcaccggttttagctgttaatttaatatatagatagaaatccaaggaagaagatgaagcagtttgccgtccaaaacgtcgtcgttccatcccacgatgagattagcgttgtttgccccaagccccgtcgcctcggcctcttcaacttccccgttaacgatcccactgttagacccttccgctggcatctcagttaccatgttgagccatgtgattcaaactcatctggttcaaatnctctggacaacttactcaccaaggatggggattttgatgtaaagcaatcg

SEQ ID NO: 40902 - DNA, 328 bp, Glycine max
  Clone ID: LIB3093-057-Q1-K1-G7
accacgcgtgcgctagatttgaagatcttggcattgcctcactcttgcttgcgccaagatctgtcctggtccgctccccgcctttttctttttttagatcttggtcttatccatgatgtcgtataacttcaaatttgaaagctttacctttctgagattgcttcttttttgcttctatccccttccccttttggagtatgaaaattttcctgcaaaattactgagctacgatcactgagtgagagacaagacttataacgatgatgaattatttcccggacgaggtaatatagcacatatttgactatgtggtgtcacacagtgatcg

SEQ ID NO: 40903 - DNA, 411 bp, Glycine max
  unsure (1)..(411): unsure at all n locations
  Clone ID: LIB3093-057-Q1-K1-G8
ggggtatgggagacttcgagacccagatgttttaaggcttctcactcctcttaggtttcagttgtgacaacctctaagtgacaagagtggaacattcattctnttagtggcaatttggctatatatattaagttctgggctgtgagtatattagaacaaatgtccttccgcagcatagttcgtgatgtaagggatggctttggaagcctatcaaggagaagttttgaggtaaggctttctggccataacaggggcaagtcacgcagttcggtccacgagttgcaggatcagccaccggttatacagaacagccggtgggctagccttcctccggagcttcttcgtgatgttattaatagatnggaagcaagcgagagtacatggcctggtcgtaagcatgntggtgcatgt

SEQ ID NO: 40904 - DNA, 255 bp, Glycine max
  unsure (1)..(255): unsure at all n locations
  Clone ID: LIB3093-057-Q1-K1-G9
atggctggtggtgctgctgattgccagttttggcacaggaatctcgggattaagtgtcgtttgcatgagttggcaaataaaaggagaatttcagtgacaggagcctcaaagctacttgccaatantttatactcttatcgntgaatggtttatctgttggtcccataatggccgattggaataaaccggcccttgtctaatataatgtgatagtgaaggaggaagacttaaaggcactagattctcggttggatc

SEQ ID NO: 40905 - DNA, 236 bp, Glycine max
  Clone ID: LIB3093-057-Q1-K1-H10
aataaacgtaccatactgtccaagatgagaaagaataactgatcgagtgctgattcagcggcatatgaggagaattgggacctatcatgataagttggcataacaccctctgatgaataaacttgataagtccaaaataaaggccatttttctgaaactagctttaacggaccaaacggatggacctgttgttttttagccagaattcttttaaccagaatcaggatccatatctg

SEQ ID NO: 40906 - DNA, 332 bp, Glycine max
  Clone ID: LIB3093-057-Q1-K1-H12
ctggtatcccaagtgggcgatcctacagcgatattctcttctctcctcctatgcgcctgatctcatgcgaagtggtcattctctttttctctatcactgctgcctgcaaacaaaagatatttatattgcattaaaaagatgaaaaaaaagggcaagagtgtgtggtccttttaagttgaacatgatggaatggccgtctttctcttttgggtatcttcccaaatcaggaaacactttctcatcttccctttcccagtttcacaccctacctcatggaaggctctgtcaacgaacgtcttcattttgggaagattggatatggatgcaatcat

SEQ ID NO: 40907 - DNA, 142 bp, Glycine max
  unsure (1)..(142): unsure at all n locations
  Clone ID: LIB3093-057-Q1-K1-H2
attcgntcctcaaactacttaagaaacactcagtttagcaagtgaatagaagtagtgggggaagcaggggaaaaaattttagtttggaccaaattccagaaaattacccatattatggagacaaatgctaaaattctgattt

SEQ ID NO: 40908 - DNA, 495 bp, Glycine max
  unsure (1)..(495): unsure at all n locations
  Clone ID: LIB3093-057-Q1-K1-H3
cccacgcgnttcgccacgcgtccgcacttatgagagtgatggctgggatgatttctcagatgtgtctgattcatcagagtacttggcctgggactttgtggctggtggcatgggagaatactatgttgatgatagtgatagttacgatggaatgtgggatgatgaagcgaggctagatgagcttcagttcgggttttatgaagggatagaagatgcacgaatgtattggcctgcatctncatagaagctatagctgctgcattacttgtgatcaattggatgcttttctactcttgtaactaatgctttctactttctttaatgtgcttctttgaatgatgtgtttttttttctttaaagtaatgttgggcttgctctgnctagcatatgcataatcgagtgagattgtattgacctaccttagatttcttacttaagtaggaaaaggaagggaaagagaaaggtcccttgttctcacatgttagaggtctacat

SEQ ID NO: 40909 - DNA, 291 bp, Glycine max
  Clone ID: LIB3093-057-Q1-K1-H4
gaagattaaaaattcagattagcgttagttttggacctgaggatgagtggatgaactgagatttggatttggatcatgttgagattgcgtttgcttgctctgattttccggcatgaatttcaagagctttggaaacgagaccggcggcggcagagggaggccggcggtgaacttctgcctgacgcggcatccgtcggtgtacttactgacgttcgacgagttcatgaacagcatgggaggttcggagaaagatattgggttcatgaacatggacgagttgctgaagaacat

SEQ ID NO: 40910 - DNA, 364 bp, Glycine max
  Clone ID: LIB3093-057-Q1-K1-H5
cccacgcgttcgcccacgcgtccggaaaacagcatcgaacccgtcgtagcagaaaaacttgtcaccatggtttcttccgacaaggatccacgagaggatgtccttcaagcctggtacatggatgatagtgatgaagatcaaagactcccccaccacaaagaacccaaggagtttgtctcgttggaccaacttgctgaacttggagtccttagctggaaactagatgctgataaccatgaaaatgatccagagctgaagaagattcgtgaagagcgtggttacacctacatggatgtttgtgaggtctgcccagagaagttgccaaattatgaacagaaaatcaaaagcttctttgaagagcatc

SEQ ID NO: 40911 - DNA, 318 bp, Glycine max
  unsure (1)..(318): unsure at all n locations
  Clone ID: LIB3093-057-Q1-K1-H6
cgttggcatcatcaagctataaaagaaaagaaaagaaaaaaagaaggttggagttagatacacacacatcacanaaagaaaaaaaaaaaaaagaagctacattgcttcttgttggagacatcaaacatggcaactggtgccaccccagatggattattctggtcagtgtatgaagggtgcatatcctgctacgataactgcgtctagcgacgaccctaccaccgtaactgtggctgtgcactccataacaagtcacttattaattgcacgcacaagctttcaaggtgtaacaatgtgtcataccctatgaggagggca

SEQ ID NO: 40912 - DNA, 454 bp, Glycine max
  Clone ID: LIB3093-057-Q1-K1-H7
gcttcattgtttacacgaagccaagggcaaacccaatccaataaacaacactgttcagagacccgtgagtcttcgtcagttccaattcgttaccgcgaaaatgaacgaacccacgagaaaatacccgaagaagaacgaaaaaagatcaaggatcacccagaagaattacaagaagaaagaactaaagaacattctcactttgttctgttcgtggatgcaagagagataaatgaggacaacacaagaaaaagaggacttgatggacggtactacagcgaggtgggagaatccaattacccgaaaaggagaaagaaactcgccggcggtgactcggggagtctccggcgagtctgggtaaaggaactttccgaacgtggtggaggagtgtaacaaacccgaatttccggacaggaattcaaaaaagccttcaaattgcgaaggttaacttttgagc

SEQ ID NO: 40913 - DNA, 333 bp, Glycine max
  unsure (1)..(333): unsure at all n locations
  Clone ID: LIB3093-057-Q1-K1-H8
cccacgcgtccgctcctctgaaacccactgagggtgttgttggcggtgtctgttagtgttcattggggttcacttttcaattgggggattttcttctggaatctgaaattgcatcaatttgggaattttttttgcaaaatgatttcttctgggattaacttggtgatgactgtgattgggtttgcggtgagcaccatgttcattgttttcgtctgcaccaggctcatatgtgcacgaattcacatgaatactgcgaggagatcttttcctattgcatccagatccaatctcagcatgatggagcggngttgccatggtcttgaacgtgtgact

SEQ ID NO: 40914 - DNA, 431 bp, Glycine max
  Clone ID: LIB3093-058-Q1-K1-A1
cagaatctgagttctttgaactcaaaccctaaaaaaaacgatgtatcgttttttgtcttccattcgccatggctgtggatcttccctcacatcacttctcgcgccgaaacccacccttccattcgacgccgccctacgatctcgccgtttacctcaaaacgacggtactcttcgaatccctctgctttcatttccgccgttttcgaaatggaaaacaaatttgaagtttagatggcgtcgtttcgatgtgtggatttactcgagactgtggaaatagaaaatcgtgtatgcttataattttttgacggcgtcgtttcgatgtgtggatggatagggattagaggcagtgtttactgttttcaaagagagaaaagagagagagagagagagagagagagagagagaggaaattatgacaaagtgaatgttcg

SEQ ID NO: 40915 - DNA, 205 bp, Glycine max
  Clone ID: LIB3093-058-Q1-K1-A10
aaccaaaccatgtctacctccgcagcttctctcgcactcccaaccctcactctccgaactcgacaacctctctgttctccccaatgcttctcctcgtccctctccctcacccctaactccaaacccatttccatttccgccgttttcctcaaaaccacgctttcgtcgtcgtccgccgtggcccttgcgtctcgctttcgtcccc

SEQ ID NO: 40916 - DNA, 414 bp, Glycine max
  unsure (1)..(414): unsure at all n locations
  Clone ID: LIB3093-058-Q1-K1-A11
cccacgcgtccgcccacgcgtccgcaaaacatcagtcatctccttcacaggaaccctaaatctgaaactaccttgactccgctcagccacggctgagaaaatagctcgtcttcacgatccagcgattccgctctccaacgggactgcgcagggtgaagaatcgagaggccagccgccggtgaagaatcgcgcgattcgtctggaaatcgcgattccagcacgattcatgcccgatacagagatttaaccacgattcaggaacaaaaacgagacaacctccgattcgtattggtagcatctggaatcgtatcgaatcgtgcgatacgtatcctgaatcgtacgatactaactaccatgctagagagcnnctatgcataacgaagtttgtttccttaaaggaatcctttttttcct

SEQ ID NO: 40917 - DNA, 373 bp, Glycine max
  Clone ID: LIB3093-058-Q1-K1-A12
cccacgcgtccggaaaggaaggaaaaatggagttgttcttctacgcggtgttcggcggtttgggagcggttgttgcagtgacggagctgagcaagagcaacaaggaccgaatcaacacctcttccgcattcaattccttcaagaacaactacctcatcgtctattccctcatgatggctggagattggctacaaggtccatatgtctactacctttacagtacatatggatatgggaagggagacataggacaactcttcattgctggttttgggtcttccatgctctttggaacaattgtcggatctctagctgacaaacaaggccggaagagggcttgtgtgacttactgcataacctacattttgagttg

SEQ ID NO: 40918 - DNA, 411 bp, Glycine max
  Clone ID: LIB3093-058-Q1-K1-A2
acgactcctactgcaccaatgcatgaatcctgacggtatttggatcccatgtgtacctaagcgtcaggaggcattacaaacctcactgtaagagctcgctgctaagggactagctcatatgattctaacggcccatatccagaggacagaatttgcgatcgtactgactggacgatggcctacagtaagctaagccgaccttgatgttcacgagagattcacgaaggaatttggagaggaaggttaatactgttggaactctcactcttaaggtccacactgagtctcaaatatattgctataatttgaaatctattatcctttggatccaaattaaatgcatctttgtcatatttggggatgaacaggcccctttaggaccgagatttatttataaaggtcgatactcat

SEQ ID NO: 40919 - DNA, 461 bp, Glycine max
  Clone ID: LIB3093-058-Q1-K1-A3
cggcccgggacgaccgacgcgtccgacccagcctccatacacactctctctgagtcggtcgagttgaatcggtgtgagtcagtgaccgactcgaaccatgtcggacgaagatcaccattttgaatgcaaggccgatgctggagcctacaagacctatcctcaacaagccggaaccatccgcaaaagcggttacatcgccatcaagggtcgtccctgcaaggttgctgaaggttctacttacaagactggtaagcacggtcatgccaagtgtcactttgttgggattgatattttcactgccaagaagcttgaagatattgtgccctattctcacaactgtgatgttccccatgtgaatcgtactgattaccagatgattgacattgctgaggatggatttcttagcttgcttactgaaaatgggaacaccaaggattgacctgagcttgctactgatgaga

SEQ ID NO: 40920 - DNA, 458 bp, Glycine max
  Clone ID: LIB3093-058-Q1-K1-A5
ctttttctcaaccaaaaggggttcaattctttctagttctattacatcgtccgcgaccatgaacatggcgatcgtgcttctgttcatggttttcgcagtttcatcagctttagacatgtcaataatatcacatgacaacgctcatgcggatagggccacgaggcgcaccgacgacgaggtgatgtcaatgttcgaggagtggctggtgaaacacgacaaggtgtacaacgcgctcggtgagaaggagaagaggtttcaaatcttcaagaacaatctgcgctttatcgatgaacgaaactctctgaaccgaacctacaagttgggactcaacgtgttcgctgatctcaccaatgcggagtacagaaccatgtacctgcgaacctgggacgacggtccgaggttggacttggatacgccgtcaagaaccactacgtgccacgtgttggagataccatacc

SEQ ID NO: 40921 - DNA, 348 bp, Glycine max
  Clone ID: LIB3093-058-Q1-K1-A6
ggaccagcgaaccgtgcctaatgtgtttattggtggaaaccacattggtggctgtgactcaacaactgccctgcacactcaggggaagctggttcctctgctgatatctgctggagctgttgccaaatcaactgcttaaaggatctcccatttctaggttatgcagttaaataaaaataaaaacccaagtagttgggtcggttatataattcaggtcccagaaactaatgtgtgtattcctgtgtgattctctttaaactacaactctgtcaaacaagtctattgctgaatgaagttatttttgtttaaaaaaaaaaaactaaaaaaaaagaaattaaaacaacaaaa

SEQ ID NO: 40922 - DNA, 458 bp, Glycine max
  Clone ID: LIB3093-058-Q1-K1-A7
ctttgactgtaccaaagtcacgcttgctccctctctcaacggcttccctcttcttcctctctctctctctctctctggacacacacatccttggtgttgaacgggtttttgggtgaaggagtagtgttggtggcttcatcttttagtgaataaggatacagcagcatgcggtggtggcttactctctctgttgatgtataccgcaaagtgatttccttgaatctgtattgcaaagttattctgtaactcttaagtcccttttgatcaaaaaaccttttacaatcatctcactcatctcttccttgccttgaatcaatgggatccaatttttttgttgttgttccttgttatgtccgtcagatcagctgaagaaacccacccccagcttgtttcaacctcttcttttcaacttagcctctttaaacattttagttgtcattagtttctagcctttttct

SEQ ID NO: 40923 - DNA, 448 bp, Glycine max
  Clone ID: LIB3093-058-Q1-K1-A8
tcattgctagagatctgtctttactgcttcttatgagctcttcctagaggatcaacattgaaaaacactacctcttcagagccacgatataggctaagagtacaaatcgcttccaatgcgtcacgcctcatgtcctgaattgactttactgcgataaaggttgctcaacattctcaacgcatgcaaagattgagaagaaaagaaagatcgtgcagtataaggagaggctcgataagactcttgcctcacctgatcttgcaaatgatgagatgctcaaaaagcttgtccgaagtcaactcccaccttctttagaacctgaagtagaacgatttagagatcaattagtagaaaccaagactgcggaggtgtctcactctcttgatatgctgaggagtgcttcttcagatgatagcggaagatcttatacatgacacactgattggaaatt

SEQ ID NO: 40924 - DNA, 237 bp, Glycine max
  Clone ID: LIB3093-058-Q1-K1-A9
aaaaaaaattgtgaaccttaaaatcattagaaccttttgtcagtgaagcctcaagggagtatggtaaaaaaattgacatactttactaagaaaaaaaggggtggccctttttaggggcctaaactttcacatccgtcctggcaacgcattactttttatatggggtaccctaaattaatttaaagggccgatattttaaaatttcccaactggaaaaaccctggggatacccaattt

SEQ ID NO: 40925 - DNA, 405 bp, Glycine max
  Clone ID: LIB3093-058-Q1-K1-B1
attctgctcatttgctttgactcctcattatcaaggaaaatggctctcattgggttgctcttgatgggttgtctcacaatgttctactctgctcatgcctatggtggacggtggactaatgctcatgccaccttctatggagggagtgatgcatctgggacaatgggtggggcatgtgggtatgggaatctctacagccaagggtatggaacaaacactgctgctctaagcactgcactgttcaacaatggcttgagctgtggctcttgctatgagattaggtgtgccaatgaccacatgtggtgcctttcaggttctattgtggtcactgccaccaatttctgtcctccaaacaatgccttgcccaacaacaatggtggctggtgtaacccttctcttcaacac

SEQ ID NO: 40926 - DNA, 338 bp, Glycine max
  unsure (1)..(338): unsure at all n locations
  Clone ID: LIB3093-058-Q1-K1-B10
cccacgcgtccgaggggatgggtagaatctcggttgagaatgcttaccctgaagatagagcgagatacaaatgggatgctgcagtgccatccttacccacatgagtatgtagacacatccaagccatgtgcacattctgcatttttcatgggcttgcaaaggaaagaaggagtaagaagtcaagaggggcagcaatttgatatacgtggaacagttgatgaattcagacaagaaataaatatgtacatgtactggaagccaaggatggatnattttggttctcatgttcgtcgaaagcaactccctgcatttggttttctgatgggtacaaacgcact

SEQ ID NO: 40927 - DNA, 307 bp, Glycine max
  Clone ID: LIB3093-058-Q1-K1-B11
tggagttattcacagtgagaaattcctaagctccacaattggagccaagaatttgtgaaccatccaattgtcaaagaaagtctgccccctagagatcctgttttctcctttttcaagggtctctatgaaagcctttttggttcaaaatagatttgatgatgtggtgtgagacttagtatttctaagaattatgtgtttgttaaaggcttctatgaaagcctcactgcttcaaaatagattcatgtatgtgagactcagaatctctggggaaaattgtgtgtggtgtggactacttgtttggttggca

SEQ ID NO: 40928 - DNA, 401 bp, Glycine max
  Clone ID: LIB3093-056-Q1-K1-A8
gtaaaggtgatagcttgccaaccgaaggtgtagaaattgcacacttcagtctggaacaagcacacggcatgatatatacaccatccgatccccttctttttgttgctgtgaaggatcagaatggggtgttgcaaattgctgacgatgaactgcttgaggatccggctatcactagcgctatagatgaagagactgagtttaatgccttggtggaggaagaagctgcgctccttgattcactcttgggtaaaagataaccccatatttacttttttgcagcagagctgtcccagctcccaagacccaccgatgttttgcttttacgtgtttgtttgcatgttgaagaaagaagctactttttgtaacttcttccttaacgcagatcaaaagttaccaaacat

SEQ ID NO: 40929 - DNA, 353 bp, Glycine max
  Clone ID: LIB3093-051-Q1-K1-G10
ttacctctccaataaatggatgggactcatagctaaggagacattgcttgagaattgcaggcgcagattccaatgctagggccatgaatacatgcgtgaaggtcaaatattacaggtaagtcttaagatctatatggatttacagtataaagcaatgctgactatattaatgtgttgaatgaaatctgagtttaggtgatgcaacagtgtcctgtctattgtacttatgaggctaccatatgcactaattgctactagcgaccctctgttcatgaacggattgcattcaaatcctgcctcaagctacagcgcattgctatgccaattctgctgctaagatgattagctatacg

SEQ ID NO: 40930 - DNA, 470 bp, Glycine max
  Clone ID: LIB3093-051-Q1-K1-G12
ctcaaatattatctatcaaaatcagaacggattcagaatacccacttatatgagttatttgggtctaaactatggttcaattgcaggcttgcttgctgcacgctactgaaaaagaaagaaagaaaatccgtttggatgaatgcgcgagaggaatcaacccaatcaagagaaactctctctcccttctacacttttaagaagaaaaagtgtgtctgatttccaattttgccctcaccttttcgtgatttctcatttatatcctgctccttttcgtttccatttctttgctgctacttccaactccttccattctgaactttgaatctctagggtttaattccccactcatcgaatggaacctcgggttgccaacaagttccgtcttggccgcaagattggtagcggatccttcggcgagatctatctcggtacgaatacccagacaaatgaagaggttgcaattaagctcg

SEQ ID NO: 40931 - DNA, 121 bp, Glycine max
  Clone ID: LIB3093-051-Q1-K1-G2
acgctttgtgtcacctgagcttaacatctaaccataacctcccacctttcaccatttctttatgggagggaaatattatctggagcacactcacacacactcacacgtttaactaacattt

SEQ ID NO: 40932 - DNA, 449 bp, Glycine max
  Clone ID: LIB3093-051-Q1-K1-G3
ccgctattctactcgcaagcaaatcagaacaagagaagagaatggcaggagcagaggggctgaacagagaacagtacgtgtaccttgcgaagctgtcggagcaggcggagcggtacgaagagatggtggagttcatgcagaaggtggtggtggggtggacgccggcgtcggagctcacggtggaggagcgcaacctcctctcggtggcctacaagaacgtgatcgggtctctgcgtgccgcgtggcgcatcgtgtcctccatcgaacagaaggaggaagggcgcaagaacgacgaccacgtgtccctcgtgaagcactacagatccaaggtcgagaacgagctcacgcaggtctgcgccagcatcctcaacctcctcgactccaacctcgtacccttcgtcttcgccagcgagtccaaggtcttctacttgaagatgaagggcgattac

SEQ ID NO: 40933 - DNA, 228 bp, Glycine max
  Clone ID: LIB3093-051-Q1-K1-G6
caaatattatctatcaacatcacttcgaattcacagaacccacttatatttacagcatgtttcaaaacgatggctcaattaccttataacttgttatacactacttttccctaaacaaagtaaatattactgtattattcatctactacaactaaccaaatcattattaactcactatcccttcttcactatttacaaatattaattaatctttattacctacattct

SEQ ID NO: 40934 - DNA, 131 bp, Glycine max
  Clone ID: LIB3093-051-Q1-K1-G7
attctactctcatgctaatcataacaatagaatagaatgtcactagcatattagctgaacagataacagtgcgggtacctttcgaagctgtctgagcacgctgagcggtactgaagagatggttgagttca

SEQ ID NO: 40935 - DNA, 308 bp, Glycine max
  Clone ID: LIB3093-051-Q1-K1-G8
ctctctctctctctatctttctctttctctaacctttcaactctcggatacatctcgattgggtatctcttctgggtgctctctctattctaatgctgtgagctactttgagtgaaggataataatgactggctttatcttctcgaggggaatgatacaccatcatacaaacgttgcttactctctactctaatgtcttcccaaaacggatctcattaaatctgtattcctcaccgattcttgaatcccagtgctatgctcgaaacctttcttaatattctctataaaccgcttccatctgatccaat

SEQ ID NO: 40936 - DNA, 450 bp, Glycine max
  Clone ID: LIB3093-051-Q1-K1-G9
ttacctcaccaagaaatgcatgggactcaaatcaaaagagatatcgctttagaatcgcaagggcagattccaattctagaggccgtgtatcacatgcgagatgggcaaatattacagttaagttccaagatctatatggatatacagtggaagtcaatgcgtactatattaatgtgttgaatgaaatcagggtataggttaggcaacagtgacttgtctattgaacttttgaagctagcattggcgctaattactacttgcaaccctctgctcatgaactgatctccctcaaatcctgcatcaagctatcaacgcttgctaatgccatcacttctgaatacactgattaccacgaggaatcccgactgatactcgttccaagattggattctcattatcagtatctgccaagaataaacttaccgttactgatcactattacaatgattt

SEQ ID NO: 40937 - DNA, 449 bp, Glycine max
  Clone ID: LIB3093-051-Q1-K1-H1
cttgcttggttatgatattggagtgatgagtggagcagccatatacataaaaagggacctgaaagtctcggacgagcaaatcgagatcctgctcggaatcatcaacctatactctctgataggctcatgtctcgccggcagaacctccgactggataggtcgccgttacacgattgttttcgccggcgccatcttctttgtcggagcacttctcatgggtttctcccccaattattcctttctcatgtttggccgtttcgtcgctggcattggcatcggctacgccctcatgatagcccccgtctacaccgccgaagtctccccggcctcctctcgtggcttcctcacttccttccctgaggtatttattaatggagggatattaattggatacatatcaaactatgcattttcgaagctgacacttaaggtgggatggcgaatgatgc

SEQ ID NO: 40938 - DNA, 419 bp, Glycine max
  Clone ID: LIB3093-051-Q1-K1-H11
cacagaggaaggtataagttttagccctttagattgtttctcttttatcaactgagctggtgtcttttgctcaagtcttggtcttgttttgattttcagagatgaagtttacattgatggccctcacaaattttctagagaaagacatcaagatatctcccctagaaaaactagaatgaattttgttcgaggtagaggaagacttaacaatcgattagattcagttcgaaatgattgggaatctgaccgtgaattttctggtgagttttataacggaccaagtcagtttcggggacccaggcctaaatatgcatctgcttttgccgatactgatatggagtacaataacgttgcacctgatgggtcatatgttggtaatggtcgattacgcagaaagccattgaatgatgggtcttaca

SEQ ID NO: 40939 - DNA, 469 bp, Glycine max
  unsure (1)..(469): unsure at all n locations
  Clone ID: LIB3093-051-Q1-K1-H12
ccaaattccaagccaatgtacctccatcttctggtgctacccagccatttccaaagaatggcgtcactcatccaggattttgtggaaagagacttttctttgaacaagctgggttttgcaaatggcttcccctccaataacctcaaggaatctggaaatcttggcagtggtcatttcattgcttcaaacaataagctttcagctgtttcaagagcacaaatttcagcaccgccaggattctatgttccgaacagggcaccacctcctggtttctcttcagttgagagaatggggcaggcttttgactacctctctgggaattcattgctggacccttctttcttactgagaaattcttatcaaacaccctcaaatggaaatattggtggtccaggtgacgttgaatttatggatcctgctattntggcagttagtaaaggccctgaacagtttaactactttgaaaatg

SEQ ID NO: 40940 - DNA, 428 bp, Glycine max
  Clone ID: LIB3093-051-Q1-K1-H2
cttgcttggttatgatattggagtgatgagtggagcagccatatacataaaaagggacctgaaaggctcggacgagcaaatcgagatcctgctcggaatcatcaacctatactctctgataggctcatgtctcgccggcagaacctccgactggataggtcgccgttacacgattgatttcgccggcgccatcttctttgtcggagcacttctcatgggtttctcccccaattattcctttctcatgtttggccgtttcgtcgctggcattggcatcggctacgccctcatgatagcccccgtctacaccgtcgaggtctccccggcctcctctcgtggcttcctcacttccttccctgaggtatttattaatggagggatattaattggatacatatcaaactatgcattttcgaaactgacactaa

SEQ ID NO: 40941 - DNA, 451 bp, Glycine max
  Clone ID: LIB3093-051-Q1-K1-H3
cttgcttggttatgatattggagtgatgagtggagcagccatatacataaaaagggacctgaaagtctcggacgagcaaatcgagatcctgctcggaatcatcaacctatactctctgataggctcatgtctcgccggcagaacctccgactggataggtcgccgttacacgattgttttcgccggcgccatcttctttgtcggagcacttctcatgggtttctcccccaattattcctttctcatgtttggccgtttcgtcgctggcattggcatcggctacgccctcatgatagcccccgtctacaccgccgaggtctccccggcctcctctcgtggcttcctcacttccttccctgaggtatttattaatggaaggatattaattggatacatatcatactatgcattttcgaagctgacactaaaggtgggatggcgaatgatgctt

SEQ ID NO: 40942 - DNA, 426 bp, Glycine max
  Clone ID: LIB3093-051-Q1-K1-H4
cttgcttggttatgatattggagtgatgagtggagcagccatatacatacaaagggacctgaaaggctcggacgagcaaatcgagatcctgctcggaatcatcaacctatactctctgataggctcatgtctcgccggcagaacctccgactggataggtcgccgttacacgattgttttcgccggcgccatcttctttgtcggagcacttctcatgggtttctcccccaattattcctttctcatgtttggccgtttcgacgctggcattggcatcggctacgccctcatgatagcccccgtctacaccgccgaggtctccccggcctcctctcgtggcttcctcacttacttccctgaagtatttattaatggagggatatttattggatacatatcacactatgcattttcgaagctgacact

SEQ ID NO: 40943 - DNA, 384 bp, Glycine max
  Clone ID: LIB3093-051-Q1-K1-H5
acgccaaattccaagccaatgtacctccatcttctggtgctacccagccatttccaaagaatgggtcactcatccaggattgtgtggaaagagacttttctttgaacaagctgggttttgcaaatggctttccctccaataacctcatggaatctggaaatcttggtcagtgatcatttcattgcttcaaacaataagctttcaactgtttcaagagcacaaatttcagcaccgtcagtattctatgttccgaacagtgcaccaactcctggttactcttcacttgagataatggggcaggcttttgactccctctctgggaattcattgctggacccttttttcttactgagaaatttctattaaacacccttaaatggaaat

SEQ ID NO: 40944 - DNA, 382 bp, Glycine max
  Clone ID: LIB3093-051-Q1-K1-H6
ccaaattccaagccaatgtacctccatcttctggtgctacccagccatttccaaagaatggcgtcactcatccaggattttgtggaaagagacttttctttgaacaagctgggttttgcaaatggcttcccctccaataacctcatggaatctggaaatcttgtcagtggtcatttcattgcttcaaacaataagctttcagctgtttcaagagcacaaatttcagcaccgtcaggattctctgttccgaacagggcaccacctcctggtttctcttcagttgatagaatggtgcatgcttttgactccctctctgggaattcattgctggaccctttattcttactgagaaattcttatcaaacacccttaaatggaaata

SEQ ID NO: 40945 - DNA, 314 bp, Glycine max
  Clone ID: LIB3093-051-Q1-K1-H8
cccactcgtacgcccacgcgtccgcctgaatggggaatcacaggccctactgatgctagggggtattacaactggccgggggacactgaatctttcctcaaagaatgtggaggctgggatggggcatatggtgagtttttcctcacctggtactctcagatgctattggaccacggagacaggattctatcatcagccacgtcaatctatgacaacacttgagagaagatctcagagaatgtggctggcattcactggcactatgggtcaaggtctcacgcgccagaactcacagcgctgtattacaacaccct

SEQ ID NO: 40946 - DNA, 465 bp, Glycine max
  Clone ID: LIB3093-052-Q1-K1-A12
cccacgcgtccgacaggaagttcttcttcaccaagtgatgctgatttgcaatccctttttgagctccttcaacaaattttgatgaaagtgtctgtttcaagatcagagaacttgtggctaaaggctcttaaattctatgcaaatcaaagacgatattttgataaattggtggagatttctgttgttaccttggtcagagatggtggtagtgaaaatggattttccctttcttctgctattgtaagttttatacttcaaaaggatggaattcagaagaccagagatatctataaacgatttctagctttaccgcttcctggtcttgctttatatagacgttgcattgacctggaaacaaaccttgcatcaataggagataaagatggtcttataaatgccaggaaattatatgaatcttcacttgcaacatatgaccaaaatgtcagcttgtggcaagattactat

SEQ ID NO: 40947 - DNA, 431 bp, Glycine max
  Clone ID: LIB3093-052-Q1-K1-A2
cggacgcgtgggcggaacgttgctataaacgttgttgttttcagataaacacgtgactcactggctatctatcaatcgatatctccgagttcagccgaaccaaactccgaagctatggcagagctccaaaccaaggttgaacctgttacggtcccggctccggtggatcccgagccaccgctagctgaggctccgccgctcgagaagaaagcggtggcggtgccaccacctgttccggctgcggcagaggaaaccaaagctcttgttattgtggagaaggagaaggagaatgagaagataccagaacctgtaaaaaagaacgcctcaggtggatcccttgatagagacattgctcttgcagaaatagagaaagagaaacgattgtctaatgtgaaggcttgggaagaaagtgaaaaatccaaagcagagaa

SEQ ID NO: 40948 - DNA, 452 bp, Glycine max
  unsure (1)..(452): unsure at all n locations
  Clone ID: LIB3093-052-Q1-K1-A4
cacaaaagcaaagatcaaacaaaccaaggacgagaacacgatgttgcttgaacttgcacttgggttattggttttggctctgtttctgcacttgcgtcccacacccactgcaaaatcaaaagcacttcgccatctcccaaacccaccaagcccaaagcctcgtcttcccttcataggacaccttcatctcttaaaagacaaacttctccactacgcactcatcgacctctccaaaaaacatggtcccttattctctctctactttggctccatgccaaccgttgttgccttcacaccagaattgttcaagctcttcctccaaacgcacgaggcaacttccttcaacacaaggttccaaacctcagccataagacgcctcacctatgatagctcagtggccatgggtcccttcngaccttactggaagttcgtgaggaagctcatcatgaacg

SEQ ID NO: 40949 - DNA, 322 bp, Glycine max
  Clone ID: LIB3093-052-Q1-K1-A6
ctctcgtctccttctgagtccaaactctgctttcttccccacttcaatccctgtgtcctcagggtcgaccggaatactctctcgactacctctctctcctacgtcaaagcccgctactacggctgtcgctgcggacctagccgctcgcccaacgactcccgcttccgcaagtcctacgattccgacgacgacgataaagcttttcgacactcaccagatctcaggtcagataccgggaggctgatcgatcatagccagaacttggtcggagtagtgtcaacagatgacgccatacaaatagctgaatatgtctaacttgact

SEQ ID NO: 40950 - DNA, 332 bp, Glycine max
  Clone ID: LIB3093-052-Q1-K1-A8
aaaaaatctctcaacaccttgagaaattttatctgttagtaatttgctactagtgttttacatgctctttcgtctctacggtgtattatagtcatggcatttcaagcagtttccttcaagtccttcgccgttgctcttcttgtggcgcttttcttcgccgccgtcgtcttcgctcaggacttgcctccggcggctgcgcctggacccgatgccggtgccgccggagccgtttcgagctcggtcgccatgattggagctttcctactgttgataatgctcgccatcttcaagcactgagtattatctgatggatccatcttgtgtgaagatta

SEQ ID NO: 40951 - DNA, 468 bp, Glycine max
  unsure (1)..(468): unsure at all n locations
  Clone ID: LIB3093-052-Q1-K1-B2
gagaattatcatacccattaagatgaaaccgtacctacgtccagtattcctattattccttatgcttctcgaccaatccatttcggcgagtgctggtaatttttttgattcattgaaaaaattatttggtccagcattagcaaagataccgagcaagaaagaagatttgaagaaggctgagaaagcgaaggagtggatcgagaaagtgaaggacggcgtagaacttggaatagaaaatgcccctccctcaccgccaaacgaaccaccgaagcaaatcaatattaaaggcctgtctgtcgtcaaggattacttatctgagtacggctacattgaatcctctaggccatttaacaattctttcgaccaggaaacaatgtcagccattaagacctaccagaaattttcaatcttncagttaccggcgttccgaacaaacagcttattcagcanatgttgtccctacgatgc

SEQ ID NO: 40952 - DNA, 479 bp, Glycine max
  Clone ID: LIB3093-052-Q1-K1-B3
cccacgcgtccgattgcttccaaatgaatgaatgaatgaatgaatatactactctgtctctcgctatctctctgtctctctcgctcactcactcactcgctatgccatgcttcttgctatgatatgtttctttctttttctttttatgcgacctctggggtccttcactcgctctcttatctgtctctcactttcctaaccctaagaggctgtgaagacggtttcggagtgtggacccgatggatccgtcgccgtcaaacatcctcgccggtggcgcggcaacgttatcggttttttgatttcgttgcagccatccatggcggtgttgttttttaacgaccgatctcattgctgtgccagatctgagcctcaccaaatccctaactgaagatctctccttcgctgacgttatcttaacgcaatgtttgacagagatgtatggaatgagagaaggaaaatgatatttccgatcccatcgt

SEQ ID NO: 40953 - DNA, 253 bp, Glycine max
  Clone ID: LIB3093-052-Q1-K1-B4
tcgccacgcgtccgcggacgcgtttggagagcttcgacaccatcgacaacgtcaaggctaagatccaggacaaggagggtattcccccagaccagcagaagctgatcttcgccggcaagcagctcgaggacggacgtacccttgctgactacaacatccagaaagagtcaactcttcacttggtgttgcgtcttcgtggtggtatgcagatcttcgtcaagacccttacgggtaagactattacccttgatgt

SEQ ID NO: 40954 - DNA, 374 bp, Glycine max
  Clone ID: LIB3093-052-Q1-K1-B7
atactctttgtctgcatgctatttatcaagttcaatattgtatcatattcaatataggatgatttgagaggttattacaactagtgcaacatgaccaacccaatctaatattatttaaactgagacacttaattcaagtttaatcgatcactaccattctacttcattagtataaaatattgtaactgttaaaagtgtcaaatattaatcgttgttgttttgaccccaagaacaccaccaacaccaaaaacaccaccattttccaaaaacttcaccttcaccttcacctacacaatcttcaaaggcaaacccaccaaccgtatcgccgtcgttaccgataccgtcaccatcttgtcattcaaaatccctatctt

SEQ ID NO: 40955 - DNA, 313 bp, Glycine max
  Clone ID: LIB3093-052-Q1-K1-B8
gtagaaactgggtgcagagtatgttcagccgaaataaaacaactagatccaggtcatttagtcgcgttcatagatggacgtctgatggaggaaactcagctacaaatgagaatgggacttctcgcaaacaagatctgtcaagtggtggccagaaaaagcttcataccaatgttcgcatacttaggggtcataatggtgccattactgctctccattgtgttacaaaaagagaagtgtgggatttggtcggtgatcgtgaaaatgctggtttctttattagtggaagcacagactgcttaattaagatctggga

SEQ ID NO: 40956 - DNA, 381 bp, Glycine max
  Clone ID: LIB3093-052-Q1-K1-C1
aatcatcacacctgtctaaagctcatacttacacatacttcatttcttttcataccactgaattttttgggggatatgctatataaagaactcatttatcgttatcatactcattttaatttcatttaatttcacttattgttctcaattgcaactatttctcccttctttccccaaaaatttataataaagattgaaaataagtaaagcaaaatggcatttcattggctgacttattgtatgctttaaaatcatgttgaaaaatactttttaagctaatgtactttataaaaagatcacaattcttgttttgactattatccattgtatctgtattgaaacatatgacttaataatttcaacttaccaaacatacactta

SEQ ID NO: 40957 - DNA, 431 bp, Glycine max
  Clone ID: LIB3093-052-Q1-K1-C12
ggagaaataaattcactaaaagaccaaggaataattagttctaggcattcacgtccatatcttaggagaatccagatcacacaatggcttttcaagtaaactaagatgcatgtcaaatatcatcacaatattcatcatctttaaaaaaatgaggagaggcagaaagtggagacacattatacactatatgctgctgttctcagatttatactgatatctataaagtgttttgtatactcgtgctgcgcatatcgcgtgtcctgctgatttacacatcacgtgttgtggtgacacagtttttatatgagatgtaactctttttgccccaaaaaaaaaaatataaattaaatttatattttattttaatttaaatatttatttattttatttatttatataaatttatattaaaaataaataaaaggggggcc

SEQ ID NO: 40958 - DNA, 173 bp, Glycine max
  Clone ID: LIB3093-052-Q1-K1-C2
cttcttcctctctcttctacctttctctctccctcatcctaaccctcaccttcgccgcgcgcgagaaaccccacccctcaccggccaagccaccagccaagcccgccgtgaccaccgtcacctcgccggcaattcaacaagcctgcgccgcgacgcgctttccgcagcaatgc

SEQ ID NO: 40959 - DNA, 409 bp, Glycine max
  Clone ID: LIB3093-052-Q1-K1-C3
gctttttgacatgataggcactggctgcattggggcttaagactggtggtactgttcagcagggcgcagagaggctcttgctcacaaagcacacacctcttgaaaagttggacaggaagcattttgctaagggtgcatgtggtgtagaaaagaatggggttgctgcagttccacaagaagatggaaattctaaagaaattgcattgatggaagccaaaatgacaaaactttgtcatttgttagaggagacaattgctcgaacaaaagacaatgttgtaaagaagcaagccctaacatatgaggaaatggaagcagaacgtgaggaggaagagacacaagaggactctgaaagcgaagatgatgagcagcatatatataatcccctaaaattaccaatgggatgggatgg

SEQ ID NO: 40960 - DNA, 428 bp, Glycine max
  unsure (1)..(428): unsure at all n locations
  Clone ID: LIB3093-052-Q1-K1-C4
ccttgagctttctcttgctttttgcttatccaactcctgaacttccaactccaagctttgagtatcacactgctttcgatggtgttgcattgggaattgtctctggggtgcaacaaacataccatcaatttcaccatgccaatgttcctcgtttgttctcgtcagagctgactatacctgtatttctgggaaggatgctattgggaatacctacaattctaattgtgaagttctgcagtaagactctcgcanaatggaccattcctgtggtagcgaacaccttgtgcatcccaataaaatcaaccggctatatacctacactgaatggatctgtgacagggtaaatgtctgataagcttaaacaaggttacttgcaaaagcttctttcccaagcacagggcattcgatgttgatacccggattaggat

SEQ ID NO: 40961 - DNA, 471 bp, Glycine max
  Clone ID: LIB3093-052-Q1-K1-C5
cgaatttattttcaaaaaccttctcttttctcaattgggtttccatctttggggtgatttcagtgccatggctccaaaggatcccaagcaagttgctgatgctgcttcttctggtggtgggggtggcttttttgcttctattgcttccagcttgtccaatttcggtagtgccatgtccaaatccgttaatggtttggtgggctacgaggggctggaggttgttaatccagatggaggaactgaagatgctgaagaggaagcaagaaagggacgatggaaacaagaggagcgagatagttactggaaaatgatgcaaaagtatgttggctctgatatcacatcaatggtgacacttccagttatcatttttgaaccaatgacaatgcttcagaaaatggctgagcttatggagtactcttacctgttagatatggcggacaagactgaggatccatacatgagactagtatt

SEQ ID NO: 40962 - DNA, 312 bp, Glycine max
  Clone ID: LIB3093-052-Q1-K1-C6
aagaaacgaagatagaatgtgcacagccctaaagacgaattaccagcttagcgaggagatcggtcgcggtcgtttcggcaccatcttccgctgcttccacccactctccaacgaaccctacgcctgcaaactcatcgacaaatccctcctccatgactccaccgaccgcgactgcctccagaacgaacccaaattcatgacccttctttcacctcacccaaacatccttcaaatcttccatgttttcgaggacgaccaatatctctccatagtaatggatctctgccaaccccacacgcttttcgaccgcat

SEQ ID NO: 40963 - DNA, 429 bp, Glycine max
  Clone ID: LIB3093-052-Q1-K1-C7
ctttctttttctgtgagcctttctttcaggttcttaacttgatcagtgtgcagtgtccaaatgataagggtagttgcaaattgcaatggctaagcatgatgttgagggtggttccttctctgcaaaggactaccatgatcctcctccagcaccgttgattgatgctgaggaactcacacagtggtccttctacagggctttgattgctgagttcattgccacaatgctcttcctttacatcacagtgctcactgtgattggttacaagagccagagtgatgtaaaggctgggggtgatgtgtgtggtggagttggcattcttggcattgcttgggcctttggtggcatgatcttcattctggtgtactgcactgctggaatctcatggggtcacataaacccagcattgacatttgggctcttcttggc

SEQ ID NO: 40964 - DNA, 449 bp, Glycine max
  Clone ID: LIB3093-052-Q1-K1-C8
atggcatctatggcggctataggttctctcaatgttccacgttctgcttcttggcgttcatcgtttgtgggaagaaaaagcgttccacgcagcctttccttctctgcatcacaactttgtggagacaagattcccacagattcagttttattggcaccaaaaataggtcgcagtccagttatcgttactcctaaagcagtttctgattcccaaaactcacaaacgtgccttgatcccgatgctagcagaagtgtgcttggcattatacttggaggtggtgctgggactcggctttatccactcaccaagaagagggcaaagccagctgttcctcttggagctaactataggcttattgatattcctggtagcaactgcttgaatagcaatgtcttcaagatctatgttctcactcaattcaattctgcgtcggtaaaaccgacaccttt

SEQ ID NO: 40965 - DNA, 433 bp, Glycine max
  Clone ID: LIB3093-052-Q1-K1-D1
tccacgcgtccgcacgcacgtctctctctctctctcgccatggctatggctatgcaaagcgggatcggagtcggcaagatcctcatcatagcaggagcaggttacaccggcaccgtcctcatcaaaaacggaaaactctcggatttaatcggcgagcttcagttgctggtgaagggattggaaaaatctggggagcatgctgaaggtgaaggtgaatatgctgatgccatagctgctcaggtgcgtcgcctggcgaatgaagttcggcagcttgcatcaaacaggccaatcacagtactgaatgggggttctgaacaaagttatttatcatcccttggcggttcaactgctggcttgggcgctctgggttatggctacatgtggtggaaaggaatttcattctcagatcttatgtatgtgacctgaccgaatt

SEQ ID NO: 40966 - DNA, 423 bp, Glycine max
  unsure (1)..(423): unsure at all n locations
  Clone ID: LIB3093-052-Q1-K1-D2
cccacgcgtccgcccacgcgtccgcccacgcgtccgtttagacttactcatataaataactcagggcggtggctatgtcaaactgagaactaagatcccgctggcggttggcgcaacctttcgatcttcatccaacggggcaacgttggatctgctgaactgaacttctttttatatgcactctgtgatttcactctgcttcgccatcctatgggggacaacaacagcaacaacgatgccttcatgcgcaaccaaaacgccgtcgttcaggcccgcaccaaagcgcagaaccgctccaacgtccttcagctcaaactgattggacagagtcacccaaccggtctcacagcgaacctgttgaagctcttcgagcctaggcctncgttggagtacaagccaccttcggagaaacgaaaatgccca

SEQ ID NO: 40967 - DNA, 267 bp, Glycine max
  Clone ID: LIB3093-052-Q1-K1-D3
gacaaagttgttcatggtcattctatgactcatgggacgtatcggcacaaaaaacaagcttggaaaggatctcattctgagaagaatagctcaaggcatgtatctgaacaaacaggccatgaggtgaatcatggctctaatgagcatcgtgatgatgcacatgaggaagaagattgggatcatctgtctaaggacaaaggtgggcataggtttagaaatcaaggcagatcaagaaaacataaatatctgcctggaaatggaatgggc

SEQ ID NO: 40968 - DNA, 452 bp, Glycine max
  Clone ID: LIB3093-052-Q1-K1-D5
cttttctctctcttctttgtttgtttctcaacgaaaggcgaaatttcggggatggtgtgtccttgaccttcatagccgcgtgacgttatcattgcctctatccatctctgcttctttctttctttctttctctgctatgctattgctgctaacacccctttggaaccttccctgtttatgatgctttgacttcttcctaaattctgtcccacgttgattgattctctttctctctctctgggttctctggcatcaaagttcgtaccttttgtggtttggatggatctgatgccagtttggttttctggggtgtctgtgttccttaacccactttcctcctttttaggatactcgtctaattgaattttttttccttttttgctcaagttattttctgattttggttcttcagtttgcttatgctgttttggtggcttttggaagtttgaaca

SEQ ID NO: 40969 - DNA, 264 bp, Glycine max
  Clone ID: LIB3093-052-Q1-K1-D6
ctcacgcgtcctgtccgtccttttttttcttttttagttgttaatgatctaagtttcccgtttgattttatattatttaaaaacaagcctttcaaatcatccttgcaatgcatattgatacaaaccagaatttactaaatattctgctgatgctacattcattcaaactctgatattaatgaaaatatcatttatcctaaatacaaatatgctattttaaatctatattactgttataatttttaaccaaataacttttaccta

SEQ ID NO: 40970 - DNA, 261 bp, Glycine max
  Clone ID: LIB3093-052-Q1-K1-D7
cgggacgacccacgcgaccaggagaggagagcacaaagaaaagcaaacacagacacagcaagagagagcagggaggagaggggaaagggagaaagagagacaccggaggcacaggaaaccaaggacacggaagagcaagagaccaacgagaacaaggacacgcagagaagaccacaacaagagcagacccaggacgcaagagagacgagagcaaacacacaaaccaacccggcgcaacagaaaagcagaaaagccacaacg

SEQ ID NO: 40971 - DNA, 237 bp, Glycine max
  Clone ID: LIB3093-052-Q1-K1-D8
caaaaggccatataatttttttttatttgaaataatgtccgggatcattcaggagattgaggagaccctccatgtgggagggcacaagaaagaggagcacataggagaacaccatggtgagcacaaaggtgaacacataggagaacaccatggtgagcacaaaggtgaacacataggagaacaactccattgggagcacaaggagggactttgtgataatatcaaggacaagatcca

SEQ ID NO: 40972 - DNA, 393 bp, Glycine max
  Clone ID: LIB3093-052-Q1-K1-E10
aagtcctaaccctatttaacaccttattagctttggtagacccaatagttagtcatcagaagcccttcttctctataatatctatgatccattcactctgagccgtaacagttctaaactccaccatttagtgacacccttaacatgatataatgccatcggtgcattcaagcccgggttactcgatggaaaacccggctttggcgtcgctactccgtcacacgacaggggaaaacaagcgtagcaataaattgtcgagcggaggagggcttttgaaaatgttgaagctgtttcctatgttgagttcgggatgcaaaatggtggcactgctgggaagaccacgaaagatgctgaaggacagtgcgacgaccgggacaatcttcggttaccgga

SEQ ID NO: 40973 - DNA, 159 bp, Glycine max
  Clone ID: LIB3093-052-Q1-K1-E11
gtcgaccacgcgtacgagtcctaaccctatgaacaccttattagctcgggtagacccaatagttatggggtataagggcaatttcgggataggatctatgatccaatcactctgagcctgagcagtatctgaactccatcttttattgacacccttatc

SEQ ID NO: 40974 - DNA, 239 bp, Glycine max
  Clone ID: LIB3093-052-Q1-K1-E2
gggtttcatagctgctgtaatagcagtttggagcacagccctgcaacagtattacgtgcattgtcttcagaggaagtattctattgggtcatttaacttgttgggccatactgcaccagcacaggcagcaagtttacttctagtaggcccctttatggactactggttgactggcaaacgagttgatgcctacggctatggtttgacatccacgttgttcatcattctggcttgcacta

SEQ ID NO: 40975 - DNA, 474 bp, Glycine max
  Clone ID: LIB3093-052-Q1-K1-E3
ggctcctccgacgatcaccatcaccgccaccgccacgtcgaggaggaggaggagatgccgccgctgcgccccccggttcagctcggcgagatcacagcggaggagctcaaggcctacgacggcaccgatcccgagaagcccttgctcatggccatcaaggcccagatctatgatgtctcccagagcaggatgttttatggacctggtggaccttatgccctatttgctggcaaggatgctagcagagccttagcaaagatgtcttttgaagagaaagatctgactggggatatttctggtcttggcccgtttgagcttgatgccttacaagactgggaatataagtttatgagcaagtatgtgaaggttggaactgttaaaagtgaagaagttccagtaactgaaccagagtccattggtgaccattagaatctactttccgtgatattgatgctgctgccaagcctactgata

SEQ ID NO: 40976 - DNA, 442 bp, Glycine max
  Clone ID: LIB3093-052-Q1-K1-E4
attcaactcttctctttctctttctcttctcttctgtcgaagaagaagaagcagaagtagttgcagaaacatgctggagaatcttcaggctcctccgccaacggaatcggccccagtggtgaagcgctatgctcctcccaaccagaggaaccgttctgccaacaggcgcaaatcatctgatcggcttgatcggacaaacagtatcgggaatgacttagaaaagaatcaagttgcttattcaagaagtgttcacattccagatcacggagatgctggtagcagtaatcttcttaatgagaatcactattcaagattaatagctttagaagggtgtagttgtagtgcagctgtccagctgcttaatgatcgttggacaggtgcacttacatctacaataattctaaagattcatctgaaaaggcagttttgtattctagtggga

SEQ ID NO: 40977 - DNA, 422 bp, Glycine max
  Clone ID: LIB3093-052-Q1-K1-E6
ctttgtgtttctctcttcaccttcgtctttctttcatttcaattctttgtggttcagaaactgtgtacagttaatcaagcccaacctcacctcacctcacctcacaggttttagttgttaattaaatatatagatagaaatccaaggaagaagatgaagcagtttgccgtccaaaacgtcgtcgctccatcccacgatgagattagcgtggtttgccccaagccccgccgcctcggcctcttcaacttccccgtgaacgatccccctgttagacccttctactggcatctcagttgccaggctgagccatgtgattcaaactcgtctggttcatatcctttggacaacttacttaccaaggatggtgattttgatgtagagcaatcatggccagtggtaacctcgtcgcccccattttctgc

SEQ ID NO: 40978 - DNA, 458 bp, Glycine max
  Clone ID: LIB3093-052-Q1-K1-E7
ggcgttacagagagagagagagagagttattatggtgactatggaagagagggcaaggagccgagaggcgaagctggggttgcgagtggaggatctatgggacattcaggaaccacagctaagtcctgatgagaagttcaatgcttgctttgaaagcatacctgtctctgccttccctccacctccttcaaatcaagaaattgagataaaatcagatgccaccctagccgaggcagtaaaaatacttgcagaacacaacattcttagtgcacctgtggtggacgtagatgcacccaatgatgccagttggattgacagatatataggaatagttgagtttgctggaattgttgtttggattctgcatcagtctgaacccacatctccaaggagttcatccggtggagctgctaatacggctgcagtgaatggaataacttctgaagcatttcggcttg

SEQ ID NO: 40979 - DNA, 470 bp, Glycine max
  Clone ID: LIB3093-052-Q1-K1-F1
acgaccacgcgtacgcttggattcgattccatcactgatatttctcttctctctctctatctctgcggaatatggcgccgcctgcgccagcagttgaaggcggccaggcgccgcaagggcggcagcaacagccgcaaggagggtttggcctctccggaatcatacgcatggcagttttctggtacttcgcctccaaattcttttcccccaaaaaacctaccgaaccttgcgctctcatctacaatctctatcagaaggcacagcctctggatatgtggctttatctttccgagtacgagaagttcaatgactatggtagtgaaagttctcttgtatggcatgaaaccaatattccgtatgccgtttggagacctgagagtaccaggactctaactttgaagtatcatccgtctgagtctttgaagcataatgggagtctatatgctcatgtattctttgcacactctggc

SEQ ID NO: 40980 - DNA, 379 bp, Glycine max
  Clone ID: LIB3093-052-Q1-K1-F10
gcgagaaggccatgaaaaggtggctcatgtatgcaacatgcatccaaattttcagattgaacgttataattgtattaatctgacggaaaccattgaggagtttgattcatcttggaattttatcatcaataaatatgaactcacgaaaaatgattggcttcagtccttgtacagtgctcgtgctcaatgggttccagcatattttcgtgattcattttttgcagcaatatctcctaatcaaggatttgatggttcttttttttatggttttgtcaaccaccagacaacattaccactgttctttaggcagtatgaacaagctttggagtgctggtttgaaaaagaattagaatcagattatgatactatttgtacaacc

SEQ ID NO: 40981 - DNA, 225 bp, Glycine max
  Clone ID: LIB3093-052-Q1-K1-F2
cacacgcgtgcgatgatagtgaagctccacaaagactggtgcaagaaacaggctaataattcggctacgacagcgactgttgctggccaagaatctggtacaacaagatgatatctgaaacgatgacctctctggacaatgcttctttcgacggaaagcccaaggtgcaccatcacatccttgatcatgaaggaggaggggatcctatgaacagtgtctgcagtt

SEQ ID NO: 40982 - DNA, 444 bp, Glycine max
  Clone ID: LIB3093-052-Q1-K1-F3
aggatcacatgcgtaaagctggtgatgtgtgtttttcgcaagtcttccgtgagcgtggtggggtgactggtatagttgatgatacgcaattatgatgatatgaaatatgctatcaggaaacttgatgactcagaattccgcaatgccttttctcgtgctttcatactggtgagggaatatgatcgaggttattctagaagtcctagtcgtgattcaaggaggagctattctagaagcctcagccgcagtccatgtatctcacgaagccgcagccatagcctcatcataagtcatatctatagtgacaggagcagaagttggtctccgaaaccaaaacactttcgacgttcaatatcttctttcaaggttagttttttaccaagtttgatacattatgcaggttttgtgctcttgtgtcttttattgttgaaattttaaattttg

SEQ ID NO: 40983 - DNA, 429 bp, Glycine max
  Clone ID: LIB3093-052-Q1-K1-F4
cccagttcaatgttatgctgatttcatgcgtgctttcagagacactttcaagcacctccttggtgacaccattgtggaaattcaagttgggatgggaccggcaggtgagctgcgttacccttcttacccagagcaaaatgggacatggaatttcccaggaattggtggtttccaatgctatgacaagtatatgttgagtagcttaaaagctgctgctgaagctgagggtaagcctgaatggggaagcacaggccctactgatgctggacactataacaactggccagaagacactcaatttttccgcaaagaaggtggaggctgggatggtccatatggtgaagttttcctcacctggtactctcagatgctgttggaccacggtgacaggattttctcatcagccacgtcaatctttgacaacactgg

SEQ ID NO: 40984 - DNA, 326 bp, Glycine max
  Clone ID: LIB3093-052-Q1-K1-F5
tactcggtcctgggttccctggtagacccacgcttacgattgaattcaaaaacttaagttcattccttgtgttttgctttcttcctcaaagccaaacatgtgaaacagagggcggcaactgcgactgctctgacaagactagctgcaccaatggaaacagctatggtgttattgtagagactgagaagagttacatctagactgttgttatggatgtaccagcatctgaacatgatgggaagtgcatgtgtggcactaactgcacttgcacggactgcacctgtggccattaatgaatatgtatgtaaatgtaattgccatgtgtt

SEQ ID NO: 40985 - DNA, 172 bp, Glycine max
  Clone ID: LIB3093-052-Q1-K1-F6
cccacgcgtccgctaccatgcttccttgcagtacaccctctcatgcttctgcgctttttatagcccctattttaaatatagcccttgactgtcttttttccatacttcctccacgaataatcatcattatttatatttgcatgtttcttgcatatatcattcaccataattt

SEQ ID NO: 40986 - DNA, 465 bp, Glycine max
  Clone ID: LIB3093-052-Q1-K1-F8
cccacgcgtccggaacattactcatacaagctcatctcagagaaagtatccagcggtaataggagagttgtgccatcaatgttctctggccgatcttaggaaatccaccaacaacttcgatcaaaacagagtaattggacgtggattatttagtgaagtatataaaggctctgtacaacataagggtgcttctgattatactgttgcagtaaagcgattcaatgaacgaggattggaagcgttcaagaaggaaatagaattgctctgccagctttttcaccctaattgtgtctctataataggattctgcaaccacataaaagagaagattattgtgtacgagtacatgtccaatggttctctagctgattacctacaaagtggagatgcagaagcattatcgtggaagaaaagactagagatctgcattggagtagctcgtggactacactaccttcacactgg

SEQ ID NO: 40987 - DNA, 372 bp, Glycine max
  Clone ID: LIB3093-052-Q1-K1-G1
ttgtttctttgcactccccgcccaaaccctaactggctaccctattccgctttctctcatccatcatgaaaggaggaaagtccaagaccgaatctaagagagccgatgccaaacttgctgtgaataagaagggcgccgccaccaagactaggaaacccgccggaaaggggaaggcagcgaaagatcctaacaagccaaagaggccttcaagtgctttcttcgttttcatggaggaattcatgaaggtgttcaacaaggaacatcccgacaacaaagcagtgtctgctgtgggcaaagctgctggagcaaaatggaagacgatgtctgatgctgaaaaagcaccttatgtggcaaagtctgagaaatggaaag

SEQ ID NO: 40988 - DNA, 477 bp, Glycine max
  Clone ID: LIB3093-052-Q1-K1-G2
gtgattttgtttatcataggaggatctgatgtactcgctcgtggatctcaactatattcacgatcatgatggcccttgaaaattctgaaaatatgcaaataaactgtgaggcatctttaaaatgcctccagggcaagggatttccttgcaattttcagagtaatgggagttctatggaaggctttacagagcttaaaaatgagcctggtactcatccttctggggatgttgctgagcctaactgtcacttaggcagtgagtttcttgagccttccaatgaatttcacaccaaacctacttatcaccaaaattacagcacctggacaccctgccattttaactctcacaaggtgcagcaatgccaaatgaatgcttttgagagccattactatccttatcctgttgagaatccacttcaatatgttccaattaatatggttgctcagggttacccgcgtgagcaatatcaggaatttc

SEQ ID NO: 40989 - DNA, 435 bp, Glycine max
  unsure (1)..(435): unsure at all n locations
  Clone ID: LIB3093-052-Q1-K1-G4
cttttctctctctcttcaatttcacccttttagcatttgtacattcctttcccttccttgaagcgttcttaattgcgagaggggatatcggagaagttgattggcctcccattaattgcaggtctgaatgatctgatggagtctaaagttgggaagaagaagtcgtctagtagtaagtcccttttgtacgaagctcctctcgattacaccattgaagacgttcgaccacacggtggaattaagaagttcagatctgctgcttactccaactgcatccgcaagccatcctgagattccctaggttgtgtgacgacatagcccccgtagtcttgcatctgctatattattctagtctcttcntttcccttttcttgttctcttccttgcccttttgttctctctacctatacagcaagactttgtttctttttgagt

SEQ ID NO: 40990 - DNA, 409 bp, Glycine max
  unsure (1)..(409): unsure at all n locations
  Clone ID: LIB3093-052-Q1-K1-G7
gtcttgcatcttcatgatgaagattttagtgtccgattagcctgtcggaataccctgaaacgagtttgcccattgatggaaattgaaggaatgcttgctgtactaaacacacacagtttcctttctgatcatcgaagtgattatgaggactttctccgagacattgcaaagcaatttactcagcatcttccctctagagttgatagttatatggcatcaacagtacaggcttttgacgcaccatggcccataattcaggcaaatgctatatacttctgcagcagcatgctttctctatctgacaatcagcatattttagcttgttatcattcacaggtcttcggtatgctggtgggaaaattgagtcgatcacctgatgctgnntgtagagcaacaagttctgctgctc

SEQ ID NO: 40991 - DNA, 323 bp, Glycine max
  Clone ID: LIB3093-052-Q1-K1-G8
aacagccttaaccttcgctgcccccaacgttgtgccattgtcacccacaaatgctgtcttcgagattaccgtctttcctaccaaattgaaagccccgcgctcctcacctcgttactctccgattagggttgcaaccgtggagcccgacacttcaactgtctactacaactctgcgttctcagtgtttcctgcataatcatgctaaactgtattatgggaatcctgcattgcttatatttacctcttaacttatctacattctgtagcttatactttatgagtcttttcttaaatctatttatagagtatttttattctatttt

SEQ ID NO: 40992 - DNA, 436 bp, Glycine max
  Clone ID: LIB3093-052-Q1-K1-H1
caccttcccctttgtttctcaacatcattccccaatttccccttctgtattgtttttcttcattgctctttttcaatccccgatttcccccttcttcgttttgtgtcttcataattcagatcctctcttcaatctagggttcctggcttaacgaaatcaaatgtttaaggaagaatttctatgacgattcgcaaccccatgcgacgaatccgtctcctccactccttttccgtcgtcttcctctactggttctacgtcttctcatgaactaaccccctctcaatcccctaatttctccaacatttccccctttttctaattaatcagatctgcaaaaccctaatttccctaaccctaacgaaacccccaaatccaatggcttcgattcaacgcccggcgagtttcggatcgtcggatggaggagatccggtgatgt

SEQ ID NO: 40993 - DNA, 355 bp, Glycine max
  Clone ID: LIB3093-052-Q1-K1-H10
tcttactccttacaatatgggcatattcaatctgtcccataggtatctctatctgatgtttttgcttcctattgccatagatttcaattgctgattaattttgcttgcagagttgttttggcaccgctgaccagacagaggtcttacgacaacgtcccacaaccccatgccatcctctactactcccagagaacttccaactgaggccttctcattactgaatccactggcgtctctgacacggctcaaggctatccgcataccccttgcatatggacttaagaccatgttcaagcttggaaacccattttcgatgccgttcactccaaaggcggtggtttcttctgtcaaattt

SEQ ID NO: 40994 - DNA, 468 bp, Glycine max
  unsure (1)..(468): unsure at all n locations
  Clone ID: LIB3093-052-Q1-K1-H3
caactcagcaaacccctacaaaagctatagaatcactagagactggagaagatgccacagatgaaattggcacggccaagaaagaagttaaaacaagaaacaggaagcctgagtgtccccactcacaaatctctagcactattaactctaccatcatcggaggctggagaagatgcgacagatgagattggcaccctgggaaagaagttaaaacgaaaaacacgaagtgtcggtcgccccccgaagaagtcttttggactagttcagggtcgaccccatttaacacctgatcaagttgtgaatttggatgactatctagataccttggaggacatgcttgttatgcctgaaattgagactacaccatcggatcatctgactcctnctaaccgtttggatgataatgaaatgattgagagctgcaagaagaagctttcttcccttcttgctataaattttccttctttg

SEQ ID NO: 40995 - DNA, 340 bp, Glycine max
  Clone ID: LIB3093-052-Q1-K1-H5
actcggtccttaattcccgtgtctggtccactccttacaatccactcgtttctgcaatgctgatcttagcaaatctaatgattatcacatactgcataaagttggtgatattcactccaagggcattatttctcttgtcttaaattcaattcttacattctttcaacaatttaatatgtttcacctactttaatatttttattatatatatattatcttttatattcttttttcaatttatattttatttttatttatttctatattattaatctttttcttatttattttttatttattatttatcatacttttatcttttttttttctatttattttt

SEQ ID NO: 40996 - DNA, 234 bp, Glycine max
  Clone ID: LIB3093-052-Q1-K1-H6
taagttcaagagaagtatattagggaataaccgattaccgtgccatgattctgttgatttatcatgacaagaacaaatataacactttgtaataccgattatgtgaatgctatagcaacaatgactttgctgttcaatttatttctgctatcattgctggtgacatagatgttgctgctgtatatgcacatgatctggcacattttggtcttgaagtaaggcttacttattatt

SEQ ID NO: 40997 - DNA, 434 bp, Glycine max
  Clone ID: LIB3093-052-Q1-K1-H7
cggacgcgtgggcggacgcgtgggttgtggttgagctttcaaacaagaatcgggtcaccttagtgcaagaggcacgtgtcgggggcatgtatagcagttgctttgagatttctgtcactcaacatgatatattgagggaccttgctcttcatttgagcaaccgtggcagcattcatcaacaccgaaggctagttatggctacacgaaaagaaaatggactactccccaaagaatggtctagatacgaggaccaaccctttgaagcacagattgtttcaatcaacacaggtgaaatgaccaaaatggactggtttgatctggattttcccaaggctgaagtgttgatcattaatttcacatccactgaatactttttgccttcctttatcaataaaatgccaaatttgagggcattgataatattaaccacagta

SEQ ID NO: 40998 - DNA, 405 bp, Glycine max
  Clone ID: LIB3093-052-Q1-K1-H8
cccacgcgtccggttgagttctatgctccttggtgtggacactgcaaaaagcttgctccagaatatgaaaagcttggtagcagcttcaagaaagccaaatctgttttaatcggcaaggttgactgtgatgagcacaagagtttgtgcagcaaatatggagtctctgggtacccaacaattcagtggtttccaaaaggatctcttgaacccaaaaagtatgaagggccacgcactgctgattcacttgctgagtttgtaaatacggaaggaggaacaaatgtgaagattgctacagcttctttcaatgtaatggtgcttacatctgaaaattttaatgatgttgtcttatatgaaacccaagatggtctggttgagttttatgcacccctggtgtggacatttgca

SEQ ID NO: 40999 - DNA, 345 bp, Glycine max
  Clone ID: LIB3093-053-Q1-K1-A1
cccacgcgtccgcccacgcgtccgaattgattgaaatcaaacctcaccaccgctgctaggtcaagcttctctgtcggtcattgcatctccaatctcgcttcttctctcagattcagataccaattcggtttcttccgaaccaaacttgtttttgagaaattcggcaattgattttccatggccaacaatccgtcacagcttctcccatcagagttgattgaccggtgtataggttcgaaaatttgggtgataatgaagggtgacaaggagcttgttggtactcttagaggctttgatgtttatgtcaacatggtccttgaagatgttactgaatatgagatcact

SEQ ID NO: 41000 - DNA, 342 bp, Glycine max
  unsure (1)..(342): unsure at all n locations
  Clone ID: LIB3093-053-Q1-K1-A10
cattcacctattacatggccattcacttaatgttggacatggaattcagcaccatattttgcatttatgcttcttttctattcatagttctctttaagtcattgctgacatcattctcttccaaacactagaaatagtcactccctcccaattccattggttggtctttacattagagaatcctttcaaatgcgttcccaacacccaaaacaatcttcttagtcacaaaaantaaaaaagtttatatcattgctttcacttgcaaacatacacatgcaatttcattattcagtccttgtacagttgctagtggttcatgtgatgctcttttgcatattcaat

SEQ ID NO: 41001 - DNA, 319 bp, Glycine max
  Clone ID: LIB3093-053-Q1-K1-A11
gacagacgtagaaaatccaattaagattgaccatggattattcattgacgaactcatggctgctatctccatcattaccttcagcttgcactactactccttagatggctaaaggcggaagtggagctcttggtgcagagctcactacactcaacactgctgctgacatatgaagaaccaatcgacccaccactcaccgttgaacacacccagctcttaatcgatggacaattcggtgatgctgatactggcataacttttccacagttggaccccaagacaggcgatgtgattacccatgttgctgacgatgaccatg

SEQ ID NO: 41002 - DNA, 408 bp, Glycine max
  Clone ID: LIB3093-053-Q1-K1-A12
cccacgcgtccgcccacgcgtccggcctcagttggcaatgcttcacgattagtgtttgatagatctggggaaatctatgtagagacgactggtgggactagaaatagaatcctacctcaagttgataatactcttgataccgaggtgaattactacagagcgacccttgatttcagtggagttttcacgctgtatgctcatccaaggaacaccagtggccaaccaaggtggagaatcatgaactatgttcctgacaacatttgcgatgcaatattcatgattatggtagcggttcctgtggctataatagttattgctccatggaaaatgataggcctacttgcaactgcccttatggctattcactggttgatccaggtaatgaatctgggggatgccaacccaatt

SEQ ID NO: 41003 - DNA, 430 bp, Glycine max
  Clone ID: LIB3093-053-Q1-K1-A2
cggacgcgtgggcggtgatccgttggagcatcctcagaaagagacttactggggaaatgtgaatccaatcggtgagaggagctgttacgatgaagggaaaaggactgcggagacgttggccatggattatcatcggggtgctggtgttgaggttcgtattgctcgaattttcaacacatatggaccccgcatgtgtttggatgatgggcgtgttgttagcaattttgttgcacaggctattcgtaaacaaccattgactgtatatggtgatgggaagcaaacaagaagtttccaatatgtctctgatttggttaatgggctggtggctttgatggaaagcgaacatgtgggacctttcaacctgggtaacccaggggagtttaccatgttagagcttgctcaggttgtcaaagaaacaattgattcaagt

SEQ ID NO: 41004 - DNA, 244 bp, Glycine max
  Clone ID: LIB3093-053-Q1-K1-A3
cccacgcgtccgatctaatctgctgcctgggtcttcttcagcttctgatgctcctaaagctgacgttgctagcaagaaccttcgatcgctgctatgtcatgcagaatctctgattcactaacttcttaaatgtgcacgatgtgcaacttttaagagtgtttcttggcgaattacaatcactatgtacatctactgcattcgctgaaaatgaagttcaagatagcagatgtgatgagtcattatc

SEQ ID NO: 41005 - DNA, 149 bp, Glycine max
  Clone ID: LIB3093-053-Q1-K1-A4
caaaaaggttgctctttttgattccaagggagttcccgttgcaattctcaataatattgagagggataagcggcctaaagaagaaagaatagcccgaacttggggaaccattgcccctggcctaccttatgttgaacaaactataacca

SEQ ID NO: 41006 - DNA, 438 bp, Glycine max
  unsure (1)..(438): unsure at all n locations
  Clone ID: LIB3093-053-Q1-K1-A5
gcagttgtttcatagctcccttacatttcctactccagtgtatcgtgtgattaaggaacaactggatgaagtacttgcaagcttcangaatttgaaaggtcttgaatgcaacctggacaggacatttaatggttctcaccgagtgaagataacagcgaacgccacaaggacagtggcagaagttagaagacctctggaagaactattgagagggaaaaccattgagcatgacagcctcacccctgcagttctccaactcatgttgtccagagatggctttagtcttaaaaactcattgcatcaagagactggaacttatattctttttgacaggcacaacttgaatttacgggtgcttggcttcccaaacatggttgcttctgctcatgagaaagtgatacagttcctactttctctgcatgaataatagctgttaga

SEQ ID NO: 41007 - DNA, 419 bp, Glycine max
  unsure (1)..(419): unsure at all n locations
  Clone ID: LIB3093-053-Q1-K1-A6
aaccacacttctcttcttccattgtctcacgttatcagcatcaacacagtgtcacatccataagcggtgagcttctccctctctctctcaatcatccttttctttgcatcatgttcacattccatcaaaagggtctcacaaagttgtgattntttacccaccccgttcttgaactgaatcttataagcttgccatttgaccctgaaaccaaagaaaaataagattttgtgaaatacgagcttgtcccttccctgatctcttttttctctcaactagttttcaatgcagcaattctggatctgagaaccctttctggatctggttggaatagaagtgaaaattgtgttgcattgttaaattttttttgggtgaatgattggagttcaattttatttggattggtaatagctgatgtgact

SEQ ID NO: 41008 - DNA, 437 bp, Glycine max
  unsure (1)..(437): unsure at all n locations
  Clone ID: LIB3093-053-Q1-K1-A7
cctcaccaaccttatcacaaggtttcgagatcaaggactctctgctagggacatggttgctttatctggagctcacacatttggcaaagcaaggtgtactagtttcagagatcgcatatacaatcaaaccaacattgatagaacatttgcattggccaggcagaggaggtgtcctaggactaatggcacaggtgacaacaatctagcanatctagacttcagaactccagatcattttgacaacaactacttcaaaaaccttctcatcaaaaggggactcctgaattctgatcaggtgcttttcaatggtggatccactgattcactggtaagaacttacagccagaataacaaggcatttgatactgactttgttaaagcaatgattaggatgggagatatcaaacccttaactgggtcacaaggtgagattagga

SEQ ID NO: 41009 - DNA, 227 bp, Glycine max
  Clone ID: LIB3093-053-Q1-K1-A8
ctttcccttttgtgggctccttttatagtctccatgtatgtgccaacgtatttttgtttcatggatacgatttctgtcatatttgttgcctgtcacatagacgggtatgtagggtcgccaattgctttattggtaatttttggtgagggatgatataaaaaattttgtttaacttacatcctttttccggcattattttagggttgagagtgtagtccatgagtttt

SEQ ID NO: 41010 - DNA, 411 bp, Glycine max
  Clone ID: LIB3093-053-Q1-K1-A9
cccacgcgtccgggattgtgaccttggaagcattagaaccttttgccagtgaagccccaaaacaggatccttctccacttccatacttgactgagaaagaacccaaaatctatgatatttccctagaggctcacataaaacctgctgggcatgaagattcgggtgtggtgtcacggactaatctaaagcacttatattggacattgacccaacaacttgctcaccatacaatcaacggttgcaaccttaggccaggcgatctccttggaactgggacagttagtggtcctgagccagagtcccgtgcatgcttgctagaattaacatggaatggacaaaacacagtgtcagtgaatgagttaaatcggaaatttcttgaagatggagacgaagtcatcttaactggatatt

SEQ ID NO: 41011 - DNA, 331 bp, Glycine max
  Clone ID: LIB3093-053-Q1-K1-B1
cccacgcgtccgcagcaaccagcttgcagaagcagatgagtttgaggacaaaatgaaggaatgggaaagcatctgcaatccaatcattgccaagatgtaccaaggtggtgctggtccagacgtgggtggtgctggtgcagcagaggatgagtatgctgctcctgcttctggtggaagtggtgctggccccaagattgaggaagtggactaaatgtagttgctttcctacagatacctgctttaaaaacttattttactttatgcttattttaatgggatttaatcgcatgatttttggtggatgggattcaaactattttttcctttctga

SEQ ID NO: 41012 - DNA, 215 bp, Glycine max
  Clone ID: LIB3093-053-Q1-K1-B10
ggcacgcgtgcgattactcgtcctcatgggcatgctgatttaaccggttcgcaagatcattagcgatacttatggaggatggggtgctcatggtggtggtgctttctccgggaaggaccctaccaatgttgataggagtggtgcttacattgtgagacaagctgctaagagcattgcggcaagtggacttgccagaaggtgcattgtacaagtgt

SEQ ID NO: 41013 - DNA, 438 bp, Glycine max
  unsure (1)..(438): unsure at all n locations
  Clone ID: LIB3093-053-Q1-K1-B11
catcctgcggccagtggcacttttttcactcttatgcttctagggctcaagtactgctcttgccagtttcagggcaatctgcaaaaatttcagatggggcttcagctgctggaagatcggatatatagggcatctttgggttggttttcttttgagccagaatggtatgacacaaactatacaaactttgctcagtgtgaggctcaatctgtttctctatttgttcaataccttacaaatatgaaaggagatactgtccaagttggttcaaaaggaaatggacaagaaaatgggaatcctttggctgatgtgagtgatcaccatcatcctgtttggggtcaaatggagaactatgctgcangaagagaaaaacggaggcagctacttttaatgctttgccagcatgaggctgataggcttgatgtttgggcacagccg

SEQ ID NO: 41014 - DNA, 368 bp, Glycine max
  Clone ID: LIB3093-053-Q1-K1-B12
tttctctctccctctctagaaccgtaaccgtcgtttctttctttctctctcctcaaccagagataaagagtcaccttcttatttttctgaatctcgcggcgttgttctttctgctgctgcggctgtggttccggcggcgatgggacagcaatcgttgatctacagcttcgtcgctcgaggcaccgttatcctcgcggagtacaccgagttcaccggaaacttcaccggcgtggcggcgcagtgccttcagaaactcccttccttcaacaacaagttcacctacaactgcgatggccacaccttcaactacctcgtcgataacggattcacttactgtgtggttgccgttgagtctgctggacggcaga

SEQ ID NO: 41015 - DNA, 432 bp, Glycine max
  Clone ID: LIB3093-053-Q1-K1-B2
cttgaatcttcgttatccttctttttttctccttgaactcgaatattcactatggcagatgaggtggttctgctagatttctggccaagtccatttgggatgagggtcacgattgcacttgctgaaaagggtatcacatatgagtccaaagaagaggacttgcagaacaagagccctttggtcctcaaaatgaacccgggtcacaagaaaatcccggttctcatccacaatggccaacccatttgtgaatctctcgttgctgctcagtacattgaggaagtctggaatgacagaaatcccttgttgccttctgacccttaccagagagctcatgctcgattctgggctgactatgttgacaataagatatttgatcttggaagaaagatttggacatcaaagggagaagaaaaagaaactgccaaaaaggag

SEQ ID NO: 41016 - DNA, 268 bp, Glycine max
  Clone ID: LIB3093-053-Q1-K1-B3
cacaaaaccaatatcttagttttggtggagagaagagaaattgaaggaaacatacttatcatgacatgaactagatatgacttgccctcttcaactccaccgattcagccctgcaacagacacattcaccgccatcgcaaacggcgtcaactgtccaaagccagcacaaacggcgccgtcaacgcgccgtttattggcgaaagtaggccttagcgtgacggagatggttgctcggcaccacgctcacgctgtggtgcccaaccagtgc

SEQ ID NO: 41017 - DNA, 369 bp, Glycine max
  Clone ID: LIB3093-053-Q1-K1-B4
ggacttttgatgtctctcttctcaccatcgaggagggtattttcgaggtgaatgccactgctggtgatactcacttgggaggtgaagattttgataacagaatggtgaaccattttgttcaggaattcaagaggaagaacaagaaggatattagtggaaatgccagagctctgaagaggttgagaacagcatgtgagcggtcaaagaggactctctcttctactgctcaaaccaccatagagattgatttcttgtactagtgtattgacttttacacaaccattacctgtgccccgtttgaagagctaaacatggatttattcaggaagtgcatggagcccgtggagaaatttttgcggaatcccaaat

SEQ ID NO: 41018 - DNA, 107 bp, Glycine max
  Clone ID: LIB3093-053-Q1-K1-B5
caaagttaactttgtaagtgctactactactgagccactaaactctgcatctggcataaagtcctttctgggtacaaatgtacgcagttcatatccgatgaaatgat

SEQ ID NO: 41019 - DNA, 413 bp, Glycine max
  Clone ID: LIB3093-053-Q1-K1-B6
cccacgcgtccgcccacgcgtccggctttattctttttcttcgcttcttctgtagagcacccaggattgaagatgatagaccttgcgcgcgtgcagaaggagcttgtggaatgcagcaaggacgcggagggatcgggcatcaaagtcagtcccaaaaacgacaaccttgctctcttgatcggcaccattcctggccccgtcggaactccatatgaagggggcattttccagattgatatcacattgcctgatgggtacccgtttgaaccccccaagatgcagtttaaaaccaaaggttggcatcctaatatcagcagccaaagtggagctatttgcctggatatcttgaaggaccagtggagcccagcactcactctgaagactgcacttctttctgtgcaagcacttatctc

SEQ ID NO: 41020 - DNA, 435 bp, Glycine max
  unsure (1)..(435): unsure at all n locations
  Clone ID: LIB3093-053-Q1-K1-B7
acacttccaccacccttagtctggaggccggtccggcccaagcgagcccactccgaaaaatgtttgccgtggcgtccatcgccgncggcatacagttcgggtgggctctccagctctctcttctaaccccctacgttcagctnttaggagtcccccacgcggcggnctncttcatctggctctgcgggcccatctccgggctcgtggtacagcccattgtgggctactacagcgaccactgtacctnccgctttggtcgcaggcgcccctntattctcgggggcgccttagccgtcgccgtcgccgtgttcctcattggttacgcagccgatataggatacgcggcgggcgacgacatatcgaaaacgacccgaccccgagcggtcggggtcttcgtcataggattttggatcctagacgtggccaacaacatgc

SEQ ID NO: 41021 - DNA, 425 bp, Glycine max
  Clone ID: LIB3093-053-Q1-K1-B8
gacaattcgcagtttgttacctcactttggtttttttctctgcagtaatagaaaaggaagagggaaagaagaagaagaagaagaagaagaagaagatgttgagggttgcagctagaaggctctcttctctctcctcctcctctccgtggcggcccaaccacgccgctttcgcttatgtctctcgaaacgcactcgttgatgaccgcagatccgatccttcctcccatcccctttttcccttcagaagttttgctactgaatccctgatccacccaatataaaacagcattattcctgagattcctgcaactgttactgctgttaagaaccctacttctaagattgtctatgatgagcacaaccatgaaagatttcccccaggtgacccaagcaagaaggcatttgcctacttcgtccttacaggg

SEQ ID NO: 41022 - DNA, 80 bp, Glycine max
  Clone ID: LIB3093-053-Q1-K1-C1
taacacgcctacgcccactcatcagagccactttaaccctactccaccaccacacctctactcggtaaaactgccccttt

SEQ ID NO: 41023 - DNA, 391 bp, Glycine max
  Clone ID: LIB3093-053-Q1-K1-C10
caaacccactaagatggcttcctttgtatccttcctagtgctgcttcttgcagcccttatcgtcatgcctcaagggcttgctacttactacaaaccaattaagaagccaccagtgtacaagcctccagtgtacaagccaccagtgtacaaaccaccggtttataagccaaaaccaccggtttacaagccgaaaccaccggtttacaagccaccatataagaagccaccatacaagaaaccaccttatggaaagtaccctccagtagaggacaacacccatgcctaaagcaagcaatgaggtctattatctacttaataaataagaggaactgctttgtgttttctagcattgtgatttacaacttcgtagcaatgcatattcttgactctt

SEQ ID NO: 41024 - DNA, 330 bp, Glycine max
  Clone ID: LIB3093-053-Q1-K1-C11
ccagaaccttaacaaagatgaggaaggatgtgtcaagccgtttgaccaagtggggagatccagttcctagcaaactgatagagaagattgatgaatatatcccacctgattttgctgagctgctaaatataactgagaattttggaaatggtgcttgtaaaccttgctcctggatacacactgacattatggatgataacatttacatgaaaccaatattgggttggtttaacaacaatggggaatactgagaatcccaccttgggggccaagggttggttgagtaacgatgaagtaaaatcatggggtcctagaatattcctggattta

SEQ ID NO: 41025 - DNA, 422 bp, Glycine max
  Clone ID: LIB3093-053-Q1-K1-C2
cccacgcgtccgttttcgatatcaatagcgaaaatgtcatcagctggtgtctctacacttactgtggttcccactgagccattgttgtcaccaaaggcattcccttttccaattccatcacacttgtctttggaagataaatccattttcatatacctctccttttccgggctcattgactcccatccgtgttatggagtgggataccattgaatctgtcaaattcaaaatccaaaggtgtgaaagccttccatttttaacaaacaagcagaagttggtttatgctggccgagagcttgcgcgaagtgatacgccgctcaaggactatggagtaacggatggaaatgttttgcatttggtaatcaaactgtcagaacttcaagtcatcaatgtgaaaacttcttgtgggaaagagttcacgt

SEQ ID NO: 41026 - DNA, 377 bp, Glycine max
  Clone ID: LIB3093-053-Q1-K1-C3
cccacgcgtccgcccacgcgtccgggccaggcaagccccactcaaccaccacacctctcctcggtcacgctacccctttctgctcttcttctacctttcaagttttaaaagtataaagatggcagagacattcctatttacctcagagtcggtgaacgagggacaccctgacaagctctgcgaccaaatctccgatgctgtcctcgacgcttgcctcgaccaggacccagacagcaaaattgcctgcaaaacatgcaccaaaaccaactttggtcatggtcttcggagaaatcacgaccaaggccaacgttgactacaagaagatagtccgtgacacctgcaggaccatcggcttcgcctcaaatgatttggaactg

SEQ ID NO: 41027 - DNA, 280 bp, Glycine max
  Clone ID: LIB3093-053-Q1-K1-C4
cccacgcgtccgcccacgcgtccgctggtcatcgttgggatctccatacgccggatctgctagaatacgcttgatccatatgggccttctcgaccacttgtgggacgacaccgtcgcctgcccaaggccgtaaaacggtctcggcaaggctcttgaaaaccccaaaccttacttttcgacctaacttccggcaagggtcccccttgactcgttaatcatactcatataattcaccaacgattttcgttaactacatagtcacaactacaatcgttaaaaa

SEQ ID NO: 41028 - DNA, 302 bp, Glycine max
  Clone ID: LIB3093-053-Q1-K1-C5
agccaagtgaaagtgagaaaaaataaaaatcaaagagcataatgtcagggatcattcacaagagtggggagacccttcatgtgggagggcacaagaaggaggaggagcataagggtgagcaccatgctggagaatacaaaggggagcaccatggtgaacacagtagtgagtacaaaggagagcatcatggtgaacacaaagctggagagtaccatggtgagcacaagccagagcacatagaggggttcctagacaaagtcaaagacaagatccatggtgagggcggcgccgtcgagggcgag

SEQ ID NO: 41029 - DNA, 161 bp, Glycine max
  Clone ID: LIB3093-053-Q1-K1-C7
ctcacacactcaatctttgctttcttgtccaacaatgtcaaacactgaagaagaagaagaagcaactccttcgaaccctaacaatcacagtcaacactccaccaacaacgatgtggaacctcgtgacgacgaagacatcgaagaagacgacgacgacgtcg

SEQ ID NO: 41030 - DNA, 270 bp, Glycine max
  Clone ID: LIB3093-053-Q1-K1-C8
tctggttttgctgttgagaacattgtatctgaacatggagagaaggctccaaatgttgtttataaaggaaagttggagaatcaaatgaagattgctgttaagcggtttaataggaatgcttggcctgatgctcggcagtttttgtaaaatcacccgcccaattgggttcttttttaaccttgctcttaactattaattctcctgtagacctgttcatgaccttgcattgcacagatgcattatttatgtactttgcattacttaaacact

SEQ ID NO: 41031 - DNA, 329 bp, Glycine max
  Clone ID: LIB3093-053-Q1-K1-C9
cccggggcgacgccgtcctacgccggcgcgttagattgggctctgaagactgtgcgcgcggagggtcccatggcgctttataaggggtttattcctacgatctcgaagcaaggaccgttcactgtggtgctgttcgtgacactggaacaggttcgcaagttgcttaaagatttctgatgaggatgatgacgagaagatgtatgctactttccttttcaataagatgctttttctggttgtgttatgttttaatagtactagtgatgtagttctaggatggcaattttgttattctattaatcaatgagaagtgctgtttattttccgaa

SEQ ID NO: 41032 - DNA, 359 bp, Glycine max
  unsure (1)..(359): unsure at all n locations
  Clone ID: LIB3093-053-Q1-K1-D1
gctcaaggtctccaaagcgaacttaacagtatacattcacccttccaaaagtaaccaagtttccgaagccgttctccgccaactcagctctttgcttttcacgttcagcgaaatcttcgacggcgtcgttttggcctacgatgtcaattccttcgacacgtgcgcaaagatcctctccggcgttcacccttacttcggcgtcaaactcaaggtcaatctgttgctcttttctcccaagccaaacatgctcttaaaagggaagtgggtaaggttacgcaagagtccattcacgttgttgtgcttggctttnctctgcgantatatctgagaaagatatcagggaagaggtcgtgtgcaaa

SEQ ID NO: 41033 - DNA, 383 bp, Glycine max
  Clone ID: LIB3093-053-Q1-K1-D10
catgaatttatatcaaaattcccagaaaaataccagacctttgttggagagcgtggggtaaggctttcaggagggcagaaacagagaatagcaattgctagagccctgcttatggacccaaaaattctcctcttggatgaagccaccagtgccctagatgctgaaagcgaatacctagtgcaggatgccatggagtctctcatgaaaggaagaacagttctagtcattgctcacaggttatccacagttaaaactgctgatactgttgcagttatatctgatggccaagtagttgagagaggcaaccatgaagagcttctcagcaagaacggtgtctatactgcattggtcaagagacaactgcaaacaacaaaagccgaaat

SEQ ID NO: 41034 - DNA, 379 bp, Glycine max
  Clone ID: LIB3093-053-Q1-K1-D11
cattatcaaatgttagggaggacaactaccggtcctatttgcgcgaagacactgagaagaacaccaaatggagatatggtgcccctccaaattacgacgttgtcaacaagctatatgaagaaggcagaaccaaggtttggcctcagggttcacttgaagagcaggtgcagtctctagtgaagaattgggagatggaaatgttccacaaggtggacctgcaggatttcagatcaatagacccaaagaaatacactttcagcctgaacggaaggaagcctatgactctggaagagatgatgaagcttggtggagggtatataccaatgctgcaaacctctataccagagaaaatgaggccttacaatccctatgaagaaac

SEQ ID NO: 41035 - DNA, 403 bp, Glycine max
  unsure (1)..(403): unsure at all n locations
  Clone ID: LIB3093-053-Q1-K1-D12
gtgacattttagaccttgcttggtccaaaagagggtttctactgtcatcctctgttgataagaccgtgcgcctatggcatgtaggaatcgacagatgtcttagagttttctcccacaataattatgttacatgtgtcaatttcaatcccgtcaatgataattttttcatcagtggttcaattgatggaaaagtacgcatatgggaagttgttcactgtagggttagtgattacattgatatcagagagatagtcacagcagtgtgcttccgtcctgatggaaagggcacaattgtgggtaccatggcaagcaattgccgtttctatgatatcgtagataatcatctgcaattggatgttcagttgtgtttacgaggcanaaagaagacatcagggaaaaagat

SEQ ID NO: 41036 - DNA, 239 bp, Glycine max
  Clone ID: LIB3093-053-Q1-K1-D3
aaaaagcttgcatcttcaaggtttcaattttactgcaactggcaatgactctgctgagccttgttcaaactgctacgtgttaaatactttggtccttagattttgttctttgcataatgatgcaagggttctctgcatatctaattctaccctttccattttgacaatattagaaggacaaacttatcaaattgtgctttctactccaaatcttaagtcttttactatcaggggttcta

SEQ ID NO: 41037 - DNA, 132 bp, Glycine max
  Clone ID: LIB3093-053-Q1-K1-D4
gaagaaagtggtgatcctaggaggtggtgttgctcggtgccaaccttgcaaaaactatacaagggtaagccggcttcacccttattgatccgaacgaatattttgagattccatgttcaagtttgagggtat

SEQ ID NO: 41038 - DNA, 407 bp, Glycine max
  Clone ID: LIB3093-053-Q1-K1-D5
cccacgcgtccggcaagcactagagcacaggtacttctcatctgcacctctgctcacagatcctgttaaacttccaagacccgctcctaagaaggaatctaaggtttcagatgtaatttcaaacgaaggtcctactgtcttgtcacctccaagaaagtctaagagagtaatgccagggcgtgatgggtctgaaagcaattctttgcaaggagaatagttcgatgacaggtgtggtagggtcagacaagccacttgtggatatacgggcaagaatgaacccagtccacatggcactagaattttctctttttggattaaaaccctccaattgaactattattaccaatgcttaccgaatacatttaaaaaggaaattagatccaaaattcttaccgcccaaaccaatg

SEQ ID NO: 41039 - DNA, 355 bp, Glycine max
  Clone ID: LIB3093-053-Q1-K1-D6
cccacgcgtccgctcgtcgtcatggagaatagtaacattcagaagcagaatctggatggtcggtacaactcggttttgcttgaattgtctgcatctgatgattatgaagctttcaaaagagaggtggaggaaaaaggcttagatgtgaacgaggcaggcttttggtacggtagaagaattgggtcaaagaagatgggatctgaaacgaggacccctctgatgattgcttctttgtttggaagcgccaaggtgctcaattatattcttcttcagaaaggaagaggtggtgatgtgaacagggtctgtgggtcttgaagggccactgctcttcattgtgctgttgctggtggcttcc

SEQ ID NO: 41040 - DNA, 432 bp, Glycine max
  Clone ID: LIB3093-053-Q1-K1-D8
gttaatttcttcacatagagctatcaagatccaacgttaacatgaagaatgttttagtaaggtgagctgcgcgagctctgcttggcggcggtgggcggagctactaccgccagctctcaacggcggcgatcgtggaacagagacaccagcacggtggcggcgcgtttggaagcttccacttgcggaggatgtccactcttccagaggtaaagggtcagcactcagaggagaaaaagaacgaggtcaacgacaccagtaacgccgtcgttacgagttactggggaatcacaaggcccaaggttcgtaaggaggacgggacagagtggccgtggaactgcttcatgccatgggatagttaccactctgatgtgtcaatagacgtgaccaagcatcatacaccaaagtcattaacggacaaggttgcttttaggg

SEQ ID NO: 41041 - DNA, 262 bp, Glycine max
  Clone ID: LIB3093-053-Q1-K1-D9
cccacgcgtccgcccacgcgtccgggattttaatttttcttattgtatattccttaccttgggagtatttctttatttatttaattaatatattgtttagatgttggtaataatcagaagtgcgttgtgcgcatggattaccaatggatgaatcctgataatttcttatactatttactaattaggtttgtcaaataatgtacaaccataagtggatgcaaagttttcattttaaatgatgttcattagaggtgctttgagt

SEQ ID NO: 41042 - DNA, 266 bp, Glycine max
  Clone ID: LIB3093-053-Q1-K1-E1
cttatgctaccgagaggggggtgatggagtattttgctacttcacttgtctgctcatagatgcgtaatgaagcctcctgctaatggcttatacatatgacgcattatagcacacgtttgcatctactatcattactgacattacctgtgaagattaatatttaaactggagaagtctagaattttttatttttttgatatataagcctatttttgtacttcatttgaaaggtcatagtttgaaccctctttttctggagatttacc

SEQ ID NO: 41043 - DNA, 390 bp, Glycine max
  Clone ID: LIB3093-053-Q1-K1-E10
cacaaagaacaaaagacaaagacagagagaaacaatgtcttccccaagcaaacgccgagacatggacttgatgaagctgtcatcaggatgatgagtgattacaaggtggagacggtcaacgatggcatgcaagagttctttgtggaattccacggacccaaagacagtccttatcaaggtggtgtgtggaaagtaagggtggatctacctgatgcctatccttataagtctccatctattggctttgtcaacaaaattttccatcctaatgtggatgagatgtctggttctgtttgcttagatgttattagccagacttggagtccaatgtttgaccttgttaatgtgtttgaggtgtttcttcctcaacttcttctgtaccccaatgca

SEQ ID NO: 41044 - DNA, 408 bp, Glycine max
  unsure (1)..(408): unsure at all n locations
  Clone ID: LIB3093-053-Q1-K1-E11
gcaaaagtaaaaatgtggtttcttggttggaaaggggcatcagggttctcagcctcttccacagccgaacaagtcactcaagggattgatggaaccgccctcaccgccatcgtcacaggagcaacaagtggccttggtctggagaccacccgggttcttgcattgcgcggtgtccatgttgttatggcagtaaggagtctggacagtggtaagaatgtcaaagaaacaatacttaaggaaatcccctcggctaaaattgatgtcatggagttagatctaagctctatggcatcggtaaggaaatttgcagcagattttaattcttctggtcttccactcaatatcctaattaacaatgcangggtgatggcgaactcattcacactttcccaagacaatattgaattg

SEQ ID NO: 41045 - DNA, 384 bp, Glycine max
  Clone ID: LIB3093-053-Q1-K1-E12
gggaaattataaatcacagatcactgaggcatcccaatattgtcaggttcaaggaggtaatattgacccctacacatttggctattgtgatggaatacgcttctggaggagagttatttgagcggatatgcaatgcaggacggtttagtgaggatgaggcacgcttcttcttccaacaacttatatcaggggttagctactgtcatgcaatgcaagtatgccatcgtgacttgaagttggagaacacattgctggatggtagtccagctcctcgtttgaagatttgtgattttgggtattcgaagtcctctgtgctacattcacaacctaaatctactgttggtacccctgcatacattgctcctgaagttttgcttaagaagg

SEQ ID NO: 41046 - DNA, 423 bp, Glycine max
  unsure (1)..(423): unsure at all n locations
  Clone ID: LIB3093-053-Q1-K1-E2
acgcgttcncggacgcgtggggttttagaaacttaaagggaaaactttactgcctatggtggttttatctgacttaagcaatgaagattttttatcccagtttctctttcattatttttaacactatctcctgtggaaaagaaagtgttaaattcctgcttatcatgtataaatatctctaaatgttcttcttatccttggaaaaaatgtgatttgggtgggctatcggattgggggatattttggggttttgggcttaatcctaaatcccctttcttcttttcattactattaatggatggtctatattaccttctgattagcttggacccctttttagtgatggcaattttattaatattatgaacctttcctgggaatttactctctaatttctttcacaacatttttaaggaccacttt

SEQ ID NO: 41047 - DNA, 387 bp, Glycine max
  Clone ID: LIB3093-053-Q1-K1-E3
cccacgcgttcgccacgcgtcgcgacctgggttttctggtatatttgggctgctgtacactcatgaatgaaattccatgcaaaactcacaaagctaaacttctttattcgacatatcaacacccagttttcaaaattccattttggtttccctttcttttttcctatataaaccaagctttaatttccttctgaattaaaactccttgatctggtgtgaagatggaccccaatgactggaaattcctttcttatgatagcccttatgaggcgtccttagattcaaaaagtgtctggattggaataactataacttgggcacctaaccaaatttcagaaaggcctaaaaaccatcaaggatttttaatccaagggacccaaaccaggt

SEQ ID NO: 41048 - DNA, 307 bp, Glycine max
  unsure (1)..(307): unsure at all n locations
  Clone ID: LIB3093-053-Q1-K1-E4
tccacgagtcaccaacgcacgaaagccgggatctttcagataatggattcctgttcnaagggtgcataaccgcatggataagctcacactaacccgtcaatttgggatccaattcgggcccttaggaactttgcagaggcagagggtaaatgtaataatatcgattcatacagatacagaagacagggttctctattgattcaaacgctctacctacgagatagggatagagcaagaagaaaaaaccgaggatttcacatagtacttttgggcgaaaaatcgatctgaattttttcggacctttcgc

SEQ ID NO: 41049 - DNA, 119 bp, Glycine max
  Clone ID: LIB3093-053-Q1-K1-E5
cgacgatgtacgctcagacctcatattctactttctcttaaacgcctccatcttggtcaaacggtggttacctttatttataatatttaacgtaaaatctagatcatcttaagcttttt

SEQ ID NO: 41050 - DNA, 425 bp, Glycine max
  Clone ID: LIB3093-053-Q1-K1-E6
gtggtgttgtgtttttttttttgtttcatctccatctttttcttcaaatttcgcagaagagagactcacaaagatgaagttatcattgaagcatgctttggtgtttgcgttaattggggcgttgtggaacttgcagagggcagagggtatccgatttgtgatagacagagacgagtgtttctcccatgacgtaaagtacgagggtgacacttgtcatgtctcttttcgtggtattaaaggctgattcttcctggcattacggcgacgaaagggtcgatctcgtggtaaaaggaccttctggccagccaattccagattttcgggaccagaccagtgagaaggtcgattttggggcttacaaattcggggtccataaattctgcttcaacaacaagtcttcttatcatgaaactggtgattttgat

SEQ ID NO: 41051 - DNA, 423 bp, Glycine max
  Clone ID: LIB3093-053-Q1-K1-E7
cttctacttccctttgttctcaaaccttatcccttatcctcccaaaaccaaaccatgtctaccgccgcagcttctctcgcactcccaaccctcactctccgaactcgacaacctctctgttctccccaatgcttctcctcgtccctctccctcacccctaactccaaacccatttccatttccgccgttttcctcaaaacaacgctgtcgtcgtcgtcgccgttgtcgctgtcggctcgcttcgttccccatgtctctgtgttggagcaagaagaggacaccttccgcgacggaaacgggcccagcttcttccgggaccctaagctctttggcgggaaatctcccttcaatggccacagtgcgcgggtcgcggagctcttcgagagggcggggaatgtggaagtggttgaagttatttatgat

SEQ ID NO: 41052 - DNA, 52 bp, Glycine max
  unsure (1)..(52): unsure at all n locations
  Clone ID: LIB3093-053-Q1-K1-E8
cccacgcgtccgcccacgcgtncgctctctcacgagaagaatactactaact

SEQ ID NO: 41053 - DNA, 293 bp, Glycine max
  Clone ID: LIB3093-053-Q1-K1-E9
cccacgcgtccgcaaaacatatgtcgccgaagaactcttgttgccattggaactcatgatctggataaattggagggccctttcacctatgaggctttgccaccttcaagtataacttttacaccattaaagcaggaaagaaacttcagggctgatgagctaatggagttctacaaatcagatttgaaactcaagaaaatcttggcatataatggaggatcttccggtttccccggtatatattaccggtagagaaccggggtatccttaaccccaattattaatggtgcaca

SEQ ID NO: 41054 - DNA, 398 bp, Glycine max
  unsure (1)..(398): unsure at all n locations
  Clone ID: LIB3093-053-Q1-K1-F1
ccgcgttgtgttgtgattgaaaatggagagcgatgttgaagaatctatgcggaagaggcccagggaatatcctttctccgccgattcatcctctcgcaagcaatttgaacaatattctggacggacatttgcaattatgggggaagtgaattttatgcaagatgatgataatcgtttggagattacccgaactaaatttggaagtttgcttaaaagacatggagatttgacagagcggcttgctagggattctgacaagataatatttgagcgtctacagaaagagtttgaagctgcacgagcttcttaaactgaagagatatgtttagacggggaagagtggaatgatggtctactagcttcaataagagaagcggtgcatatggaagcngacagaa

SEQ ID NO: 41055 - DNA, 357 bp, Glycine max
  Clone ID: LIB3093-053-Q1-K1-F10
acaacgtaaaagctaagattcaagacaaggaagggatcccacctgaccagcagagacttatcgtttgcgggtaaacaacttgaggatggtcgcacccttgccgattacaacatccaaaaggaatcaaccctccatctcgtgcttcgcctcaggggtggcatgcaaatctttgtcaagactttgaccgggaagaccatcacccttgaggtggaatcctcggacaccattgataatgttaaggccaagatccaggacaaagagggcatccctccagatcagcagaggctgattttcgctggtaaacaacttgaggatggaagaacccttgctgattacaacattcagaaggaatccacc

SEQ ID NO: 41056 - DNA, 354 bp, Glycine max
  Clone ID: LIB3093-053-Q1-K1-F11
aaaaaggaaaccctagctggataggtcaaacatcatcatgtcggacgaagagcaccatttcgagtccaaggcagacgccggtgcctccaaaacctaccctcagcaagccggtaccattcgcaagaacggctacatcgtcatcaaaggacgcccctgcaaggttgtggaagtttcgacttccaaaactggaaagcacggtcacgccaagtgccactttgttggaattgatattttcactgccaagaaacttgaggatattgtgccctcttctcacaactgtgatgttcctcatgtgaatcgtactgagtaccagctcattgatattgctgaggatggatttttgagtctgcttac

SEQ ID NO: 41057 - DNA, 403 bp, Glycine max
  Clone ID: LIB3093-053-Q1-K1-F12
catagcgtagccatggccatgggattgacctcacaactcctcctttctttgttcatcagtacccttcttcttcttcttccctcttccctttcacaatctaaccagttttgtgacgctggaacttcatccaagctgttgatcaagggcggcaccgttgtgaatgctcaccaccaacaggttgccgatgtctatgtcgaagatggtatcattgttgccatcaatcccactattacggttggagatgaggtgacggtcatagatgccactggcaagtttgtcatgccagggggcattgaccctcacacccacctagagtttgagtttatggatacggaaactgtagatgacttcttcagtggtcaggctgcagcattagctggtgggacaacaatgcacattgact

SEQ ID NO: 41058 - DNA, 433 bp, Glycine max
  unsure (1)..(433): unsure at all n locations
  Clone ID: LIB3093-053-Q1-K1-F2
gattgatcctgattctcgaaatgctggccagaaccgtttacttgcgatgaattacatagatgaaggaaatgatgacaaactttttgaggctcacagggactggggtaggcgatttatgagactatattcacagttcacatcatgggacaactcanaagatcctgaacggcctcttgtgataggatatgtctctcctgaataatttacacattctggggcataattcataaaagctccccttctttaatatgactataccaattattaagggggtggttattcaacaattggcaaagcagattccaaaaccattccggttaaaaaggaaggcttaaaaaaaggtgggatctggaaagatatttatggaaccgattaaaagaagggtggccacatgggtagaggagatcaagttgatattttaatagaacttact

SEQ ID NO: 41059 - DNA, 436 bp, Glycine max
  Clone ID: LIB3093-053-Q1-K1-F3
ataaggaggagcctatattggtggtggctgacaggagtaaaaaagaggtgggtgccgatgatgggttttatcttgtgaatgctgatggtgagggtttgaaggtcgagaggggttcgggattgaaggaaaagggtttcactcagagtttaggaactgtgttattggttgttagacctcccaaagaagaaaatgatgaattgagtgacgaagactgggagtgaactcaaatcaaagggaagggaatgattgagttgctaaagaatagcgataacaccacattatatatatatatatatggttttctcaattcaagaattgctagttaactcagctcaatcccctgcctttggtttttgtgtcatgcaaaataaggttctattaatttgggattacatgcaactttcttttggtttccatacttaatagaaggatttaa

SEQ ID NO: 41060 - DNA, 164 bp, Glycine max
  unsure (1)..(164): unsure at all n locations
  Clone ID: LIB3093-053-Q1-K1-F4
gccccgcgctcctcacctcgttactctncgattacgattgcaacctcctcagggggatgtgaagcttttgggtattgtgggaagcccatttgtgtgcagggtccagattgcccttaagttgaagggagttgaatacaaatttttggaagaaaattttgggcaac

SEQ ID NO: 41061 - DNA, 427 bp, Glycine max
  Clone ID: LIB3093-053-Q1-K1-F5
cccacgcgtccggcgttctctgagagatgccacccacaagacaagaaagcgttgctccaactgcagaaggacctcggcaacccttatcacatcatatcctggaacgcaaaggaggattgctgcgagtggttctgctgcgttaagtgtgacgagaaaacaaaccgcgtcattagcgttgccttatcatccccttttccagacaccaatctctcggcccaaataccttcctctgtgggtggacctccttacctcgaagtcctcgtcttccacaaattccccaaactcgtgggcccaatccaagcccgaatcggcaaactcaccaaactcaaataccttgatctcttcaacaacaatctctctggcccaatacccgaatttttcgcgcaactcaagaacctcgacgatatcgacctttcctttaacaacc

SEQ ID NO: 41062 - DNA, 56 bp, Glycine max
  Clone ID: LIB3093-053-Q1-K1-F6
ctatacttgttccttttgaaggttagaagtgctacaatacaaacaatggcatttat

SEQ ID NO: 41063 - DNA, 355 bp, Glycine max
  unsure (1)..(355): unsure at all n locations
  Clone ID: LIB3093-053-Q1-K1-F7
gttattgttggtgttgtgggttatgtgaaaactccccgtggtctccgaacattgaacactgtgtgggctcagcacttgagtgaggaactgaaacgtangttttataagaactggtgcaagtccaagaagaaggccttcaccaagtactcaaagcagtatgaaactgaagagggaaagaaaaacattgaggcacagctggagaaactgaagaagtatgctactgtggttcgtgttttggctcacacccagatcaggaaaatgaaagggttgaagcagaagaaagcccatatcatggaaattcaggttaatggtggtactattgcacaaaaggtggactttgcatacaagttctttg

SEQ ID NO: 41064 - DNA, 350 bp, Glycine max
  Clone ID: LIB3093-053-Q1-K1-F9
cacacttacactatcacacagcattactctcactcaacaacaatgttgccgccagcgggaaccatcgtattcaacaccgtcggaagagtccaatacggtttcgacgttttctctgtcgacctcaatcaccaacagccttcggcccacgccaccgcagaccaccggcttaccgacggtgtctcgattaacttcaacgcacaattcattaacccccaaaacgacgtcgtcttcgtattcgaaagaaccgggtcgccccgcttctacattacaaaacccgacactaaaccccagcctttaccctttctgcccaacgctctcttccacgatcgcccaatcgttaaaaacggaaa

SEQ ID NO: 41065 - DNA, 409 bp, Glycine max
  Clone ID: LIB3093-053-Q1-K1-G1
cccacgcgtccgcccacgcgtccggctgaaagggagcttggaaatgattaaggttgacgtgcaagcgatcaaggagagagagtgaagtgtctccagatttagctcaagacaacaacagcttcttcctccttctcctactcttcacactccatgtgattgattctccttttttttttcaactgtttatttataaataatttcacatggctgcttcctttttttttttaaaaaaaaaaaagatgatttgaaatcacaatgatgtaagttggagaggagtaaattatttgggggctttgatattattgttggtgttcagagatgagagatgggtcatgtggaagtaacctgatcacattgtcttcttcttgctggaacaacaaagctattctttctggccacatgtgaatga

SEQ ID NO: 41066 - DNA, 261 bp, Glycine max
  unsure (1)..(261): unsure at all n locations
  Clone ID: LIB3093-053-Q1-K1-G10
cccacgcgtccgcaaagtttgcactgttggagaccataaaagaagctgtaccagaaatgtggtcaccggctatgaagaatgcatggggagaagcttatgatcagctggtcgatgccattaaatctgaaatgaaaccaccctcctcttagactccagtttaagcagttcctttccttccctctcaattctcaaattggtatattaataaaagtgagaaagtttaggcttgtgcttttattttgtgtgaatgtnatatacttt

SEQ ID NO: 41067 - DNA, 331 bp, Glycine max
  Clone ID: LIB3093-053-Q1-K1-G11
gccatcatcacagacccaccctggaccgagagggaatggatatgcccctagcctcgactgcgcacttgtcacattgatgccaagattgctgaactcatgaccgacattgacaggcgatgcggctaagagcttgagaaggagcccaagattctgacgaacggtgatgctggctaagctaacacgatgccataccaaacccatgggtgctgcaactttttccgagtattcttcacttggacagtacgctgatagggacacgcgtccaactgttgccgatggagtcatgaggaacgttgctaagaaggatcctaccggagccaaggttaccaag

SEQ ID NO: 41068 - DNA, 390 bp, Glycine max
  unsure (1)..(390): unsure at all n locations
  Clone ID: LIB3093-053-Q1-K1-G12
cggacgcgtgggcggacgcgtgggtggaaaatgaagcctcgtgtcggtggtgctcttgcagtgcacgcaccctcgtgtcaatattcgctgcaattcttctcctattccaaccaaattgcatcgctaagcaacagcaccaaccatgccctccttcatcctgcggcataattggcaacatatcgttcccatttcgcctcaaagacgacccaagccactgcggcgacacaaggtaccagttagattgcgtgaataacgcgacgctgttaaccttgttctcgggaaaataccatgtacaagatatcgattacaagagatacaaaatcaaggttagtgacgcgggtgcagtggaggactcaaatngtttcatccctcgcaatntcttatgggatg

SEQ ID NO: 41069 - DNA, 424 bp, Glycine max
  unsure (1)..(424): unsure at all n locations
  Clone ID: LIB3093-053-Q1-K1-G2
cccacgcgtncggattcgttacaaacgtaaggaatttgatatgaaatactatgttgaatgtgggattgaagtgactgccacaagtactgcaacatgctttctcataatagcacctctggttgtgctatggtgttggaagctactaaagtgggtgtggatcagtgcaagggggaaaaactcttggaaatagaggtcttgagtggctcaccgaactctttaacgaaattatgagggcaaaacccatgccgaaggaatggttggaaaacaacgtttggccaattttttaaaccaagggggtttttcaaaattgggcaaattttaggggaattaactccttgggccaatccttggatcaacaaattcggtacgtgcgtgcatttctttcccatactgcttagatttggactcttatctgcaaatttct

SEQ ID NO: 41070 - DNA, 429 bp, Glycine max
  Clone ID: LIB3093-053-Q1-K1-G3
attttgaagaaaatgggtcgtgcaagaatcagcttgaaacatatctcaaatgagagatctcgcaagaaaactttcatggagagaaggaaagtacttataaaaaaaatctctgaattttccaccttgtgtggagttgaagcatgcttgattgtgtatgatgatgggaatggtgacattgaaccagtgacttgtcccaaagaccctgtattggcacactccatacttcaaaactatgagtttcaaaagaatcagagacctcccaagaagtttggtattcaggactttgttgaggataggaagaacatcattgaagctgagatttccaaagtgcataaagagatcaccaacatcaagtatccaacttcggatccaagtttcataaacatggaagaggatcaattgagggccttcattgctctggtggatgct

SEQ ID NO: 41071 - DNA, 423 bp, Glycine max
  unsure (1)..(423): unsure at all n locations
  Clone ID: LIB3093-053-Q1-K1-G5
gggaaataaaaatactccatttacgtttcctgcatgttagtggtgatgagcatgtccgttcttggtgtgggctaaagattaaacaaattagattagttctattgagagctttctgaagttatatacacattctggaagtcagatcttttctgcaggtatttctgacccctactcatttagctatcgtcctagagtatgctgctggtggtgaactcttcgagaggatatgcaatgctggtcgattgagtgaagatgaagcaagatttttctttcaacaactaatatctggagttagctattgtcattccatggtacatatgcattcagaattttnggtgtggtggtaatttaaaagtcccttggaatatcatcttatgcctnctactgcagcaaatatgtcatagagatctgaaattggaaaac

SEQ ID NO: 41072 - DNA, 308 bp, Glycine max
  Clone ID: LIB3093-053-Q1-K1-G7
ctctctctaaagtcaccccattatttaccttttaaatcaagtctacacctatggcattcacaacaaatactacaaactttttttacaccatacacctttttttctttttttgaaggtcttaatatctcaaaacctctggttcggattttccaccatgaaccaataactacaacctgggacttgtcgttggtgtttgtgtttgtgtttgtctggttacatggcgtaccataaccaccacaaccttttacaacaagaccttcctccactcaaccatttcccgaaccaatccatgttaccagaccaacaac

SEQ ID NO: 41073 - DNA, 392 bp, Glycine max
  Clone ID: LIB3093-053-Q1-K1-G8
acggacgcgtccgaccacgcgtacgtgaaaaaaacgcgatggaagagagaaacttgagcagcgtgtgcaacaagagagaaaaaaatggtggtagtagaaaggttgataataataataataacaaaaatatggcacaggtgaataggaaccggaaccccagtttttcacctgacggtttaaagacaccaagcattggtttcccttgacgaaacttttcaaaaatgtttgaatgccaaatggctttggcttaaaaccaacaaggggccaaaatattggccaaaccccattaattttcccaatggcaacattcccaaattggaagattccaaaacccgtgaactttaaactttggcttttgaatttaatctatttgaaactttgggttcattgga

SEQ ID NO: 41074 - DNA, 386 bp, Glycine max
  Clone ID: LIB3093-053-Q1-K1-G9
cacaaaaccaatatcttagttttggtggagagaagagaaattgaaggaaacatacttatcatgacatgaactagatatgacttgccctcttcaactccaccgattcagccctgcaacagacacatccaccgccatcgcaaacggcgtcaactgtccaaagccagcacaaacggcgccgtcaacgcgccgtttattggcgaaagtaggccttagcgtgacggagatggttgctcggcaccacgctcacgcggtggggcccaaccagtgctgctccttcgtgatccaggcgatcgacgcgccggtctccgccgtgtggccggtggtgcggcgcttcgacaacccgcaggcctacaagcacttcgtaaagagctgccacgtggtcgccg

SEQ ID NO: 41075 - DNA, 408 bp, Glycine max
  Clone ID: LIB3093-053-Q1-K1-H1
cttcgtcgaacgagtcaccccaccgggtctccacgcgttcacacccgccacttcccccggcagcaacaacttcatcgccgtcgcaaccagaaggccaggctccaattttcgtcacatcgagctattcgacctcgctagtaacgaattcactgagctgactcggttggtctcgcctaattctcaccacctcaacccgttcatctcgcccgattcaacccgggtcggttaccataaatgcagaggagaacccaacgctcacagtaccccacagtttttcctcgagaatgttcggagccccgtccccggtctaactctcttccgcttcgtcggttctttcccggttttcttccccttcggcgaccgaatcgcgtacgtcgagatgcccggagtttatgtcgtgaaccggga

SEQ ID NO: 41076 - DNA, 404 bp, Glycine max
  unsure (1)..(404): unsure at all n locations
  Clone ID: LIB3093-053-Q1-K1-H10
gaaattgtggcttgctggcttttcaaagggcatacaggaaatgcacagaaaggcatctttggttcttgaagatgcagttaggaatatttacactgttgttgcattttgtgctggtaataaggtgatggaactctaccagttgcagttaaataaaatatttaagcaaagctttcttcatggagtggccattggttttggatttggcttttcacagtttctgctctttgcttgtaatgcccttctactttggtacactgcactatgtgtaaataagagttatgtggatctacctactgctctcaaggagtacattngtttctcatttgctacatttgcccttgtggagcctttcgggttggctccttacatacttaagcgacgtaaatctctcatgtcagtgtttg

SEQ ID NO: 41077 - DNA, 386 bp, Glycine max
  Clone ID: LIB3093-053-Q1-K1-H11
tggattcgaccctcttcgtcttggtgaagtaccagagaatcttgagaggttcaaagagtcagaactcagtcactgcagatgggccatgcttgctgttccagggattttggttccagaggcattgggcttaggcaactgggtaaaggctcacgaatgggcaacagttcctgggggccaagcaacctacctaggcaatccagcttcattgggcaccctacccaccattctggccattgaaatccttgctatttcctttgtggagcaccaaaggagcatggagaaggacccagagaagaagaaataccctggtggtgcttttgatcctttgggatactcttaggaccctaaaacatttcatgaatacaaagtcccagaacttaagaatg

SEQ ID NO: 41078 - DNA, 377 bp, Glycine max
  unsure (1)..(377): unsure at all n locations
  Clone ID: LIB3093-053-Q1-K1-H2
acccacgcgtacggcccagtccgattccaactaatcctcttcaacttacttgttatcactatcttgctttgtctggcttgaagagtaaacaatgacggtagtagaaaggttgataataataataataacaaaaatatggcacaggtgaagaggaacgggaacattgatcgtggagggttctacctcaaaatggggctttcttttccttttggatctaaggacaagaagaagaagattaagaagaaaaatgaacccttggggaatagttgtagttcgagagttacacctaaaccttctgatggatcagcanagggtggtgttgttgataaggagtggtggaagaagagtcctttaacgtgtaaaagagagtgatagtg

SEQ ID NO: 41079 - DNA, 410 bp, Glycine max
  unsure (1)..(410): unsure at all n locations
  Clone ID: LIB3093-053-Q1-K1-H3
gttgtatactccagggaaacaacctgagaaagtgtgcacctcggtcaaaaaacctgccggcactcgtatctgtgacaccgtgttcaattcggatccaaaaatctgatttatcgggtctcttcccaactcccccaccttcaaccaacttccaccagtagtaaacagaaatacaagcataagcaaaagaagacccgcgacacatcgcaacatcgtatcatgtctgcaacaaacgtccccaaagtgctgttacaactacaaccacccttcaaatcgaacccactctgcgtgccggtgataggactcggcaccgncgcggtccacaacgacggtgacacggtgaaggctgcagtcatagaggctatcaaaactcgttacagacacttcgacaccgcggcacagtacggatcgga

SEQ ID NO: 41080 - DNA, 430 bp, Glycine max
  Clone ID: LIB3093-053-Q1-K1-H4
gttaagttggtcatctgtggatggcatgacgaagatgcaccaaattatcgttcaattatacagaacccaatggacatggctaccattctgcagcatgttgataatggtcactatattacaagtgctgcattcctgcaggacatcaatctcattgtttccaatgcgaaagcttacaatggagaggattacaatggtgctaggattgttaggagagcttgtgagctccgtgatgcggtgcatggaatgctctcacagatggatccagcactggttgcatattgcgaacagattgctagccaaagtggcccaattcaggtgtctgatgaattaagggattctactttccctgctactcctgttgtgcaactgggtcagagtactagaatgagtgctcgacttcgtcatgtccaaccagaggttaatatggatc

SEQ ID NO: 41081 - DNA, 426 bp, Glycine max
  Clone ID: LIB3093-053-Q1-K1-H5
cccacgcgtccgcttcgatcttgcggatatgtttccttctttcaaacctatgcatgtcataaccgggttgaaagccaaattggataagatgcataacaaggttgacaagatcttagataagatcataaaggagaatcaagcaaataaaggcatgggagaagaaaagaacgaaaatcttgttgaatccacatgtattattcaaacaagtatgctaatggatcaatgtcatttttctgtccttgttataatgtgaaatatatatgaaactacattcaacattaattatgcaggacatatttgcagctggaaccgatacttcagcaaaagtaatagagtgggcaatgtcagaaatgatgagaaatccaggaggaagggagaaggcacaagctgagatcagacaaacgttctgaggaaaagaagcaatca

SEQ ID NO: 41082 - DNA, 282 bp, Glycine max
  Clone ID: LIB3093-053-Q1-K1-H6
cggacgcgtgggtgacagacgaagatgcaccaaattatcgttcaattatacatggctcaatggacaatgcaatcactctgtgctcaacttaagttgccttacaatgcatccagactttcctttcttatatccttttccaatataatcgtgagacttatgacatatctgtgtctcacttcatcaataataaattatagtcaagaagagcaatcattacaaaaaaaatgagccccttggacaataattgtaattataaagttaccccttaaaccttataatgga

SEQ ID NO: 41083 - DNA, 413 bp, Glycine max
  Clone ID: LIB3093-053-Q1-K1-H7
gcgagatttttttgtacacttgacatgtcttcatattttccaagctttgctacaaaaatcccacgtatgggaaagggatacgatgatgtgttgttcacagtgaccaaccaattagtaaaaatcagttcatgggccaacaactataagggcctgaacctctaaagcagcacattggtttgatcaaatcgccaaattgttcttctcctgtgatggaggacgagcataaaaagttggattctttgcctgaaattgaattatcagagtcagaggaatattccaaggaattggaagtggctgttagagcagtgcaaatggcgtgttccctctgccagagagtgcaggacactttgatttccaacgctgggacaaatcatcgtcaggttcagtccaaggacgacaattctccggttaca

SEQ ID NO: 41084 - DNA, 223 bp, Glycine max
  Clone ID: LIB3093-053-Q1-K1-H8
cttacaatggagaggattacaatggtgctaggattgttagtagagcttgtgagctccgtgatgcggtgcatggaatgctctcacagattgatccagcactggttgcatattgcgacaagattgctagccaaggtggcccaattcagttgtctgatgaattaggggattctactttccctgctactcctgttgtgcagctgggtcagagtactagaatgagtgc

SEQ ID NO: 41085 - DNA, 404 bp, Glycine max
  Clone ID: LIB3093-053-Q1-K1-H9
cccacgcgtccggaaacttaatcgatcatcacttcacttcactaatacatcatggcagacgagacccagaacaagtatgagagctctgaggttgaggtccaggatcgtggtgtttttgactttctcggtaagaaaaaggatgaagaagacaagcctcatcctcaggaggaggtcatcgccaccgagtttcaaaaagtcactgtctcagaccaaggagagaacaagcacagcctcttagaaaagcttcaccgatctgacagcagctctagctcttcaagtgaggaggaaggagaagatggagagaaaaggaagaagaagaagaaggaaaagaaagggctgaaagagaagatcgaggagaaaatagagggtgatcatcatcatcacaaggttgaggacccaagtgt

SEQ ID NO: 41086 - DNA, 282 bp, Glycine max
  Clone ID: LIB3093-056-Q1-K1-A1
cacgcagtgagccaacccgtccgaacatgatggggagctggatacacgttacctgacctttgcgaggggtgaggtagcatcaacagaacttgctatacccgttatgtcggaagacccatcaagaaagcagagcataaagaataacgccatacagactaatacagaaggcatcaccttggagaacacaccttggatgacagaggaatcaagatgactccaaaatctgggagaacctggtggctcataccatacgcagcatagagacactgaaatataaggcat

SEQ ID NO: 41087 - DNA, 362 bp, Glycine max
  Clone ID: LIB3093-056-Q1-K1-A2
acgaacactcgtatcctgcgttataagatctacaactggctcagaaatgggccatctggggatacctgaaacctacgcttgttacacaactcacacgcaatggaataggccaactatagcaacccatcccatatcgatttcaattgctgaatggcaaatcatcacatgctcatcaagattatttacgaccagaatttacgcaagaattggactgaaaagtaggctacgtttcaatatttaatggccacttatgccatgatttatcaagctctttgcataactatctttatgaaaacatcttgcaacagcatgacttttggactgaatacagaaagcgccgtggaatacgcttaccttgacac

SEQ ID NO: 41088 - DNA, 408 bp, Glycine max
  Clone ID: LIB3093-056-Q1-K1-A3
acacaagccaagtgaaagtgagaaaaaataaaaatcaaagagcatagtgtcagggagcattcacaagattggggagacccttcatgtgggagggcacaagaaggaggaggagcataagggtgagcaccatgctggagaatacaaaggggagcaccatggtgaacacagtagtgagtacaaaggagagcatcatggtgaacacaaagctggagagtaccatggtgagcacaagccagagcacaaataggggttcctagacaaagtcaaggacaagatccatggtgagggctgcgccgccgatggcgagaagaagaagacggagaacaagaagaaggagcatggccatgagcatggccatgacagcagcagcagcagtgacagtgattaaactgctgcattaactatata

SEQ ID NO: 41089 - DNA, 426 bp, Glycine max
  Clone ID: LIB3093-056-Q1-K1-A5
cccacgcgtccgattttgatggggagctgtttccacgttacctgagctttgtgaggggtgtggttgattcagatgatcttcctctcaatgtttctcgggagatccttcaagaaagcagaattgtaagaataatgagaaagagacttgtaaggaaggcatttgatatgattcaagaccttgctgaaagtgaaaataaagaggactacaaaaaattctgggagaactttggtaggttcataaaattaggttgcattgaagacactgcaaatcataagcgcattacaccactattgaggttttacacttccaaaagtgaggaggagcttaaaagcctagatgattatgttgaaaatatgggtgaaaaccaaaaggctatcttttatctaacaacttacagcttggagagtgccaaaactgttacatttt

SEQ ID NO: 41090 - DNA, 418 bp, Glycine max
  Clone ID: LIB3093-056-Q1-K1-A6
cttcacacaacaaaacttttttctggcattgtagcatcatgactggcagagaaatcctccatatgatgaaggtgaaagcagggtttggaacaccagacacagggaatggaaaaggcaaaatatcaaaacacattacacatggctttcacttgatgaagggcaaatcagcgcatcctatggaagattatttagtttcagaatttaagcaagaaaaggacagagaattaggcttgtttgcaatatttgatggccacttaggccatgatgtagcaagctatttgcagaaccaccttttccaaaacatcttgcaacagcatgacttttggactgagacagaaagcgcagtgaaaaaagcttacgttgaaacagatgagaaaatatttgaacaagaacttgtgttggggcgaagaaggtcaac

SEQ ID NO: 41091 - DNA, 430 bp, Glycine max
  Clone ID: LIB3093-056-Q1-K1-A7
tcttactccttacaagatgggcaaattcaatctgtcccataggtatctctatctcggtgtttcctggctatttccatagatttcaattgctgattaattttgcttgcagagttgttttggcaccgctgaccagacagaggtcttacgacaacgtcccacaaccccatgccatcctctactactcccagagaacttccaacggaggccttctcattactgaagccactggcgtctctgacacggctcacggctatccgcacacccctggcatatggactaaagaccatgttcaagcttggaaacccattgtcgatgccgtccacgccaaaagcggtgttttcttctgtcagatttggcacgttcgaaaagtttcaaattcaggtcttttctttttctttaatgcccttaacttcttctttagaactggttt

SEQ ID NO: 41092 - DNA, 432 bp, Glycine max
  Clone ID: LIB3093-051-Q1-K1-F9
caatctgcttacgaactggactgctatgagtggatactttgattctgtattctctagatatgtagacaggtatccagtcgctgcactttaggcgctcgagatcgagcgtgtgcttgggcctggtggaatcggtgccgttattgtgtccacgagtgactcaatgccaaataatactgattagagctagtaccccagtttcatcttggctgaaaacttgcactgtgatgcatgtgagccatgttaacaacttaactctggttgcatataagaagaacactcgaagaatatcagcatttggaggagccttgcctatcgtatgaatgtcgctctgtgacatggaacaagcgtgcgattccaaagctggagcctattgtgaaggaaagacctgcgggatttgacaaatacgtggcttatttaccaatgcttgttgat

SEQ ID NO: 41093 - DNA, 372 bp, Glycine max
  Clone ID: LIB3093-049-Q1-K1-B4
atctgttctttgtctgtcaaaggaaagaaaaggaaagattagaagagataatgaagagagtgacgtaaacagaagcgcacactacacagttaccaaaatcaggttcaaacgcacagatctgggagaagagacgaagaacaataacaagatgggacaggatcagaaccagagatcgctgatctacgcgttcgagtctagtggaacggcgattctcgacgagtacactgaattcacaggcaacttcaacacaatacgcgttccagtgccttcagaagcttactgcctacaacaacaagttcacctacaactgtgacggtcacaccattaactacctaggcgacaacggattcacttattgagctgttgccgatg

SEQ ID NO: 41094 - DNA, 274 bp, Glycine max
  Clone ID: LIB3093-049-Q1-K1-B6
acgaaaaattgttgaatgataattaataaattccttcatatgtatagagataggagggaaaatgtacatggatatagctagtcatgctcgggctgctttaatggaagttctttcattgtctctttccctctcagtatggggaagaagtggcctatacaggattctcaaaagtgagttaatcggatctaagtacccatatttgtttatacttggctttttcaatttctataactttaactattgatttaaagtatttcatttatactaattaatt

SEQ ID NO: 41095 - DNA, 428 bp, Glycine max
  Clone ID: LIB3093-049-Q1-K1-B8
tttattcgttcgttttatatggaaaaaaatattgtagcaagttcgtcgtacaaacaaaatgccactattttcggcacgccggtgctgaatatgcaatctgaggtgttttgtcttcttgtatttatacgtgatagttccaaaaagcctaacgcgagagattgattagcttttgaattattgctcgaattattttgaaggaatgatccaaactggttgaaatattcatcatcaacaacctcacgctgttatagatattcgctctctctatcttgctctatctctctctcacacacacacacacacagatcctgacatggacgaagaacaccgatgctaagctgccgaatgtcacagactctgatccaacaactgcgggttctttggtagccttggcaccatgaatctatgatccaaatgctgcagagaca

SEQ ID NO: 41096 - DNA, 257 bp, Glycine max
  Clone ID: LIB3093-049-Q1-K1-C1
gtttaagaagcacattgtgggagcaactaaatacccgctctctaagattaaggggttccaggtttttgatggggagagcatgaatgatgatgcttgcttggtctttgcatactacaaggatggtgctgctgatccaacattcttatacttcgcatatgccttaaaggaggttaagagctaattgacataatgtaccaagatatctactcttattctacctaggttcttatatttaagttttgtcctaagttacttaa

SEQ ID NO: 41097 - DNA, 447 bp, Glycine max
  Clone ID: LIB3093-049-Q1-K1-C10
gtaactcaagagttgctgttttttttcctcgtgacttctgatttgatttccaccttcactcaggttttaattgggaatctgatataggctttggaggttcttccacttccaaggatgctttcaattatacactacagaggatttttcagtgattgagtgagtggatatgaacatggaaggatcttatgattcatcatgcaatggagaagctggtaacgaaagccttcagatcattaaatactctccttataaaccctgcaccatgatatcattatcatcaccttggtttgttctaagagtgttttatgtgagagtgtgtggcattcaggttgatgaatccaccccagagtttctctctctcaaccatattcctcttagtcctgatacccttttagaggtgaatggtgttaggagcagcatttactctgatggagaagagtcttcagt

SEQ ID NO: 41098 - DNA, 416 bp, Glycine max
  Clone ID: LIB3093-049-Q1-K1-C11
gtgattcctatccttcttggctgcaaggataagaataatgcagaggacaattttataggcagtagagtagtagcggagctcaagaatttgttaaaagaatctaaatttagccatctaatggaggttgttttggaagtatctcctgaggccttattcaatgaattattcactaaagtattcaggaattccttgtttgagttatcatctcatcaacatggaaactttgttgttcaagcattaatttcttatgcaagcaatcaagatctgatggagttgatttgggaagaacttgggccaaatttggagggtcttttcaaaatgggaaggtcaggagttgttgcttcacttgttgctgccagtgaaaggcttcatattaatgaacacaagtgctgtcaagtccttgctgaagcagtgtg

SEQ ID NO: 41099 - DNA, 391 bp, Glycine max
  Clone ID: LIB3093-049-Q1-K1-C4
accacacgatcgattttattattgccgagcgttctcccgagtggcctcctttttcgctcatttctatggtcatggcgatcctgatggcaattgctctcggaatagacagcgccggatacagcatcccattacggatccgaaagcagcggcttgagtcggctctctagctggctatctcgctctctacggcgcgctcgacgacgatcacggcgaggatcaccgcggccacggccacggtcaccacggtcacgaccacggacccagagactgcccctgcgactaccattgcgatgaagctggtcatggaactctacggaagacccgatggcggcgctatagacgagcctgataagctacacaagtggctgaacaagttgatgatagagaccgt

SEQ ID NO: 41100 - DNA, 317 bp, Glycine max
  Clone ID: LIB3093-049-Q1-K1-C5
acgaaatgttatggaggacaactaccggtcctatttgcgctaagacactgagaagaacaccagggggagatatggtgccggtccaaattacgacgttgtcaacaagctatatgaagaatgcataaccaaagtttggccttagggttcacttgaagagcatgtgcattctctattgaataattgggagatggaaatgtttcacaatgtggacctgcatgatttcagagtaatatgatcctaagaaatacacttttagtctgaacgtgaggaatcctatgactttgtaagagttgattaaatttggttgtatggtatat

SEQ ID NO: 41101 - DNA, 360 bp, Glycine max
  Clone ID: LIB3093-049-Q1-K1-C8
ctcggcgtccatcggaaatttccaaggtaaaaagatgaatctgaagaacatgaagattccgaacgttccaggcggcggtgcgtcctctgcgctgctgaagcttgggcttcttggtggaattggtttatatgcagctgctaacagtctctacaacgttgaaggaggtcaccgagccattgttttcaaccgtctagttggtgtcaaagacaaggtctatcctgaaggaacacactttatgattccgtggtttgagaggcctgttatctatgatgtccgtgcacgaccccatctagttgagagtacatctggtagtcgtgatctacagatggtgaaaattggacttcgagttcttactttgcc

SEQ ID NO: 41102 - DNA, 428 bp, Glycine max
  Clone ID: LIB3093-049-Q1-K1-C9
cccacgcgtccgcccacgcgtccggctaatcatcgaagactacccttacgccaacgacggccgcgtcctctgggacgccctcaaaacctggttcaccgaatacgtgaacctctactacgccgacgatggttctatagtgtcggacactgagctccaagcctggtgggaagagatcagaaccgttggacacggggataaaaaagacgaaccttggtggcctgtcttaaaaacaaagttagatttgattgacattgtgacaacaattgcgtggacgacttccggccaccacgcggctgtgaacttcggacaattctcctttgcggggtatttcccaaacagacccaccattgcaagaaacaacatgcccttggaggacccttcggacgccgaatgggagctggtcttggagaagccggaagtgattatgc

SEQ ID NO: 41103 - DNA, 447 bp, Glycine max
  Clone ID: LIB3093-049-Q1-K1-D10
cccacgcgtccgcttctccgataatgatgaccgttccaaaaccgcattcgcctccgacgacggtcccgtggacttcaccgtccgttccatggcggcgcgtgtggccacaatcgacgacgcgctgctgctcaaaacctctcccttaagagaaggatggagcgactggttcgacaagaagagtgtgtttttaagaaaggatagaatgttcagatccaacttcgacgtgcttaaccctctcaacaaccccttgcttcaagatcccgacgccggcgccgccaccaccggactcaccaggggggacagaattgtccagaagtggtggatccatgagttcaagaaagttccattccctggtatcaagaagaaggctcctcttaatgtcaatgtcaacactctcaccaaagttggcatagaacgcagaactttgaatcataaccacaacaacaa

SEQ ID NO: 41104 - DNA, 429 bp, Glycine max
  Clone ID: LIB3093-049-Q1-K1-D11
ctttttctctctctacaccttcaaaaatcaaaagttccttgttgctcatcaaggggtgttatggtagatgatttgaaaagatagggtcaaatcaacagaagttcccctattttgatctgttcgcagttgggatggaattgcaggtgatttgagcctgacacagagctttcccgcttataagtagtagtgctagtgcagcagagacgatcatgaaccacgtgcacactctaatttccatcacacaggatcttttgtgtgaagaagactagaaaaccagcttcaattatcgagaattgtttgatgggttgatcaaaaatcgctctccaaaccagattcgtaacactgaaagtgtgaacaagtaacaaagcaagagaaaattatctccgatggcgacatattttcatagtaactccgaaattcaagccggcg

SEQ ID NO: 41105 - DNA, 447 bp, Glycine max
  Clone ID: LIB3093-049-Q1-K1-D12
cccacgcgtccggctaattaaggttcattgggcattggcggattctatttccttttctcaaagcccaatttgcttcttcttcatggaagcactctccttcatcatccccaaagactcttgttctcttctccttcgcactccttcttcatattcctcttcgtctgtcagaactccgccgccgccacttgctttcttcaaaaccacccaacactctcactcgcctcaccttctccgtcttcgcgtttttgccctccctaaccccgacgccgatgaacccaccaacgacttcgctttagcgtctcatcctcaggaaaatttaagccattctgagactgagagttccgaagatgatcaagatgctccaccacaaatggacatgtcgtggtcaacgatcacagccccagctggaagtggatccggtggtggcaccagggctggacttttcag

SEQ ID NO: 41106 - DNA, 441 bp, Glycine max
  Clone ID: LIB3093-049-Q1-K1-D5
cccacgcgtccgtggaactactgataggattatcatggtatctggcgcaataaatgaaatacagagggctgtagaacttatcctttctaagttgctcagtgagcttcatagtgaggatgacaatgatgctgagccaaagacaaaagtgagactcgttgttcctaatggttcatgtggtggaataattggcaagggaggtgctaccattaggtcattcattgaagactctcaggctggcataaagatatctcctcaagataataattactatggacagaatgataggctagtgacgctgacaggatcttttgatgaacagatgcgtgcaattgaattaattgtttcaaagttatctgaagatcctcattatgcacagtccatgaattctccattttcatattctggttatcaaggtgtttcatacacatatgtgctttcgtc

SEQ ID NO: 41107 - DNA, 386 bp, Glycine max
  Clone ID: LIB3093-049-Q1-K1-D6
cccacgcgtccggtacatatatggtggaaaccacaatggtcgttaccttaatgatctccatgttctagatttgagaagttggacttggtcgaagattgaagctgaggttgttgaatctactaactcatcctcaataacattcccttgtgctggacattccttgattccatgggaaaataagctcctatcaattgctggtcatacaaaagatcctaatgaatgtatacaagtgaaagtgtttgatctgccaaacgctacatggtcaactctgaagacttatgggaaacccccggtctcacgtggcggacaatcagttacctttgtgggtacaagcttagtaattttctggtggagaatatgcatagagaaactctattgaatgattt

SEQ ID NO: 41108 - DNA, 381 bp, Glycine max
  Clone ID: LIB3093-049-Q1-K1-D7
ctttgattgagccagacagagataaaaaatcttgttgcccaagtgagggaaaaagggttgccttggacacttctcaccttgttctctgggttatgttaatttgaaagaagctacttggcatcaagaatgggtccaggtgattggtttaagacaataattagctcaagaaaatcaaaagatggcacatcaaagaaagtaatgactaagatttatacacgaaaaaagtccaatggtttagcaaatggaatcaaaagcaaaaatctatagtcagatggggtattagttgaaactattgctgtaacaaggatccaaacagcattccgagcttatatggctataatatatttacactgctttgtatggttcactaaaattgaagat

SEQ ID NO: 41109 - DNA, 420 bp, Glycine max
  Clone ID: LIB3093-049-Q1-K1-D9
atctcaccaaattttgctgagactaattagtaaaatagaggcaaaaaatggaatctaaagaggccatctttgtgaagcttttgctgattctgcatttgtccgttctctgtgtttcacaggattttgatttctactactttgttcagcagtggccaggatcatattgtgacacgacacagaacagctgttgctaccctacaactggaaaacccgctgcagattttggcattcatgggctttggcctaattacaaagatggttcatacccatctaactgtgattcaaacaatcgttttcagccatctcagatatcagacctcactagtagcttgcagaggaactggcccacactagcatgcccaagtgggaatggggttcaattctggacccacgaatgggagaaacactgcacttgtttta

SEQ ID NO: 41110 - DNA, 451 bp, Glycine max
  Clone ID: LIB3093-049-Q1-K1-E10
cagcaatcaaatctgtaacctttcagaactcaaaaccccctttcaaatttcatcatgtccgggtatcccaaccagcctcccagctacagctacggcgcgccgccgccgccccaaccctacggtgcccatccgccatcgcaatcatacggggctcctccgccatcgcaatcatacggggctcctccgccaccgcaaccctacggcgcgccgccgcccgctcagccctactccgcctccccctacgcccaaccgtccgccccctacgccgccccctacaacaaacccccgaagaacgagtcccactcccacggcggcggaagcagcggcggctacccggctccggcgtacgcgagcccgttcgcgtcgctggtgccatcggcgttccctccagggacagaccctaacgtggtggcgtgcttccagatggcggaccaggacggaagcggattta

SEQ ID NO: 41111 - DNA, 414 bp, Glycine max
  Clone ID: LIB3093-049-Q1-K1-E11
ggaaaagaggagaatgtgaagaaggctcaggaagcccttttggtaagagccaaggccaactcggaggcaactctgggaacctacaagggtaactcaaagcttgctgatggtgcctcagagagcctccatgttgaggactacaagtactgatcaatctaagtgcgggtaggaatcggtattttatgggtacaaccgaattttcttgttaatgagtattgtgcttcgactcttcccagaataataatcgtttggaattttgctttttgtttttcctagtgttccttcatatcaattttagtaattcggtgtattggtcaaacctgtgcaaacaggggaggggatgtaactttgttttcttgatagacaccaccaccttgctgttaacgaggctttgtgtttattttgcaattatct

SEQ ID NO: 41112 - DNA, 448 bp, Glycine max
  Clone ID: LIB3093-049-Q1-K1-E12
gcggtgagtgatgttgaacctcagatggatgatgagattgaagatgctccagatggacaattgtgtgttatatgtctaatgaggagaaggcgttctgtcttcattccctgtgggcatcttgtgtgttgccaagggtgtgccatatcagttgaacgtgaagtggcacccaaatgtcccgtttgtcgtcaggagatccgagattcagtgcggatttatgaatcttgaacagacaggctgattgttctgttctctctgcggcagaatcttttatgctttgctaatgagaagaatgttgtttgctttttatttcgataagatatggaatgtggagttgtagggaaaacttgcctttgctcttatttcctgtgaacattcatctggggtagataataggttgtcgaggttaattcgaagccttctcacttctcactctgccaggtcttttggg

SEQ ID NO: 41113 - DNA, 319 bp, Glycine max
  Clone ID: LIB3093-049-Q1-K1-E3
cacaagcataagcacaagcacaagcacaagcacttctctaattccctttcacactctattacagatttcacaagtgcttacacttcaaatggctttggaagctcttcaatcacccaccacagccactccatcgtttagtccctttgaagaaaccagtctcagttacttagagacaccgtggacgaaaggaaagcgttctaagcgtagccgcacggagcaacaactgcaacacccttcatgcaccgaggaagagtacctcgctctttgtctcatcatgctcgctcgcggctgctcctgcatgtgtcttcaccgtcaaatc

SEQ ID NO: 41114 - DNA, 432 bp, Glycine max
  Clone ID: LIB3093-049-Q1-K1-E4
gaaaaatttcgcgccccagaaaccctagaggaaccctgattcaatcgattcgctgttgccttcgaatttcgttccttggaagattagggagcaatggcaattgcagccccagggcatctgaacgtgaatgaatcacccatttggggatctagaagtgttgattgcttcgagaaattggagcaaattggcgagggcacatatggtcaggtttacatggctaaagagatcaaaactggtgaaattgttgctctgaagaaaatacgaatggacaatgagagagaggggtttcctataactgccatacgagaaatcaaaattctaaagaaactacaccatgaaaatgtgatcaagctgaaggaaattgtgactgatacaggtcctgagaaagatgaacaggggaagccagatggtaacaaatataaaagtggcatc

SEQ ID NO: 41115 - DNA, 390 bp, Glycine max
  Clone ID: LIB3093-049-Q1-K1-E9
caaatattatccattacatttacatctgataatttcctcacaaaaatggacggacagagtttgtactcactagtgtttcttgtgcttgctctggccattgtgaacacagtgcatgggcaagggacgcgtgtaggggtctattcgagcacatgcccacgggctgagttcattgttaggtccacaggtcaatcccacgttaggtctgatcctaccttgggtgctgggacgcttccgatgcacttacatgattgctatgtgcaaggttgcgatgcttattgtctcattgtcggtgatggaactgatagaacagcatttgcaaaccttgctttacgaggatttgatgttactgataatgcatagacacagctagaggcttcgtgcccacgaggt

SEQ ID NO: 41116 - DNA, 181 bp, Glycine max
  Clone ID: LIB3093-049-Q1-K1-F1
gatagagtgtgaagactcctactaaccattactggctgcagcctatatataaagtaatgcgaggcattgcctatagcatacatgatatgtacagggtcaatggctcgacgtctataagaattacatggacaagacaatactcacgcgatgtaacaccatatatctaaacagcatctgtaat

SEQ ID NO: 41117 - DNA, 402 bp, Glycine max
  Clone ID: LIB3093-049-Q1-K1-F10
gcttttgcttggagttcgactcgatgcagggacggttttcaccaccacaactgtgtttaagagcctgcaggaacctattaggaccttccctcagagtatgatatctctttcacaagcgctggtgtcacttgggaggttggataggtacatgtctagcagggaattgatggatgattcggttgagagagaagaagggtgtggtggacacactgctgtggaggtcaaggatggaacctttagctgggatgatgatggccaacttaaagacttgaaaaatattaacttgaagattaataagggggagcttacagcaattggtgggactgtacgctcatggaagtcttctctccttgcttcaattcttggcaagatgcacaaaattttctgggaaggttcaaggtt

SEQ ID NO: 41118 - DNA, 407 bp, Glycine max
  Clone ID: LIB3093-049-Q1-K1-F11
cccacgcgtccgatcatcatcccccctttagccaaggtgtcattgagcaagatatacaagatggagttaaaccattaaagaaggaggaaattcatcagggaagttgtgtagagagtacttttaagaccgaggtagcctcacaaaacagtagtcagaaacctctttcacatactaagacgggacatgtttcagttaataatagttctgactgttgtgagaaagttgaagctgatgtgaagtctgaaattttcgaatgggataataaatttgggaattattctaatagattagtagaaacacgtgaaaattttaggaagtctagtgatggtaaaataaagaatgggtttaaacgggaacaggatgctggaagttcatgcattcgaggatcaaatttaactgataagtgt

SEQ ID NO: 41119 - DNA, 445 bp, Glycine max
  Clone ID: LIB3093-049-Q1-K1-F12
cacagagcgagcgaaagtagaatctgaaaaacaatggcggcgaagctagacacccacgccgtggcttccgatctgatcgacttcctcaacgcttctccaacggctttccacgccgtcgacgaggcaaagaggcgtttgcgtagcgcggggtaccaccaactctctgagagggaagtgtgggaactgcaaccgggcaacaagtacttcttcaccagaaatcactccaccatcgtcgccttcgccatcggcaaaaagtacgttgctggaaatggattctacataattggggctcacacggatagtccttgtctcaaactcaagcctgtcaccaaggttgttaaggctgggattttggaggttggtgtccaaacctatggaggtggtctgtggcacacgtggtttgatcgagacttgactgtggcggggagggtcattgtgcgggaag

SEQ ID NO: 41120 - DNA, 434 bp, Glycine max
  unsure (1)..(434): unsure at all n locations
  Clone ID: LIB3093-049-Q1-K1-F2
ccaagccccactcaaccaccacaccactctctctgctcttcttctacctttcaagtttttaaagtattaagatggcagagacattcctatttacctcagagtcagtgaacgagggacaccctgacaagctctgcgaccaaatctccgatgctgtcctcgacgcttgccttgaacaggacccagacagcaaggttgcctgcgaaacatgcaccaagaccaacttggtcatggtcttcggagagatcaccaccaaggccaacgttgactacgagaagatcgtgcgtgacacctgcaggaacatcggcttcgtctcaaacgatgtgggacttgatgctgacaactgcaaggtccttgtaaacattgagcagcagagccctgatattgcccagggtgtgcacggncaccttaccaaaagacccgaggaaatcggtgct

SEQ ID NO: 41121 - DNA, 431 bp, Glycine max
  Clone ID: LIB3093-049-Q1-K1-F3
cattactccagtatgctgctacagcatcctttctcagtaaattgtacagtgattaccttgatcatctcaaaatgtctggtgcaagttgcaagactgatgcattctcggtggaaatgcttcacgattttgctacttctcaggttagctacatcttggggcaaaaccctatgaaaatgagttatttggtgggctatggtgacaggtttcctctccaggttcatcacagaagtgcatcaatcccttggaataaccaaccctaccgttgtgaagatggtaagaaatggctaaactctaaagatccaaatccacaggttcttttgggagccatggtgggaggaccagacactaatgacaatttcgtggatcataggaccaaccaaaagttcactgagccaaacataacaagcaatgctggcttaattgcaacactt

SEQ ID NO: 41122 - DNA, 51 bp, Glycine max
  Clone ID: LIB3093-049-Q1-K1-F4
gagagctgctgcttccgtctgctctcaaaaattagatctagagcatggttc

SEQ ID NO: 41123 - DNA, 416 bp, Glycine max
  Clone ID: LIB3093-049-Q1-K1-F5
cccacgcgtccgcccacgcgtccgcttaacttcgtattgtgtcttgagatttttttccttgcacagttgggccctttgtcttccgtgatggccaggtgaagtcttttaaggaaaaggatgaagtggatgcgtggcttttcagcaaccctatgcggcgccttgaagcgcttcattttcggagagaaactacattgttataagctacgatcttcataccaattccaccagtcttcagcagcgatggaagtacgaggatcccacggatttgtttcatcttcctcttcagcttgctgccgatagggaaattgtcagataccttattggtggtgtgaaaatttttaaaattaactcgttatattctgccataattgaattgtatttgtgtttaagagtttggaattgggtgtttctgaggg

SEQ ID NO: 41124 - DNA, 286 bp, Glycine max
  Clone ID: LIB3093-049-Q1-K1-F8
ctacgttttgctctacgcctctccctctctctcaaaaatctttctcttcgattttagggttttgttttgctgctgcctccgttccccccttctcataaacaacgcgttttctcttctgcttcgtatctattctttgcttttggttttggttgattcaaggccttcacagcattcgttgcggcattttaatcgatttatccaagcaggactgaatgaactaatggagtctaaaggtgggaaaaagaagtctagtagtagtagtagttaattattgttctacgaagct

SEQ ID NO: 41125 - DNA, 445 bp, Glycine max
  Clone ID: LIB3093-049-Q1-K1-F9
cacagatctccccccgattgaaaagaaaagaacttcgatcatatattcctcaggtgactccgacctatgactatatatgacatataatggaccatgcatctctgaggaaagaattgagctgggaatcaagcagcaaaaacggtccccaattcggatatattaacaaccaccacccttcaaaacaaaatttcaccctttcgttttccttatcccatacccctcaaaagaaaaagctggcgattcttcaattctcctcttggttcgtgtcctttactacttcgaatcctcacaacactctctgtagtacacactactaacccaaaagtcactcacctctagaaaaccttaaatctcaaaacccatcaagattttatcacaaagactcaaaactttcacaaaattaaagagacccaattggtttttttctttttaaactgaagtattt

SEQ ID NO: 41126 - DNA, 337 bp, Glycine max
  Clone ID: LIB3093-049-Q1-K1-G10
attgccggttcggacgacgcgtacggaagacccctttttctggttattaacagagtcataaaaaaccaaagttctctatgggctgtagctcacatggtgggctaagaatatctgactttggggtggaaagtatggttggcaatgagagtttgagaactgatgtcttgaacttgagctttgagaagcttatgatggttgaatgtggtggaaatagtgggaaaggagtgaacattaaagctggtgtgatcactgagtgtaaggatattccagttgagcttttgatgcaaattttgccacttgtggatgatcaaatggttatcatatcttttgaagtgtg

SEQ ID NO: 41127 - DNA, 446 bp, Glycine max
  Clone ID: LIB3093-049-Q1-K1-G11
tggagtcccagacttccacacgagagaaggagtctctcaatctcagggaagtcccagaagcagataaaaccttgggcttggacatggccaagggcagcgcattctgcaagatgggtgaaggttggacatgcatcataactaaaactgaggggcctgatgctggcaaagttttcgttaaatgtggtgaaaattgcacctgtaccattgagggcgaagcagtgtcccaagaattgaatttgccacctgatgttgtgagcagcagtggcagtggagcattctgcaagtgtggtgaagggtggagttgtgtcattttcaggactgaaggccctgatgcaagctctggcaagggctttgctgaatgcgctggacagtgttcttgtactattgatgacaaatccacctaagataaacgatgagtgcatctatgatataatctgatggttatt

SEQ ID NO: 41128 - DNA, 443 bp, Glycine max
  Clone ID: LIB3093-049-Q1-K1-G12
aaaaaaagagagccaaaccaaacctttcccgaaacggttcgttttgcccttcttcggaacccggccttctgcgccgctgctgctgctccggtcgccgtcggcgactctccggtaaccgaagaccactgccgatccgtcagaaacctcggatctcggatctgaacgagcgaaacgatgccgtctcacgcggatctggaccggcagatcgagcatctgatggagtgcaagcctctgccggaggccgaggtgaaggcgctgtgcgatcaggcgagggcgattctcgtcgaagagtggaacgttcagccggtgaagtgccccgtcaccgtctgcggcgacattcacggccagttctacgatctcatcgagctctttcggataggaggaaacgctcccgatactaattacctgtttatgggcgattatgtagatcgtgggtactattc

SEQ ID NO: 41129 - DNA, 392 bp, Glycine max
  Clone ID: LIB3093-049-Q1-K1-G2
cccacgcgtccggttgaattttaaccaagtgatgcaacaaggtgaggttacaacgcaaggaggtactttggtttcagggtataacaggggtgatccagatttgagagaaatggtttccgctttgacacatgtggtggtgtcttcagggtcaggccagaggagcaccgaatggatccagcaaagtggttttcctatgatgtctgcatcttctctttcatgtttgtcttctttctcttctccttcttcttctggagcctcttgggttggccacaaaagaggcagagaagaagaagagagtagctcttcccataacatgatccaacaacaacaacaaagtgctccaagactcttcagaaacattggtgactttatggtgccttcttaaggagact

SEQ ID NO: 41130 - DNA, 164 bp, Glycine max
  Clone ID: LIB3093-049-Q1-K1-G4
cccacgcgttcgaccacgcgttcgaaaaacttttgaaagatattatccaattgaaatttggaaaatgactgggataaacttaagaatttaattattgtaatttaatttgtaaactattaaattcgattggtcgtatggacttaataaatttgggtactatgttt

SEQ ID NO: 41131 - DNA, 57 bp, Glycine max
  Clone ID: LIB3093-049-Q1-K1-G7
cttcaattgctgaaattatggatagtctcacttttatatacttcatcatcccttatc

SEQ ID NO: 41132 - DNA, 101 bp, Glycine max
  Clone ID: LIB3093-049-Q1-K1-G8
gcgtgtatgaggaatcaccattgatatagctttgaggaagcttgaaacaacaaagtattatggcacaggtattgatgcgccatggacatactggattttca

SEQ ID NO: 41133 - DNA, 222 bp, Glycine max
  Clone ID: LIB3093-049-Q1-K1-G9
tcgtccacgcttacgtaaaaatacagcctcaaagaatgagtagatgaacgacgttatgggtaactggggttgttgttgatacaggtcaatcttatctgtcacaatccattctggcgccctcaaaacaccctctaacttaacaaccaatatataaagaaaatgattaaaacttgatcactctttctcttgccagtatcagatcttttttagatatgattttaa

SEQ ID NO: 41134 - DNA, 433 bp, Glycine max
  Clone ID: LIB3093-049-Q1-K1-H10
ctttcctcaaccttctttcttcttatatatcgaacatggctaagtatcattcaagtgggaaaagctcttccatgactgctatagccttcctgtttatccttctaatcacttatacaggcacaacagatgcacaatccggggtatgttatggaagacttggcaacaacttaccaacccctcaagaagttgtggccctctacaatcaagccaacattcgcaggatgcgaatctacggtccaagcccagaagtcctcgaagcactaagaggttccaacattgagcttttgctagacattccaaatgacaacctcagaaacctagcatctagccaagacaatgcatacaaatgggtgcaagacaacatcaaaaactatgccaacaatgtcagattcaaatacgtttcagtgggaaaatgaagtgaaaccccgaacac

SEQ ID NO: 41135 - DNA, 274 bp, Glycine max
  Clone ID: LIB3093-049-Q1-K1-H11
cccacgcgtccgtcaattctgaacaaagagattctagcgccaatcatggaccacgctacaatggagcattgacactccataggctcaatccaaaccacttgcacactgccagcaggtttgaatcagtacaggcactcatactaggacgtagccattcaagcacagctgacaaggaccctaacaagacatagagaccttctagccctttctacatttacatggccgcaattatatagcatatctggcaagagcatcctaacaacaaattcctccc

SEQ ID NO: 41136 - DNA, 252 bp, Glycine max
  Clone ID: LIB3093-049-Q1-K1-H12
gtcaagcgcaaggcgatccacattttatagtttcacaggtgaattaccatgccttctatccggtgcatctcccaccatgatggcgccatcacttccaacctcagtactactaatgccttcccttcacttgccgtatctgcctcaaactcggccacaccgcttttctgcacgctaataacagttgcgtgcaacactctgacctctcaaataatcgttccctctaatggcttctaatgcacaagccgattctta

SEQ ID NO: 41137 - DNA, 432 bp, Glycine max
  Clone ID: LIB3093-049-Q1-K1-H2
ggtagagagaacaaaagggcaaggaagaaaacaagaaaaaggagaagagaagagactagatggctggctcagctattggtttcgaaggctatgaaaaaagacttgagatatcattttttgaacatggtgtgtttgctgaccctgaaggaataggcctccgagcattgtccaaagaccaattggacgagattcttaaaccagcagagtgcagtattgttgcatcactttcaaacgattatgttgactcttatgttctgtcagagtcaagcctgttcatctatccttataaaattatcatcaaaacttgtgggactaccaaattgcttctgtccatccctgtcatcctcaagttggctgatgctcttgacattgctgtgaaatctgtgaggtacactcgtggaagtttcatttttcctggggcacagtcttttc

SEQ ID NO: 41138 - DNA, 152 bp, Glycine max
  Clone ID: LIB3093-049-Q1-K1-H3
catttacatcgaaagacacaggatactatcattgaacagcttcaattcctattcctgatagcttgcggggctcacgattgatgtcttgttcattactgtctcactttttcatctaaaccagacattgacttatatggtatctttcccaaatt

SEQ ID NO: 41139 - DNA, 425 bp, Glycine max
  Clone ID: LIB3093-049-Q1-K1-H4
aaactgagcttagtcagtcagatatgtttgatcctcgtcttcaggcaaaaatactgaatgttgttgacgtctcctatggaggtgagaatgggtttaatcaggctattgaactatctgctgaaattctgtccaatgtgaagtttatccaggaaaagcgactgattggaaaatactttgaggaaatcagccaggatactggaaagtatgtttttggagttgatgatactctaaaagctttggagatgggagctgtcgagacacttattgtctgggaaaatctggatatgaataggtatgtcttataaaatagtgctactggtgaggctgtcattaagcacttctacaaggaacaggattcccaccaaagcaattttctgtatcctgagagcaatgctgattttgagggtcatgagaagttgtctttg

SEQ ID NO: 41140 - DNA, 218 bp, Glycine max
  Clone ID: LIB3093-049-Q1-K1-H5
cctaaacgtccgaacttatggctgtaacctattcacgtacagactcgcaaaggcattcaaggcgaaaaaaagattcggggaggcgaaaataatcgaaaatccattgatacccgatataggtcaaaacatactaactgcatgctgaatccattaggctctcaatgatacaactctgttgaacttgaatacatcttaatagccatattgataataataaa

SEQ ID NO: 41141 - DNA, 288 bp, Glycine max
  Clone ID: LIB3093-049-Q1-K1-H6
cggacgcgtgggcggacgcgtgggcggacgcgtgggcagccgcgttgactccaacatatgggctggtgcgggaccatcataacttggtgctgagagcagttgtcaggcttcaccagctccgataattccccggcgggggagctatcgaaaattcaagtctggtgaccaccgtaggcggtgagcaaagccttgtgtttggactagaacatggtgatggcgttttggaaggagcatctcaaggcagaccaccagtggatcaatcacagatgggtatcccccaattaaaga

SEQ ID NO: 41142 - DNA, 397 bp, Glycine max
  Clone ID: LIB3093-049-Q1-K1-H7
tgtttccccttttgttttctcaagagttgtctgtgagaacaatctccaagctgttcaggaactgtttttggattggttttctgtgtcaaattcccataggaatgtctttggtgaggaagagtctgacttcaagagtggagaatgttgaggacagccatgacatgtcagtgttggacttgcctgagttggccttggattgcattcttgagaggcttcccccctctgcactgtgtcgaatggccgctgtatgccggtccttgatggagaggtgtgtgagtgatcacctttgggagaggcacatgaagcagaaatggggtagagttattggccctgcttcttataaggagtggaaatggcattttgcttccaaaatgaatgttgggggtcttaagcatgg

SEQ ID NO: 41143 - DNA, 292 bp, Glycine max
  Clone ID: LIB3093-049-Q1-K1-H9
catttccataatcactttttcctactttcttctccatccatcccttgactaattagttatccgtcacaactaccaatggccgaagagaaacaccacaagcaccgcctcttccaccaccacaaggacgaggataataagccagtagaaaccgatactggttacgacaacacattatattccaagccttctgatgactatgactctgggttcaacaagccatcgtatgagtcctctggcggtggctatgaaggtgggtacaacaaaacattttattctagtgatgagccagctt

SEQ ID NO: 41144 - DNA, 147 bp, Glycine max
  Clone ID: LIB3093-050-Q1-K1-A1
accacgcttccgataatttctaaactgtttgtcacacttacatgaaataacttaattacaggccctaccaagtctttaatcctttctttacatgtctcaatgcctactgtcaacctatgccaaatatctgcacattctccccctaac

SEQ ID NO: 41145 - DNA, 359 bp, Glycine max
  Clone ID: LIB3093-050-Q1-K1-A11
tcgcccacgcgtccgatcctagatgctaccaacaaatttgatgagaagctacttcttggtgtcgggggttttggaagggtttacaaggggacccttggagaatggacccatgggggttgtaaaaagggtaacccgagatccgagcaagggcttgctgaatttcggacagaaattggaatggtatctaagcttcgccaccgtcatcttgtgtccctcattggttattgtgatgagaggtcagaaatgattcttgtgtatgaatacatggctaatggacccctccggagtcatttgtatggtacagacctgccgcctctgtcatggaagcagcggcttgagatttgcattggagcagcaag

SEQ ID NO: 41146 - DNA, 312 bp, Glycine max
  Clone ID: LIB3093-050-Q1-K1-A12
aattcccgaatcagaaatgactcaagcccagattcaaccagttaaacttggaacccaaggctttgaggtttcaaaattgggattcttatggatagtcgggactggagcgtacaatgaccctttccatgaacatgatggcatatctgatatcaagtatgcgttcagtaagggaatcacattttaagatactgcggatgtttatggagccaatgctaattgacttttggtcggaaaggctttgaagcagcttcccatagaaaagattcagatagtcacaaaattatgtattgcttcactagtgtttcctgatat

SEQ ID NO: 41147 - DNA, 160 bp, Glycine max
  Clone ID: LIB3093-050-Q1-K1-A2
aaattttccggaaaaaatttgaatctatttttatatgcgaatcaatcctactacttctgggccttaatattgggcatgttcaaaataataatattataattaaaataaaataatatatttatataatttaaaaaaattatttaaaataatataaaatata

SEQ ID NO: 41148 - DNA, 323 bp, Glycine max
  Clone ID: LIB3093-050-Q1-K1-A4
cttctcaccccagtttcactttctcattattttctctcctattgataaagaaacagagagagagagaaaaaaatgcctgcggtaggaggtattagcaacggagggggcaaggagtaccctggaagcctcactccttttgtgacggtaacatgtatagttgcagccatgggtgggttaatcttcggttacgatatcggaatttcaggtactaacatttacacacatgtgtatacgtatgttagtgttttattttgatttaacctatgatcttatgtttttaatgtgtgtgggggttatgatcaggtggggtgacatccatggat

SEQ ID NO: 41149 - DNA, 203 bp, Glycine max
  Clone ID: LIB3093-050-Q1-K1-A5
acgacatctcgtgaacacactcatacaaccacccaacacgacatactcccataatccaacatgggcgacatcacattctagggcacatacacacgtctaccaaactagcttccaactatttcttcaaaactcaccttcctacatgtatcagacacacaaaccatacactttctacccgacgccaccttctgtatcatcccttc

SEQ ID NO: 41150 - DNA, 429 bp, Glycine max
  Clone ID: LIB3093-050-Q1-K1-A8
cccacgcgtccgaaactctaagcgtatctgctagtacaactacaaatacaaattacaaaacctaagcaaaagcaactttacttagcatagttttcaagttattccatgcttcatctcataaccccgaggcagattattattatcactatataataatacgagagggaaaaaaaatcgaagaggcttgctctgatttcagcgtctacagttttgggcagagaacattaatttttttatattttattttttactttttcctttttctggatttttctgactttctccgtcctcaaattttaaaaacgaagacggagaatcgagaaaggtgattgcgcagaacttagaagtttaattgctttttacacagtttttgtcttctgagttctcaagaatcggtaatggaatagacgaacaagtgagagtgtgagt

SEQ ID NO: 41151 - DNA, 308 bp, Glycine max
  Clone ID: LIB3093-050-Q1-K1-A9
aaccaggaagagccacgcggacgaaaacggccaaagcaaccaaaaactaagagaagaacacaggggccaagaaacccgcacaagggagaaggacaaggcaagcagaaccagaagaaggagctgaagcacaaaccacagccaaacaggagggatacaggcatcaagacagcgctagagcgaataagaaccaagcagagaaaggaacggcacgtaagaagctttttgatgatggtgtggtgaagcgtgaggacttatggatcactaacaaactctggatgtcaaatcatgcaccagaagatgtgccaaaa

SEQ ID NO: 41152 - DNA, 315 bp, Glycine max
  Clone ID: LIB3093-050-Q1-K1-B10
gagaaaatcagcttcagacagcaagtgatcatttggtgggctggccttatgagaggtgctgtgtcaatcgcacttgcatataatcagttcaccatgtcggggcacacttcactgcgaagcaatgcaatcatgatcacaagcaccatcactgttgtgcttttcagcacagtggtgtttggtctgttgactaagccactcataaggcttttactgccccatactccacatcataaagaatcaagcatcacgataatcacagatccatctactccaagtccaaaatcagtcactatcccacttcttgggagtgcccaa

SEQ ID NO: 41153 - DNA, 377 bp, Glycine max
  Clone ID: LIB3093-050-Q1-K1-B11
ctcaccactttgggcctctccatgatgggcttcgggcccgtttggtccaaaagaaaacacgaggccgttccgtcgaagactctgaacggcaataacggctccgaagactcgtaatcgaaattctccgatgtgggcctcgagaatttgcctttgccctgcgtcttgaggttcttcgtggagaacaaattcgggtacgcggtggagagaagcgccgcggcttcgttgtaggtttggttgggtcgcttccgcggtgttctgggtttcttagttgagattgctagcggcgaattgctcgattcggagattgttgaggaaggtgaagaagatgtgtgcgatgtgaaagtagatgaagatggagatttaacgaattcgaaatc

SEQ ID NO: 41154 - DNA, 310 bp, Glycine max
  Clone ID: LIB3093-050-Q1-K1-B12
cttgattggagagaaaataaaagagaaagagagagaaaaattgtcttcttgaaacaaaagttcaaaattttcctttctttcattttctctttaattcaactttcaaatttttatcttttctcttattttctttccaccttaacaaatggatcctttattacttccttcaattttcttttaccataccaaaccttccaattaggtcctttcattcctattttaattggccttaggaaactgctttttgtaaaagaggaaaaaggggaatttggaatttgagatttgaaaacttaccccttgaagaaattaa

SEQ ID NO: 41155 - DNA, 155 bp, Glycine max
  Clone ID: LIB3093-050-Q1-K1-B2
cgcgctcccatctattccaattccatgactacaccaccgacttcttcctaatcttcacactggcaatcctccgggtgccaccctccctcctcctcctacttccccgattcctttcacctttatcaacccgcaaccactcactacgctttgcccta

SEQ ID NO: 41156 - DNA, 251 bp, Glycine max
  Clone ID: LIB3093-050-Q1-K1-B3
cccacgcgtccgcccacgcgttcgaatgctaccagtgttaagaagaccaggaatagaagaggccttcatgagctcccagagccgcttaatgggtctagtctgaacataactgaagaacaagtgaaaaatttgcagaaagaccacttccatggtaacaagtcttctatggtggtttcagtccttgttgatcccagataggctggtgatggtgatgttgatgtcgatggcatgattaggccaaagtcactctc

SEQ ID NO: 41157 - DNA, 246 bp, Glycine max
  Clone ID: LIB3093-050-Q1-K1-B4
gacaagcgcgagcgcatgcgtgcgcacacgcgtgcacactaggagagccagttctgattcgcgatagtagcggagtgcaagcgcagtcatgtgtgtcatgtcaggcctgctaacacacatgtagacgtgtacaagctagggctttaatcaccattcacttaagctaaattgaatgcatattcaacgatgtatcctgatcgaggtaatgcagtatctcgcacattacctaatactggataacctcta

SEQ ID NO: 41158 - DNA, 371 bp, Glycine max
  Clone ID: LIB3093-050-Q1-K1-B6
gcgtcatctccgattccccgacaatggccacccaaatgagcaagaagagaaagttcgtaggggatggagtgttcttcgctgaactgaacgaggttctgacaagggagttagccgaggacggatactccggcgtggaagttatggttacgccgatgctcaccgaaatcatcatcagagccaccagaacccaagccgttctcgttgagaagggaaggagaattagggaacttaccttggtggttcagaagaggttcaagtttcccgagaacagtgttgaacttcatgctgaaaaggtcaacaataggggtctttgcgctatagcacaagctgagtctctcacgtacaagcttcttggtggtctatctgtgctc

SEQ ID NO: 41159 - DNA, 136 bp, Glycine max
  Clone ID: LIB3093-050-Q1-K1-B7
ctcacgcgtccgcatattacatgacacacacttctcttcatccttgtcactaaggccagagggacaagacaattgcgttcacacaaactacgcgtacttattgacaaagatgcactacgttacatgccacacggtc

SEQ ID NO: 41160 - DNA, 435 bp, Glycine max
  Clone ID: LIB3093-050-Q1-K1-B8
ataatctcatcattggtccaacatagcccagcctaaaatttaagtagcagaagctagcactagctagttaggtttaatttctgtcttgtaattgagacaatttatgaaataaccgcacaattgattcatgatgaagaagagagtagcaagcaccagcaatgagtcctctaaacttgatcgcaaaaccattgaaaggaaccgcagaactcacatgaaatccctctgccatcagctttcttctcttattcctcccaatctcaaaccagtcaaacccaagttgatgctagggctgcaggaccagctggatcttgcagcaaggtatataagacaaatgacagagagagtagagaaactgaagaggcagaaggagcaagccatgtcaaaccaaagcaatgatggtagaaaaatgttcaacaataatgttgagtccaaatt

SEQ ID NO: 41161 - DNA, 273 bp, Glycine max
  Clone ID: LIB3093-050-Q1-K1-B9
taattccctgatcggccgactcgtacgaaaaggataaccttcttttctctctatgtggttgttattcttatttcatacctaaaaaccatgagcaccttttctgctttgtagaattacattatcgtatcaagaaaactctttaactacacgaaaatggtgtctgctaacaaagttattgtcgtgtactgcttctacacccttcttgctcactacaacatcacagattctcctttcactgccttctatcatgctcaacatttattgtttgttaca

SEQ ID NO: 41162 - DNA, 435 bp, Glycine max
  Clone ID: LIB3093-050-Q1-K1-C10
aaagagcccagcatagccagaatatgaaacctcacgtttctggtgaaagctctaatttggccgaggagtctagcagatccgtcggagagaagctccaccaggtttgtaaggctgccatggtggcaatcatcaccgatggatccaaccaacctagcagtagtagtaggcttctcaccaatcaaaggttgagcctccaatcagaagacccaattagaaccttaatgttcttggtctcttggagtcacacatagctaattaaatacactcaaaatcgtgaaggaatagatcgattgaaccaaactcttctaagtttggagaaaattgaataaaactatatgggtgggccaaaattcattcatatatgttgtcacatatctatataatattactatgtcaatatatacaatgcaaggagtggcgtaaaaaatcttataa

SEQ ID NO: 41163 - DNA, 338 bp, Glycine max
  Clone ID: LIB3093-050-Q1-K1-C11
atccacacaacaacactccttaaaccctaaccaaccatggcttcttccaccttcaccgcaatggccgcttgcaagctttcctcctccgccgccatctcctccttccccacccaccgccgcaccaacgccgtccttctgtccagacgcagccgcgccgccagggtctccgccatggccaaggagttgcacttcaacaaagacggcaccgcaattaggaagctccagagcggtgtgaacaagctcgcggatctggttggggtcacgcttggtcccaagggaaggaatgttgttctcgaaagcaagtacggctcgccgaaaatcgttaacgacggtgtcac

SEQ ID NO: 41164 - DNA, 347 bp, Glycine max
  Clone ID: LIB3093-050-Q1-K1-C3
tcgaaagtattttggcctaatgtagaactcttgttcactgttgctccgacctcttatacctggggctattttctcaatcttcacaaagcatcaggccatcctgttcttgtctacatggcatctggaacgttcgcttacgacattgataaactatctgaataagcagctgcaaattttgtgatgcaccagctcaacaagatgtttccaaatgcttctaaaccagttcataatcttgtgtctcgatcgggaacagatccaaactctcttggatgttactcacatgatttatttcgaaaaccaactgatgtgtatgacaagctttcttcacccttggctaatcctattct

SEQ ID NO: 41165 - DNA, 197 bp, Glycine max
  Clone ID: LIB3093-050-Q1-K1-C5
gccacgcgtccggggtttgggtttctcttcctcccttggagaaaaagaagagccaccgctgcgacgccgttggtgcatttttgaggtgccgctgtcatgtttgggcgtggtggaccaaggaggagtgataactccaaatattatgatattcttgggatttccaaaaatgccagtgtagatgaaatcaagaaggccta

SEQ ID NO: 41166 - DNA, 378 bp, Glycine max
  Clone ID: LIB3093-050-Q1-K1-C6
ctcacgcgtacgtataggacaggcccaacacctgtctaaagccgcgtctgtcgcgtcctgacggtccaagacaagcccctatacccaacctaagagcaatgagtgtaaaacatgagtacgtggcacgcaacacgggctgaactaggtcttctcgcattatattcgggcaaggctgcttcatggtacataatacgcagggcattacagtatgggtccaaatatacgagtatcatgaaaacctgtactgctcataatgccgagctaacaaccagcttggcacgaagagtcttccggctttctaagtcactcaatgacctacatgctttgatcagtccaacgcctcagggcactaacttaccgctatctctgttggtaaag

SEQ ID NO: 41167 - DNA, 210 bp, Glycine max
  Clone ID: LIB3093-050-Q1-K1-C7
ataaaacgttccacgtccttttagctaccattcctaacaaactgctaaataaattcacatggggctcttaccatccaaccttaacataattaatatcataataatgtcaaatgcgctagctcttattcccccaactgaacccaactactaccgctagctctcaactacaactatcccaacacacatacaccataacagaggctttacttt

SEQ ID NO: 41168 - DNA, 273 bp, Glycine max
  Clone ID: LIB3093-050-Q1-K1-C8
gaaagacttacgaatgcgcaaaaactggagctgcttttgactgctggcattggttctgatggggtagatctcaaagctgcagctgctgctggtctaactgtggcaaaggtcacggcaagcaatgccacatcggctgctgtggatgaactcatgagaattcttattctaattaagaatttcttgcctgtgtgccatccagctcaatagggtgaatggaatgttactggcattgcacatagagcttatgatcatgacggcaagacaatcagaacc

SEQ ID NO: 41169 - DNA, 400 bp, Glycine max
  unsure (1)..(400): unsure at all n locations
  Clone ID: LIB3093-050-Q1-K1-C9
gaaatgatggagaggtggtgaatgattttgatgccaccaaacacatgtcctttggatccaacgagaacaattattttctcccttcaactttctctctttctcctcattctttcattcaccctccttatccttctttttttctttcctaacaacacttcaagagagagagaagacaagaaaaaagtgttgtagtcttgctttagtaacttgcatcaatgggagctggttgttctaaattgtgtctatgctggtgcccctccaactccaaacccaatcttcatgacttacctgataatgagaatgagaaggaggagtcttgngttggcttcaccgagttcaccttggatcaactgagaagtgccacatcgtcatttttacccgacaacatagtctcggaaca

SEQ ID NO: 41170 - DNA, 447 bp, Glycine max
  Clone ID: LIB3093-050-Q1-K1-D10
ggaaggatggacttcccttggtgggatcatgctcagcataactgggacagaagctctttttggtgacctagcccattttccagtctcagctgtacagcttgcatttactctagttgtgtttccttgccttcttttagcctattctggtcaagctgcttaccttatgaataacttgacccattcacaagatgctttttatcgttcaattccagatagaatatattggccagtatttattgttgcaacattggcagccgtagttgcaagccaggctacaataactgcaacttttttaattattaagcaagcccttgctcttggatctttccctagagttaaaattgtgtatacatcaaagaaatttcttggccagatatatgttccagatattaattggatccttatgattctttgcattgcttgtaccgctgggttcgaaaataaaac

SEQ ID NO: 41171 - DNA, 381 bp, Glycine max
  Clone ID: LIB3093-050-Q1-K1-D11
ggaggaatcaaatgttgatggcttttttgaagatgttttggtgaatggtaaaccatggactggtggagtcccggaggtgtttagtggttcacatgtgtatgtatgtgctcatggaagtcgtgacgtgagatgtggtgtttgtgggccagttctcatcaagaagctgcatgaggaaattgagcttcgaggtttgaaggatcagatatctgttactgcttgttctcatattggtgggcataagtatgctgggaatgtaatcatatacagcccaagagcagatggaaaaattatgggtcactggtatggctatgttactcctaatgatgttcctgatttgttggaccaacatattgcaaagggagaggtcatccaacgactttt

SEQ ID NO: 41172 - DNA, 474 bp, Glycine max
  unsure (1)..(474): unsure at all n locations
  Clone ID: LIB3093-050-Q1-K1-D12
cggatagtgagggagctttcaaaggagctactatctttggacttggaggcaattagtagtggggtgacagatgttgacatggagaaagaggccaagccaagtttttacttaaaacacatcttacctattataattaaaaatcaagttgttcactttgttggatttggtaatcgcctggcatttgatccaatagcatttgaactgcagccttactatgctcttnctaattggggaacttcatatagagacttcgttgcagatgtaattttcatgccctgcaatntgttcccagaatacaagaaaccggtgctttgcttcttaaaagattgcgtgaacattcaagtcttgttggaccattggatcgttatcttgttggtccatttgccgaattaatgaaagagaaaagtgaaagtaatgccaagaaagcatccaagtatctagctttgcatctcagatttgaaattgacatgatag

SEQ ID NO: 41173 - DNA, 410 bp, Glycine max
  Clone ID: LIB3093-050-Q1-K1-D3
acatcttgttcaggaattcacgaggaagaacaagaaggatattagtggaaatgccagagcgctgaggaggttgagaacagcatgtgagcgggcaaagaggactctctcttccactgctcaaaccaccatagagattgattccttgtacgagggtattgacttctacacaaccattacccgtgcccgttttgaagagctaaacatggatttattcaggaagtgcatggagcccgtggagaagtgtttgcgggatgccaagatggataagagtaccgtccatgatgttgttcttgttggtggttctactaggattcccaaggttcaacagttgttgcaggacttcttcaacggaaaggaactttgcaagagtattaacccaaatgaagctggtgcttatggtgctgcagtgc

SEQ ID NO: 41174 - DNA, 318 bp, Glycine max
  Clone ID: LIB3093-050-Q1-K1-D6
tctatatctctcttgttcttcttcttcttcttgcacgtattgttctaatccacaaaacttggggccttaaataacaacattgacctcgcctaatgtactgttctcacgctgtttgctatttctttaccaacccttggggagctcgtgcaagagcaggctctaatcctcaagtaccacaacagacaaatactgaaggggcgcatcaccgtcaatctgatctgactcggcacctatacccagattcaacgatccataatcgcggacttcataaactcactaagcagcgcgccaaacgcgccgtttccatcgactgccacg

SEQ ID NO: 41175 - DNA, 436 bp, Glycine max
  Clone ID: LIB3093-050-Q1-K1-D7
attactttggaggtagagagctctgacacaattgacaatgtgaaggcaaagatccaagacggggagggtattcctccagaccagcaaaggttgatttttgcgggaaagcagcttgaagatggacgtacgctggcagactacaacattcaaaaggagtctacccttcaccttgtccttcgtctgaggggaggtatgcagatctttgtgaagactttgacagggaaaactatcaccttggaggttgaaagttcagacacaattgataatgtcaaggcaaaaatacaggacaaggaaggtatccccccagaccaacagaggttgatctttgctgggaagcaactggaggatggaaggactcttgctgactacaacattcagaaagagtctactcttcaccttgtcttgcgtcttcgtggtgggttttgagtttgagaat

SEQ ID NO: 41176 - DNA, 428 bp, Glycine max
  Clone ID: LIB3093-050-Q1-K1-D8
gactccattatctgctttgtatgcatcaaagttgcttcatgaggctggactgcctcctggggttctgaatataatatctggctttggtccaactgccggtgctgctattgctagtcacatggacatagataagcttgctttcactggttcaaccgaaactggaaaaattgtccttgaactggcggctagaagtaaccttaagcctgtaactttggagcttggtgggaaatccccattcattgtatgcgaagatgctgatgtagatgaggctgttgagttagcacactttgcattattctttaatcagggacaatgctgctgtgccgggtctagaacatttgtacacgaacgtgtgtacgaagaatttattgagaaagcaatggcacgcgctttgaaacgtgctgttggagatccatttaaagggggaa

SEQ ID NO: 41177 - DNA, 373 bp, Glycine max
  Clone ID: LIB3093-050-Q1-K1-D9
gcaccagcgaaacgctcttcgttatcttttctcagactccgcggcgtagatccgaggagttcgggaaatcctaactcatcatctcaactcaagtcatggctggacttgcacctgagggatcacagttcgatgctcgtcaatatgattctaaaatgagtgacttactttcatctgatggacaggacttcttcacatcctatgacgaggtttatgatagttttgacgctatgggtttgcaggaaaatcttctcaggggaatttacgcatatggttttgagaagccatctgccattcagcaaagggggatagttcccttctgcaagggacttgatgttattcaacaggctcagtctggaactgtgaagacggctac

SEQ ID NO: 41178 - DNA, 343 bp, Glycine max
  Clone ID: LIB3093-050-Q1-K1-E10
gcgcggacgcgtgggcggacgcgtgggcggacgcgtgggtccaaacaaaacccatcaaagtctttcgccctcagggatcatatattcattcagttctatacaaaatcctcaaaaactcttcctctctgccatgaccatggaatacagaaccttagaactcaacatcatatccgcaaaggacatcaagaatgttaatctcttctccaagatggacgtatacgccgtcgtttcgatctccggtgaccctattcaccctcagggcgccaccacccacgttcacaaagacgccggcagcaaccccacgtggactacccccggaaattctctgtcaacgaatcgctgg

SEQ ID NO: 41179 - DNA, 385 bp, Glycine max
  Clone ID: LIB3093-050-Q1-K1-E12
cccacgcgtccgagcaaactggcttctttggaaagtgaaaatgaagatttgaaacggaaaatgttagaagccgagagcaaaagttcccagtcttttagtgaaaatgaattactggttggaacaaacattcaactgaaaaccaagattgatgaacttgaggaatcattgaaccatgctctatccgagaaggaagccgctgctcaagaacttgtgtctcataagaacagtataactgaactgaatgatttacaatcaaaatcctctgaaattcaatgtgcaaatgaagctctcattctaaaagtagaatcacaattacaagaagcattgcagaggcatactgagaaggaatccgaaaccaaagaattgaatgagaaactgaatacac

SEQ ID NO: 41180 - DNA, 440 bp, Glycine max
  Clone ID: LIB3093-050-Q1-K1-E3
gaattactgggttggccgatgcgttcgttatctataaacaaattgcttcttcctttcttgctatttcttgtctcgctgcaatttcactgatacttacaattatagatgcaacatggatccataccaagctggtgaatattcaggtcgtagtaatcggtacaggcttgctttccagcatatagtgtatatgaattgtagcaatccagagactcagaatggtaagtatgtggatactgctttatacgtcaactgggacttcatagataagtacatatacgctattgctggtgacttaaaagcagaggactttcaagttggatgtcacgtaaagctggttgctctgacatcttggttgggatctggatacaaactattattcctactcttccattcatacagtgttagactatggattttagatttcatggattccctttata

SEQ ID NO: 41181 - DNA, 140 bp, Glycine max
  Clone ID: LIB3093-050-Q1-K1-E6
attactcttgaggccgagtgcactcacgcaatagaccttataaacacagcaatccaataggggattggtatgtctgctcaccaccaaacggtgataataggaagattacacatttaaagaaggacatactcgttacatac

SEQ ID NO: 41182 - DNA, 413 bp, Glycine max
  Clone ID: LIB3093-050-Q1-K1-E7
accaggtgaacttggaacccaaggctttgaggagttaaaaatgggattcgaatgtatggggggtactataccatacaatgaccctctccaagaacacgatggcatatatgctatcaagtatgcgttcactaacgtaatcacattatttgatactgcggatgtctatggagccaatgctaacgtactattagttggaaaggcttagaaacagctgcccagaaaaaagattcagatcgccacaaaatttgtgattacttcacgaggattttctgatatgaaaatcaagggttacactgtatatgtgccatcatgcttgtaagctagcttgaaacgtcttaatgttgaatacattgatctctattatcatcacagattggacacatctgtacctatagagtaaacaatgggtgaac

SEQ ID NO: 41183 - DNA, 365 bp, Glycine max
  Clone ID: LIB3093-050-Q1-K1-E8
cccacgcgtccggcggcttcaaccttgtagttattctctttcttcttttttagctatccctgtcttgaaaaatctagatctcgttcttccttgatctacgttacgcttttagtgaccggatctgtatggatctgaaccagatctacacgccgatggtggttttggcctggtctttcatagatctgatgcatggaggctcagatctactgtacagaggtgtgcgattcatgttcgtctctcttttggaatctgtttcgtagaaagtcgtttggtcttccatgtcgcatggctcttgaggtatttttttttgcagatactgtagataatcgatgagaagaacgcagatccagccgcttccgcttgtt

SEQ ID NO: 41184 - DNA, 294 bp, Glycine max
  Clone ID: LIB3093-050-Q1-K1-E9
cccacgcgtccggctgaaaaaccctaataacaatgggaggaaaatgtccgcacaggaacgtggggaatagaagatattcttacaagaccgctcggcgaaccaaatttgagctgaaaggggacgacatggtttatgcgcagctcaacaaacccgatcaagagagaccccctttacccgtcgactaagatttgcctgggatgggccagtactattgccttcacttggatcggtactttgccaatataactgtgagggatgagcactttaagaccaaacgacacaagaagcggttta

SEQ ID NO: 41185 - DNA, 423 bp, Glycine max
  Clone ID: LIB3093-050-Q1-K1-F10
tccacgcgtccggctctctcactcacaaacgcacactgaattcaaaaacatcgaaagagagagtcatggtcgagcaaaccttcatcatgatcaagccagatggcgttcaaagaggccttattggcgagattattagcagatttgagaggaagggtttttacttgaaagggttgaaactcgttactgtggaccgtccttttgctgagaagcactatgctgatttgtctgcaaagcctttctttagtggtttggtggattacattgtctcttgccctgttgttgccatgatctgggagggtaagaatgttgttacaactggccgaaaaattatcggagccacaaacccagcttaatctgagcctgtaactattttaggtgactttgctattgacattggaaagaaatgttatccatggaaatgat

SEQ ID NO: 41186 - DNA, 454 bp, Glycine max
  Clone ID: LIB3093-050-Q1-K1-F11
aactgtggcgtcaaaatgggagaatacttctgcaacatctgcaaattcttcgatgatgatgtggagaaagaacaatttcactgtgatgattgtgggatctgcagggttggtggtcgagataattttttccactgcaagaagtgtggatcttgttatgcaattggtctgcgtgataatcatttgtgtgtggagaactccatgcggcatcactgtcccatttgttacgagtacctttttgattcattgaaagacaccattgttatgaaatgtggtcacacaatgcaccatgaatgttacgtatagatgataaaaaatgacaaatattgttgtcccatatgcttcaagtcagtgattgacatgtctaagacgtggaatataattgatgaagagattgaagcaactgtcatgccttaagattatctgaacaggaatgtttggatactatgtaatgact

SEQ ID NO: 41187 - DNA, 361 bp, Glycine max
  Clone ID: LIB3093-050-Q1-K1-F12
cccacgcgtccgcccacgcgtccggtggaactggaacattcttctacggttcggtaattcaggcgttgattcgctaccagtatctatcaccaccaatccctattcgtcccttatgctgcatatcccctctcatcacctccattcactccaacgacgccgtttctccgcaaaacggaacgcttcgctttcagacagagcatcagcagcacagcgaagaaccgcttcccgttccgtcactctctgccgctgaagaaaacaaagcaacaacgaagcttcgaaagaagaaagaagacgacgtcgtttccgaagaccgcttcaagctccccaacggaagagaggtttttgaagacaaagcgtacct

SEQ ID NO: 41188 - DNA, 352 bp, Glycine max
  Clone ID: LIB3093-050-Q1-K1-F3
tctacacttgcttatcatatcttaaaaactgtctacttattatataacattgtagaaccgtggctagatcttatagatgcacattcaattgtaaaaccacactatttaatactgatatatcaaactatctatcataaagtcctcatatgttaccttcttaagccgataactaaatatgattatgattataattataaatgagtaatattccttgaacattaagaccattcttttcacttctaccttaatgaattagattaaccagactatttatatattgaatgagacaattacatattgtaattatttgtgatcgacttataatagaatttaatgttgaagctaaatttta

SEQ ID NO: 41189 - DNA, 360 bp, Glycine max
  Clone ID: LIB3093-050-Q1-K1-F6
cccacgcgtacggatgatctcataatcactatccctaatgatagtatcgttaaaccacaagttcaatatattatacacatcacatctatctctctatcttctatctcttatctatcttcgagcgactgcacaaccatgacaatctccttaaagaccgcaacatacctagaacttaacacgctgactacaccatgatctgtgacctaattatgccttgctcgacaagacactacttatcacttctcctgcgattctcaaattaaccatactgtctctgtaggaccgttacaagtacatcttgtaaccattgctgaccgactcaagatggaattgaaggtggaagctatcgatagtgctacc

SEQ ID NO: 41190 - DNA, 315 bp, Glycine max
  unsure (1)..(315): unsure at all n locations
  Clone ID: LIB3093-050-Q1-K1-F8
ggagaatcatctattttggagaaatacaaacacagaaccgctctcttgggacactcgaatgaaaatagctattggtgctgctcggggcttggcttacttgcacacctcagaaaagcaaatcatatacagagatttcaaagcctncaacatactacttgatgaggattacaacgcataaatttcagattttggcttggcgaaattagggccttcgggtggagattcacacgtgagtacgaggatcatgggaacatatggctatgctgctccagaatacgttgcaacaggacacctttacgtgaaaagtgatgttta

SEQ ID NO: 41191 - DNA, 306 bp, Glycine max
  Clone ID: LIB3093-050-Q1-K1-F9
cccacgcgtccgctggtgaatgcgtagaaaaggaaaatatagaaattagcgtgaaaaatgttgggtgtgttcagcagctccatagtgtcgccgccggaggagctcgttgccgccggcagccgtacaccgtctccgaagatgacggctgcggcgctgcggaagtggttcgaggagaagaaccccttcgtagtgtctgtggaagtcggagagcatgtccagctcgcttatacccaccataacgagtcgccgttttagcccagatcctttgctgtgaatgatgagggattctgcttgtttgaaggagcc

SEQ ID NO: 41192 - DNA, 220 bp, Glycine max
  Clone ID: LIB3093-050-Q1-K1-G10
tcgccacgcgtccgtctatttctactatcttctgtagtcacttccaacacttattcaattttgagcgttcttttgctctttgtgcattataatcttctcttgtcattacaacccccccgttactcaaatcagaaactctcatttgaagctaacatacatcatatatcaacggatctatctaccttcagacatgatgtattctttcaaccaacgcttctgg

SEQ ID NO: 41193 - DNA, 254 bp, Glycine max
  Clone ID: LIB3093-050-Q1-K1-G11
aagtcaatatacctgtattgcgagttctggaaatcaagattcatactggataactattgcatgctggttacgctataaattaaaggagatgctatctagatttaccaaagatttgtgtcaagcttacttcttctctaggagtatagatgttactaataatcacgttgaaagttaagaccccttttatgaccaaattcgcttgtctaattcattttatactgttggaacttaaaaatatgtatttgcatcataat

SEQ ID NO: 41194 - DNA, 420 bp, Glycine max
  Clone ID: LIB3093-050-Q1-K1-G6
gccacgcgtacgactgcgattgctataacggtgaaggttactacgatgggagtattgaagagcgccgtcaggaactgctattgcgatgaatagactagacaccagcggcagatgtgcaaacatgaggctggggaatacatgaggaccatgttaaaggttctgagccacatgcacaacagctggtgcgttcactgcgacataaaactgcagaacatactcatattcggtgacggaggcttcaaacttgcggaaagtggacttgcgagggaggcagagcataaacaggagaagagtgaatgcatgacgactacaaaggttatggctgcctatcaagccaccgcgaaatagtgcaaatcgcctaacgatatatgccctaagggatgtaaaattgtgaatatggtgaccaggataccgatgtgg

SEQ ID NO: 41195 - DNA, 346 bp, Glycine max
  Clone ID: LIB3093-050-Q1-K1-G7
cccacgcgtacgacacagatggctcgaacgaagcataccgctcgtatgtccacatgatgtgaggctcctaggaagcatcttgcaaccaatgctgcacgtaagtctgcaccaactactggtggtgtgaataagccctacattaatccgactggtaccgttgctcttcatgagatcaggaaataccatattagttccgagctattgatccggaagctcctcttacagaggctgggtcgtgaaattgctcatgacttcaagactgatctgcagttacagagtcacgccgtgcttagcattgcacgaagctactgatgcattcattgtcgggctcaatgaggacactaac

SEQ ID NO: 41196 - DNA, 442 bp, Glycine max
  Clone ID: LIB3093-050-Q1-K1-G8
aggactttaggttgggatttgggaattagggttattcgcgtggcgaagatgattgaggtggttttgaacgatcgattggggaagaaggtgcgcgtgaagtgcaacgacgatgataccatcggcgacctgaagaagcttgtggcggctcagactggcacaagagccgacaagatccgcatccagaagtggtacaccatctacaaggatcacatcactctcaaggattacgagatccatgacggcatgggtctcgaactctactacaactaaacacaacaaggtgtgttttatgcgtaatatactatgtgctgggaatgggataagcgctaaatgtaattctgacttgcgaaagttcccatgatttgaaataatgtacatctccaaatgatattgggtattatataccgttgacagcttaagttgctttggtatataacctata

SEQ ID NO: 41197 - DNA, 304 bp, Glycine max
  unsure (1)..(304): unsure at all n locations
  Clone ID: LIB3093-050-Q1-K1-G9
attggggtaaaaaaccaatccgtctgtaactgtcacgtacacacgcagtgtgtctcgtctcgggttancaggtatcgctgattcattcatggaaccctttcgatttcaattgatgccaaattccctgtgcttactcgtttgccgcttcaaatgacgattaaggataatcttattttctcaatctctgaatgtgatgtcctttgcaataagaccaaggagtgaagattctgctgatgtggagaatcctggaaataatttgtatgttacaggcttgtccacaaggataactgacagtgatcttcac

SEQ ID NO: 41198 - DNA, 269 bp, Glycine max
  Clone ID: LIB3093-050-Q1-K1-H11
aacttggttgtaatgctaaaaatttgttaggttaattttgatttgttttggaacccagtcgcgcgccagtggattggggtgggtggcggagaaattttacttagaaccatttgttcctgccctgcaattagagttaattatgtctacttgaatttaaagacattatcttttacttcattcttgaatgaagatatctttcgagatttttcgttaatttgcgtctttaaagattctttcattctttaacaaataatttagaaactgtactc

SEQ ID NO: 41199 - DNA, 137 bp, Glycine max
  Clone ID: LIB3093-050-Q1-K1-H12
tcctttctctcttgcaaatttcatatcgcgctgactttctcatccaagcatctctccctttttcatttccaatttccccttctcttaactcacctatttctcctccttcctttcccttttctcttcaaattaatact

SEQ ID NO: 41200 - DNA, 379 bp, Glycine max
  Clone ID: LIB3093-050-Q1-K1-H4
tgttgctatagatatctttatatttttttcccccaaaaatccaagatccaacctttgcttgtaatatctgaggtatcaatcttcatatatttgcttttggtaaggatattgattaggagaactcggtgttttttgttttattgggtgtgtcagaaacttgttttaaggagaagctactgagagagctgttatatgaggttcgaagctttggctatgccatgaaaattttgaattgtacaatatgggtagcaacaggactattgtttggtttaaaagggaccttaaaattgaggacaatcctgcattaactgctgttgcatacgagggttctgtactccctgtgtatgtatggtgcccctaaagaggaaggacaatttta

SEQ ID NO: 41201 - DNA, 294 bp, Glycine max
  Clone ID: LIB3093-050-Q1-K1-H6
tccgagacttaagccgggatttgggtatagggtattcgcgtggcataaggaagacgtgggtcaacgatcgattgggaacaaggtttcgtgaagtgaacgacaatgattccatctgtatccttaagaagcttgtggcagcttagactgtcacatgatccttcaagatccacatctagaagtggttcaccatctacattgaacacattactctcaatgattactagatccatgacggtctgggtcttgaactctactacaactatacacatatatggtgtgattaatgcgtaatat

SEQ ID NO: 41202 - DNA, 379 bp, Glycine max
  unsure (1)..(379): unsure at all n locations
  Clone ID: LIB3093-050-Q1-K1-H7
agcagattcacactatggtatggggcatacataggagcagagtgacaccagangtagtgctgggctgctagattataaatagagggcactcctttgcttaagaagcacacagcagcaagcatcttcttcttaaactagtagtattattcttccattcataatgggtggtttcacattccaggatgaaatcaacttccctgtggcttctgctactctttacaaggccctagttacagatgccgacaacgtcattccaaaagctcttgatttcctcaagagatgttaaaacgtttaaggaaatggtggccccagaaccattaagaagatcaattttcttgaagattgagaaaccaaatttgtgctgtacaaaatttaaagc

SEQ ID NO: 41203 - DNA, 306 bp, Glycine max
  Clone ID: LIB3093-050-Q1-K1-H8
cccacgcgtccgagacaaggcactggaaatggctgtagactctttgggattcagctacttgagaattctaatgcagaaggaaatctacaaacagtcacttttgcaggaagggtggttgatgataggtcggttccatctttagatgctgagtctgatcaactttctgaaccttcaaaggccaaccgacctgatattccttcagttagttgcaatgctgaaaaatcatgcctgcagtctccccaggagtcacaatgcacgcaattaaggagctgtacaaaggttcacatgcaaggaatggctgttggg

SEQ ID NO: 41204 - DNA, 413 bp, Glycine max
  Clone ID: LIB3093-050-Q1-K1-H9
gtaactaaagaatgatgtgttacacctctggtgcaaaaccttggttgacctcccttttttcaagactggacatattcatacttagaggcaaggctcaggctgagaaggttaagaaggctaaagctaagaaaatccatgcggagaaagataaggggaagcaaatagaaaatccccaagatgacttggtacctcttccttctcctgttactaccgatgtcactatccgagaagacctatgccttttagtggtggtccttctaagaggcaacggttggaaccggtaccggtggatattcctttcgtcatagatggccatactgcttttagtaatagatggccattctacttttttgttaacaaaggaatgggtttcttctctttggaagaaagatttcaacccctaggctctcatt

SEQ ID NO: 41205 - DNA, 370 bp, Glycine max
  Clone ID: LIB3093-051-Q1-K1-A1
cccacgcgtacgcacggatacacactacgttctatcaaagccagtgctaggatcaatgaggggaatcaacgaatctacctgagggacttgcatattggatgatctaggcaattatgcgtctagacagaaaactgtaccgcagaacaaagcattgcaccagttcccaaagctggtctggtaagtggaaacctaccttatgctaagacctgcacatgagaatactgatatactcagaaatatgcctctacctcgcaattgcttatgcagtttactcttgctgagaaggatattgattaccacaaagtctcccataatggatctgatataaaaactggagatgctcaaaagggcgctcaaccagttgttccca

SEQ ID NO: 41206 - DNA, 115 bp, Glycine max
  Clone ID: LIB3093-051-Q1-K1-A10
cgcatacgatcgtgctccacatacaccactttttcatgtatccttaattaattcgaatgagggaccctacttacggattcttcttgttattactacgcttctatcaaatatattg

SEQ ID NO: 41207 - DNA, 466 bp, Glycine max
  Clone ID: LIB3093-051-Q1-K1-A11
atgatgctcatggttctcacttactcatgtcagatttgctttctgacttcatccagaaaaagtcaattacagaatgcactgacatgttgcacaatgggaatacatcaaatctgaacatgatgtccagctcagcaggaaagcctttgcaagcagatggccataccattgatgatggattagccccgccacagacatacaaacagttgcctgatacaacaattaaggtgaatccaaagttatcacagcatgtgaattctgagtcgaagcaagtgctagaagataataaagtttctagaaatgaggatcaggttcttagttctgaaaacgaaaccaaaggcaccgaacatcttgcatttcatcaagttccttctgttgaacaaaatcagaatctagcatctaaacttccagacctcaatttggctgacgtttctaccacggagtctgataatgatactaaggtccaatc

SEQ ID NO: 41208 - DNA, 467 bp, Glycine max
  Clone ID: LIB3093-051-Q1-K1-A12
aaaagaatgtaactggcatctaccactactggcaggaaaagaacatagaccgaacattgtgggaactcggtaccttgccacctggactgctgacattttatggattaactgagcccttggatccatcatggcatgttttgggttttggctacaccaatgttgatcctcagttgatagagaggggagctgtattacacttcaatgggaactccaaaccctggttgaagattgggattgagaagtacaagcccctatgggaaaaatatgttgaatactctcatcctttgttgcaacagtgtaacttccattgattttgaattgcatttaaattgatacttcaaaccttggtggaagattcagatacagggctaagctctgttgatggggtaggagaatatattattggccgtttgtaagtctggcaagcttggtgattcttaccaaaaagtgaattcaggtcttgattt

SEQ ID NO: 41209 - DNA, 165 bp, Glycine max
  Clone ID: LIB3093-051-Q1-K1-A2
acgcccacgcgtccgcagggatacactctatgatctgtctgaacctatgttcaaatttattaaggtggggatcgtatatacctgcgcgacatgcattttggattatttaggcttctatgaagctcgtccgataactattttgtagaacaaagctaagcatcaatt

SEQ ID NO: 41210 - DNA, 313 bp, Glycine max
  Clone ID: LIB3093-051-Q1-K1-A3
gaattcccgttcgaccccgcgtaccttacgaaacgcaatgtccactctacttcactccgctcccacttcttctccttccttctcgggtatcatcactactaagggcgggacctctccaatcactcacatctctctcctaaacggcatccgtaacactgctatcgaaacaattaacttgcacaatggaataccaatcactagctatttcatattcatcgtatacacaaacgcaattcctagttacctttatactccaaacacgcatattcacagatttgtataacctaaactacacctctccttctaatattta

SEQ ID NO: 41211 - DNA, 340 bp, Glycine max
  Clone ID: LIB3093-051-Q1-K1-A4
acggaaacctgaaaccctaacaatccctattcaatgacttctcgcgccgacgatttcgaaaaggagtaagctctccgccaccggcgagcgacgacgatgatgacgacggcctcaaggaggacatggacgcgctcgcccgagcctgcatgatcgccgtccctcgccccgacgataattccaccgccgaagatgatattcctgcggaggacccgctcctcctcgccggcgactccatcgttcccgccgccaccgacgactacgacgaccaagacgacctcgagtgtcttaagagagtgcagagcctctaccagcccctgtccattctttcgccgctgacacc

SEQ ID NO: 41212 - DNA, 200 bp, Glycine max
  Clone ID: LIB3093-051-Q1-K1-A5
acgtcaactctcttgctactctcttacacttctttcacgatttttccaactacctcccggggagggttattactaaagggggtgacataatgcacacatttaatacataaactcagcacattattcccaactgtcatctaaagcctttccaatcacactgtcatacccctcatgattgattaacccctccacaaacatac

SEQ ID NO: 41213 - DNA, 180 bp, Glycine max
  Clone ID: LIB3093-051-Q1-K1-A6
acgatgatactaatggctccctcttccacctgcattacttgccttttacttaccaccctgttgggtgcttttcaaagtaggggaagatactgcccaatcttaatccatgaaatccatacatactaacccactgacaaagaaacacatcttactaacatagacataccattaatgaacata

SEQ ID NO: 41214 - DNA, 432 bp, Glycine max
  Clone ID: LIB3093-051-Q1-K1-A7
gttacttggagcccccacatataatcctcagaaaagggttgattgctgggattgagtaccgttttttggctgaacacgtggctgatttcatggcgaagacactcttcttcacgtctctgcttttccgttccactgctgaccacaaacgggacgttgccgaattttgtgggaatgtggagttatgcaggctcactgaacaggtcgttttctctgacccttataaaggttctcaatataatcgttgtacttccccctatcttgatcgtgatgctgaggctgttcgggaagacaatctgctgaagcttgaagttgctgagctgaaatccaagttcattgagagggcccaggcactaatacatggagatctacacactggttctgtgatggttactcgggaatcaactcaagtttttgatccagaattggctttta

SEQ ID NO: 41215 - DNA, 344 bp, Glycine max
  Clone ID: LIB3093-051-Q1-K1-A8
acgattacttaacacatcttgattctcatcctcttttatcggcttaattctttgcacaaggggacgttcattacaaacggcagcaggtactatttgccattccacccatattctgagttctttcctttatccatctctttctacattctctctactcctcacccataaaatttcctctcaaaaggttactatcctcatattgatcattttttactcactactcacttgattctctctaattattatcacatctagattacatatttatcatgatttatgaatctattctttcttttatatctattgtacttttatctttgattcattattattaatgatatttc

SEQ ID NO: 41216 - DNA, 356 bp, Glycine max
  Clone ID: LIB3093-051-Q1-K1-A9
ggattctgatcctgctgcacatacaccacaatcccatgcaacctagggtgctaagaatcagggacaccacatcctgatgcttctacttctgcgagctcttgctccagttgccgtgtcgctgaatccattcgaactttatgggagtcatgatactatgacaagtcgtactcaaatctccatatacaatgccacatgctgaccgatctgtccagaaagacgctgacctatatacatctcatgctacatcgtgatcaatattcacacgtacctatcggcatctatgattatcaccataccatattcagccgattgatctcggagttgatcactgctgatattaacatgactagtgaaat

SEQ ID NO: 41217 - DNA, 456 bp, Glycine max
  Clone ID: LIB3093-051-Q1-K1-B10
gtacaactattctcgtgtgtgttcagtttgaacggtttaggcgaattgttcaccattctagggatctagtcttactaggtctcaaggagagaaagatcatgagcactttgtttgtcgaggaggtacaatgttttggttttcttcatcatcttttttccaagtttttctctgttgtctaaactgaaattatgggttgatgaacttcatgcataacaaatacaagcagcgggtttgtattcgtggaagtcgacctgaggaagaggagatatttcaacttacaatggttcatgtttgatcataatttcttctactacttcatagttcatatcatagtcatacttgtcatgccatttaatatgtgtttgtttgtgtcagattatttgcaaaaaattatgccttttttatttgtttggaaaataattaacaattatatgttgttatcgcaaaatgtgaact

SEQ ID NO: 41218 - DNA, 474 bp, Glycine max
  Clone ID: LIB3093-051-Q1-K1-B11
gagggcggtcctcaggtcacgttcgacgccaacgcgcctctgcgcgagagaatattcagctgcagccgcgaagcgattgagaaactcaaagccatagcgaacaaccgccggtggccggaaaacaacaacttcgccggcgagttgttacggaagaaaagcaacgataatctactaaaggagaacaaggcgacgacaattcttgagaactggttcaaggtgaattcaaattcgatttcgaaaccgcaaacggtggaaatttcgtcgtttcaatcagtgtgcgcgcttctgtggcgcggggtgacgcgagcgaggaaatttccttcgtccaaaacgacgacgtttagaatggcggttaactgtcgccaccggttagaacccaaactggaagcgtattacttcgggaacgcgattcagagcgtgcctacttatgcttccgcgggtgaggtgttatccagggatctacggtggtgcgcg

SEQ ID NO: 41219 - DNA, 309 bp, Glycine max
  Clone ID: LIB3093-051-Q1-K1-B12
acggcacatcaagtcacatggttgcaatgttcatacattcatctgttgccacatatactgcggcgatgcctcctcaagagcgagaattcaatagtgcaatcagacacacatggctttcaaaagagacccaaaatgtctttataaaaggcataccattattcaccgaatttgcaacctgttaaaacccaatccatttcaatgcccttgaacgaccaattagagatttccatgaggttttaaaaccgttaaaccatgaccatgacaaatttaaggcaaacatcaaaactgttgttcttaaaaaggggattc

SEQ ID NO: 41220 - DNA, 305 bp, Glycine max
  Clone ID: LIB3093-051-Q1-K1-B2
agctactcatcataccggcgcactcaaggcgctggcttcggccctttctttcatcttcccgagagggagcattcagggggagctaacatgccgaacaatgtgtctgacaaagctgacaagggaccacgcatctgacgacgaagcatcagggcaactgtgctcatagaaacacttactgcactgtttcaactgaatgaaattttgtatgaactgaatgaccattcattgcgtttgaactgttagcgttgagattacagtcgcagtcatgttaataccttccaagctcatccagagcgcctcttacc

SEQ ID NO: 41221 - DNA, 387 bp, Glycine max
  Clone ID: LIB3093-051-Q1-K1-B3
ctgctcattttggcagtgttctcatcggggggcgtatgtctccctactctttactggctaattaagaactccatctctcttctcaccatcaacaacaaactctcttgcccttcctgcctctgttactgccctacccctctctctctcttccaactttcttccttgctttcgaatctctctctctcacattgttcaattaatgacctctatctaaatgatgatatttacaatcattttgtcgaccttctttactatgatttctagtttcaatagtcttttactgaatcaaacactcttcacattaacataactttttctgaaacccaaatattcgcattttattaccatcaaaactctttttaaatccttacttcaaccttaacattc

SEQ ID NO: 41222 - DNA, 123 bp, Glycine max
  Clone ID: LIB3093-051-Q1-K1-B5
gactcgacctgttcatcgatttccgttcacgctcagctccaacgctcctctctaatcttgcactatgctagtgatcctccattactaggacacactcatatacctatcatacaacactttgat

SEQ ID NO: 41223 - DNA, 61 bp, Glycine max
  Clone ID: LIB3093-051-Q1-K1-B6
acgacctgtacaatcaccttcttccatgttctactccaacatacaattctaatatctaata

SEQ ID NO: 41224 - DNA, 380 bp, Glycine max
  Clone ID: LIB3093-051-Q1-K1-B7
catgggagtcttcacctttgtcgtccgcaaatccggcagcgaatggagcgccaagcggcagtccggcgacatcgaggggtccgccgattccaccttcgatctccaacggaagctcgtgcaagccgctctcgccgttgattcctccggtggagttcagtcctctttctctcccgtgtctcctacctccgctgtgttccaggtgatagtgggtggtgcagtattcgttggacgtggtggtggtgctgttgcatctgcacctgcatgtggtgctgccgcagctgatgctgtcccagctgctgagaaaaaggaagaaaaggtggaggaagagtccgatgatgatatgggattgggactgtttgataagagtttttctgcttttt

SEQ ID NO: 41225 - DNA, 361 bp, Glycine max
  Clone ID: LIB3093-051-Q1-K1-B9
ctcactcatcctttcaagttcactttcgacgctggcgaacaattatgcaaccgcacacactgataccatacccttactaagttcattcacctcgacccttatcacactcctataactcgccatcctaaactatcacacctattcctaaaactacttcaacaaaacctactttccaaacataactttgatcgattaatccatcctaaccattctatctttcttaaacctgatctattctaccttatatcaccttctgatcgcaatcatacccgatttcgctcatcttattaccacacatacacctcaaacatacctaagttctcttaccatctatctgaagcatattccattagattctatt

SEQ ID NO: 41226 - DNA, 128 bp, Glycine max
  Clone ID: LIB3093-051-Q1-K1-C1
gttaatattccatccagaatggaacactatcattgtaccttcacagaccccatatcatccgtgggggcacaaaattgcttggggactggtaactatgctgaattaaaagcacaatcattcactgatct

SEQ ID NO: 41227 - DNA, 409 bp, Glycine max
  Clone ID: LIB3093-051-Q1-K1-C11
acgcacgaagtagaaacacgaaactcataatccatggcgacaccagcgactacgaatcgaatacgagtgtttgtgaacgtgggtcagttaataccttccaccaatgactacacactgaccatgaatgtattcaggttccattcgatcaaatccctcagtaccctctgatctagaccgatggttctattcgaaccctcattctgctttactacatggagtactgtagcaggctcacttttatcgctcttcaatgcctccactaattacctactgtccttctctcattcatcctctatatccatctccacaactacaattttatcaacctcatcgttttcacattctatgtactttctactgtattactatgattacaggcgcctattgcactgatgcatcttattaatgc

SEQ ID NO: 41228 - DNA, 429 bp, Glycine max
  Clone ID: LIB3093-051-Q1-K1-C12
cccacgcgtgcgcatggagcaagatacaggctgagattagagctcgtcgtatatgtatggtgacagaagacagaatcaggcggaagataatacattctcaactaaaacttgaggccaagattcatgacctggaggtaacttgtaaagctaacaggttttcagtgatggtattctggactttttcttttcaaactgatgccagtttgctaatcactctttctactacaatgattatgtgtggtttcattggtttctctgttttaaatatgcatttgtgtcattatttcaaatttctatgtctctctaggtgattagttaatgcatataactattgaaacggtgtcatgggatgggtctaccatatgagtcaactgcacttctgaggtctaatatcctatagattgacgtttagacattggaagcatgcgc

SEQ ID NO: 41229 - DNA, 403 bp, Glycine max
  Clone ID: LIB3093-051-Q1-K1-C2
cccacgcgtccgggtgagcttgcccttggtcctgaatggaagccacaaaatactgcttcttgtacaggtcagtttcatgggtcccaagctctatgtaaacacaacaccggttgatgtgggaaagaagcccgtgacaggccttcgattgtatttggaaggaaagagaagcaactgcttggcaatccatttacagcacctctcttccctgcccaaaactttccaactccaggatgagcctaacgggaatgcgtctaatgactcttcagaacgcaagtactatgagaaggtccagtggaagagtttctctcacgtttgcacagctcctgttgattcagatgatgacaatgctgtcgtgactggtgctcacttttaagttggagatactggcccttagaaagttcta

SEQ ID NO: 41230 - DNA, 68 bp, Glycine max
  Clone ID: LIB3093-051-Q1-K1-C4
gggcgtgacgcccacgcgtctcgggttatttgatgattgctatatacgctattctcgaggtctatcat

SEQ ID NO: 41231 - DNA, 118 bp, Glycine max
  Clone ID: LIB3093-051-Q1-K1-C5
cccacacttgaagctcgaatataatactggttcacaatatcgctatctgcgtctcgtctgggatacactactcacgcaggtacattattgaacacactcacttactcattcactccat

SEQ ID NO: 41232 - DNA, 450 bp, Glycine max
  Clone ID: LIB3093-051-Q1-K1-C7
acgatcgatttgaaggcaggaggtaagtccaagatgaccaaacgtacagcccccaaatccaatggtatttacctcaagctggtcgtcaagctgtaccgttttcttgttcggaggactggtagtaacttcaatgccgtcatcctcaaacgccttttcatgagcaaggtcaacaagcccccgctatccctctctagattgattcgttacaccaagggaaaggaggataagatagctgtggtagtcggggccgtgaccgatgacattagggtgtatgaagtccctgctctgaatgtaactgccctgaggttcactgaaactgccagagctagaattgagaaggctggtggctaatgccttacctttgatcaactggctcttagagctccactcggccagaatacggttcttcttagaggtcccaagaatgcccgtgaggcttgcaagcacttt

SEQ ID NO: 41233 - DNA, 355 bp, Glycine max
  Clone ID: LIB3093-051-Q1-K1-C8
atacggaattatcatacccattaagatgaaaccgtacctacgttcagtattcctattattcgttagccttctctaccagtgcgggtcggctagtgctggtaatttttatgattcatcgaaaaaattattcggtccatcattatcaaagataccgagcaagaaagaagatttgaagaatgctgataaagcgaatgaatggatctagaaagtgaaggacggcgtataacttggaatataaaatgcccctccctcaccgtcaaactaaccaccgaagcaaatcaatattaaaggcctgtctgtcgtcaatgattacttatctgagtactgctacattgaatcctctatgccatttaac

SEQ ID NO: 41234 - DNA, 476 bp, Glycine max
  Clone ID: LIB3093-051-Q1-K1-C9
cgcaaatgtgatgcacgcatcgcatcaggaatgcctaaagcgccatctgggtcgacacgagggaacactaatcgcagacgaacacttctcaacacactcactaactcactcactccaagccctagatgactgctccattctttcacatgccacagaagtctgtgatctacgcttatgtcgctcgaggaaccgacattctcactgaatacaccgagtacagtagcaatttcaatactatcgcttttcaatgcctccagaaattgcctactgccattatcacattcacctacaattgccatggccacaccttcaattatctcgatgacaacggttacacatactgtgtacttgctactgaatcagcaggaagacaagtgcctattgcatttttggagcgtattaacgatgattttgtgtcgaaatatgcagggggaaaggctttcacggatcctgccaatagacttaacaaggaattt

SEQ ID NO: 41235 - DNA, 445 bp, Glycine max
  Clone ID: LIB3093-051-Q1-K1-D1
aaacaattaacacacacaaacagaggctacgtacgatcaaattaattaagatggcggaagtgaggagacaaacaagtgggtctgagggactatgtgagtggttttcctaaggaatccgacatgaacatagttgaaggaaccacaatattgaagcttccacaaggttccaatgatgtgcttctaaaaaatctctacctttcctgtgacccttacatgagaatgctcatgaccaaggtggaaggcctcgacgtgtttggcacctatacacctggctctccattaacagggtatggagtgtccaaagtcctagaatctggacacccagattacaagaaaggtgatttagtgtggggatctacaaaatgggaagaattcagcttggtgtccccaactcaaatacttttcaaaattgagcacaccgatgttccgctattatattatactg

SEQ ID NO: 41236 - DNA, 364 bp, Glycine max
  Clone ID: LIB3093-051-Q1-K1-D10
acgatcatctatcctatcctgacaccgaccatgtacaatagactctctatcgctatccaacgggggaaacaaagataaacgcgtgtctgatcacaaatgtacatcaaaaaggcttctactgctagatatcatacattctgacattaccgacactgctggcaagattctctaatatgttgacataacttgtgcacctccacttgccacgatacttgataatgataatgatctcttgatatgtcttcacactgactagcactcatgctcccaattttaccttgactgtctatggagtagccataatgtcaaaatgaagcttctcaatgtacacgtaacttgcactatcgccacgatttatatgact

SEQ ID NO: 41237 - DNA, 462 bp, Glycine max
  Clone ID: LIB3093-051-Q1-K1-D11
gacaactctaaccctagtattggtcccactcttgctgcctaccatacagtccctaatccacgcatgtcatccactgcgtggctgcataacagcagtcagatggctgcacccatgatcagaagtggatccacaccagccatgactgcaccccatcatcatactcacgagtatcatgacgtctctaacttgggctcacgtgccgacactctcgccgccgaccgttctacatcgacttctattgataacaattctacatcaagcagccattgctaatcataatcaccaccatggagcaatgaagcccatgctaatcttgttcatggatactctgcttgctctgttaccaatgatgatatgacttctcactgtggtccacacgacgatattggctcctatttctaggatgcatcgactgataactcatacacactacatgccaacgattactcacaatgacatggc

SEQ ID NO: 41238 - DNA, 426 bp, Glycine max
  Clone ID: LIB3093-051-Q1-K1-D12
cccacgcgtccgcccacgcgtccgcccacgcgtccgcccacgcgtccgcccacgcgtccggcggcgacgtcgtcgtcgacggaggagtgtttgaattcgaagcccgccgtggaaccggtggtgccgagaaagggttgcggtgatcgaatcaatgtcggtggcaataagtccaatgaagttgctgttggtgttccgatatggtggaactaccccaacattatttagagattaattttttaaaatttacattatttattttttataacggtcaagcatcatagaagaagttcagttttaattcaattatagattatagatattgtgagaaagttgacacactttgctaaaaagcttgaatgtcatccttgtctttttttaatttgttttttttattcatggtatttatgtaaaatatttatttgtttt

SEQ ID NO: 41239 - DNA, 316 bp, Glycine max
  Clone ID: LIB3093-051-Q1-K1-D2
accacgcgtccggtcgttctgaacggaaaagcactggcgcagctaccctgaggcttctctggtcggctcttctctgtggtgagtcaccatggtgagggttagtgtgctgaacgatgctctgaagagcatgtacaatgctgagaaaaggggaaagcgccaagtcatgattaggccatcctccaaagtcattatcaaattccttttggtgatgcaaaagcacggatacatccgagagtttgagtatgttcatgaccacagggctggtaaaatcgtggttgaatcgaacgtgtgactgaacaagtgtggggttattagt

SEQ ID NO: 41240 - DNA, 288 bp, Glycine max
  Clone ID: LIB3093-051-Q1-K1-D3
aactatcctgattactctcacccattgctgcctcattcaccatcaacaactttctctcttacttcgtacgcacaaaaccacgggcagcacccttatcatcgcatttcatccccaccacttttcatatccagaaacccttcttctcacatcccctaattgcccaatacaaccctccttcttcaccctcttgctcttcttcttctgagttgtcctttgttatatgcccattcatggcgtactccaacacgctcttcttccagtctccgtacaacttgcatgttgtttttt

SEQ ID NO: 41241 - DNA, 413 bp, Glycine max
  Clone ID: LIB3093-051-Q1-K1-D5
ctcacgcgtccgaccacgcgtccgcccacgcgtccgcccacgcgtccgcccactcgtgcgggggcgacgtcgtcggcgacggatgagtgtttgaattcgatgcccgtcgtggaaccggtggtgccgagaaagggttgcggtgatcgaatcaatgtcagtggcaataagtccaatgaagttgctgttggtgttccgatatggtggaactaccctaacattatttagagattaattttttaaaatttacattatttattatttataacggtcaagcatgatagaagaagttcagtcttaattcaattatagattatagatattgtgagaaagtttacacactttgctaaaaagcttgaatgtcatccttgtctttttttaatttgttttgtttattcatggtatttatgtaaaat

SEQ ID NO: 41242 - DNA, 308 bp, Glycine max
  Clone ID: LIB3093-051-Q1-K1-D6
ctcacgcgtccgaccacgcgtccgcccacgcgtccgaccacgcgtccgcccacgcgtccgggggcgacgtcatcgtcgacggaggagtgttagaattcgaagcccgtcgtggaaccggtggtgccgataaatggttgcggtgatcgaatcaatgtcaatgtcaataatgtccaatgaagttgctgttggtgttccgatatcgcttaactaccccaacattatttatagattaatatttataaatttacattatttatcttttataacagtcaatcattatagaagacgtttagctttaattgaattat

SEQ ID NO: 41243 - DNA, 301 bp, Glycine max
  Clone ID: LIB3093-051-Q1-K1-D7
ctcacgcgtacgacctcgcgtccgcccacgcgtccgcccatgcgtacgtccactcgggcgggggctacttcgtcggcgtctgctgagcgcttgaattcgaagcccgtcgtggaaccggtggtgccgataaatggttgcgtgagatcgaatcaatgtctgtggcaataaatccaatgtagttgctgttggtgtaccaatattcaataactaccatcaacattatttatagattaatatcttaaaattcacattatttatctttcataactgttaatcattattgaagaatttcaattataat

SEQ ID NO: 41244 - DNA, 274 bp, Glycine max
  Clone ID: LIB3093-051-Q1-K1-D8
cttgaaccaggatcagacggctgggaagcgaggacgcgtaaatggatcaaagggcaacgcgcccaagcgcagcaactcgccgcagttagtgtgccgtactgaatccgtcttgtaattttcttacttgacattggatgatgattgaaatgaaaatccttttggtgggattaaattaaatttgctgaacaactactagtacattagtaatgctcttccttagttatggaacaatacaatacaccaagtgcaactgtgcaaattgtgctttgcattc

SEQ ID NO: 41245 - DNA, 472 bp, Glycine max
  Clone ID: LIB3093-051-Q1-K1-D9
gtcatcttccccaaccagagatgcgccctacaacatatacttactaaagctttcaactttggagacaccctttcagatgtgagccaaggcccataacacaggggatggatctaagttcctggctaagatactggcagaatggaaagactataatgcccagattgattccagcagtgatgcagataagccaattcgcaaagctcctgccaaaggatcgaacaaggggtgcatgaaaggtaaaggggggccagagaactcacggtgtaactaccgaggtgtcaggcaaaggacttgaggaaagtgggttgctgaaattcgagagccaaacagaggcaatacgctttggctaggtactttgcccactgccattggagctgcccttgcatatgatgaagcggtcatggcaatgtacggctgctgtgccacgctcaacttttccaatgtttcagtttccaggttctctgaggaatct

SEQ ID NO: 41246 - DNA, 373 bp, Glycine max
  Clone ID: LIB3093-051-Q1-K1-E11
tcgcccacgcgtccgcccacgcatccgaggacattgtcttccacgggagtcacaatccatattggatatgatgaggagagtggagccttttattgtgtattccaacagtggaagaatgaagtcaatgctcaatatggaaatgtactaaatggaactattacaacttccaaaagcaaatttgatgaatagatagagtcatcatctgcaaaaatgtattttcattattattgacaacttctgcatcagcaaaatatgctgtacgactatgtgctgacatggacctatcatgctgctattgttgagatccgtccttatttcattggccgacttctaactgatgctgattcttgatgatgaattttgtcattatttg

SEQ ID NO: 41247 - DNA, 476 bp, Glycine max
  Clone ID: LIB3093-051-Q1-K1-E12
acgtagaaattgatcctttagcatcccttccgattctgcacttccttagtctgctggacaacaagattacatagaaacgaaattacaggctttatgttattaacaagctgaaatccctacgggtgttagatttcaagaaagtgaaaaataaggaacggttggaagccaaaaatttgttttcttcaaaagaagttatagaagaaattcaaaggacacccacaaaaagtgaaactcctaatgtttctgaagtgattgaggaacaacagatgcccaaagtcgttgctcctacacctgagcaaattattgctattaaggctgccattgtgaattctcagactcttgaagaggttgctagacttgaaaaggcattgaagtcaggccagcttcctgcagatttattgttggataatgttgatgaaaaacatgaggacatgattcatgacgatagaggtcaagctgatggagaatctaatgat

SEQ ID NO: 41248 - DNA, 392 bp, Glycine max
  Clone ID: LIB3093-051-Q1-K1-E2
cagaagtagaggaataatggagcaggaagagcacgaggtgtacggtgcagacattcccgacgaggggattgacatggacgcagacgccgaacagcaagacgagcaacttgcccccaatcacacaaacaaggaactggaggacatgaagaagaggctgaaggagatcgaggaggaagctagcgccctacgcgaaatgcaggcaaaggttgagaaagagatgggcgctgttcaagattcgtctggcacttctgcgactcaagttgaaaaggatgaagtggatgctcgatcaatctatgttggtaatgttgactatgcatgtacgcctgaagaagtccagcagcattttcagtcctgtggaactgtgaacagggtgacaatactgacagacaaat

SEQ ID NO: 41249 - DNA, 453 bp, Glycine max
  Clone ID: LIB3093-051-Q1-K1-E3
acgctatttctctctctacaccttcaaaaatcaaaagtttcttgttgctcatcaaggggtgttgtgttgtatgattttaaaagatggggtcaaatcaacagaagttcccctattttgatctgttcgcagttgggatggaattgcaggtgatttgagcctgacacagagctttcccgcttataagtagtagtgctagtgcagcagagacgatcatgaaccacgtgcacactctaatttccatcacacaggatcttttgtgtgaagaagactagaaaaccagcttcaattatcgagaattgtttgatgggttgatcaaaaatcgctctccaaaccagattcttaacactgaaagtgttaacaagtaacaaagcaagagaaaattatctccgattgcgacatattttcattgtaactcccaaattcaagccggcgctgacggcctttaaacttttc

SEQ ID NO: 41250 - DNA, 432 bp, Glycine max
  Clone ID: LIB3093-051-Q1-K1-E4
cccacgcgtccgggcggggctcggaggtgggaatgacgagagggaacagactattaaccagcttctgacggagatggatggcttttctggcaattctggtgttattgttttggctgccactaacagaccggatgttcttgattcggcgttgttgaggcctggccggttcgacaggcaagttactgtggatagacctgatgttgccggcagagttaaaattcttcaggtgcattctagaggaaaagcacttgcaaaggatgttgactttgaaaaaattgcaaggagaacccctggattcactggggctgatctgcagaatctgatgaatgaagcggctattcttgcaaccaggcgtgacctcaaagaaataagtaaagatgagatatctgatgcgcttgaaaggatcatagctggacctgagaagaaaaatgc

SEQ ID NO: 41251 - DNA, 119 bp, Glycine max
  Clone ID: LIB3093-051-Q1-K1-E5
acgcccacacatatgctttaacatccattcggattttattcttccttagtcttattaacaatagtattatttataaaggttgttacactctatccgttatttacacacttcaatcctta

SEQ ID NO: 41252 - DNA, 443 bp, Glycine max
  Clone ID: LIB3093-051-Q1-K1-E9
tcgtcgacgcgtgctgcaaaggatgcaagatgactgtcacgagcgcgctacaaggaatatatggggtgacgtaagttaacttggaccgaatagccaacaaatcaacacttgtagactacgtaaagccctccaaagccgaacttcgtgtaccataccgaacatcgaagaatgccaagctgtcgccctaccttccatactacgtgcttgcacatttatacacactatcagtgtacgactggaaaacttcactcacgtacttgcgactcatcaaccacgccaacttgtactaactcgcacttactaactcaactgatgttcattatactacagcattaatatacgaatatccctcatctttttctctcatctaacggacattcttcacttgattgtaaatacactgtactaattaggcattctaattatagtcctttaccatttta

SEQ ID NO: 41253 - DNA, 375 bp, Glycine max
  Clone ID: LIB3093-051-Q1-K1-F1
aaagggccttggctcgcttttggattaaatttggagaggattcgattgcttctattaccgatttggttcttggaccctctaaagatgaacaagaaagagcaagagcaaagaaaaaggcagaagatactatcatggtaatggaagagcaaggcctaggagacaagaagttctttggaggcaacaatattggaatggaggatatagctcatggatgcctaagtcattggttagaaggcttggaggaaattgtggggatgaaattgagtgagccaaacaaattacctcggttgcatgcgtggacttaaaatttcaagcaaagttctgttattaaagaaaaccttcctgattatgataaactgttgatccatcttgaat

SEQ ID NO: 41254 - DNA, 326 bp, Glycine max
  Clone ID: LIB3093-051-Q1-K1-F10
cattatgcttacgaactgcactttaagagtggctactttgattctgtcattatatacagatcgagtctggtatcagagggctgcactttaggcgatcgtgatcgcgcgtgtgcttgagcctgatgataccgttgtcttccttgtgtctactatgaactcattcctcatcactactgatgactagatgacaccccagattcatattggatgaaaacttacactgtgattcacatatgcaatgttgacaaactaacttacgtagctgataagagtaacctactatagtataaccaatgtggactacctcttagtatcggctgaatgaa

SEQ ID NO: 41255 - DNA, 346 bp, Glycine max
  Clone ID: LIB3093-051-Q1-K1-F11
acgcccacgcgtccgcccacgcgttcgcccacgcgttcggttcagaaacgcttcacagacaagtataattatgattatgtgaaggacatgcctttggagggacaatacgagtgggttaaattgaagtcataaaagtgaaagtaccaaccttgaaagaagaagaagaagaagaccgtttattaaaaaatcatgccacttgctgacattatttttacgttaatcaattgactttaggtacttcattttatactttgacttttcgtgttttcacggtaagactacgttttggtgaacactttaatcttaatttttctggatctgatggataaattcccttttgtaaaaa

SEQ ID NO: 41256 - DNA, 451 bp, Glycine max
  unsure (1)..(451): unsure at all n locations
  Clone ID: LIB3093-051-Q1-K1-F12
cttacattgccaaggcctgttggcagagccaaattcaaagactcagaaggtgccttcagaagtaagaatcctagacagctctcacaaaaaaattggtgttcacctcaagaacaagaagtacatgaccttgatagtggagattccagcaagactcagtcagatccctctcgggttgaacggccctatgaagtggaagtgtcatctgagggaactgtctcagaccatgctgtgagagatcaggaaacataactttagtgttttggataaaaaaaaatgaaaccatattctttcttgatgctgaagccttttcaccaatgcgctagaatttttgtaggtatgacgagtgaactagcaaaaatataggattgttgagaacatgtaaagttttttttttctccaagtgaaatgaaatatagtgttgcttgttgaaaaaaaaaaaanaataataact

SEQ ID NO: 41257 - DNA, 376 bp, Glycine max
  Clone ID: LIB3093-051-Q1-K1-F2
cccacgcgtccgtgtcattgccttccagacctatgcagttggaagcagtggaggatacaagaagggtgtgacagaagcaaaactgaaggttgccataaacggatttggaaggattggaaggaacttcttgaggtgctggcacggtcgcaaagactcccctcttgatgtcattgccatcaacgacaccggtggcgtgaaacaagcctctcaccttctcaagtacgattcgatcctcggaaccttcgatgctgatgtcaagcctgttggcagcgacatcatctctgtcgatggaaaggaaatcaaagttgtctctgaaccgaaccctgccaaccttacttggaaggatttggggatagacttggtgattgaatgaact

SEQ ID NO: 41258 - DNA, 316 bp, Glycine max
  Clone ID: LIB3093-051-Q1-K1-F3
tccacgcgtacgtcagattgcaacccaaatttaaaacgaagaagacgatgaagaatatcgtgtcggggactataacaaattcaattcccacaatcaaacatctatactatttgcatcccctgttctctttctatggaaccgacctatcctcggctcctattatcataaaacctattaaacactctaccaatctctctgtcaccaactccgacactttcagcaatagaatcattttatacaccatttaaataatcatttcacccttctaatttcagatctcactcattttcaacctcacttctcaatccaactttct

SEQ ID NO: 41259 - DNA, 434 bp, Glycine max
  Clone ID: LIB3093-051-Q1-K1-F4
gtaaataccggtttacaacttctcaccgcaaacgctgggagtgaccagtcgacggtggatgatggggcctcgtcgggggctgaggataagcgtgccaagatgactgagctggcacgactgaaagaggaccttcgaaacatgaatgcagagaaccaaaagctgaaggagatgctcagccatgtcagcagtaactacgcgaacttgcaaatgcatcttgcagcagtactgcaacagcaacagaaccaacgcactgagagcacggaacaagaggttggtcaaggaaaattagctgatgagagaaagcatggagttggcggatgaacggggcctagacaattcctgagtttagttccaagtgaaatagatgatcaattatctaattcttctttccgtgaaaggacttgatcaaccacaccttccagcaattaaaatga

SEQ ID NO: 41260 - DNA, 434 bp, Glycine max
  Clone ID: LIB3093-051-Q1-K1-F5
cttacattgccaaggcctgttggcagagccatattcaaagactcacaatgtgccttcagaggtaagaatcctagacagctctcacaaaaaaattggtgttcacctcaagaacaagaagttcatgaccttgatagtggatattccagcaagactcagtcagatccctatcgggttgaacggccctatgaagtggaagtgtcatctgagggaactgtcttagaccatgctgtgagagatcaggaaacataactttagtgttttggataaaaaaaaatgaaaccatattctatcttgatgctgaagccttttcaccaatgcgctagaatttttgtaggtatgactagtgaactagcaaaaatattaggattgttgagaacatgtaaagtttttttttttcttcaagtgaaattaaatatatcgttgcttgttgaaaa

SEQ ID NO: 41261 - DNA, 320 bp, Glycine max
  Clone ID: LIB3093-051-Q1-K1-F8
acgcccacgcgtccgcttaaacatagagtgtgtttatgtctccttggctgatcttcaaggggatgaggatcatgcattgaaggggattatgttgagagctgaagatgtgcaagggaagaatgtcctgacaaatttctggggaatggatttcacaactgacaagctgaggtcattggtgcgaaaatggcaaactctaattgaagcccatgtggatgtgaagacaactgatatctacacattgtggatgttctgcattggatttaccaagagaagagctaaccaattgaagtgactctgctatgcacaaataagccatatta

SEQ ID NO: 41262 - DNA, 376 bp, Glycine max
  Clone ID: LIB3093-049-Q1-K1-B3
tttctaaggttccaggatcagatctcgttccctcgccactcatcctcggccgcgcgtcgcgcgccacgcgccaccatcaaccgcacctcttgccgtaatggcatctgaagaagttctgaaggctgttttccctttcctggacggtgttgatcttgcttcttgtatggctgttgataagcagtggaaagacatagctagcgatgatttcctttggaaatgtctgtgtgccaagagatggccttcgatctgtaagcaacctaatccttctactttaacctactacaagttttacaaaacctttcataaactccagcaccgtataactcttctccctactagaattttttttgatgatttggagttcttcattgacatt

SEQ ID NO: 41263 - DNA, 432 bp, Glycine max
  Clone ID: LIB3093-046-Q1-K1-F1
gcagatcttcattttctatgcacagggaaaccacttggttcaacatggattagagaaactcgtctaaagaatgacttggatgctgatggaaggatcaaggtcgatgagcacttgagagtgaagggcaagagcaacatttttgcaattggagatattacagatgttcaagaaatcaaacaagggatgtatgcaagtgctcatgctcaagtggttgccaagaacctgaagctattgatagagggaggaggcaaagagcgtaagttgggaacatacaaggcacagccaccaatatctatagtttcacttggaaggaaaatagctgttgcacagttcccattcatgactgtgcttggaaggcttcctggcatgatcaagtcaggggatttggttgttgggaaaaccaaaaaggaattaagactcgaacctaatgtt

SEQ ID NO: 41264 - DNA, 450 bp, Glycine max
  Clone ID: LIB3093-046-Q1-K1-F2
atctggagggcaagtggcttcatcacccccatttttctgtggatctccacctagcagggcttcaaaccctgtgatccaagatgagcaatttggtagtaatggtaatgagaattttggtgcattttccttggcacccccttcaccatcttcctcagcaagaggctgtgttaggatgaagtttggtcacaccccagctgcagtgaggattgaaggttttaattgccttagcagggataggcgcaactgcagcatttctgctgttgcttaattcaattttaaaccatgaaaaagaaaagaaaaggggattaaagaatcacaaaagttctaagagcagaggagatttttgggactgaggagctaatcttaatttcaatcttattgtattatatgtatataccgttgttcacgagttaatttaaggtgtcatgtataattgagagaaggtgggaa

SEQ ID NO: 41265 - DNA, 439 bp, Glycine max
  Clone ID: LIB3093-046-Q1-K1-F3
accacgcgttcgcccacgcgtacgaccacgctttcgctcacgcgttcgaccacgcgtccgttgtttgttgttgatactcgttcttcttcttttgttgttctgtgtttgtgtttgtttttcatctcacctgacaatgtcttgctgctgtggttactgtggttgctgaagctcctgcaagtgcggtaacagctgccgaggctgcaagatgtacccagacttgagctacactgagtcaaccaccacctggaccttggtcatgggagtggcacctgttaaggctcaatttgagggtgctgaaatgggtgtgcccgctgagaacgattgctgcaaatgtggaccaaactgctactgcaacccttgcacttgcaagtgacgtattgtgagatcaagctatacgcatagatagcccttaattaggaataatgagtatctattaatg

SEQ ID NO: 41266 - DNA, 390 bp, Glycine max
  Clone ID: LIB3093-046-Q1-K1-F4
gcgtggatcacgcgaccacccttcagaggaagagtaccgtggatcttgactcatcatgcgggctcgcggtggcaccaaccgccgggtcagcactccaccggcgcatccgactccagatgcttccaccaagctcagttacaaatgctccgtttgcaacaagaagcttgccctctgtaccaagcgctcggtggacacaaggccagtcaccatagactcgctgactccggcgaccaagaccaacccaccatgacctacttcggcggcagcttcatcaacaccgactccagaggtaggacccacgaatgctacatctgccacaagtcctttctcaccagacaggccctctgcggacacagacgacgtcactacgaaggtaacagtaatggaaat

SEQ ID NO: 41267 - DNA, 402 bp, Glycine max
  Clone ID: LIB3093-046-Q1-K1-F5
ctacagatcaagcgcgatcttgaacgaagacaccatgtacttgccatcttaaatgggctgttttcagttccagaaaccgtatcatcacacgcagtacgtgaagacggaggatcacaattgcttgagctccgacgaggcctgcagtttcttctccgatgaacaagcaccgaccctgcagtggtactgtccagaacattcaagctgagatagaagaaacatgggaaaattggaaaccgctttcagaaattattgtttaatatgtagcacggttgtgttgaacactgtttattgaggttaaatttgtaaaaaaaggtttccacttgccaacataggctgattgaaggttgaaaatgaaacactgtgcataagatagagttacgaatgagtgaacagatatcaatg

SEQ ID NO: 41268 - DNA, 238 bp, Glycine max
  Clone ID: LIB3093-046-Q1-K1-F6
attggaagaaagttcgaagataaggaagttcaaagagatatgaagcttgatcctggtaagattgtcaacacggatggaaaaccttcctaccaatggaaaataaaggttgggggacccaaggtttcaacccctaagaaaccagtgccatgattctgactaagattaaagaaactgcggaagcattccatggaaagaaaatttatgatgccgtggatactgtaccagcttacttcaatga

SEQ ID NO: 41269 - DNA, 394 bp, Glycine max
  Clone ID: LIB3093-046-Q1-K1-F7
cacaaacacgagcgagagcagcgagctaaggaaaggaaaaaacagcttgttcgagaggtgaccccaaagatcttctctttacgtgctcatgtgaggacccaattcttcttctccttcttccggtgcttggatctgcacttttcggcgttttctttcattctcgcaagcgaactcggtcacgggttaattccaattttgcgcgctggtttttcccgcacgacaaaaagctttcgggaagtatttgtagggtggtcgaaggtcgagaaaggttctagattgacgtggctttggttcgtttgaatcctgaaggggtttgtttgttctaaacctacaattcggccacttcatcttatgaaagattgactcatggatcctgaatgcataaagtttgtat

SEQ ID NO: 41270 - DNA, 94 bp, Glycine max
  Clone ID: LIB3093-046-Q1-K1-F8
ataacgagatcgttctaagatcaaacagttcttagcgatgttgcccataacgctgggctaattgctcacacaaacggcgtgtcatatcttcaca

SEQ ID NO: 41271 - DNA, 374 bp, Glycine max
  Clone ID: LIB3093-046-Q1-K1-F9
acccacgcgtccggccacgcgtccgtccacgcgtacacatattacccaatcccctcatattatctaggcgtctcttacaccagcatgtcctacaccgcgcctgcggtgcttcccagctataacactacccagcccggacacgaccaggcatgctacaccaccattatagctcctaccaacatcccggacttgccctcctttatcgacaacctgtgcaactcccttcgccacggccttcaacagcaccgatcctgatccgatctcgactacctttcatcgatctctaaacccgagtcctactcctaagccaccctccgtgtccgcaaaaacttcttctactttccgcgtcaactactacgctgtcgtttcactca

SEQ ID NO: 41272 - DNA, 445 bp, Glycine max
  unsure (1)..(445): unsure at all n locations
  Clone ID: LIB3093-046-Q1-K1-G1
cccacgcgtccgattcgagaatggcctcgatatgtgaaggtgcctttccccattgcaaaggcattggcaacaccaagagaaatattactaaacaaggtcccctttccactacctgttcctgagatattaaatctggataagatccaggctttgactacagataccgttgtttcagaaaatgctttgactttcaatgatcttggaattgttcctcacaagctgaagggataccctattgagtttcttatctcatataggaaaggaggcccacaatttggttctactatcagtgaaagggtcactccagattcttggccgtaagattctttggatgtttgatcctgaatcatttttctgtcttgcttgtactaccaccatttaatttcactatttaaaaaaatctgaaatgcttntatatcttcctttcataatctgtagaatatgt

SEQ ID NO: 41273 - DNA, 451 bp, Glycine max
  Clone ID: LIB3093-046-Q1-K1-G2
ctggtcctcttcctcctcactatctgcgccgttcttcctcccctgtttcgttccactgagcaacacgctatcagttgcatgacataatacagagtgttcaattagagcataatgggatccaaaaatgcaaatgggaagaaccacaaggacaaaaggaacaaatttaaggataatttgagttctagttattcatcacccagtgatgccaaggttatcctcatcagtgatcctcgatattcaaaggctcacacggatcctcggttccgtgaggctccaaagcgtgaaacgaaggtggctgttgactctcgcttcaaccgcatgttcactcacaagagttttttgccctcttctgctcctgttgacaagagaggcaagcccaagaacaacccaacctctcagcttggttctctgcgccattactacaaaattgatgaaaaggaagttgagcaga

SEQ ID NO: 41274 - DNA, 193 bp, Glycine max
  Clone ID: LIB3093-046-Q1-K1-G3
ctggatctcttactccgcactattcaaggcggtcaccatcgcgtgtggcgacctactgaggcgcccagctgtcagccgcttatcatctcacaaagcgtgcacttgaagcgctcagcaaccctgagctgcctgttggcagacccgcaccggctaataggacaactgtactgatagctctggtgctgattgttga

SEQ ID NO: 41275 - DNA, 376 bp, Glycine max
  Clone ID: LIB3093-046-Q1-K1-G4
ataaaaggataattactaactatctgagcacgatcttactgccctgttacgatccactgagggacacgctatcagttgcgtgacataatacaaagggttcaattagagcataatgggatccaaaaatgcaaatgggaagaaccacaaggtcaaatggaacaaatttaaggataatttgagttctagttattcatcacccagtgatgccaaggttatcctcatcagtgatcctcgatattcataaggctcacacggatccttggtaccgggaggcttcaaagcgtgaaacgaacgtggctgttgactctcgcttcaaccgcatgttcacttacaaaagttttttgcccttttttgctcatgttgacaagagaggcaa

SEQ ID NO: 41276 - DNA, 310 bp, Glycine max
  Clone ID: LIB3093-046-Q1-K1-G5
ggccaagcttagtaaactattcttattctttgttctagagagatcagggaatgtggagattggggtgaaatgagctagtattcggattggatcttggtgtatagagaacataaaaaaaaatggagataaggatttttgtgtcgcagtaagtaaaaagtaagccgaatgatggatgataggatattgtatggttaatgtagttgtttatggaaaattcttggtccattgctattctagtatgaattcttcatatatatttgaatataccaacttttgcttttcaattcaaaggagtcaattgaatgaaaaa

SEQ ID NO: 41277 - DNA, 311 bp, Glycine max
  Clone ID: LIB3093-046-Q1-K1-G7
gacacagtcatgtgcactactggcactgtgtctggcttgcactccaacacagatgcgatcaggcaaaatgacattgaaaactggtggatcgtctataattggagaacgcatagtgcaccttttcaatgttcgtgtgatcccaaatatctaaacatgccaagtgaaagagcgaagaaaagtctaagacaatgtctgggatcagttacacgattgatgagacccttcatgtgtgatgccacaagaaagatgaagagcacacatggaagcaacaccatggtggataattcaaaggggagcatcattgtgaacac

SEQ ID NO: 41278 - DNA, 343 bp, Glycine max
  Clone ID: LIB3093-046-Q1-K1-G9
gaaagtgagtcttcagagtctctgtcttctttatactttcctcatcaccaaccttctcaaacagttctgaaggatctaataatggttcacatgcttggccttgtttgtacttctaaaggaacatttgctgactgtttgccacatgtggtaacagagctgtgcaatttaggtatcatttctgactcatcacgcgatatggcatctgaaccaccttgcatattcaacaaaaccttcaatcgtgttttccagaaacacctggctttatctataatatgtcatttttggaaacctgatattggacgcttaaacacaacttttcatggttctccatatttcaatgatt

SEQ ID NO: 41279 - DNA, 432 bp, Glycine max
  Clone ID: LIB3093-046-Q1-K1-H1
cacccttctttccttttctgcttttcgatctgttgtgttttctgtttcttattgtgatattctcgtgtcgaataataattaaatgtgtttgattgttgatttttgttgttcagatattttaccttcacatgtattgttgataccaaaaacaaaacaagccaagtgaaagagagaagaaaagtcaaagacaatgtcagggatcattcacaagattgaggagacccttcatgtgggaggccacaagaaggaggaggagcacaagggtgagcagcaccatggtggagaatacaaaggggagcatcatggtgaacacagtactgaatacaaaggagagcatcatgttggtgagcacaagccggagcaccatggaggagaagagcacaaagaggggttcctagacaagatcaaggacaagatccacggcgaggaagg

SEQ ID NO: 41280 - DNA, 262 bp, Glycine max
  Clone ID: LIB3093-046-Q1-K1-H10
gcattttcagaggaaaatggcgggtacggtttcgactttgttcttcttcgggtttatggtttctctgggttgtccttttcagatctccgctgatgaatgcgcagatacggagttcgcactcacattggatcactctaactgttacgacactgacagcaagcacgatttcatcgtcgtcgagttctacgccccatggtgtggtcactgtaagaagcttgctccggagtatgagaaagctgcttctatcttgagtagtcatgat

SEQ ID NO: 41281 - DNA, 332 bp, Glycine max
  Clone ID: LIB3093-046-Q1-K1-H12
gcgcccacgcgtccgcccacgcgtccgggagtcataacagtgaagaataaaaaagatgaaacaacatttactgttcactttcctgctagtggagaaacgttggttgttagagcttggcatctccgtccatcccttatctggaaggatggaaaatggattgaatcttacaaagtggggacaaatgacagttctacccatgagggtgatacaccaaatgaaaaacgacctaaattgggtagtcatgtggtagatgtaaaagggaaagacaagatgtcaaaaggcattggtgctgtggagtcggcaaaacctgatgagatgacattacttaattt

SEQ ID NO: 41282 - DNA, 103 bp, Glycine max
  Clone ID: LIB3093-046-Q1-K1-H2
gtgcgatcccagtgttagtgtgtatttactctctgctcactccgggatcgatattgtcaagaacagatcgaatagccgttcatcgatttgtaggatctgtgag

SEQ ID NO: 41283 - DNA, 446 bp, Glycine max
  Clone ID: LIB3093-046-Q1-K1-H3
tgtaaataaaatatttttggagaataaatttgatgctgagatgcactttgctgctgttgcatatgtgggagagagcacactggaccctcttaagtattatcacagtattacgtggaataccttgttggtattggagtctatggctaaatatggtgtgaagacattaatatattctagtacatgtgcaacgtatggggaacctgaaaagatgcctattatagaaataacagaacagaaaccaattaatccatacggaaaagccaagaagatggcagaagatatcatctttgatttttccaaaaattctaagatggcagtaatgattctgagatacttcaatgtgattggatcagacccagagggcatactaggtgaggctccaagacctgaacttcgagaacatggtcgaatttctggtgcctgctttgatgcagctcgtggtatta

SEQ ID NO: 41284 - DNA, 455 bp, Glycine max
  Clone ID: LIB3093-046-Q1-K1-H4
attcaatccattctaaacaactttcctcatttacaaagcctccacttacaaaaaagaaaaaaatgcaccatcaatgatctgtgaacaagggaaaccacacacatagctttaattcgatctaattgcttcatggaggaccaaccattatcatcaaaatcaaagactgctgctttggatcaaacccttcattcaattgggtttgaaattgaagacttgtcaccacaaaaaatctctggtcgtctacctgtcacccagaaatgctgccagccattcaaggtgctttatggaggggtatcagcattgatagcagagtctttggcaagcatgggagcacacatggcttctggttacaaaagagtggctggaattcaactaagcatcaaccatttgaaaagagcagagattggtgacttggtctacgctgaagctacacctttaaatgtctgcaaaaccat

SEQ ID NO: 41285 - DNA, 278 bp, Glycine max
  Clone ID: LIB3093-046-Q1-K1-H5
tccacgcgtccgagcgagccaatttgttgcaatggatgcgcatcctagcttgtaaggtatctagagactgctcttaaacgccttcgatgtcaaactgtagtagtgccctgcatttctaggtcgtaggtaccggatggagcgaaaatataatgaacagccatatagagaccagttctgcttctgcgtttaattgacacagaaagaagccggatgtcacctttacagtgcaaatacaaattaaatcagacggtaaaatcactgagaatgctgaaggtcct

SEQ ID NO: 41286 - DNA, 177 bp, Glycine max
  Clone ID: LIB3093-046-Q1-K1-H6
ttcccgttcgaccacgcgtccgattcaatccattctaaacagctattctcatttacacagactacactttcgataagaataagggcggttctgattgccgttcatagaaggggaagatcagatattgatatgatggttactaagacatacatggctgagctgtacactgctattaaa

SEQ ID NO: 41287 - DNA, 436 bp, Glycine max
  Clone ID: LIB3093-046-Q1-K1-H9
aagattaacccagactcagctaaaggctactttttactaggaatgtcaagggctatgttgggactatgggaagagcatcaagtgaccttcacgtggcttcaaagttagattacgatgaatagattagtatggctcttaaaaaggttgaacctaatgcccttaaaatcgatgagcatatgataaaatatgaacgcttaagaaagcaaaagcaacagaaaagagctcctatcaagactgaagcttctattaagaaggagcaagaaactgaagcccaagtacaagcagcattatctgctttaaaagatgggcaagtcatgggtattcactctagtggtgaattggaaaagaagttaaatgctgtatcaaagacattacgcttggcgatcctgtattttactgcaacatggtgtggcccttgatgttcattttccctatt

SEQ ID NO: 41288 - DNA, 441 bp, Glycine max
  Clone ID: LIB3093-047-Q1-K1-A1
cccacgcgtccggcaaaatattacggagaactcagttagaatattggtggtttttcttggtgttaccaagggcgaggatggttctctctccaaccaagacaagtcaaaggttttatttacaacgtatatggcatttacaatatatgcttctggggatgtcattatagaatgcaatgtgaaaccaaaccctgatcttcctcctttgccacgtgtgggaatctagttaaatgtggaaaagtctttggatcaagtaacttggtatggaagaggaccatttgagtgttatccagatagaaaagctgcagccctggttgcagtctatgaacataatgttagtgagttgcatgttccttatattgttccgtgggaatcttcatgtaaggcagatgttagatgggcaacatttagatacaaagatgcttttggaatatatgcttctaa

SEQ ID NO: 41289 - DNA, 443 bp, Glycine max
  Clone ID: LIB3093-047-Q1-K1-A10
gccaaatactaatgtttcaaataccctgccaaatactaccatcatatccatggctgtgcaaattgtaggttttgatggggttgagatccatggggctcatggctacctgcttgagcaatttatgaaagataaagtgaatgaccgaacagacgaatatggtggatcccttgagaaccgctgccgatttgctttggaagttgttgaagctgttgttaatgagataggggcggacagagttggaattaggctatcgccattcgcagaatattcagagtctggagactctaatccaaaagaattggggctttacatgatgaatgccctcaataagtatggtattctttactgtcacatggtggaaccaagaatgaagactgttggagaaaaaactgaatgccctcataacctggtgcctatgagaaaggccttcaatggcactttta

SEQ ID NO: 41290 - DNA, 384 bp, Glycine max
  Clone ID: LIB3093-047-Q1-K1-A11
accgcataagagagaaacacataaatgctgataatcgatgctagcgcgaagacaattgctcgaacagtgtcgttggaggcgccaccattggggattagggttctgcctcggctctaccacgagagggtggtggaccactacgataacccccgcaacgttggatccttcgacaagaacgaccccaccgtcggaacgggtcttgtctgagcacccgcgtgtggtgacgtcatgaaactccagatttaagttgatgacaaaacggtgaagatcgtcaatgcttgctttataaccttcgggagtggatccgctatatgttgcttcttctaaactactgaatgggttaatgaaaagcaaatttatgaagtttttgaccattaaaaacac

SEQ ID NO: 41291 - DNA, 469 bp, Glycine max
  unsure (1)..(469): unsure at all n locations
  Clone ID: LIB3093-047-Q1-K1-A12
cccacgcgtccgcaaaaacactcatcactctatctctctcaaaagtgaaaatgtgtgggggtgctataatttctgatttcatagacgtgaatttgaacagtggtcggaaattgaccacccacaacacccatcatcagcttcacactttctctgatttccacgccacctcttcttccaaacatcaaccatcctaccaggatccaaacctccctaggcctcctccgcttccaaacaaccaaggagtgaagttgaaggctttgactttgaacactggtcgagtacggaagaacgtgtacagaggaataaggcaaaagccatgggggaagtgggctgcagaaataagggacccacgtaagggtgtgcgtgtgtggctgggtactttcaacactgctgaagaagctgctcgtgcttacgacaatgccgncaagcgcattcgccgagacaaggccaagctcaactttcccgacag

SEQ ID NO: 41292 - DNA, 391 bp, Glycine max
  unsure (1)..(391): unsure at all n locations
  Clone ID: LIB3093-047-Q1-K1-A2
ctctgcctaaaaggattgaaagatgggtcaagcactaggttgctatcaagttgatcagtcagatgtggctatcaaggagcattttggaaaatttgatgatgtcctagaacctggatgttattgactgccttgagtgtctngggtaccagattgctggtagtttgtcactgcgtgtgcagcaacttgatgttcgatgtgagacgaaaaccaaggacaatatctttgtcactgtggttgcatctgtgcaataccgagctgtgtctgagaaagcatctgatgcattctataggcttaccaacacaatggagcagatccaatcatatgtttttgatgtcatcagggccagtgtaccaaagttggaattggattctgtctttgagcagaagaatga

SEQ ID NO: 41293 - DNA, 474 bp, Glycine max
  Clone ID: LIB3093-047-Q1-K1-A4
ccttggtcaagccctctaggccacttctctacaaccccattaagaattatgggcaagcaagcaaaggaaagcatagccgtttgatggaagagagggcaccttccacagctgaagaatttgagagggttgctcgatggagaatgccaaggaagctcaaaagggggtggcaagtcagagtcttggcaaggcaattgatggtgcagaagaggcttcaataggtaagtcaaaggttgaatcagttaagaataggtacaaagggcatgaatgaaagcagggtttggttaccacaggagggggtgattattatatatataggaaccttttgtgctagctgacttgaaactgtgacatatatagctgttggatatgcagccagagaataagggagtgtcttgtatttccaaaaagcttgtttaattgccagtgtttttgaagcataaagagaccaaacaattgaaaacttttaatctgttt

SEQ ID NO: 41294 - DNA, 337 bp, Glycine max
  Clone ID: LIB3093-047-Q1-K1-A5
gtaaacaaaatacgtttgaccggtggggaaccaactattagaaaagatattgaagacatatgtttggaactgtcgaccttgaagggactgaagacattgtcaatgacagtccaagtgatattgccctgagagagagaactttcaaagctgaaagaatgtgggcttaattctgtaaacattagtttagacactctagtaccagcaaagtttgagttgatgacaagacgcaaagggcatgaaaaagtaatggattcaattaatgcaaccatagaccttggatttaagccagttaagggcaatcgtgttgtaatgcgtggatttaatgatgatgaaatct

SEQ ID NO: 41295 - DNA, 266 bp, Glycine max
  unsure (1)..(266): unsure at all n locations
  Clone ID: LIB3093-047-Q1-K1-A6
gccacgcgttcggcggtgacatagtgtatgttatataactgaatcatagtctctgttttagggacagccttctgaatgttcagcatcttaacattcaacacttacgatctcccttaattnagttatggaaaaataaatttgtgccgatcacatttcctgaaacactggcttatacacacagatcatcatgttaaatagtatgttgtatgcttgtcggaactgccatggaagggaacatgattcttactctatggatggcttcttgt

SEQ ID NO: 41296 - DNA, 363 bp, Glycine max
  Clone ID: LIB3093-047-Q1-K1-A7
cccacgcgtccgcccacgcgtccggcagcagccacacttcttcgccgtttcagctgaagagccatccgcaggtaagcaatggttaagcataataatgttatcctcattgtgaaacatcggaaactactggcagaactatgtgaagacttggtttaatcaaccagcccgaaagaccagaagacggttggctcggcagaagaaggctgtcaagagtttccccaggcctactgctggatctctcaggcctattgttcatggccagactctgaaatacaacatgaaagtcagagccgtgagaggattttcactggaagaatagaatgctgcatgaattgcgaagaaacgtgctccagctattgggat

SEQ ID NO: 41297 - DNA, 478 bp, Glycine max
  Clone ID: LIB3093-047-Q1-K1-A8
aatacttcaaacacaacaacttctccagcttcgttagacagttaaacacttacggtttcaggaaggttgatccagatcgctgggaatttgcaaatgagggttttttgaagggtcaaaagcacttgcttaggagtattacacgacgaaaacctgcccatggtcaaaatcatcaacagcctcagcaaccgcatggacagagttcatcggtaggggcatgtgtagaagttgggaagtttgggcttgaggaagaggttgagaggcttaaaagagataagaatgtgctcatgcaagagcttgtgaggttgaggcagcagcaacagaccactgataaccagctgcaaacaatggttcagcgccttcagggaatggagcaacgacagcagcaaatgatgtcattccttgccaaagctgtccagagccctggcttctttgctcagtttgtacaacagcaaaatgacagcaataggcgcataactga

SEQ ID NO: 41298 - DNA, 479 bp, Glycine max
  Clone ID: LIB3093-047-Q1-K1-B1
gtaaaggcgaaagactttaggtttggaattgggaattagggttgttcgcgtcacgaagatgatcgaggtggtgttgaacgatcgattggggaagaaggtgcgcgtgaagtgcaacgacgatgacaccatcgtttagctgaataagctggtggcggctcagacgggcacaagagccgacaagatccgcatccagaagtggtacaccatatacaaggatcacatcactctcaaggattacgagatccacgacggcatgggtctcgaactctactacaactaaacacaatgtgtgttttatgcatgatatattactatgatctgggaatgggatgaggcgccaaatgtaattttgacttgcgaaagtccctatgatttgaataatgtacattcccaaatgatattgggtttacataccgatgacaccctaagttgctttgtatatataacctatctgatgacttgttgctaagcttcattaa

SEQ ID NO: 41299 - DNA, 470 bp, Glycine max
  Clone ID: LIB3093-047-Q1-K1-B10
gccacgcgtccggtagttgtccctgtcaagctagagaggcagctcaatggcatcaatcaagtggccattctgttgcataatgactgtctttatctctcccaggagattcttgggtttgcatttgagtatcgaacagactttccaagttccatgaaggagcatgctgtgtttgttgatttagctccaagatttcagctgttggcagaagaaatattgcagagacaagttcaccttgttatttataatttgaaggaggctatagatggtgctgatggatttcagaatactcatcagatgaaacagtttgagtcagctaaattcagcatagaccatgttgttatcattctggaaaaagtacatatcatatgggagccacttttgctgccttcaacttacaggagaagcatgtgtacagtcttagagtcaattttctcaaaaattgctagagatatacttctggtagatgacat

SEQ ID NO: 41300 - DNA, 455 bp, Glycine max
  Clone ID: LIB3093-047-Q1-K1-B11
gccacgcgtccggcaaaaggccatataatttttttttatttgaaataatgtccgggatcatccacaagagtgaggagaccctccatgtgggagggcacaagaaagaggagcacaaaggagaacaccatggtgagcacaaaggtgaacacaaaggagaacaccatggtgagcacaaaggtgaacacaaaggagaacaacaccatggggagcacaaggagggacttgtggataagatcaaggacatgatccatggtgatggccatgacaagggtgagaaaaagaagaagatggacatgatgaagaaggagcttggacatgaccatcatggtcatagcagcagcattgacagtgattagatcttatatgttaagcaggtgtacggtacgatggttatgaggagcccgaatcccttttcctgcttaatgatataattcaaataaaatagcgattccgga

SEQ ID NO: 41301 - DNA, 390 bp, Glycine max
  Clone ID: LIB3093-047-Q1-K1-B12
cccacgcgtccgcccacgcgtccgggaggggtacaccaaatgctaggctttttacaggatgctgataactggagaagatcaccaattaaggatgttactgaatctgatgatgatagtgggggacgaggatatagatcattgcatgattttgctgaaagtcgttatctactgaaacttagatctgcgtatactaatttggaacgtccagaaagtgtttgattgatcaacatcaagcaagtactgactaatttacttggagcaagtcctgcggattgcatgctcttgaatatggatatactttttggatatatagtcttacaggtgatcatttaatgagagatggtaccatatgcattggagagtggaaactattctttttgcgcaacatta

SEQ ID NO: 41302 - DNA, 348 bp, Glycine max
  Clone ID: LIB3093-047-Q1-K1-B2
gtttggcctacgactccacgcgtggacctgcgaatctcccctgatcgcatctcaaatctgctatccgtggcttcatatcactcgacggggaccttcgcttgacccatctgaagatccagttgaatctggatctgatcgaaactgtactgactcaaatcctctgcagatctgacgcgcatgatcgccattctcactctgctcatcgtatacgtgcgtcagaaatgtctcttttaccgcaaggcgcactccttcaaatcactgagagttgcaacgattacctacaggaggagttctacgtgttccgagaaattgtcaactagtataactacgaggcgacggattcctagt

SEQ ID NO: 41303 - DNA, 107 bp, Glycine max
  Clone ID: LIB3093-047-Q1-K1-B3
cccacgcgttcgggctctacgtgccgacactctcatcgtccaatcgcgaacgtcaaactacagagctatggggatctgaagcttatgttcaatgaccaaggacaagc

SEQ ID NO: 41304 - DNA, 408 bp, Glycine max
  Clone ID: LIB3093-047-Q1-K1-B4
attggcgtctttgctcagtgaagatgcatctcaggatgctgctggaaaccctatgaacctttggagcttcgacgacctgccttccatggcaggagtcttctgaacaccttcatatccctttttatgaattgtgatcgtgatgttggtgatggaatccacagcaagaaaaccaacctgcttaaagcatatgtggagtttatttatcttgtagctaatgcagtataggactatatataggtttttatagggtatcctttgtgtgaaactcaagagacctcgttttcaggggattttctgtttgatgtccataaggattatcaattatgttatatatggtctgggatacagtcttgacttacagtttttaacttgggtgttatcattggtatggcaatttgattatgattt

SEQ ID NO: 41305 - DNA, 329 bp, Glycine max
  Clone ID: LIB3093-047-Q1-K1-B5
atcctcctctgtctctctctctccaccattgccatggatccttacaagctgctgacatccagcgccttcaattctcccttctggactacaaattctggtgctactgtttggaacaacatcttctttttaacctatgtagctagaggtccaattctgcttgaggattatcatcttgtggagaagcttgcaaactttgacagggaacgtatcctagaacgtgttgtccatgccaggggagctagtgcaaagggtttctttgatgtcacacatgacatttctcacctgacatgtgcagatttccttcgagcccctgtagttcatacgcctgt

SEQ ID NO: 41306 - DNA, 445 bp, Glycine max
  Clone ID: LIB3093-047-Q1-K1-B7
agcgagcgaggtagggttttcgttgttcccccgtctttgaattcagttcgcgacgatggggtccatccccgatccaggcgagttgagcgagttgactcagccgagcttcgacgagttccagcgccaaacttccctcatgaccagctgcaccctcctctggaaggagctctccgaccacttctcctccctcgagcaagacctcaaccacaaatccgaagccctcaaacgcaagattcgcaccctcgacaacactacttccgactccctccgcctcctcgatcgccgcgaaacctccctcgacgccacgctccagatcgccctccgcacgctcgacacgcgccgcaccgctgccctctccgccctcctcaccgacgccgacgacatcatcaacagctcccccgacggtgaggtcgacgacaccaccggcctcatcctcaaactcaag

SEQ ID NO: 41307 - DNA, 454 bp, Glycine max
  Clone ID: LIB3093-047-Q1-K1-B8
gaaacaactaagggttgctgctcgcatattatctatttcaactgatgaaacgtttacttcagattggtgtgacatgctacctgatgaagctgaggttctagttttaaatcttaactctagccagtacccattaccgaagttcacagaaaatatgagcaaacttaaagttctgatagtcacaaattatggtttccatcgttcagaattaaacaattttgagctacttggttctttatctaacttgaaaagaatcagattggaaaaggtttcagtcccttccctctgcatattgaagaatctgcgaaaattgtcccttcatatgtgtaatacaaggcaagcttttgaaaactgttctatccaaatctcagatgcaatgccaaatcttgtggagatgagcattgactattgtaatgatctggttaaattgcccgatgggctgagtaacatcacccca

SEQ ID NO: 41308 - DNA, 422 bp, Glycine max
  unsure (1)..(422): unsure at all n locations
  Clone ID: LIB3093-047-Q1-K1-B9
gatgaattgaacccaaatactaacgtggtttctcttcaccgattccctttatatacactttttcaattacagttacaggtaatggattaaacaattattagtcggttaataaacacactctctctctactaattctcatcgcattccttttcctctttctccttccaattgagaattcgtttctctaattgacgcanagttcacagtgaaattagtgcaatggaagcggatttcgtcaccagtgacatgctcacactcacgcaggacgctttttacgccaacgataatgatgatgtagctgttgaaggggaaagatgtggaatatgtatggatatggttattgacaggggacttctggattgctgtcagcactggttctgctttgtatgcattgacaactgggctactatcactaatctttg

SEQ ID NO: 41309 - DNA, 499 bp, Glycine max
  Clone ID: LIB3093-047-Q1-K1-C10
ggcaactacatccgaccctgcttccatcaacccggccaacgcgcttttgggcatgcccgggtggaaacccggtccccatttccaggatgatatgaagagctatgtgaatgaaggggtgagggtgttggtacatgggaagagcatagttgcggaagatgagttggacaagaggtgggaagaagttactggggaggttattgatgaagtgatcttcttcagcaagcacactgctgccttcaacaagcctgccctgactgttcaccctattggagttcctcatttgcgccaaggcgatgttcccccccaaggcggcagacctggatgggcagctcttccaaatcctaggatggggccttggcttcgccttttgaaaaaccttgcccaagctcataatcttgtccctgaatttgagattactttagaggccactcaccatggaccgttgaccaataagccaaccatgtttttggagattggtagtactgaaaactattggaag

SEQ ID NO: 41310 - DNA, 284 bp, Glycine max
  Clone ID: LIB3093-047-Q1-K1-C11
aaaatctttctatataaaaccatgcataaaatggtgccaaaaagataaaggtggatcgtgactagtgggagatttttaagggatggaatcaacaaatttcatgctccaagccggatgtgaccactcaacaccagctgttaaatattttataggtctttttaacagctattaaagaggtagtgaaagatgagggaattagaaagaaggactagtgtatttgtatgtgtaagtacattttgtctttttacttttaaatgagggagttaaattgaaacccatatggc

SEQ ID NO: 41311 - DNA, 442 bp, Glycine max
  Clone ID: LIB3093-047-Q1-K1-C12
gttagctacctaaaccctagtctccatacatcaactcgagaggctaaagagactgcaacgttgtgctgtccgtcttgaccgagccagagctatgactaggtccttgattttgccctgtaaaactaatcccaatcacaacagaaataatcaatggcaccgaaacagaccaaggctgataagaagatctcttacgatgctaaactgagcgacctaatggaggagtaccgccaaatcctcgaagaaaactccgacaacttgggatcgaaccagctccagaacattcgcaagggtctacgctgcgactctgttgtgctcatggggaagaacaccatgatgaaacgctatgacaggatgcacgctgagaaaaccggaaacaatgcctatctcaaccttatccccctccttgtcggcaatgtcggattgattttcaccaacggtgacc

SEQ ID NO: 41312 - DNA, 101 bp, Glycine max
  unsure (1)..(101): unsure at all n locations
  Clone ID: LIB3093-047-Q1-K1-C2
cccacgcgtccggaatcagagnattcttgaccactatcacgctcagggatgggagtcttaaggggcgtcggtgtctactcatcaacagttccgttacacgc

SEQ ID NO: 41313 - DNA, 284 bp, Glycine max
  Clone ID: LIB3093-047-Q1-K1-C3
acgctccagaaaaaatggcggtgcctctactctcgaagaagatcgtgaagaagaggctgagggagtagcaagaggcctcaaagtgacaggaagattgctgtgaagacaaactggtgaagaccaaggagtagggagaaagagtaagaagagaaagttcaagggatgcactctgatgccgaacattggttatgctttagacaagaagacccgccactatctaccgagtggagtcaagaaatttgttgttcacaatgtgaacgatttggaactgctcatgaagcaca

SEQ ID NO: 41314 - DNA, 357 bp, Glycine max
  Clone ID: LIB3093-047-Q1-K1-C4
gccaaccaacttcttctcctttttctgcaatgggttgtttttgatcttcacaatccaagcctgatggtgagccaccccttcttttcaatcctctcaaaacctcttctttgcattccgatatttgtgaatctttttctattttatcatgggtcgctgtcaaaatcccttctttcttcttcttgtttcatggtattcgtgaacaagcatgtaatttttgctctaaaaaattgtactagtttttaagggggagagaatcatgaaatatagtgcataggacaaacaaatttaaaacctttctgttgggatatagatatattgccacattttgtattgaacaattgaagtcctaccctctgt

SEQ ID NO: 41315 - DNA, 472 bp, Glycine max
  Clone ID: LIB3093-047-Q1-K1-C6
cccacgcgtccggaatcagagttttttttaccactatcaggtttaggattattatctgaaatggcatcggtgtctactcagcaacagttccgttacacgcagccaccatcaaaggtgcttcatttgagaaatttgccgtgggagtgcacagaggacgaactaattgaacttgggaagctatttgggaaagttgtgaacacaaagtgcaatgtcggagcaaatcggaatcaagcttttatagaatttgcagatttaaatcaggcgatcgcaatgatatcatattatgcctcatcgtcggagcctgctcaagtacgagggaaaactgtgtatcttcagtattccaataggcaagaaatagtgaataacataactgcagcagatgttgctggaaatgtactgttggtaacaatcgagggtgaagatgcaaggcttgtcagcattgatgttttacacttggtcttttcagcctttg

SEQ ID NO: 41316 - DNA, 98 bp, Glycine max
  Clone ID: LIB3093-047-Q1-K1-C7
cccacgcgtccggaatcagagttttttctaccactatcaggtttacgattattatgtgaagtggtcatcctgtctactcagcttcatttcctttacac

SEQ ID NO: 41317 - DNA, 473 bp, Glycine max
  Clone ID: LIB3093-047-Q1-K1-C8
cgcaagtggatggctatcaacccaaaggaatttgtgatgatgatgagattggttctgatgatgaagccacagataatgggaagatcaagcaccatattgaagaagaggaataagaagaaagataagaagagtgtgttggaaagaacaaattagctggctttttgggagagctgttttcatacactccactggcagttgtgagaagaactagaactaaaagcaagatttggccaacaactatgcccaaatgtatacttggtagttttagaaagattagaagtattgtatgctttggcaggaagaggcactattctcggagacttccatggagaccgcattaacaaatggtgttttctaaccgcacaacatatccaatgatggcagcagatgaaaaagccgaggtgtgaaaattttggttcctatgcaaatgatgtgcgtgtgaaaactgtattgctgttttgactgagatggca

SEQ ID NO: 41318 - DNA, 248 bp, Glycine max
  unsure (1)..(248): unsure at all n locations
  Clone ID: LIB3093-047-Q1-K1-D1
ggtttgtacagcgtttgctttgggggcgaaaaattcagccttttccgatttgcaccaaatagnacagagaacaacaccatttggtcagtcttctatgcttctgcctccaatctatggtttgttattcctgaattggtatgctcttcaattgatgcggttcgatttgaaaggattgagggggttgtttgttggaattggactcaaaattagggtatgtgtgttaggatcgtctcgtgtgaatcgattct

SEQ ID NO: 41319 - DNA, 210 bp, Glycine max
  Clone ID: LIB3093-047-Q1-K1-D10
gtttgttgttgtaactcgttcttcttcttttgttgttctgtgtttgtgtttgttttttctctcacctgaaaatgtcttgctgcggtggtaactgtggttgcggaagctcctgcaagtgccgcaaccgctgccgaggcttcaagatgtacccagacttgagctacactgagtcaaccaccaccgagaccttggtcatgggagtggcacctg

SEQ ID NO: 41320 - DNA, 409 bp, Glycine max
  Clone ID: LIB3093-047-Q1-K1-D12
cccacgcgtccggtttttccgactgtggcccagtttgccagctattgtagaatatactggcacatatacatatgaaggaagtggctttaaggctactgcagcccagcagtatggtgcatctcctttcttaagtggactgaaatccttgtcttccaaaccattccacaaagtttgttcacatattatccgcacagtggcagggtttgagatgtgttatgctgccaaaacttggcatggtggcttcttgggcatgatgatttttggtgctagtgaagtgagtagaaatgtggacttaggtgatgagactacaaccatgctgtgcaagtttgtggttcgtgcattcgattcatctattaccaaggagatcggatcagaccttcagggttggttggatgaccttactgatggt

SEQ ID NO: 41321 - DNA, 106 bp, Glycine max
  Clone ID: LIB3093-047-Q1-K1-D2
gcgacgcacagcgtcagaacagaggcggcatcagccacgttcccgggcggggcaccgaaagagcatcgggaatgcccaggaggacacaaggctagacgccggcagc

SEQ ID NO: 41322 - DNA, 279 bp, Glycine max
  Clone ID: LIB3093-047-Q1-K1-D3
cccacgcgtccgactagatggtgcttttaggattttccgtgaaatgcctgagagaaatgtggtatgctggagtgctgtaattgcaggctatgttcagaatgaccggtttattgatggatatgaattgatgaaaggatattctgaaagtaggtatgggggtgagtcaatctacctatgctagtgtattcaggtcttgtgcaggattatcggcatttaattggggcacacagttgcatggtcatgctctaaaatctgattttgcatatgacagtataattg

SEQ ID NO: 41323 - DNA, 356 bp, Glycine max
  Clone ID: LIB3093-047-Q1-K1-D4
gtttctaaggatgaaattcctccagatgaatatgctttggaacttaatggcgttaccatagtagaaacagcaaaattaggccctcgcccagagaagcctattgagatatatgaatttgagagctagtccattttggtcgaaagtgttagagaaattgttgccattttggaccttgatgttcttttctatccttgtccaagaaatggcccaaatttccgtcgaaaggttctagagatgggtggcaaactgcagttcccctacatggttgacccaaacacaggcgcttcaatgtatgaatcagatgacataattcgggatttggttgacaaaaatggtgatggaaacgtttctctatc

SEQ ID NO: 41324 - DNA, 236 bp, Glycine max
  Clone ID: LIB3093-047-Q1-K1-D5
gttgctccatggaggaataaccttattctgtgaaggaaagctgctctagctttttgttgatgggggcgtctctgatggcagctgccagcgctgcatccatgttttgttctttctggttcttggttttgtttattctgtgcactgttgggaccggtctttcctttgtcctcagcaacaatcttcttggttggatccttttctgcggctttttgcttatctggactctctattttgtc

SEQ ID NO: 41325 - DNA, 478 bp, Glycine max
  Clone ID: LIB3093-047-Q1-K1-D6
gtttgagatcatgctggagagaagatgttcttgtcctttcttgttctgacagaatccttcggctatccttgcagcttctttctagatactcaagttggctgtcttatgtgctgactgtctcgcaaaagccatatcacaagcactagccctgggtgtgaatgggccgtttcagctgtcatagatgactttatttttgttattcatgatataacatatttggaggagcaggttcatggtgattaccttcaacatgtgcttcagcttttgtcttcatgctcccctgatgttctggaatcaataaggcagagcattttactgagtggtcaatcattaaaatctgtagaacctgtggtcattaaagcattggaggagtcactagttggataatcaagtgaagacttaagacaaatgaatgggataacagcaacctataggatgactaatagacctttacctgggaggcattcaccatatattt

SEQ ID NO: 41326 - DNA, 71 bp, Glycine max
  Clone ID: LIB3093-047-Q1-K1-D9
aattccggtcacccaaccttcggcaaccttcctccattctatgaccgaatctaagccaaactacaaaaatg

SEQ ID NO: 41327 - DNA, 103 bp, Glycine max
  Clone ID: LIB3093-047-Q1-K1-E1
gccctagatcgcgatctacaacgcgaacagtgccacaacacaacacagcatcaccataataacgacttgaccctgcctgaccttaacacccaccaccccgaga

SEQ ID NO: 41328 - DNA, 376 bp, Glycine max
  Clone ID: LIB3093-047-Q1-K1-E10
cccacgcgtccggccgaaggttcatccaatctccgaaggccttcaccggattgcaaccatgtcgaggagaaaggttagagagccaaaggaggaaaacgtgactctgggcccagctgttagagatggtgaacatgtttttggagtcgctcgcatctttgcctccttcaatgacaccttcattcatgtcactgatctgtctgggagggaaacacttgtccgcatcactggcgggatgaaggttaaagctgacagagatgaatcatctccatatgctgctatgcttgctgcgcaagatgttgctgctagatgcaaggaacttggcataactgcttttcatattaaggctcctgccacaggtggaaacaagacaaaaaca

SEQ ID NO: 41329 - DNA, 418 bp, Glycine max
  Clone ID: LIB3093-047-Q1-K1-E11
ctctgtcactttgcctacccactaagaaaaatcgatcctttcttatcttacttgcgcatcggttctcttcattcaattcaattttgttgttagtgaaataataatgaggggtagttgagcattcaaacaacccataccctcatttttatgtgtgggataccgtcggacaggtcggtgactccgggagctaaaccacttcttgtttgggatttgtagtagatttggcctaatatttgaattagaccgtgtagaattgcatctggcaataggttgttgagtagtacgcataacgcattgttttgtgttacaaatattcttaagcttttctggggaatttttttagtttgtgggatacaatacaatttgtagctttggttagtgattctccaagatgtcaaaatttgagggtgttattgtc

SEQ ID NO: 41330 - DNA, 492 bp, Glycine max
  Clone ID: LIB3093-047-Q1-K1-E12
ccctttctttttttctatacattctttctcttccaccctctttcaaggctccacttttatggttccttgtaatttcttcatcaaagtatcaaacttgtcttctctctctctccttttacttcctctgcatatatgatatattcttccaaaatcctcatctaagggttaattttgttccggacaagtttttattattattattattattttttaaatttcagaatgatttacttataggtttctgatccaaggtttaagatgttatagtttccttgaattctcatctgggttcaacctgtttgatgttttgactgaatcagtttgaaatagtggtgattatctgataccaaacataaaagattcagctctttttcttgtttctttgtcacaagacttggattttgagaatctggaaacatgggttgttgtgcaagtaaagagtcagagccgcaacacaatggttacagacatgcttggactggtggtgtgcac

SEQ ID NO: 41331 - DNA, 205 bp, Glycine max
  Clone ID: LIB3093-047-Q1-K1-E3
catcattgtattgtacagcacagccccaacttcttccttgtgttctgttctgttctgttcgagtctttcgctttctcttctctgtttccacgcgattctttcaattttcaatagggatttagtcacatgcttttgttacattctagattccttccttccttacttaaaaattcttatattatgcatcatttctcaccaaccacct

SEQ ID NO: 41332 - DNA, 278 bp, Glycine max
  Clone ID: LIB3093-047-Q1-K1-E5
acatagaagagaaagaaagaaaacaaagaggagaaagaaagtagttgagggaggtacaaacagtttgtgcagattgttgagaatgcctttcaagaagcctaatgatcgcctcaggcaaaagctacatagcaagaaacgacggaggcaaattcgagatacaacctagaggactcaacattagttggggaaatgattctcggtactggaaaatgacagaacaaggtcctgcggagctgatccaagtatcatgaggggaggtatccggcgtggtaaactta

SEQ ID NO: 41333 - DNA, 334 bp, Glycine max
  Clone ID: LIB3093-047-Q1-K1-E6
ttcaattacaacctaggaactctcacatcttcttactcttaattttctcttcagaccactgagataatggcaagcactcctagcattccatcacacataaaagcttgggcttattctgaatatgggaacacagaagagattctcaaatttgaatctaacatacctataccagacatcaaggaagaccaagtgctcatcaaggttgtggctgcggcccttaacccaatagattataagagggctcatgggtttttgaagaacactgattctccctttcctactgttccggggtactatgttgctggtgtggtggtcaaagtgggaagtcaagtga

SEQ ID NO: 41334 - DNA, 187 bp, Glycine max
  Clone ID: LIB3093-047-Q1-K1-E7
cccacgcgtccgcccacgcgtccgaaaagaggggacggtgaagccggggcgagttcacgaaggatggctagggtgcaggctcagcctgccaatgcacatggtctagtggagcaggcataggcataaggcggcagaagggagcaggacaattcagaagatcgaccaaaatgacgagagctcgacggac

SEQ ID NO: 41335 - DNA, 276 bp, Glycine max
  Clone ID: LIB3093-047-Q1-K1-F1
aaagattcaacaatggcctctgcttctgctactcttctcaagtcatctcctgttcttgacaagtgcgagtgggtcaaaggccagacccttcgccaacctctcgtgagatgtaacccttactcagcatcagcgtcataccatcaaagctgcttcctatgctgacgagctcgtcaaaaccgccaaaacagtggccttaccggtgcgtggtattttggcgagggatgagtcaaatgcaacctgcgggaagcgtttggcatctattgggttagagaacac

SEQ ID NO: 41336 - DNA, 477 bp, Glycine max
  Clone ID: LIB3093-047-Q1-K1-F10
cctttgatcactcttcttctcttgcggctagggttatagcgcagcttcttctagatttaaggaagatgggtaaggaaaaggttcacatcagtattgtggtcattggccatgtcgactctgggaaatccactaccactggtcacctgatttacaagcttggaggcattgacaagcgtgttattgagaggtttgagaaggaagctgctgagatgaacaagacgtctttcaagtatgcctgggtgctggacaaacttaaggctgagcgtgaaagaggaatcaccattgatattgctttgtggaagtttgaaacaacatagtattattgcacagttattgatgcgcctggacatagggatttcattaagaatatgattactgggacataccaagctgactgtgctgttcttatcattgattctaccactggtggctttgaagctggtatttccaaggattgacagactcttgaacatgctc

SEQ ID NO: 41337 - DNA, 502 bp, Glycine max
  Clone ID: LIB3093-047-Q1-K1-F11
cccacgcgtccgggcaattggttcttgaagtctgctagaaatggtgtccaccccaacgcggagaagatgttgaaaccgagctttggtgagcctgggcagtgtttccccttgaaggatagtagagggtttgtgcagattaggctccgcactgccatcattcctgaggctgtcaccttggaacatgtagcgaagagtgttgcatatgatagatcaagtgctcctaaagactgcagggtctctggttggctgcaggagcataatgctgattctgcaattaatactgaaaagatgcatcttctggcagaatttacatatgaccttgagaagagcaatgctcaaacattcaacgtgttgaattcagcagcttctggtgtcatcaacacggtaaggcttgattttacgttcaaccatggaagcccttcacacacatgtatatatcgctttagagttcacggtcatgagcctgactcggttctatgttgcactggagttataatgttgc

SEQ ID NO: 41338 - DNA, 470 bp, Glycine max
  Clone ID: LIB3093-047-Q1-K1-F12
taatgatcttgacgacagatttagatgtctgcaacgtcctaatgtgagaaaagataagtggggatagattgagaggggatagttcttcaactcaggcttggaagatgatgacatctatttgaatgtcagggaaactagtgatatctggcagcacggcatcattcttgaaggaatacaagtttggcctaaacatgtttgatccgtcaaatgattgtacttatgcctaacctgaatggatggtggcgtttgctacagtggatggacaccctgaataatacatactcattatctgtattaattctatttctgatttagcattcatgagatcatgaatacagctcattggttattatttcctgattgaatgtttgttttgcttaaaaatcacatgaatcttaaaattgtcattgatactcttatttgagccaatgcacagaaggcaaaactttgtgtatcaatgatttttatcc

SEQ ID NO: 41339 - DNA, 320 bp, Glycine max
  Clone ID: LIB3093-047-Q1-K1-F4
accacgcgtccgcaatatattccattctctctgtgtatttccctacctctcccttcaaggttagtacgatgtcttctgttgttcttcctcgttctttccatgaattgtgtatgttcgttggtctatactatgattattcgattgtgtttcgttaggtttcatcgatcttcaatcctcatactcagattcagcttttattatctttacaacaacgttcttgatttgatgattctctaatctgagatttgctctaattagagctttctcatgccagatccctttacatcaagccttaattgatgattcattaatcgaagatt

SEQ ID NO: 41340 - DNA, 480 bp, Glycine max
  Clone ID: LIB3093-047-Q1-K1-F6
cccacgcgtccgatacccctttcttttccttcgttcaagttagaatcttttgcttcactcagtgagccatggatgacgctgagttggacgccgcgttcgggtttccgtctggtttcccctacgagtttgactcggttggggccgaaccggctgattccggttcgaccggaaccgagagcagcgacgaggaagacttcttcgccgggttgactcgccggctgagtcacacctcactcaatgaaacaaggaaggaacaacaaaaactcaatgttcccatctgcaacagcgacaaaaccgagaatcagaagatgatggctcgcggtttggccgggtcgcctcagtctatactgagcggaatcggaagctggtcgggtcggagcggaaggtccggcgacggaagcccgaacgggtcttcccgtgttgcgtcgccaaccacgacgccgttttgaggctcaaacgacgcgttggagtgctgtatgc

SEQ ID NO: 41341 - DNA, 406 bp, Glycine max
  Clone ID: LIB3093-047-Q1-K1-F7
gccttatccagtttacggtttcggttccttaccctacctttgacgtatcgaggccttaaatgtgggattaggtctgagcaatctggttggtagaacctttggtcttataaagacaaggtttatgagttgtattagacgatcaaattcctactgccttcgatcctttagctgatgcaaatgctgatgactcgggtgctgtgtcaaaggaggatgtgcatattctcgttcagcagcgaaatggtacgaaaagcctgacaaccgttcatggatggaaagaatatttcagctatcacacgatacttaaagacgttaagaaagagttctgttgccatggaacagtatgtcatgacccagaactaggacaggttattcaacttgaaggtgatcagatgaagagtgtttctac

SEQ ID NO: 41342 - DNA, 481 bp, Glycine max
  Clone ID: LIB3093-047-Q1-K1-G10
cccacgcgtccgccctgcattagttaaatttttctgctctgcgtcttcttgggcctctcggccagaatccgagagcaaccctgacccctaaggccaggggtttttctcggcttcttcagattcctgaaatggcgtctgtttcagctttagccaagtacaagctcgtcttcttgggtgaccaatccgtgggcaaaaccagcatcatcactcgcttcatgtacgataaattcgataacacctatcaggctacaattggtattgattttctatcaaaaactatgtatctcgaagatcgaacttcgactgcagttgtgggatacagctggccaggaaagatttagaagtcttattccaagctacattagggactcatctgtagctgttattgtatatgatgttgcaagccggcagacttttctaaatactgcaaagtggattgaagaggtgcgaacagatagaggcagtgatgtcattattgttc

SEQ ID NO: 41343 - DNA, 353 bp, Glycine max
  Clone ID: LIB3093-047-Q1-K1-G11
aagagttctttcaacatgcacacagccttaaccttcgctgcccgcaacgttgtgccattggcacccacagagagtgtctcccatattaccatctttcctaccaaattgaaagccccgcgctcctcacctcgttactctccgattagggttgcaaccgtggagcccgacacttcaactgtcgactacaactctgcgttctcagtgtttcctgcagaagcatgcgaaactgtaggaggggaagcctgcatggcggacatgtaccctgaaacgaagctacagccagacgctaagactccacgagtcgttacagagaacgttgagagagagtatcttgaatacgatgatcctaaaac

SEQ ID NO: 41344 - DNA, 441 bp, Glycine max
  Clone ID: LIB3093-047-Q1-K1-G12
ctcatatctctctctctctctctctcgctttcgattcgacgcctgaacaagtgaacatgggccctaatcacctgttcttcacgcatttccgcgatggtgctattgcctcacgcattgagggccaacacagaggagctcttacttctgttattgcgattggtgctggaatatctggacttgcagcagcacgaagtctctatgatgcatcttttaaggtgactgtactggagtcacgagataggcttggtggtcgcattcatactgacttgtcatttggctgtccagttgacatgggagcctcatggctacatggaatttgtaatgagaatccattggcttcattgatacgtggcctggggctttcattatatcgtaccaatggtgacaactctgtcttatatgaccaataacttggaaaagtatatgctttttaacatcgat

SEQ ID NO: 41345 - DNA, 209 bp, Glycine max
  Clone ID: LIB3093-047-Q1-K1-G6
aggagccaccgcttccaataaatgtagaccagatacatcgaacccgaatatgacacactaagggggatccaattaccgcagccaaagcctaccgaaaagatcagaagagcaaaagagaaacataaaaagagacacaaggaatgacagaacaccttactcaacctgcaccacgacccattacagcccaccaccagtaccagcagcacacc

SEQ ID NO: 41346 - DNA, 499 bp, Glycine max
  Clone ID: LIB3093-047-Q1-K1-G9
aattattattaccacagcaaccatgttgccacttccaggtcgtgccggaagccggttgcccgacccgataaaaagaaacgggttgttccggcttctggcatgccgctggtggcggagacctcggcggcggtgtttaggagaccgagcagtgatgattccagggtggcgaggagcaatggtttggagaaggtgacgattctacggaggggccagtcgctcgattcggctgtgaagagcgacgtgtacgccggatcggcgttcgctgtgtctccgtcgccggaagcgcttcctctgccgtctttttcgacgaagaagcaggcctcggcggcggttgatgactccgccacgcgagatctgaggcgtctgctccggctcgaatgaaaacgagtcgggttgctgtcccggatttggatcgggtcggaccccgacaaatgatccatattacagtctctctttctcaccttattattatccagaatattctctttctcgtcttctc

SEQ ID NO: 41347 - DNA, 106 bp, Glycine max
  Clone ID: LIB3093-047-Q1-K1-H1
cttggcatcgcatctccactctcccaagaaagaatcatcaatggcgatagagcacaaagacgatctcaaagacgagaagaaccctccaccactccacgaggatgac

SEQ ID NO: 41348 - DNA, 192 bp, Glycine max
  Clone ID: LIB3093-047-Q1-K1-H10
cccacgcttccgtccaagcaccattacgccacctgccttacgcaatttacgggtccatctgtggtccaattcgagttcttcagcgacttcttcggatgaaacatccacttactgatgccagagatctcaagaagaagagcaattgaaatgactacgatcatattctgcataatgagcttatagcatagcatg

SEQ ID NO: 41349 - DNA, 494 bp, Glycine max
  unsure (1)..(494): unsure at all n locations
  Clone ID: LIB3093-047-Q1-K1-H11
catactctgattcattagtgaagaaaaatggcaaccatcatcgccggcatcccaactacatcgatcactcgcgcaggtcttgtgctcaaacgacctgttggagcctcgtcctctaccgttcttggattgccagcaatggctaaggcagggaaagtgaggtgctccatggaggaaaagccttcaagcagctcaaatatagggatgggggcatccttgttagcagctgcagttgccgcaaccatgtcaagcccagccatggctttggtggatgagagactcagcactgaaggaaccgggcttccctttgggcttagcaacaacctccttggttggatcctgtttggtgtcttcggtcttatatgggctctctactttgtctacgcttccacccttgaagaagatgaagagtctggattgtccctctaaacccccaagtggcgatgcatgcattgtagaaattgcaaagaattatctctntttctggtgattaaaaa

SEQ ID NO: 41350 - DNA, 182 bp, Glycine max
  Clone ID: LIB3093-047-Q1-K1-H12
aacctttggagcttcgacgacctgccttccatggcaggagtcttctgaacaccttcatatgcgtctttatgtaaataaagctgcacgaattgtgatcgtgatgtaggtgatggaatccacaagaagaaaacccgacctggcaggagcagaagcaggggctctgtggcagagaactgctaatc

SEQ ID NO: 41351 - DNA, 113 bp, Glycine max
  Clone ID: LIB3093-047-Q1-K1-H2
cccacgcgtccgggcaacggcatctaccaaggaaacaactgatagtgaatctcctaaagatggactctaaagcttctgcattgaaacttgcaattcttggaggtccatacagg

SEQ ID NO: 41352 - DNA, 259 bp, Glycine max
  Clone ID: LIB3093-047-Q1-K1-H3
gaaactcatccagataaagactagacccaacaaacgacccgacatacaatactctaaatgaacctccgaacgatgcggccaaggctgtagtcacgggcctactgacaagccagcgtgagagtcatcctcaagagacatctagtagcaatgcttaaccccatgcttaaccattccttcaagcagaactgcattctgtacaggaacccttctcgaaccagtcctccaaccgcaatggccaacccctggtcctaacctggcc

SEQ ID NO: 41353 - DNA, 295 bp, Glycine max
  Clone ID: LIB3093-047-Q1-K1-H4
gtgagaccaagcaacggaaatggttgatgtcaatgatgctatttgttcgtaatcagaatggagctttagcagaagctataggaatttggaagcgcagttttgataaagaattttataggtatttattaattcccagatttgtttcttgtgtaattacaccacataccacggtcttccttggcttgcttgcaagacatgcaaacataaatttgattctgctggcgtttataaatggttttcaacttctcacaaatcattctgcccattgtgtcaatctccattctaaggtttcacc

SEQ ID NO: 41354 - DNA, 277 bp, Glycine max
  Clone ID: LIB3093-047-Q1-K1-H6
gcgaaatccccaattaacaccgaaacctctgctacgcaaacactccctccaagctgacttggaatccctatgcatgcggtggcgtgaatctctgatccgccaaaaatgagtggaagggggatgtagagcgagctgagcagagcgagatccgatgccgacgccgacgccgattctcgacgacaaaagaggcctccgttcaatcgacaaagagagacaagcagatacggaagctccattccgatatacaacaatgccaatctcaaagtgctgctcggta

SEQ ID NO: 41355 - DNA, 304 bp, Glycine max
  Clone ID: LIB3093-047-Q1-K1-H7
gggaagaccaaagatgaactggggaattgactagtgcggcgcgctcctatgattgactgtagacagcggaggtggcggtggtggtgtagacacggcgtgacggggagcattttggatagatgatggtagtaagaggaagaagaagaagagttgtatcgtagaatgagccaaccaacggtgatacttgccactgcgagctatgatcacactgtgcgtttttgggaggccaagagtggccgttgctgccgcaccatccaatatcctgattcgcaagtaatccggctggagatgaccccggataaac

SEQ ID NO: 41356 - DNA, 274 bp, Glycine max
  Clone ID: LIB3093-047-Q1-K1-H8
gagaaactgcgaaaatggcatcggagtcaggtcaaagtcccaatccttcttggttaacgcccaaaaggcttcttatgatattttgtctcattaacatgctaaactatgtgtatcgaggagctttagtcagtaacggtgtcaatggaagtcttgcaacttgcactgactctggaatttgtacaggtggcagtggaattcatggggattttaacttaaacaattttcaagatggagttctgtcatctgcatttatggatggacttctaattgcttt

SEQ ID NO: 41357 - DNA, 491 bp, Glycine max
  Clone ID: LIB3093-047-Q1-K1-H9
aaataaaacatctgtggagacaaaatctttgtgaaagcaaatatgggaggcaactggttatgaggactgatgattttgaaaagcctgctcaaacaaatgtcctctgtagcaattggaaggaatggaagcaacctatcatatggtttcaaggaactacagatgctgtggcagctcaatttttcttgaaaaatatacactctcagatgaggattgctgcttttgatttatttggtgatccacaagttctgggatctcagccgaatgtatttggagagctcttgagagttctcatatctccttcaaaagatgttgaagcagctgtcaattgggttattggtggtgaggagaatcctgacatctcattgcatatgcggatgcttatgaataggtccataagagctgtacaggctgcattgcattgcatcaaaaaagtcatagagagtcagcacctaacttctagaccaaaggtgggtgtggtgtcagatacacct

SEQ ID NO: 41358 - DNA, 367 bp, Glycine max
  Clone ID: LIB3093-048-Q1-K1-A1
cccacgcgtacgcagtacatctagcacagatgccccaactacaaatgtgtctgcagataccgatggtctggctgcttcgaatttagatgctggtagtaatcttgagcagactattcaacaaattatggacatgggtggtggcaattgggacagagacacagttagtcgtgctcttcgagcagcttataataacccagagcgtgctatagattacttgtattctggaatccctgaagcagcagaagttgctgtgccagttcctcaaacagctgggatttcttctggagcattttctggaggacctaattcatctgccttaaatatgtttccacaggagacgatttctaacacttgtgctggacttgga

SEQ ID NO: 41359 - DNA, 273 bp, Glycine max
  Clone ID: LIB3093-048-Q1-K1-A2
gttacacggtcgtaacaagcgcaagcgacctggattaccacggtttgacaggaacacgatccttaacgtcatagtgttctctaagacaccagggtcccatgtgctcaacatcgttgaagttacacataccctaacccgataactctagcttctcatgggagtctaggtcgattcccttaatagagtcaatacttttcacatgaaagactcctactctacttctaagggcgccagtgcttacctgtgcatcgaatatcgcgaaactagtcttta

SEQ ID NO: 41360 - DNA, 301 bp, Glycine max
  Clone ID: LIB3093-048-Q1-K1-A4
tttgctctctctctagaattattgaacactgtgtttatggcccatatttaggaagacatgagcgtgatatttactgcctatagaacatttatgtacctggtcatatagacctcaagttggcagatgatagtacacatatgttctagaaaattagacgaacataagtgacatgcttctgataagcaactcatttcacactaccgttacagagatgattcacaatgtgcaatccatagcatacatcatttgtgattgttgaatacattgatgatacatgggagaacaaacccattttggcttc

SEQ ID NO: 41361 - DNA, 463 bp, Glycine max
  Clone ID: LIB3093-048-Q1-K1-A5
caacaacagtaccacggtcctgccttaccgatgatgccaaccccactccaagttcggaggaggcctgtctttgaatttgatgatgagcatcttcagaatcaaaagcccaccattccaatggaattgcagattgtcagttcccaacaacattttcgtcttcccgatggttgggtggtcgagaaaaagccccgtccctctcacgagtctcgttttgacaaggcaccggaaggaaatttcgttctttgctatctgttcagagacatctagcaggagaaacaagagactatgttgttgctaacacaatgatgtcaaaaaatgaaaacactgtgagttctaattccatcttttgcaagtttctgtgccttttttggaaatgaaatctgtctggatacaaacacaaagctgaagttacaaacagggcatttctattttccacactatgttgtctggggtacattctgat

SEQ ID NO: 41362 - DNA, 428 bp, Glycine max
  Clone ID: LIB3093-048-Q1-K1-A6
atgactccgatgggttcttgaaagacgctattcagatggtgaagcccgcgaagggtactacaactcttgcttttatatttaaagagggtgttatggtagctgctgattctcgagctagcatgggaggatatatatcgtcgcagtctgtgaagaaaattatcgaaatcaatccgtatatgcttgggacaatggctggtggtgctgctgattgccagttttggcacaggaatctcgggattaagtgacaggagcctcaaagctacttgccaatatttcatactcttatcgtggaatgggttcatctgttggtaccatgattgccggatgggatgagacgggccctggtctatattatgttgatagtgaaggaggaagacttaaaggcactagattctcggatggatctggttcaccatatgcttatggtg

SEQ ID NO: 41363 - DNA, 447 bp, Glycine max
  Clone ID: LIB3093-048-Q1-K1-A7
cttattctagggacaggaggagcagatgaactggcacccggttaccttaaactagcctatgacattatacacaaagctggaggagtctgcatagctgatgaagtgcaatgtgggtttgcgcgcacaggaagccatttttgcagattggagacacagggtgtgattcctgatatagttaccatggcaaaaggtcttggcaatggtttgccattagcagctgtacttacaactccagaaatagcaagcgtgatggcccaaaaccattaatataatacttttggagagaaccctgtatgttttgctgggggacttgctgagctcagagttcttgacaacgagaggcgtcaatgtcattgtgctgatgtagggtctcactcgattcagcgtctaaaatctatgatgcatgtacatgacattattggatatgtaagaggaagaagcttaatg

SEQ ID NO: 41364 - DNA, 453 bp, Glycine max
  Clone ID: LIB3093-048-Q1-K1-A8
gattatcctaagtctttgggaatagtgctgcaatggcttcaagtcaggaggaggtgacccttttgggagctactggaagcccatttgtgtgcagggttcatattgccctcaagttgaagggagttcaatacaaatatgtcgaagaaaatttgaggaacaagagtgaactgcttctcaaatccaacccagttcacaagaaggttccagtgtttattcacaatgagaagcccatagcagagtctcttgtgattgttgaatacattgatgagacatggaagaacaaccccatcttgccttctgatccttaccaaagagccttggctcgtttctggtccaaattcattgatgataaggtttttggtgctgcatggaaatccgttttcacagctgatgagaaagagcgtgagaagaatgttgaggaagcaattgaggctctgcagtttcttgagaatg

SEQ ID NO: 41365 - DNA, 343 bp, Glycine max
  Clone ID: LIB3093-048-Q1-K1-B1
gatatccctctctttctttctcatagttttcagttttctgcgaaatcgccgatgctagaatcggggcttcacgatttatccgatgacgccgattacgccgcgtcgcagcaacaaggatctgctagcgtgatgttgcggagtgacagtgccaaacagagttcccctcggaacggtgctgaaattgtattttcgaaggacaatgttgcaattcatccgactcaatttgcgtctgaaagaattagtggaagactgaaattgattaagcaaagctcgtccttgtttatggtaatcgctggggggtttttcaagttactttttggttgtcagcgtcttattgtttatg

SEQ ID NO: 41366 - DNA, 261 bp, Glycine max
  Clone ID: LIB3093-048-Q1-K1-B2
gccacgcgtacgttaatatcagatgaatatgagcgtatcacttaaagagatgatgctgctctcgcgtacttatggaatgctatcacaatactggcatgcgttcatctatccacatatgcaattgaaaacttgatggaagagctatcactctatggagcatgctcacgactagctacgatgacagctatcactgggacatgactgcacacttgtctatgtacaatgcaatgcttattatcccagcgatagtgatattgggat

SEQ ID NO: 41367 - DNA, 400 bp, Glycine max
  Clone ID: LIB3093-048-Q1-K1-B3
ctcaaggttcctcatcttccattgccattctgaatttggtatcatctgcatgcaccagaaaggggaaaaagtatcgtgaagcagcactttcctctctcgaacaggttataaaagccttggggaatccagagttctttaatatggtttttcccttgttgtttgatctatgcaattcagagcccctaaagtccgggcaagcacctttggccagtgatgctgctggatcagagttgaacagtgttgaagagatttctgttccacataacaaaatagttgactgtttaacctcttgtatccatgtggcacatataaatgatattcttgaaaagcaaaagggcttagcacacatgtatacagcattcttgttacctgaaacataaatggactgtcaaaactacag

SEQ ID NO: 41368 - DNA, 348 bp, Glycine max
  Clone ID: LIB3093-048-Q1-K1-B4
attaatttctcgtatcgaaaatcatttccaccaccacaattttttttatttccgtttactaaagattagtaattgtttggtttgtgtgtagattttgattcgattcgattcgattcagtcgaggttttaagcagcagcaagatgtctgggcgtggaaagggaggaaagggattgggaaaaggaggagcaaaacgacatcgtaaggtgctccgcgacaacattcagggaattacgaagccagcgattcgtcgtttggctcgcaggggtggcgtgaagcgtatcatcggtttgatctacgaggagactcgcggtgttctcaagatcttctttgagaatgtcatccgtgac

SEQ ID NO: 41369 - DNA, 445 bp, Glycine max
  Clone ID: LIB3093-048-Q1-K1-B5
cccacgcgtacgactttatccatccatcccaaaaagtttgctttggttaatgcccctaacaaatttccatttttattttccctgtttgtgactagagagttgggttcccatgccggttgatttggacaacgcttccacagcttcaggggaagccgccagcgtctcttccttcggccaccaaacaaaacccgacgtcccaaagaaaaaacgaaaccttccggtcatgccagatcccgaagcaaaggtgattgctctatcgccgacggcgctcttggcaacaaaccgttttgtgtgcgagatatgcaacaagggattccagagggaccataatctgcagcttcaccggcggggccacaacctgccgtggaagctgctgcagagggtcaacaaggaggtgcgaaagagagtgtccgtgtgccccgagcccacttgcgtgcaccacgac

SEQ ID NO: 41370 - DNA, 319 bp, Glycine max
  Clone ID: LIB3093-048-Q1-K1-B6
ctttcattctcattgccgtcacagagagagacaagaaacaatgaagtttaaccctagggtttcctcaagccgtcgcaagagccgcaaggctcacttcaccgctccgtcgagcgtgcgccgcgtcctgatgagcgcgcctctctccaccgatctccggtcaaagtacaacgtgcggtccattccggttcgcaaggacgacgaggttcaggtcgtgaggggaacctacaagggccgcgagggcaaagtggtccaggtctatcgccgcaagtgggtcatccacatcgagcgcatcacccgcgagaaggttaacggctccacc

SEQ ID NO: 41371 - DNA, 463 bp, Glycine max
  unsure (1)..(463): unsure at all n locations
  Clone ID: LIB3093-048-Q1-K1-B7
ctcaaaatccctttcttgtgtcgattagattactttcacaccagagtcgttcgagtacttcaccttctttctctctaagcgcaaaacctcgtactgtttttggcggttaaggatgtcggggaaaggagcgaaggggttgatcacaggcaaaacctccgccgccaacaaagacaaggacaagaagaaacccatctcgcgttcttctcgtgccggccttcagttcccagttggtcgtatccaccggcttttgaagtcaaggacaaccgctaatggtagagttggggccacagctgctgtctactctgctgctatcttggagtatctcactgctgaagtattggagctggcagggaatgctagcaaggatctcaaggtcaaacgtattactccccggcatttacaactagcaatccgcggngatgaagagttggataccctgataaaaggaacaattgctggagga

SEQ ID NO: 41372 - DNA, 320 bp, Glycine max
  Clone ID: LIB3093-048-Q1-K1-B8
ctcaaactctctttcatgcgtccattagattactttcacaccatagtcgttcgcgtacgagagcttatatctctgtaagcgcagaacctcgtgctgcgtttggcggctaatgatgccagggaaaggaccgaaggggtagatcacaggctaaacctgcaccaacgacaaagacaaggacgagaagaaacccatctcgcgaggtgctgtgccagaccttagatcccagttggacgcctgcacctgctcttgaagttaacgacaaccgctaatggcatatctggggccacagctactgtctactttgctgctatctagagata

SEQ ID NO: 41373 - DNA, 358 bp, Glycine max
  Clone ID: LIB3093-048-Q1-K1-C2
cagtgacatgtgcctatgatatctactgttttggttagattttacttgagctcattaccggtgacattgaagtcagcaagttagatgatgcctctacaaaggagtggttagagcaaaccttgccttacatcactatatacgataaagaacgggtgactaagattattgacccatcattgatcgtggatgaggacctgttggaagaggtatgggctatggcaattgtggccaatgcatgcttgaatcccaagccttccaaacgccctcctatgaggcatgtcctgaaagcattagataatgcattgaagattgatagagaagaaaattctagctcatcaaggttgaaatcaaactcttc

SEQ ID NO: 41374 - DNA, 354 bp, Glycine max
  Clone ID: LIB3093-048-Q1-K1-C3
gttgaacagaaaccctagcaagtggagcaatggcttacgttgaagtcgatgtggcggcagcagcagcagcagggctgccgaagaagagaacgttcaagaagttcagttttcgaggcgtggatctcgatgcacttctcgacatgtccaccgatgaactcgtcaagatgttcagtgcccgcgctcgtagaaggttccagagaggcctcaccagaaagcccatggccttgatcaagaagctccgtaaagcgaaaagggaagctccaccaggtgagaagccataaccagtactcactcaccttcgcaacatgattattgtgcctgagatgattggttccattatcggagtgtacaatg

SEQ ID NO: 41375 - DNA, 413 bp, Glycine max
  Clone ID: LIB3093-048-Q1-K1-C4
gccactcgttcgggaaaatattggatacatttctccgaacacgggattacagcatgtgggagattaatggagactacagtgggaaagggaagggttatgaatctatgtcagatgcccatctactatggaagcggagcatgcctcccaagtttcccactacatataactttactcggtttgccatcacattaaatgaacttacccctggattaaaggtctgcttttaactgatactgactattgtgttgccagtttatcttcctttggaagatcttttataatggacaaatgtgctatattttatacctttttacccaccattattaatgcttgcatcacttaggaaacgttttgatcatttctatataatggaggacctaatataaaataatttaaatttaacattaaaagga

SEQ ID NO: 41376 - DNA, 427 bp, Glycine max
  Clone ID: LIB3093-048-Q1-K1-C5
ctctttctctgctaaattatttaaattttctctctttctctaattaattccctttgttatgaaaatggctgtggctatggctgcttgcagtcttggacttcacttgagtgctgacaacaccttgagaccttttgaaaaaaccactatcttgaaggccctctctatctctgatgctactaaaccatgttacatttctcacaaaacaagattatcatcttcatcttcaggaataacaatgatcccacgagcaacaacagttattggtactgtggaggatggaaatcaaggagaggctgataccattccaactccggtagttattattgatcaagactctgatccagatgcaactgtggtcgagataacctttggtgatcgccttggggctcttcttgacactatgaatgcgtttaaaaaacttggggct

SEQ ID NO: 41377 - DNA, 447 bp, Glycine max
  unsure (1)..(447): unsure at all n locations
  Clone ID: LIB3093-048-Q1-K1-C6
gttaaaagttaagaagtagcaaagatgttttcattcgggcacaagggtcaaaagataaaggggactatggtggttatgcagaagaatgtgttggatatcaacagcatcaccagtgttgacgggatcgtcggcaccggcttagacttcttaggcagtgcactcgatacagttacttttttagcctcctccatctacatccaacttattagtgctaccaaggctgatggtggtaaaggaaaagttggaaaggctacaaatttgagaggaaagataacattaccaaccataggagctaaggaagaagcatacgatgctcaatttgattgggacagtgacttcggaattcccggtgccatttatattaagaacttcatgcanaacgagttctacctcaagtctttaattctcgaggacattccaaaccatggaaccattcacttcatatgt

SEQ ID NO: 41378 - DNA, 447 bp, Glycine max
  Clone ID: LIB3093-048-Q1-K1-C7
attgaaaggtgtgaagtaagggcgatgcgttcattgcggcacaatggtcaaagcataaaggggactatggaggctctgcagaagaatgtgatggatatgaccacgcatacctgagttcacggtatcgtacgatccagcttaaactgctcacgctgtgcactatattcagcatgtagctgagcatagaccatattgattcaactgatcaatgctaccaaggttattggtgggaatgcaaaagtattaaaggatacacaccaataggaaagataacattacgcaaccatatgagctaatgaagaatcatactatagctaatactatagcagacagaaaactgccaatgacgcgtacatgttatattaagatctggacgcttgacgtactgtacataaagtctgtaatgctcgacgacattctaaaccatgtaaccattcacttcatatg

SEQ ID NO: 41379 - DNA, 458 bp, Glycine max
  Clone ID: LIB3093-048-Q1-K1-C8
cccacgcgtccgggaaaatattgtctacattactcggaaaatgggatgacagcatgtattatattaatggagactacagtgggaaagggaagggttatgaatctatgtcagatgcccatctactatggaagcggagcaagcctcccaagtttcccactagatataactttactcggtttgccatcacattaaatgaacttacccctggattaaaggtctttttttaactgatactttcttttgtgttgccagtttatcttccttttttttttctttataatggaaaaatgtgctatattttatacctttttaccaccattattagtgcttgcatcactaaggaaacgttttgatcatttctatatcatggaggagctatataaaataatttaaatttaacataaaaggaccaaaatattcatatcactatattttgcatattgtgagtgcttgtgctc

SEQ ID NO: 41380 - DNA, 467 bp, Glycine max
  Clone ID: LIB3093-048-Q1-K1-D2
cgacccaagcgacgcgtccaagccacgcgtaacggtaaaatattagtctacattatctcggaaaatgggatgacagcatgtattaggttaatggagactacagtgggaaagggaagggttatgaatctatgtcagatgcccatctactatggaagcggagcaagcctcccaagtttcccactagatataactttactcggtttgccatcacattaaatgaacttacccctggattaaaggtctttttttaactgatactttcttttgtgttgccagtttatcttccttttttttttctttataatggaaaaatgtgctatattttatacctttttaccaccattattagtgcttgcatcactaaggaaacgttttgatcatttctatatcatggaggagctttataaaataatttaaatttaacataaatagaccaaaatattcatatcaactatattttgcatatt

SEQ ID NO: 41381 - DNA, 458 bp, Glycine max
  Clone ID: LIB3093-048-Q1-K1-D3
cccacgcgtccggtctctcgtaatcatgcctaagcaaatccacgagattaaggatttccttctcactgccagaaggaaggatgcgaggtcagtgaagatcaagaggagcagagatgtggttaagttcaaggtcagatgctccaagtacctctacacactttgtgtgtttgacccagagaaagctgataaattgaagcaatctcttcctccaggtttgagtgttcaagacctgtaaaggtactgggcgagagatcaagaagaagcaattcattgattcttctgaagtttgattctctgtagttgaagcttgagatttttgtcagttggtcttttattatagattattgctaagacatggttgtttttatctgtttggaaaatgaaacttgaatttatgtctaatggagtattctagtgctgtggaactatatatatgaatttattgtctggtttatttt

SEQ ID NO: 41382 - DNA, 456 bp, Glycine max
  unsure (1)..(456): unsure at all n locations
  Clone ID: LIB3093-048-Q1-K1-D5
gcggctaacaccggaatctgcaaactcaaaagttccatctcttcttccacacatccatcgttaatcattttcccgcaaaatattttctttctctgttctgtgccttcttctccaccgttggttcaaaaatcgcagccgttgatcagattgagccttcgtgttgatcttcatcgccatcatggaggtccgttccaatcccgcctccgacaactcctccgaccaccttcgaccgcccgccgtttcgtccaagcagccgctgccttctcctaccgccgtcgacacctncgccgtttctcagagactccagaaggaattaatggctctcatgatgagtggaggagatctcggggtgtctgcttttcctgatggagagagtatttttacatggattggcacaattgaggtggaaaagggactcagtatgagggtttatcttataaactcttcttacgtttt

SEQ ID NO: 41383 - DNA, 374 bp, Glycine max
  Clone ID: LIB3093-048-Q1-K1-D6
cgcttgctttccgtcgctagaaacttccgctccaattgctcctctgatggagctgcaaagagcattgtcttccaatttcagtgtgtgacatggaaattggagaaactgttgagcaatttgccatatgacgatttggacatctcggaggaagtcaaggagcatgtggatttggtgagaacacaattgagacgggccacggataaatatgggtttatgatttcaaagatgccatctcatgaattatgccagccactggctgaagaaattagtcaggttcttggcatatatgaaagcttgttgcacacacaactatgctgacctgaaaatttatcataactacgacagtattcctatcaactttaaatggaaatgct

SEQ ID NO: 41384 - DNA, 439 bp, Glycine max
  Clone ID: LIB3093-048-Q1-K1-D7
ggggatgagagagggaggatgaggtgcggttaggagcgatcgacaggtattcgaaagaagggaagcggagtgagacaatggctggtcctggacggcataggagagacggaggtggtggaggcctataagcacgccatcatgaggaggacgggactccccgcgcgtgacctgcgtatattggaccctctcttgtcatacccttctacccttctgggtcgtgagagggccatcgtcatcaacttggagcacatcaaggccatcatcaccgcccacgaggtcctcctactcaactctcgcgacccctccgtcacccccttccttcatgagctccaggccaggatcctccgtcaccaccaccagactctggccgatgccaaccccaaccctgacgacgccatcaagattctccccttcgagttcgtagcccttgatgcctgtc

SEQ ID NO: 41385 - DNA, 461 bp, Glycine max
  unsure (1)..(461): unsure at all n locations
  Clone ID: LIB3093-048-Q1-K1-D8
tccagttcagccctgttggggaaagtaagaaaagtggtgaagtctatagactctttgatggtggcggccagagaaatgagaggagaaaatggatccatttgtttgaaggagtttcagctgtaatattctgtgctgcaattagcgagtatgatcagacactttttgaggatgaaaacagaaacagaatgaccgagactaaggaacttttcgagtggatcctgaagcaaccatgttttgagaaaacatccttcatgttattcttaaacaagtttgacatatttgagaagaagatcctgaaagtcccacttaatgtatgcgagtggttcaaagattaccaaccagtttcaacagggaaacaagaaattgagcatgcttatgagtttgtgaagaaaaaatntgaggagtcatnatttcagagcactgctcctgatcgtgttgatcgcgtctttaggatctaccgg

SEQ ID NO: 41386 - DNA, 232 bp, Glycine max
  Clone ID: LIB3093-048-Q1-K1-E1
cgtcaggcttattccccaatcaatgaatggccttgcatatttagatgaagaaaaggccatgttctaggtgtccatccctctgctactgtgtagagtattattcctacctaccgtcatctcccttactacacaccttcaactatcctattcatattaacaatctctctgccaaggagcttaaacaactctctgatgaactgcgttcttactttatttttagtgtttctagaac

SEQ ID NO: 41387 - DNA, 405 bp, Glycine max
  unsure (1)..(405): unsure at all n locations
  Clone ID: LIB3093-048-Q1-K1-E3
gcaagcctattgttagtctaagtctgggctgcaaagctatatttcttttgggaggaaaatccagagaggatactcccttggcaatgttccttcgaagcggtgatgctgtacttatggctggagatgcaagggaatgctttcatggggttcctcggatcttcacagataaagaaaatgctgaaataggccatcttgagacacggctgacgcatgaagatgatatttgtttcttaaaatacattcaaacatctagaatcaacatcaatatcagacaagttttttgagtagtatgttcttttctttcgaagtgaaatttgttttattagctcaaggaacaaaaaaatgatgtatgatttctatttaacgtgattatngctctatatgacaagccgagtctatcccagc

SEQ ID NO: 41388 - DNA, 462 bp, Glycine max
  Clone ID: LIB3093-048-Q1-K1-E4
cttacggcaagaaattgaaaaacgggttaatttaaccctcccttttgtacaatgcgtaatcgatgacctatgtataaatgaataagaattctttggatttgaagaaaaaaaacaactttgctgacatatatttgtttggtcagaagagtcctccgaatattctggtcttatattggtaattgttttcaatattttaaaaataaaaatagcgaagagaggataggctcattacataaaaaattggtaaatttcccataagtaattgagtgtgagagccaaatgaatcgaaagattcatgtttggttcgggaagagatcctagacattttgaaatgaatggaaagagagtctactttcattaagtgatttattagataatcgaaaacagaaaatcttgagaactattcgaaactcagaagaattacgggaaggggccattgaacagctggaaaaagcccaagcc

SEQ ID NO: 41389 - DNA, 455 bp, Glycine max
  Clone ID: LIB3093-048-Q1-K1-E5
gtttattccccaattaatgaatggctttgcatatttagatgaagaaaaggccatgtgggggatatgcatccctctccgagagtggagagtattattcccaccgaccgccaactcccctactagacaccgtcaactatcctattcatatgaagaatctctctgccaaggagctgaaacaactcgcggatgaactgcgttctgatgttattttcagtgtttctagaactgggggccatttgggctcaagccttggtgtggtggaactcactgttgcacttcactatgtcttcaatgcccctcaggacaagatactgtgggacgttggtcaccagtcttacccgcataagatactcaccggtagaagggaccagatgcataccatgaggcagacaaatggcttatctggcttaaccaaacgttctgagagtgaaattgattgttttggcactggtcac

SEQ ID NO: 41390 - DNA, 464 bp, Glycine max
  Clone ID: LIB3093-048-Q1-K1-E6
tcgcccacgcgtccgcccacgcgtccggttccaaatcccatatggaaataccataaatatgatgggttattcaaacccaaccaagaaggttcatgatcaaattcagctgtatggtgatgtaaaagatcttgatgatttttgtttgaaggctcaactagttaactacatacaatatagagctcttctggagggatggacttcgcgcatgtggaaaaaatatacaggagtattgatttggaagacacaaaatccttggactggtctgagaggtcaattttatgatcatcttcttgaccaaacagcaggtttctatggctgtcgatgtgctgcagagccaattcatgtacagcttaatctggctacatattttatagaggttgttaatactacatccgaagaattgtctaatttagctatggaagtttcagtgtgggacctcgaaggcacatgtccacactacaaag

SEQ ID NO: 41391 - DNA, 292 bp, Glycine max
  Clone ID: LIB3093-048-Q1-K1-E7
ataaattttggatttcgcacgtagctagctacagaagacaaaggagccttgagtctcgagggcttgtctgatcggaacgcagccgcaactgccaccgagatctgctctgtgtgtcatgggatggaaagttactggcatacaggttatgtaaaagatgccaaattgtgccatatcctcttcaaatggcagtttaagcgatagaatgccattttcatccaatatagcagctatggttcatgcaatggatcatgagatacatgaatatgctgcaacttattcgagtgagatacat

SEQ ID NO: 41392 - DNA, 431 bp, Glycine max
  Clone ID: LIB3093-048-Q1-K1-E8
cggttacggcaagaaattgaaaaacgggttaatttaaccctcccttatgtacaatgcgtaatggaggacctatgtatcaatgaataagaattctttggattcgaagaaaaaaaacaactttgctgacatatatttgtttggtcagaagagtgcttcgaatattctggtcttatattggtaattgttttcaatattttaaaaataaaaatagctacgagaggataggctcattacataaaaaattggtagatttcccataagtaattgagtgtgagagccaaatgaatctacagattcatgtttggttcggtaagagatcctagacattttgaaatgaatggaaagagagtctactttcattcagcgattcattagataatcgataacaggaaatcttgagaactatacgaaacctaggagaattacgggaa

SEQ ID NO: 41393 - DNA, 221 bp, Glycine max
  Clone ID: LIB3093-048-Q1-K1-F1
ggctttgaagctaaagtcaacaacacatagctgaggatagatagtttgttcgttgcgttgccatggcggcgtccgagatcggtcgggaactggattcgctgaacgacgaaaagaccataattgagcataaaatctctgcgcttgaagctcaactcacagagattaatgtacaaaacaacgccgtaccatccaacggattgacgcatgacatgattcacaga

SEQ ID NO: 41394 - DNA, 459 bp, Glycine max
  Clone ID: LIB3093-048-Q1-K1-F2
atgctctgaacgttctcatggcaatggatattatttccaaggacaaaaaggaaattcaatggaggggccttcctcgtactactgtgaatgatattgaagaactaaagacagagcggcttgggctcaggaatagaattgaaaagaaaacagcctatctgcaggagcttgaggagcaattcataggtcttcagaaccttattcaacgaaacgagcagttatatagctcaggaaatcctcccagtggaggtgtatctttaccttttattttggtacagacacgccctcatgcaactgtggaagtggaaatatcagaagatatgcagcttgttcattttgatttcaatagcactccttttgagctgcatgacgacaattatgttctcaaggcaatgaaatttggtgagagaccacaagatgataatatgacacacaatcttactgacggatgtgaaatttcta

SEQ ID NO: 41395 - DNA, 348 bp, Glycine max
  Clone ID: LIB3093-048-Q1-K1-F4
aaaagcttcaactgtgaagctatcttcgtatcgagcatggccaaatatgcatgacagtcggtttgcgctttacaagttgccattgcgggttcccaaagatgaccaagaatatgctggtttatggggaggaacttttggttggcctcctggaaagccttctgaagacaagcctggaaaggcttcatatttatatccgcattcttataacgctttactgtatcaacagcatctgagttcaacacaaattttgtaaggcactcactatgtgttacatgctaacggttcatcaatgattacagctaatatcaatgatcctttatacgaaccctttacctgggacactgatgc

SEQ ID NO: 41396 - DNA, 450 bp, Glycine max
  unsure (1)..(450): unsure at all n locations
  Clone ID: LIB3093-048-Q1-K1-F5
cgaaaatgtggaagagaaggggatttgaagaagaagcagttcaattgataaactcagatttgagagacctaagtctagctggcataggctttggagcctctttcttcggattctttgctgccattgctgctatttatctgttgattttggatcgtacaaactggaagacaaatattctcacagcactactcattccatacattttcttcagcttgccttcattaattttcgacgtcttcaggcgattagcttgtcacgctttattgttatcaattttgcaccatcatttttctgtaatagtaattttcctttttattatcattctacttatgcaggggagagcttggaaaatggattgctgcagttgctgttgtattacgactnttcattcctagacacttccctgattggctggaattgccaggtgctttgattcttcttatcgtcgta

SEQ ID NO: 41397 - DNA, 460 bp, Glycine max
  Clone ID: LIB3093-048-Q1-K1-F6
cttgaacgtaacgtttgtcgagatgcaaaagaaagtcaggtattaatttgtttgacttgatttcgagcatgattggtcaattatagtaagaatcaaattgtcacggtttggtgtgtcatgtgtgtccttttaagtttaattgtctatctcagggcttaactctgaagtgccaaatccttattatatatatcctcattcctcaaacgctgtattttatcgatggaattagtgttaaatgctggttatatgaaaatatattacattggcgttagattctctgctttgttagagtttctgtaggaagacaagaatgatcttttataagttataactattactcttggttcatcaagtttgaactgtcttgttaattttcaattccaaattttctttacaggaaagctggaacacctagacctctttggaatgcatcatctcagcttctaatggctgtaggtta

SEQ ID NO: 41398 - DNA, 458 bp, Glycine max
  Clone ID: LIB3093-048-Q1-K1-F7
cattaattgtctacgtggtcattcctgtatcatactggggcctcaatgtgtacaatgccaataggtttcccattttctcctcacacttgttcaccgcccaaggtcaaaaatacaacatacctaagattgtagacaaccattttgagctaaatgttgcagagtatgaaaagcaaggtagaattcatctcagtgtgtttttcgctctcacttacggctttggatttgccaccatagcatccaccctcacacatgttgtctgcttctatggaagggagattatggagcggtatcgtgcttcttccaaaggcaaagaagatatccacacataattgatgagaagatacatagacataccttcttggtggtttcattcattgctgctcgtgacacttctggtttctctcgcactatgtatctttctaaaggaccaggttcagatgccctggtggtgacttctc

SEQ ID NO: 41399 - DNA, 285 bp, Glycine max
  Clone ID: LIB3093-048-Q1-K1-F8
ctcacgagcttctcagagaggtcctcctacgaattgaatcgtcggagtccacgtggccgctgcggaggagcgtcgtggcttgtggcggagtgtgccgcacctggaggaggctcatcgtcaaggagattgtcaagccacctcaattctcttacaacataaccttccccatctctctcaaacagcctgtcccgagggaacatctacttcagtgcttcattaggcgcaacagtgcctcacagacatattatctgtttctcagtttatctagtgccctaatagctgatg

SEQ ID NO: 41400 - DNA, 262 bp, Glycine max
  Clone ID: LIB3093-048-Q1-K1-G2
gaacacatgggaaatgctagagtagggcctggtagttttggtatggttgaatgtcacgtccactgtgcaacaatgcgttcttgaatctggcggactgtgatgtaccagcaggatgtgcatcatccaggacatgtgtggtgccgaaacacctctctatactgataaccttctaaatactgctaaaacaacttctgccgaggcaacatctacttcagtgattgattaggcgcaacaaatgccttatagacatattatctgatat

SEQ ID NO: 41401 - DNA, 246 bp, Glycine max
  Clone ID: LIB3093-048-Q1-K1-G3
ctcttcctacttgaagaaagtagtatacatccctgacaagattccttttgatccgatctcttgttttgagggagacaacatgattgataggtccacaaaccttgactggtacaagggtccaactctgcttgatgcacttgaccagattattgagccctagatgccctttgacaagcccctcatgcttacccttcatgatgtgtacatgattgtaggtattggaacttgtgccagtgtgacgtgttt

SEQ ID NO: 41402 - DNA, 446 bp, Glycine max
  unsure (1)..(446): unsure at all n locations
  Clone ID: LIB3093-048-Q1-K1-G4
aaaattctctctctctctgttccgtgttccgcacccatggccaagtcctcctccaccaccactccacaaaaacctttcctcaacttagacccactcttcttgaaaactccttcttacacttccctcaaagacgtgcttcctttctccgccgctgcttgcaactcccccgccgcgagccaccaccagtacgtgtccatccgcaaccgcctcgtgaagcaggccgcctgggcctacctccagcccatgtccatttcccccagcggcccatcaggcccacacttcttccgccacttctacaacagattctcctnccccacccacaataacaacccttttaccacatgtctcagctttatataccgaaccctacaccgaatactccacgctatcccttgcttccttcatgtattcgaagaatagcacaataacacgtttttttttttttc

SEQ ID NO: 41403 - DNA, 288 bp, Glycine max
  Clone ID: LIB3093-048-Q1-K1-G5
attttcttccttacatggagtttgtcatgccttcactgcttcaatctgcttcacttaagcgggatgtaaccattacatcagcagattcagacaatgagattgaagattctgatgacgaaagtatggagactattactcttggggacaaacgaattggaatcaagactagtgttctagaggaaaaagctacagcatgtaacatgctttgttgctatgctgatgagctgaaggaatgattctttgcatggattgatcacgttgctggaactttagttacactccttaaat

SEQ ID NO: 41404 - DNA, 453 bp, Glycine max
  Clone ID: LIB3093-048-Q1-K1-G7
ggaagtctcttcctacttgaagaaagtaggatacaaccctgacaagattccttttgttcctatctctggttttgagggagacaacatgattgagaggtccacaaaccttgactggtacaagggtccaactctgcttgatgcacttgaccagattagtgagcccaagaggccctctgacaagcccctcaggcttccccttcaggatgtgtacaagattggaggtattggaactgtgccagtgggacgtgttgagaccggtgtcttgaagcctggaatggtggtgacttttgcaccaactggactgacaactgaagtcaagtctgtggagatgcaccatgaatctcttacagaggcacatcctggtgacaatgtgggattcaatgttaagaatgttgctgttaaggatttgaagcgtggttatgttgcctcaaactcaaaggatgaccctgcaaa

SEQ ID NO: 41405 - DNA, 307 bp, Glycine max
  Clone ID: LIB3093-048-Q1-K1-G8
acgataagtctcttcctacttgaagaaagtaggtttcaaccctgacaagattccttttgggccggtctctggctttgagggagacaacatgactgagaggtccacatacctttactggtacaagggtccaactctgcttgatgcacttgaccagtttagtgtgcccaagaggttctttgtctagtcccttatgctttccctacaagatctgtacaagattggaggtattggaactgtgccaatgtgacgtgttgagacctgcgtcttgaaacctgcaatggtggagacttttgtaccaacttgactg

SEQ ID NO: 41406 - DNA, 370 bp, Glycine max
  Clone ID: LIB3093-048-Q1-K1-H2
actttctttgctggtaatcggactaattctctttatatctctcatccccctcctgttactcctccgcttactctgcaatccctattctgttatatcatctgctatttcaacctcctgatttttcttggttttgcctcaccaataatgattctaaactttgaaaattttttctcgaaagccattgtgttttcataatcgagatccagctttttttttgcttggttttaaaaaaatattattttctttcgttcaccctcgaaggttgttttttgatcccctcaaaaagctctcctttctttcttatctttccttggtattttaatgggttgctctattattatacctacttccaatacctttttttgttggt

SEQ ID NO: 41407 - DNA, 281 bp, Glycine max
  Clone ID: LIB3093-048-Q1-K1-H3
gccaaaactagggtttagcattgatggcactgtgcaaccgcgtcagatcgggaatctctgggggaccaaattcacgttccttacttcccagcgatccagtctccaacgatccctcgttgcccctttcatttccctcgcctccagaaattacgccaacgtgccgaggccaaaggaatccaaagttaatgtccctttggctttgattggacgttcaggaaaccttgcctctgctttgcatactgcatctgtgaaagccaatgcattggataaggttgagactg

SEQ ID NO: 41408 - DNA, 463 bp, Glycine max
  Clone ID: LIB3093-048-Q1-K1-H4
cccacgcgtccgctcgatccagcacataacaatggaaacgcagctttacgtgttttctctgtagattctgctcttaaacgccgtcgttttcaaactctttttttccccttcgcttctctgtctttgtaaccgaaaggggggaaaatataattaacaccgatttcgcgaccaattcttcttctgcgttgaattgggacaacgagaaattggatctcagtttttggcaggaaataaaaattgcatttgagtgtaaaataacagagtatagtgtagggccttgttcttgatactgtgctaaatttgttggatggcggagaaatcatgcatcaagcgccttcagaaggaatatagagccctttgtaaagagccagtttctcatgttgtggctcgtccttctccaagtgatattcttgagtggcattatgtgttggagggaagtgaatgaacaccttttgcaggtgga

SEQ ID NO: 41409 - DNA, 201 bp, Glycine max
  Clone ID: LIB3093-048-Q1-K1-H5
gtgattgttgtgactcgatcttcttcgtagttatctagctcataatgtcgaatgagtgaggggggcttttttcacgtgaaaatgtcatgctgcggtggtcacatatggctgcggaagcgcctgcaagtgctgcaacggctgcggatgctgctagatgtacccagagttgatctacaccaaatcaaccaccaactagacctt

SEQ ID NO: 41410 - DNA, 246 bp, Glycine max
  Clone ID: LIB3093-048-Q1-K1-H6
gaaggtgctttctgtggcggtttataatcactacaagaggatatttaatgaaacctcttggtacaagtggcctgcaggagattcagataataataatgtgaagactgatgctgttgatgatgatagagttgaacttgagaaaagcaatattctactaatgttgccaacacgattagggaagtcatcactagtgagacctctagatagggtagctaatgttttggctggaaataatatattgtactt

SEQ ID NO: 41411 - DNA, 239 bp, Glycine max
  Clone ID: LIB3093-048-Q1-K1-H7
tgacggtgctttcagtcgcgaacgatattgattaccatagtatatccagcacaagatagtgtgggtcatagccttcacttagtccccagggtcccaagagctccacatcgatgaagcttcatataccctaattcgatcacactagctactcatgggagtctacgccaatttccttaatagagtcaatacctttcacatgcaaggcttctactcgacttctaaggtcgccagtccttacc

SEQ ID NO: 41412 - DNA, 465 bp, Glycine max
  unsure (1)..(465): unsure at all n locations
  Clone ID: LIB3093-048-Q1-K1-H8
cccacgcgtccgctcgatccagcacataacaatggaaacgcagctttacgtgttttctctgtagattctgctcttaaacgccgtcgttttcaaactctttttttccccttcgcttctctgtctttgtaaccgaaaggggggaaaatataattaacaccgatttcgcgaccaattcttcttctgcgttgaattgggacaacgagaaattggatctcagtttttggcaggaaataaaaattgcatttgagtgtaaaataacagagtatagtgtagggccttgttcttgatactgtgctaaatttgttggatggcggagaaatcatgcatcaagcgccttcagaaggaatatagagccctttgtaaagagccagtttctcatgttgtggctcgtccttctccaagtgatattcttgagtggcattatgtgttggagggaagtgaaggaacancctttgcaggtggata

SEQ ID NO: 41413 - DNA, 332 bp, Glycine max
  Clone ID: LIB3093-049-Q1-K1-A1
atggcgatgtctttctctctctcttttcctctcacactcttcccatctattccctcatggtgtcttctctcttccttcccaataaaaattacccacttctaatcagacaaaaagtagagtggttataagtccatttgtttcttcaggttccacacaacttttaccagaagaaactaacaccttccgttactggctttttctgggtccttggcaaccctttgctgattttcactggcacaatcacaaccaattgtagaagaaatttctgggttatgggttacgggtgccggatagttatataatctgagctgggccccatttcatacgcaact

SEQ ID NO: 41414 - DNA, 376 bp, Glycine max
  Clone ID: LIB3093-049-Q1-K1-A10
ctttttctctctgttttttgttctctcttcgcttaaaccctatcgttcttctcgttttcgccgattctcgccatgccgaaagctaaatccgacgccaaagccgccgatagcaggttgaagcggaagggcgctggtgctgggaggaagcaatcgaggaaagctgctaaggaccctaacaagccgaagagaccttcaagcgctttcttcggtttcatgtccgagttcagagagcagttcaagaaggagcattctaacaacaaatccgtcgctgttgtcggcaaagctggtggtgaaaaatggaaatcgctatctgatgctgaaaaggcccctttcgttgctactgctgagaagaagaaacaggagtatgagaaaacta

SEQ ID NO: 41415 - DNA, 349 bp, Glycine max
  Clone ID: LIB3093-049-Q1-K1-A12
acaggttcctatgttttgtggatcttactctctagagaaagcagtatctcgcgttgcacgaggggttggtaaaacgggaaaacatctatttttaactgatattgacaatggaaaaccccctcttcttcttcagatggttcgtgattcctaagatattaaattcctgtctgctttacgctccttcaaacaccgtgttgcctatgcaaatgttcgatatgaccaacttgttggatggagtacgttatctatcatgcgtataaaggagctccctaagcgccggcatctttcaagacatgagaagtacccgcatattggtaatgtagaaacagaaaaatctacttttgttgtt

SEQ ID NO: 41416 - DNA, 207 bp, Glycine max
  Clone ID: LIB3093-049-Q1-K1-A2
atctcacgcaagaataaagcctgttgctgatacaaccaattgggagaccttagatcatccggcatgcggaagctcgtgcgaatcctcctattgagtttgctactacctacgcccatctttttctgttacccttctttactctaagatagtcttcctatgtctatacgtacatgctcctgtgtattcaactttgtcaatatgtcttgc

SEQ ID NO: 41417 - DNA, 332 bp, Glycine max
  Clone ID: LIB3093-049-Q1-K1-A3
atggcgacgtccatctctctgtctaaccctatgacactcttggcatctattccctcatgggctcttctctctgacttcgcaataaaaattacccactgctaatcagacaaaaagtagagtggttataaggccattagatccttcagtttgcacacagctttcaccagaagaaactaacaccttccgttactggctaacactgtgtgcttggcgaccctatgctgattatcactgccacaatcacaaccaattgaagaagaagtttctgggttatggctcacgggtgccgtataggtatataatctgagctgggccccattgcatacgcaact

SEQ ID NO: 41418 - DNA, 343 bp, Glycine max
  Clone ID: LIB3093-049-Q1-K1-A4
cccacgcgtccgcccacgcgttcgcccacgcgtccgcccacgcgtccgcccacgcgtccggaacaagttccgcatgtcactgggtctgccggtggcggcgacggtgaactgcgccgacaacaccggcgcgaagaatctctacatcatatcagtgaaggggatcaagggaaggctgaaccggttgccgtcagcttgcgtgggtgacatggttatggccaccgtcaagaagggaaagcctgatctccgtaaaaaggtgctccccgccgtcatcgtccggtagcgcaagccgtggcgccgaaaggacggtgtttacatggacttcgaagataatgctggggtcata

SEQ ID NO: 41419 - DNA, 437 bp, Glycine max
  unsure (1)..(437): unsure at all n locations
  Clone ID: LIB3093-049-Q1-K1-A5
atggcgatgtctttctctctctcttttcctctcacactcttcccatctattccctcatgggttcttctctcttccttcccaataaaaattacccacttctaatcagacaaaaagtagagtggttataagtccatttgtttcttcagtttccacacaactttcaccagaagaaactaacaccttccgttactggctttttctgtgtccttggcaaccctttgctgattttcactgccacaatcacaaccaattgaagaagaagtttctgggttatggttcacgggtgccgtatagttatataatctgagctgggccccattccatacgcaacttttcctccttcattctccttttttttttattgtcttaagaagtgatggacatggaagaanattcaaagttgaatttggatggttttcttcttctcacgaggtttg

SEQ ID NO: 41420 - DNA, 204 bp, Glycine max
  Clone ID: LIB3093-049-Q1-K1-A7
cgggacgacccacgcgaacgagaacgcgaaggaagaaacagcaagaaacgacggaaaagacaagacaaaagcgagaggagaggaagcagacagagaaagcagaggagcggccagagcagcagaagaagaggaagaagaggagcaagaagaagcagcgagaacggggacaagcaaccaagaaggaaaaagagaacggacagaagg

SEQ ID NO: 41421 - DNA, 281 bp, Glycine max
  Clone ID: LIB3093-049-Q1-K1-A8
ccacgccgtcggttggtaatggatacccattacaaactatgatcaacatgggcgactacgcccgcgtttcaaaagctgagagggaacctatcatggagtattccacaccacgaccaatgatgggcaactaccaccaccctaatgctcaccgtgtcctcaacgagaagattgtttatgaggaggatgtgattggaggatcccttcacaaccatatgcattaccacaaccctgagactcatgaaagagacaaggcggtggagtatgaacaagttcctgagagg

SEQ ID NO: 41422 - DNA, 96 bp, Glycine max
  Clone ID: LIB3093-049-Q1-K1-A9
gatatggtcttgggtgttggacaagtattacaccttttttcggtggtttagcatctgatgcgtgaaaacttgagatttctctcaagttgtttcctt

SEQ ID NO: 41423 - DNA, 431 bp, Glycine max
  Clone ID: LIB3093-049-Q1-K1-B1
aaaaatttttgaataataattaaaaaattccttcatatttttagagataggagacaaaatttacatggatatagtaagtcttgcttgggctgctttaatggtagttttttcattttctctttccctcgtagtatggggaagaagtggactatagggatactcaaaattgagttaagggatcaaagtacccattttgttttctacttgggtttttcaatttcttaactttaactattgaattaaagtatttcatttatactaattaattgagttcaaatataaacaaatataaaatagatctgcatttcagggttctattatattctagtagtgtaatgtattctatgtatatgtatattatagaaattgaaaatactctttcaatcaaacacagatttgaattatatctatattcgtattttgagaaaatc

SEQ ID NO: 41424 - DNA, 444 bp, Glycine max
  unsure (1)..(444): unsure at all n locations
  Clone ID: LIB3093-049-Q1-K1-B10
cccacgcgtccgttcactccctcttcctctcttaggttcaactctcttcttgtttcctccacgcccctcttcttcttcacgctccaacagcgtttctttccccgccctctccaggaacataaggaaatcggtagaagatagaaagattaataaaaattctgctgtgaaagcagtgtatggtgatgaattttggacacctgcgaggagttcacctcaggatatttggtccataaggagtgatttgcaagtcccatcttccccttatttccctacctatgcacaaggacaagggccaccccccatggttgcggagcgtttccagagtgttataagtcagcttttccaatacaggataatccgttgtggtggagcagtttatgacgatatggcaaacatcatagttgctcagctcctgtacctcgacgctgntgatcctaacaagga

SEQ ID NO: 41425 - DNA, 414 bp, Glycine max
  Clone ID: LIB3093-049-Q1-K1-B11
caaaggatgggtgcacgctcaatctctcttgcctcgaacacacgacattactatggttcctcgcctcggattccgcgtcaaactcaagcggccgaccatggaactccgccatgataaccgtacacttgacgatgaagtcgactactactatcatactccgccagccaacatcgtcaagaaggaacttgatcaaacacctattgacattaatactggtctacaactccttactgctaacaccaggagtgaccaatctaccgtggatgacggactgtcatcggatgcagaagataagcgagccataaccaccgagcttgcacagctgcaagtggagcttcaacgcatgaacgctgataacaagaagctgaaagagatgctcagccatgtcaccggtgactacaacgacttgcagat

SEQ ID NO: 41426 - DNA, 445 bp, Glycine max
  unsure (1)..(445): unsure at all n locations
  Clone ID: LIB3093-049-Q1-K1-B12
gcttcacggtgaagcacctaagccacttctccaccctagacgtcctcttgaaaccctactacgagcaccacacttccccctctcaattcatctctctctcgatttacattccagagatagaagaagaaagagagcaatgacagcaacaacagagagcgagaagaagaagcgagaagaagaagaggaaccagaacaagttgtgaacccatgggaagtttcagccaaaggtaaaatcgattacgacaaactcatagatcgtttcggttgccagaagctcggcgaagccctaatttcgcgtctcgagcaactcacctctcgcactcctcacgtctttctacgacgcggcgttttcttcgcccaccgcgatttcgcggagattctggacgcgtacgagaggggcgacaagttctacttgtacaccggacgcngaccttcctccgaagcg

SEQ ID NO: 41427 - DNA, 400 bp, Glycine max
  Clone ID: LIB3093-046-Q1-K1-E9
cccacgcgttcggtccaataatactgaaattatgctcacaaaggttaagatgccacttcctgatattaaggctgcagtactggctatggatgattcagtgttagatgttgatcatgtggaaaatctcattaaattttgtcctaccaaagaggaaatagagcttttaaagggatacaccggtgataaggagaatttggggaagtgtgaaaagtattttttggaggtgatgaaagtgccaatagtggagtcaaaattcagatgtttctctttcaagattcactttaggactcacaattcagagttttaagaagagcttaaacacagtgaactctgcctgtgaagaagtcccaaacttattcaaactgaatgagattttaatgaaattctttatttgtgtata

SEQ ID NO: 41428 - DNA, 184 bp, Glycine max
  Clone ID: LIB3093-044-Q1-K1-B3
agcgtaccgtcgcggacatctcatgattccctcaacgacatgtcaagacatgttcaaccatcaacaaacttagagattatcatgtcatgattatagcgcagctaccaccgaagctagggtcatataaatcgctgacgataggtatattatcgttataggaatctacgacataacatgactaatg

SEQ ID NO: 41429 - DNA, 203 bp, Glycine max
  Clone ID: LIB3093-044-Q1-K1-B5
aaaaaaaaaaaaaaaaaaaaaaaaaaaaaaaaaaaaaaaaaaaaaaaaaaaaaaaaaaaaaaaaaaaaaaaaaaaaaaaaaaaaaaaaaaaaaaaaaaaaaaaaaaaaaaaaaaaaaaaaaaaaaaaaaaaaaaaaaaaaaaaaaaaaaaaaaaaaaaaaaaaaaaaaaaaaaaaaaaaaaaaaaaaaaaaaaaaaaaaaaaa

SEQ ID NO: 41430 - DNA, 384 bp, Glycine max
  Clone ID: LIB3093-044-Q1-K1-B7
atagaatcgtcgattttctctttttctgactttagggtttcattattttcttgggtagatccatctatctagcttgggagctgcgaaatggacgtcgcagtcactgccttccggtcaccgctgatcatcctccgaagaccggtcaacgagtctgcctcagctcggttcggttccacttttgggttttccagaaagcaacggttcagttcagtatgtatccccaaacacaagcacaagcaaggtcgtagaagagggtttgtagttagagcttctgcatcctcatctccggagtcggatgatgccaagattgctcctcttcagtttgaatcctcaattgggcagttcctttctcagattttgaaagatcatccgcatcttgtgcct

SEQ ID NO: 41431 - DNA, 457 bp, Glycine max
  Clone ID: LIB3093-044-Q1-K1-B8
cacaaactaagatcaacatggtttactacactcgcgtttcagaagttgagagggaacctatcatggagtattccagaccacgaccaatgatgggcaactaccaccaccctaatgctcaccgtgtcctcaacgagaagattgtttatgaggaggatgtgattggaggatcccgccacaaccacatgcatcaccaccaccctgagactcatgagagagtcaaggtggtggagtatgaacaagttcctgagaggcgcgttgtctatgaagagaaagttgcttatgacaacgatcgttactactctccaaggtattgaaattggacaaatggaataacacctataacgtgttatcatgtggctttttattaagcaggctacctagtataccaaaaagcaccaactgtggtccttgtactaaataaattcctgcttatatatactggccattatgttatata

SEQ ID NO: 41432 - DNA, 325 bp, Glycine max
  Clone ID: LIB3093-044-Q1-K1-C1
taccttgtcaacccaagcgtaccctgctcatccacacacaagcctggacgccctgtctacccatttatcccaagtggagacataagaggactactctaattacaaaactgatatctcgacattccaagcttgccaaaatattattctaactagatttcttatcttatcaacactagaatctcatgacaatttatcacagatttctgatatcctagttaggtactccaccgaggatatacgatgatgcaagaaacctaatttccaagacagtattggcaaatccctcaaataggaccgcaaatccgacagtactaacatgtaaaag

SEQ ID NO: 41433 - DNA, 465 bp, Glycine max
  Clone ID: LIB3093-044-Q1-K1-C2
ctccatgtgtttgtgcatgcaggaaagcacgtaaccaaattctctgtttcagcttcctctgggttttgggtacgaacagagttgctctgtttttgacgatggccataaaggcgattgaactgttgaaagggtgcggatcacaagaagaaataatggaagtgcttgctgcggtggcttcggatttgggggatgtgatcgatgatgtgaacaccttgcaggtgattccactgaatggtgcaatgaccaatgaggtttttcagataaactggccaaccaaaaatggtggtgagatcagaaaggttctggttcgtttatatggggaaggtgttgaagttttctttgacagggaagaagaaattcgaaactttgactgtatttcaaagcatggtcaagggcccacgcctttcttttggggccgattcacctctggcatagttgaggagtttattcatgcccgaacttttt

SEQ ID NO: 41434 - DNA, 96 bp, Glycine max
  unsure (1)..(96): unsure at all n locations
  Clone ID: LIB3093-044-Q1-K1-C3
gccaccgtcggagaaaagtggggcactactcnactttttccttttgcttgcgaatcggaatcaaataatcagatcatccggttcattagttcatca

SEQ ID NO: 41435 - DNA, 449 bp, Glycine max
  Clone ID: LIB3093-044-Q1-K1-C4
cccacgcgtccgcccacgcgtccgcaaaatgtgtccctattgtgaatccaggtcccttcagagacaaattcttgttattgatcggactgttggtcaaacaactattgtttatagctccaggtttggcagtcctggtgagtgccttgcttcttggcattcaaaactgcatggtgctaactatttgagggggaacgaaccttctttcataagaggtttgaatttgaatttgaacttgaatatgactgagccaactttggctgataaagtatatgggaatctcggaactagcattgaaagtgagatgcatgaagacaccgaagaaattaatgcattgctttactcggacagctatggctattctacccaggatgatgatgattaagttactagcacaatggcacttcttcctaaagggtacaatgaccactcatgataactgtgaaaccctt

SEQ ID NO: 41436 - DNA, 305 bp, Glycine max
  Clone ID: LIB3093-044-Q1-K1-C5
ggacacaggtgatgttgaaactttagatgtctaacaggggatctctaatggacaattgaatgcacctcaacttctggataggagtgaataaaagcgtatggaaagtggtggtgttgacaagaaaaagaaaaaaagaaagaggaaggaggttaaagatctcaagtttgaaatggaagtggataaaacaagctcccagttaaaaagaaaggaacgtaagaaaaattatttcgaatcataaaagaagaagcacataaaatccaatgaataaaaaatggactttcctggacaagaaaaaattaaatttg

SEQ ID NO: 41437 - DNA, 305 bp, Glycine max
  Clone ID: LIB3093-044-Q1-K1-C6
gtacacatctcttgtttaaacttttgacacctactacatcataggaaatgctggggatacgcggcactttcttcaaggatttggggctagtaaatcttatccaacaaatggcagctgacatgtttaaggacatttatagagtatgcaggacaatgattatagctaacacttgaagatccctaatactccctctcatttacctacttggaagcgttatactaccaaaacgagacattcctgattaatcacaataaactcaactgagagtcaccattcacatacggatataatgccttgtcatgtta

SEQ ID NO: 41438 - DNA, 340 bp, Glycine max
  Clone ID: LIB3093-044-Q1-K1-C7
gccacgcgttctgcattgctctttgcaaccttatttctagctaattattatgggtattatggaacctgatatcggggataatggcatacttaatcaaatacacagaggccaacactccttccaatattccatacgcttgactagccactcctcaagctgaacctaaagctgtaaccacagccatcaccatagcaatcatgcatatatacacgcatattgcttatactaatccgtctaacattcaatctgatattaataatgatcttaataatcattttgataatcgtgaggacaaacgtaataacttatggatcaccttctaacaatattcttcatatca

SEQ ID NO: 41439 - DNA, 451 bp, Glycine max
  Clone ID: LIB3093-044-Q1-K1-C8
aaaaacggtgcgtttcgatcatgttggttttttccttcctcgctcgcacttctgcgttcaggatcagcatgatctggttgtgggtcgtctcaccccaccgttccgttttcagggaaatgggtctgtggactttacttgaggggtttcttcttcttgcaaatgcgctagcgatattaaatgaggaccgctttcttgcacctagaggatggggcttccaagatttctcgggtggaaggactaagtcgttcaaaggccagcttataggcctcatttatgcaactcagtacctcagagttcctctcatacttctcaattccatctgcatttttgtgaagttggtgtccggatgatgcttactaggtgtttctgtcagatgattgcacaaaggttcttcaagaccaagtttagggttgccaaatccactgtaaaatatcaattgaataatgtcttg

SEQ ID NO: 41440 - DNA, 344 bp, Glycine max
  Clone ID: LIB3093-044-Q1-K1-D1
acaagcctgaactaccttgtcaacccaagcgaccctgctgcaactctaacatgccactaggaccttttacccactcttgcgaagatcctgcactgggacggctccgtatagcgctatgtgatacgctagccagagtggcaatgtacggcgagaacgcaagcatcaaagagatccagtacatgaacgaaatagccagcatgtacgattacaaggctcaggcgaagaaacagctctgcaacatgcctctacaacgtgatgcttcaatcccaatgttacaccgagatatgcactatgagcatagacactcttaactataacactaacaacatcgttctacgcttcaa

SEQ ID NO: 41441 - DNA, 457 bp, Glycine max
  Clone ID: LIB3093-044-Q1-K1-D2
tccacgcgtccgatcacgcgtccgagcagcttgcgcccatgcgtccggtggaatacaacatatcagatgctggtggcagcttgtgaactacgggaagtgttttcttgtttggacacttatgatcctgattacaagggtgccccatctatgcaggattggaagctggttgagaccctgtgcacatacttgaagcccctttttgatgcagcaaacattctgaccacagcaactcatcccactgttattaccttctttcatgaaatttggaaattgcagttggatctgtctcgtgctgttgtgagtgaggatcctatgatcagcaaccttactaaacccatgcgacataagattgataagtactggagagattgcaggtttggtttggctattgcaactagttaatggatcccctttttgtttcaagatgaagcttggtgagtttaagttcactaaaatc

SEQ ID NO: 41442 - DNA, 460 bp, Glycine max
  Clone ID: LIB3093-044-Q1-K1-D3
gaggttttccgttccgaaacgatgtcctccttgccatctccaccagagacagagatcgagagcttctcatccccgtggccgagacccccggcggcgatgccgccgtctccccttcccccaagccatcgtcgtcggcgtcgtccccgcatcattccggacgcgagactttttacaaagttgttagaagctgggcatcaaaaaagtttatgactggatgtgtcattctctttccaattgcaattaccttctatataacatggtggtttattcatttcgtggatggatttttctctcctatctatgctcagcttggaattgatatttctggtcttggattcataactttcataactttcatcttcttggtcggggttttcatgtcatcatggttggggtgcttctggtcctgggggggccttggggagtggttatcaagcgaatgcacttggtctcatattta

SEQ ID NO: 41443 - DNA, 450 bp, Glycine max
  Clone ID: LIB3093-044-Q1-K1-D4
tcctctttcaatctccctctaaaacttcacctacccaactttcacatcattttcttttctccgaacaaatgaaaatgaaaataaggaaagccttcatctataaatatagccatcacacactctccccattcgttccactcgttctttagatctatccactcacctgcctcttcctcacccctttctccatctaacgagtaaggaaaaatggcgcgtaagaagatcagagagtatgactcaaagaggttgttgaaggagcactttaagagactttctggcaaggagttgccgatcaagtctgcacaaattactgcatcaactgatttcactgagctacaagagaaggaaccctggctttcatcttctaaattggttgtgaaacctgacattgttatgttggaaaagcgttggcaaaatataagtggtttgagttgccttaaaatttggatt

SEQ ID NO: 41444 - DNA, 420 bp, Glycine max
  Clone ID: LIB3093-044-Q1-K1-D5
ataccactctggagaattaatgtttcagagttcgtatttttctctgtaattctggaattttttctcaagaatttgtgttaattgcgaagctttctgtgttctctgtaatggtgcagatttgagctcacatcactgcgattttctcggtggccaagctcaaactgatccaatttcatttctggggtttcatcttttcaccatttcagacaaaaaaattgtgtttttaaagattcctgtaagattgtaaaattttcctgcgcccaaatctgtctcttaaataaacttagcatttaccccctttaaaaaattcaattttttgtgtgatttttttggttgactgggtgtagaagtatctgaatcttcaatgggtagggtttaagtgaagttttgaggttttggaaggtctatcttaattttttc

SEQ ID NO: 41445 - DNA, 439 bp, Glycine max
  Clone ID: LIB3093-044-Q1-K1-D6
gaaatcatacattcaggaaggttatcttcactccaccaaagaagaattagcaagaagggtaggaattacagtataggagttgggcaatttgctatttgcttcaagaaatccaatttcgatgcagcaaactttgtgggtggaccaagatacaactttccaggagattactgcagactcagcaattgagatcccaggtgtgactgtctcaaaacagctaatgaggaggcacgtgcacaacctcctaaatatcttaagcccaaaagaaaagggcataatcaggctaagatttggtattgaggatggcaaggagaaaacattgtcagatattggcaaggtgtttggtttgaccaaggatagagtcctacagttggagtgccgagctttgtctaagcttcaagcagtggtttccctcgaaagtcaaggacttgatgcatacata

SEQ ID NO: 41446 - DNA, 386 bp, Glycine max
  Clone ID: LIB3093-044-Q1-K1-D7
ctggtttatagatctctgtgaattcgctatataacactcaacctaagatgcagagcgaggaaggacagatcaccgagctttacagtcctaggaagtgctctgccacaaaccgattgattaccgctaaggaccatgcttcggttcaggttaacattgggcatgtggatgagaatggcgtctacaatggccatttctccacttttgctctctgcggcttcatacttgctcagggtgatgctgacagtgccctagatcgcttgtggcataagaagaaagttgaagttaagcatcatttgacacccatgatagttagttactttgctatgtattaatttctacgcttgctaaagatatttgagtactatgattgacgactttgagcaaat

SEQ ID NO: 41447 - DNA, 367 bp, Glycine max
  Clone ID: LIB3093-044-Q1-K1-D8
tcaaattccaattctgaaacgttttttgtgatattttattttggtcttaatcttattttccagtattgatgaaaaggaccatgggttatttgttttgcgtatcaataaaggttaattttattaaaaaaaaaaatactaaaaaaaaagaaaaaaataaaaataaaaataaaaaaaaaaatcaactataaaaataaataaaattttacatataaaaaaatataaaaaaagggcgggccctttttgaggttccaatttaacgtaccgtggattccgaattaatagttttctaatggggttcccaaatttaaattcatgggcctttttttaaaaatgtcaaggcttggaaaatcctctggggttcccaaat

SEQ ID NO: 41448 - DNA, 143 bp, Glycine max
  Clone ID: LIB3093-044-Q1-K1-E1
cacacagccccgcctacttgcgacccccacgaccctccgaagcccgatcacgcctcgaggccgttgacccacgtcgtccgagctggcgactcattgggccatagcgtgcgcccgccggctgacctcgagcgactcaggaatgg

SEQ ID NO: 41449 - DNA, 378 bp, Glycine max
  Clone ID: LIB3093-044-Q1-K1-E3
aatatgaacagaatctcgtctcgacaccttgtctatgcttcagctcgcaactgcaacttccgagaaatataaatatggattactgcatggtcacacatagttaattttattaattactactaggtagctggtttttaataggtagtaagtaagtgtaatcgttgtcttcctgcagatatggaagaagcgggtttaggagattgttgttcctctaatacgactattacgaggaaaagcgagaagcgaaagcatcagcaccaacaacaagagaagccatacagaggaataaggatgaggaaatggggcaagtgggtggctgagattagagaacccaacaagaggtcgaggatctggttgggttcttacgccacccgcgtc

SEQ ID NO: 41450 - DNA, 321 bp, Glycine max
  Clone ID: LIB3093-044-Q1-K1-E4
ctctttactaccttaagtcaacaagagccttaaccattctgccctctcttctcttctttggctctctagattgcgtctctcgggtgtcttagaatcacgtacaatctagtcaacatatcagaaatggatgcaattagttgcatggatgagagcaccaccactgagtcactctctataactctttctacaacgtcatcgtcagatacagcgaagacttcttcgatgattacatagtctgagaaagtttctctatccccgactcctgcaaacatactataccgtgttggaagcttctcaagcgcagacgtggatcctgttagc

SEQ ID NO: 41451 - DNA, 347 bp, Glycine max
  Clone ID: LIB3093-044-Q1-K1-E5
cggacgcgtgggggagttttattattctctgtcgccaataacgaaggcatatggcgccgtttgcctgttggctacggcaacttaccatcttggattatatcatccagcttacattgcactattctacgataaagtgttctacggttttcaggtttggaggttgttcacaaacttatttttccttggaccattctctatcaattttgggatccgtctcctaatgatagtaaggtatggtgtccaacttgagaaaagaccatttgatcgacggactgctgatttcttgtggatgatgatatttggtgcctttgcactattggtattgtcttctatccccatattttggt

SEQ ID NO: 41452 - DNA, 455 bp, Glycine max
  Clone ID: LIB3093-044-Q1-K1-E6
cccacgcgttcgaagagaatcttatgaaagttagaagaaaatgggagtggaggagcagttgttgaggcctggcaggggtcccgggccaattcccggtcagaacgtcaccgttcactgcactggtttcgggaagaacggtgacctttctcagaaattctggagcaccaaggatcctggccaggaccctttcactttcaaaatcggccaaggttctgttatcaaaggatgggatgaaggtgtgcttggcatgcaaattggtgaagatgctcgtctccggtgctctccggattatgcttatggtgctggtggctttccttcttgggggatacagcccaactctgtcttggaatttgaaatcgaaatcttgagtgcacaatgaataccttgggtagtctggtctctggtcccccctaagaataaaatcatcatccatttcatggacttgaattatggat

SEQ ID NO: 41453 - DNA, 252 bp, Glycine max
  Clone ID: LIB3093-044-Q1-K1-E7
caatcacttgctgacgacaagatttagcaacttctggagttcactccgacgttggggcgagtcgcgccttttgcacaggggatactggcgcatttccctcgccattaaacacctactacattatcacggaaagattctcaaatccaaggaccacaaacctatctactaatctctccacaatatcaaagaacacctgacgctatcatggatcatatccctgcttttaagagatacacaaaacagcatcaccaa

SEQ ID NO: 41454 - DNA, 445 bp, Glycine max
  unsure (1)..(445): unsure at all n locations
  Clone ID: LIB3093-044-Q1-K1-E8
gtttgctagctctatgacgcattatgacttttgaacagttgcatgcttaggaagcagtgtctgtcaagaaacgttgtattctggtcatataaattgtggtggaaagatagtaacagacaatggaagcacatatgatgatgattcagatactggaggtccagcaagatttcaccgaagtggaacaaaaaaattgggcatatatcaatactggtaactttatggataatgacgctggcgcctattatatcgtgcaaaataaaactttgctttctatggacaatgttgacctatacatggatgctcgagtttcttccatttctcttacttactatggattttgcctgggaaatggaaactacacggttaatctacattttgcggaaatcatgttcattgatgatcaaaaaaacatttaacagcttangaagacgagtatttgcatcta

SEQ ID NO: 41455 - DNA, 325 bp, Glycine max
  Clone ID: LIB3093-044-Q1-K1-F1
tacgttgcacccccagcgacccttcgtgagccggatcaggccattatggccgttctacccattcttccgagtacaatgtcgaaggtggtctaagcctgttaaacggagttgcaccgcctgctggacgtcgtgcaggcgtacgtgcattctactgaacaggtgcctcacttcatggagttatgtcagggtcaatgcgctctgaagccattgaactcgttacactctagctctgaaaatactctcttcaagtgcgtacaaccgcttcattgtcaccactactcgactttaccagccagcttgtccatattgtacagaaaggatggca

SEQ ID NO: 41456 - DNA, 465 bp, Glycine max
  Clone ID: LIB3093-044-Q1-K1-F2
tccacgcgtccggagacagcaaattggggtctcgatgattatgaacttcgacaatcagtggggcaggctcgctctaaaggaatggctgttaaagcaatggggatcataaatcctggaaaccctactggtcaatgccttactgaagctaatctaagagaggttttgcaattgtgctatcaagaaaatttatccttgcttggagatgacggttaccagactaatatatatcatgatgaacgaccctgcatcagctctagaaaggatctgatggaattgggaccacctataagcagggaagttcagcttatttcttttcactctgtgccaaaacgttattatggtgaatgtggacagctagggggatattttgaaatgaccaacattcctccagagaccagttgatgagaatctaacctaaaaggtgcatcaatatcacttagtccaaatgtccagcacaaatattat

SEQ ID NO: 41457 - DNA, 456 bp, Glycine max
  unsure (1)..(456): unsure at all n locations
  Clone ID: LIB3093-044-Q1-K1-F3
tccacgcgtccgggtgtgtgtgtaggtgcactctctcctttcttacacagagagaaaagagagagaaagaaaaggatgaaatagggaaaacctttgggtctttccctccatagttccatttttccattcaacaacacaacacctcatacagacatcatggaggcaggttacaatcctcgtaccgtcgaagaggtctttagggatttcaagggtcgcagagctgctttgattaaagccctcaccaccgatgttgaagagttctaccagcagtgcgatcccgagaaggaaaatctttgcctttatggattttcaaatgagcagtgggaagtcaatctggcagctgaggaggtgccccctgagcttccagagccagcattgggcattaacttttgccaagagacccggatgcaaaaggggataaggactggctgtctntggttgctgtacacagtgatg

SEQ ID NO: 41458 - DNA, 439 bp, Glycine max
  Clone ID: LIB3093-044-Q1-K1-F4
gcacgaatatctagtaggttggagcgatccttgaaaaactctgtacacatgttggtttaccgggacctacttacaggtgatgagcttctctctgactccttccgttacaaggaaattgagaatggaatgctgtcggaagttgaggggaagtgggttgttaaaggagcaattgatgtagacattggtgcaaacccttctgctgagggtggaggagaagatgagggagttgatgatgcacctgttaacgttgatgacattgttgacacattcagacttcaggagcgacccgcattcgataagaagcagtttgctaccttcatgaacaggtttatcaagaatttgactcccaagctcgatgcagagcaacaggagttgtttaagaagcacatcgagggagcaactaaattacctgggccttctttaagattaaagatttcca

SEQ ID NO: 41459 - DNA, 424 bp, Glycine max
  Clone ID: LIB3093-044-Q1-K1-F5
cgcatgggtcattacacgtagctttacaaagtccgatgtgtctaagtggttgagggctttaattgatcgagctcggagtgttgagcctggatggaaagtcagtggatttttaattgatgacgctgcagctgaaattgatcttttgagagatatattttgctgtcctgtcctattttcactatggcgtgttcgtagatcatggcttaggaatattgttaagaaatgtagtaacattgagattcagcgggagatttttaagcgtcttgggagaatagtgtacaacatttggggaggtattaatgcatcgcttgccttggaacaattcttgctggattttgttgaccaaactgctttcatggaatatttcaaagtcatgtgggttgcccaaagcgttgaaatgtgtggggccctttcaacgatgaga

SEQ ID NO: 41460 - DNA, 451 bp, Glycine max
  Clone ID: LIB3093-044-Q1-K1-F6
cccacgcgtccgcccacgcgtttttccagttcccgcccacgcgtccgcaaagctctctcgctctctgtctcgcgctctgatctgctttgtttcaggagccacccgctcctgcagatttcttttgcggctggagtggaaggccattctcgcaacgtttgagttcagcagatccagaatttttcagaaaacaggtttaggagaatgaagaatacggaacgaattgccaattcggctttagcaggtttaaccttagcgcctcttgttgtgaaagtagatccgaatataaatgttattttgactgcttccctcactgtgtatgagggctgttaccgctccgttaaaccaaccgcaccaactgagacaatgtccaatgaacatgccatgcgtttttccctttgtttggggaaaaatgcaatgttattgtcactcttcttactcttcaagtttctat

SEQ ID NO: 41461 - DNA, 443 bp, Glycine max
  Clone ID: LIB3093-044-Q1-K1-F7
cccacgcgtccgataacgtcgattttctctctggtctccagcctcagccaccaggtattgatgtcaaattcaatggggcgctggcggagcccgtggcgccgccgccggagcatccgttgcgattcaattttaaccctgcggtctcggatccgagcgcgattcagcgccagttgcagcaactgcaaattgcggagaacgagcaagctgcgcatcggaggaagggtgaggataattaccccgccggtgattactacgttcaaaaagtgcctgagaagttccccccaccgaattttctggcaagctcgccgggttattggcctgaaaaacatgtttccggcgacgtttatccttcggctgtgacagctacgttcggcggaggggaaaccgtcggttttatatgggtttttccggcgccggggacgttctatcatgcaccggttatg

SEQ ID NO: 41462 - DNA, 52 bp, Glycine max
  Clone ID: LIB3093-044-Q1-K1-F8
cccacgcgttcgaaagagaatgtgactttactcatcagttccactagaaagt

SEQ ID NO: 41463 - DNA, 229 bp, Glycine max
  Clone ID: LIB3093-044-Q1-K1-G1
gctcacttgtagaagctgctactaatcacggtcataagaccaacaactcacaggatgtgttagctgcacaacatgattctgcataaaccctgtacctgaggtcgcagacattgaattctatctcaaggatctccaagacccgttcgactgttgataaaacactgactgatgctacatatgcatccttactatacgcagacacaactcatgaccccgatgtggaccatat

SEQ ID NO: 41464 - DNA, 323 bp, Glycine max
  Clone ID: LIB3093-044-Q1-K1-G2
accggatcgttagcacaagttcaggaactatgagtggcttggtgcccatttgttctagaacgcttatgttgggataccaatacatgaggacggtcattggaacttgatcattatttgtgtcccagacaaagaatatgaatcacggccaatcatacttcatttggattctttggggcttgactctagtaaatcagcttttgataatattaaaagctatttgattgaagaaaagaactatatggatcgagaagatgtgtctgtagatgtttcaattgcggatagaatatggaatcgcctccctacgagaattgaatctcagatca

SEQ ID NO: 41465 - DNA, 376 bp, Glycine max
  Clone ID: LIB3093-044-Q1-K1-G7
cttacgcaccattgcctgaatgttgatgatttcgaatagatgctggaaactaacagattgtgggtgaccattcagggggatctggagaggatcattctattcggcctagaataaaggtgattgtatattcgatgccataaggtgagatacttactgctgttgccaatttaacagatgcacaaactgaactcatagatgcctaataggacgacgattctgaactatcagtaggacctgcaccaccagctatagactctgatgcagaattatctaatgaatctcaacgccttgaagatgcaaccagtatcatagaagctgaggcaaacagacaccatgatgttcttggagctaaccataatatgaccaatgacaacat

SEQ ID NO: 41466 - DNA, 329 bp, Glycine max
  Clone ID: LIB3093-044-Q1-K1-G8
tccacgcgttcgcccacgcgtccgcaaaatgtggatgctttcatgaaattgaaattatcaagggaaaacctcgtccgaggaatgctgtttcatcaacagtggaaggatcttcgaacagtacaaatcctttagatgttgcactatcatgggtacaaaggtgtatagggtttgacactaaattctcaactttgaggtgcctaatagccattccggtcgcatatgagatttatttgccagatttcgcttgactgtatcctacttcacaacatgaagtccatttaaatcatggttttcatgcattttgctcaatggtcaaaaggcctgccatg

SEQ ID NO: 41467 - DNA, 178 bp, Glycine max
  Clone ID: LIB3093-044-Q1-K1-H1
tacttgccacccccacgaccctacggaatcctgatcaggcctcgacatccgttgacccacttatgcgacacgctttacaaacgggtcttatgctccagacattgggccgtccatgttcaatgccctatacacatcgtactcaatacctcagccagatacggtgcagaaaacctacaca

SEQ ID NO: 41468 - DNA, 353 bp, Glycine max
  Clone ID: LIB3093-044-Q1-K1-H3
cgcttgagtttggaacagaggaaaatccacatgcaaatcatattcaccatcctctaatgcatggctatcacaagagctggattgggctgctcagcaaaggctgagctgggtgcagaagaattacatgatttacaattattgctccgacaaaaacagatttgctcaaggccttccactcgaatgcacacattcgtagaggacttcatcttccactagcacaagtgttacattataatttcatttaccattcttttattttatttccttttaattcctggtcacagtttgtgctcttttacgatgtaaaatatatcgcatgtaaaataacggttctgttatttggatgtcaaaaa

SEQ ID NO: 41469 - DNA, 381 bp, Glycine max
  Clone ID: LIB3093-044-Q1-K1-H5
cttcaatcctttcgttattctcttattcatctgtctcttctgaataatccagatgtctttctgcccttttctccgggacgcttgtcgtgaccggatctgtatggatttgatccagatctacacgccgatggtggttttggccgggtctttcatagatctggtgcgtagaggctcagatctacggtaccgaggtgtgtgattcatgttcgtcttgcttttggaatctgtttcgtagaaagtcgtttggtcttgcatatggcatggctcttgaggtatttttttgcaggtacaacagagaatcgatgacaagaacgcagatccgacggtagatccagtcgattccgcttgttcgatcgctacagacccctgtatcggatcatt

SEQ ID NO: 41470 - DNA, 446 bp, Glycine max
  Clone ID: LIB3093-044-Q1-K1-H8
ttacctttcgacccactcgtccgtccacgcgtccgttcaaggtgacttcgccattctcaacttttgtaacctccgacaccagggggcctccttcggtggtgacttgggggagtataagcctcttcattccgccgttgacgccaagcttcaggccatttgcgagggcctggctgagctgcacaaacaggggaagaccgagaagcctccgaggaaaacgcgatccaaactcgcttctccgccagagaacgacaacaacatcgacaacaactcttgtaaggtcgaagctgcttcctcctcttctgaaagttcttcgccgctttcggttctgactttcgctgacgtcagcgagccgcaatgggaaagtgaatcggataattctaatctccagatgtacccctcttatgaaatcgactgtgattctctgtgaaaccccgtgttttcttttt

SEQ ID NO: 41471 - DNA, 345 bp, Glycine max
  Clone ID: LIB3093-045-Q1-K1-A10
tctcgatcaatcatggctttgcccaatcagctaaccgtcgattaccctactttgaaactcgggatcgtcggtgacggtggtacaggaaagacaacgttcgtgaaaaggcatcttaccggtgaatttgagaagaaatacgaaccgaccattggagtggaggttcacccattggatttcttcacaaactgtggaaagattcgcttctactgttgggatactgccggacaagataagtttggtggcctcacggatggatattatatccatgggcaatgcgccattatcatgtttgatgttactgcccgactaacttacaaaaatgtgcctacctggcatcgggatctt

SEQ ID NO: 41472 - DNA, 62 bp, Glycine max
  Clone ID: LIB3093-045-Q1-K1-A11
tcgaccacgcgaccgatagatctatactcatcaccttatcacacgaaccactacggggaaac

SEQ ID NO: 41473 - DNA, 381 bp, Glycine max
  Clone ID: LIB3093-045-Q1-K1-A12
attgggtgctaaagatgttgacaatctgtctagacagccagtttcactaactggtgagcgggcttgtgggggacatgtgtttggagataacaatcaggagtttgttgatggtgtcactagcatggaaaccaattgtgaagatccctcagagtgtgtatctcaccacaatgcatctgatggtgtggtgaaaaaacgaaaagtggaggaagatttatcagctgatggaaatcttgttgctgatttttccttaaatgataccagggaaactaagctagaaaaatcaagtattatacaggatgacatgttaatggactatcagggtgcaactgcagctacagcaaatgcgtcagttgctgaacgtgtgatcgagccgactcttgt

SEQ ID NO: 41474 - DNA, 267 bp, Glycine max
  Clone ID: LIB3093-045-Q1-K1-A2
gttacacccagtcgcctgcatcttggtggttagagttcgtgtattggtaccctgctaactggtaggggatatagacgctggactgaactatctgttaaagctcattctttgaatggtcaacagtgtatacattgtatgttaattgtacgagatggttgtgttacaatcacaaaatgggaaagtatcacaatgtcgtttgatcatgcttaaaatgccgaggaagaataggatgattattcaattgactacgatggaaatgatcttgat

SEQ ID NO: 41475 - DNA, 253 bp, Glycine max
  Clone ID: LIB3093-045-Q1-K1-A3
gtgacagtgggagaaagttaaaacaagaaatgaaaatacaaggtgacaaaataaggatacaaaatgatttgatgagatggattatgcatactgctgttcaattttctaatgctacaaccataagagttttaaatcctgacaagctcacataacaagtacagaatattgctctggagacaagtgactatgatggtgcaggatgactggatgttcatccatgatacttcacaacgtatatctacattaggtgatt

SEQ ID NO: 41476 - DNA, 418 bp, Glycine max
  Clone ID: LIB3093-045-Q1-K1-A4
cccacgcgtccgcgttatcaacacattcaccgagtttgaacaagtttacttaaaccacttgaagaaagaattgggacacgaaagagtctttgcggtgggcccggttctgccgattcaaaccggttcgatttcaacaaaaccggaagaacgaggcgggaacagcaccgtttcgcgacatgacatcatggaatggctcgacgcacgtgacaaaggttccgttgtttacgtgtgtttcgggagccgtacgtttctaacgagttcacaaatggaggtgttgacacgtgcgttggaaataagtggggtgaactttgttttgtccgttagggttcctgaaaaaggacaccttgcgaatgagcacggtacggtgccgcgttggttttcagatagggtgaaaggaatgggatttgtgattgaagga

SEQ ID NO: 41477 - DNA, 466 bp, Glycine max
  Clone ID: LIB3093-045-Q1-K1-A5
cgaacttatgggagatcttgctgaaattcggggcaaccttcttgcattgcaccgaattgcgcggcctccgtcatgatgagctgggtcaggaaacacttcttaatttgttacttcgtaactaccttcactacaacctatatgatcaggctgagaagttgaggtcgaaggctcctcgatttgaagcacattcaaaccagcagttttgtcgttatctcttctacctagggaaaattcggacaattcagctggagtataccgatgcaaaagagtctctcctgcatgccgtccggaaagctcctgttgctgcacggggttttcgaattcaatgtaacaagtgggctgtgatagtgcgtttactgttgggagaaatacctgagcggactgtcttcatgcataaaggaatggagaaagctctaaggccttactttgagcttacaaatgctgtgcggattggagacttggaact

SEQ ID NO: 41478 - DNA, 263 bp, Glycine max
  Clone ID: LIB3093-045-Q1-K1-A6
gaacttatggtagatcttgctgaaattgggtgcaaccttcttgcattgcaccgaggtgccgcccttcttcatggggagctgggtcatgaaacacttcttaatttgttacttcttaactaccttcactacaacctatatgatcaggctgataagttgatgtcgaaggctcctctatttgaagcacattcaatccaacatttttgtcgttatcacttctacctatggaaaattttgacaattcatctttagtatacctattcata

SEQ ID NO: 41479 - DNA, 469 bp, Glycine max
  Clone ID: LIB3093-045-Q1-K1-A7
tggaagaagccttttgctggttcatcccatgccaagggtattgttcttgaaaagattggtgttgaggctaagcagcccaactctgccattcgaaaatgtgccagggttcaactcatcaaaaatgggaagaagattgctgcatttgtgccaaatgacggttgcttaaattatattgaagagaatgatgaagtcttgatagctggatttggacgaaaaggtcatgccgtgggtgatattcctggagtcaggttcaaggtcgtgaaggtttctggtgtgtctctcctggcccttttcaaggagaagaaggagaagcctaggtcttaagcttgtgggtcgtgtcctctctatagtctatccaaaaaattattatgaattttgcttcttgagactggatgagttctctgaacaattttgtatctctctaatagtaatttttctgaaacttaaatttggttcgtatgtcgcactt

SEQ ID NO: 41480 - DNA, 458 bp, Glycine max
  Clone ID: LIB3093-045-Q1-K1-A8
cccacgcgtccgcccacgcgtccggattccgcaacagagagtagaaaagatggcgcggttgatcacagtggtgtggtgcgcggtggcggtgctactgtgcgccgcggcgggcgcgtcgtgggtggaggaggcggcgaacccgatacgaatggtggcgggggtggaggcggaggtggttcgggtgatagggcagtgccggcgcgcgctgaagtttgctaggttcatgagcaggttcgggaagagttaccgaagcgaggaagagatgagggagaggtacgagatattctcgcaaaacctgaggttcatgcgctcccacaacaagaaccgcttgccctacactctctctgttaatcattttgctgattggacttgggaggagttcaaaagacacagactaggcgctgcccaaaattgctctgccactcttaacggcaaccacaagctcactgatgctgttc

SEQ ID NO: 41481 - DNA, 446 bp, Glycine max
  unsure (1)..(446): unsure at all n locations
  Clone ID: LIB3093-045-Q1-K1-A9
caaattgcaactccttctcggcttttcctaatcagcacgaacacaaacacagagagagacgtggattttgaactgagaagagcgagagagaagctagagaaagagcagagggagaggaaggaaagagcaagactgaaacttcagaaggaaaagaaggccaaagaagaggctcagaagcaaaaggaagccatcgaagctgttcaaagatctcgtcgtattgatgccgctcaagctcaactcaaggctgcccaacagatgcaagataacctacttgctggcggaggaatagtgttttaccgactactagagggctttttttatgaaggcggtggagataagatcaagctacctncttcttgctttgcagaactggctgagcagggtacttttgataagagacagggacccttatactgtcagttggcgttaggtcatgaagaaagcac

SEQ ID NO: 41482 - DNA, 401 bp, Glycine max
  Clone ID: LIB3093-045-Q1-K1-B1
gcggccgagagctctttgagaaaatctgcagtgctgggcgttctacctaggatgaggctccatggttctgggatcatctcatatctggggtcagctattgacatgctatgcacggatgtcatcaggacttcaagcttgaaaacactttgctggatggaatcccggcacctagtttaaagatatgctattatacgtactcccagtcttcactgcttcattcacaaccaaagtcaactgtgggaactactgcatatattgctccagaacaattgctgatacaagagtatgatggccagcttgcaaatgtctggtcatgcagggtaaccatatatgtgatgctagagggatcatatcctttttcagatcctaatgaacccacagactttctcaagacaattcat

SEQ ID NO: 41483 - DNA, 404 bp, Glycine max
  Clone ID: LIB3093-045-Q1-K1-B10
cccacgcgtccgcccacgcgtccgcccacgcgtccgggcacgctgagcatggaacacagagggctagaactcaagctggcttcagcaaaggatctcaaagacttgaatatattctcaaagatggatgtatatgctgtgctttcactctccggcgatcaaaagaccaagactcccgtccacagaaacggcggcaccaacccaacatggaattttccggtcaagttcacttttgatgaatcggtggcgcggcagaaccgtttggccctcgaaatcaagatccgctccgagcgcgccctcgccaccgataaggacatcggccaggtccacgttcctctcatggaactccttaagcaacctggcgacggtaaatccttccagcacgttagttaccaagtcagaaaacc

SEQ ID NO: 41484 - DNA, 305 bp, Glycine max
  Clone ID: LIB3093-045-Q1-K1-B11
cccacgcgtccgatcatgcaccctttcaaatatttggcttgggagcggcaaccttacacagtcgatcatcaatagtaaagctaaccactcgtttgcatagagtagtatatatcattctaagaagtaagaatctcagtaacaccaattagacaatatacagcgactatgaaagcaatgacagcaacgacaacgtttgatgtctctgccgtttgctttcgtgcccctccatctgtgtcaccgaattcatgccacaccagttttttagttataaacttcatgaatcctcacaaggaactacttattaa

SEQ ID NO: 41485 - DNA, 58 bp, Glycine max
  Clone ID: LIB3093-045-Q1-K1-B12
tccacgcgtccgcccacgcttcctaccacgcttccggcctctcttacattggggcaca

SEQ ID NO: 41486 - DNA, 473 bp, Glycine max
  Clone ID: LIB3093-045-Q1-K1-B2
accaagcgttcggacagtcagagggtaaagctactctcaacatctatgctatgaatcaatgcgtagggtagcagcacgtgtcggtctggtgttccagagacctgctatacactggcttgaagacatggtgaggccgatcagagaatgtgaatgcagcacacgatgcacttcttttccgtaccaagtgcaactcgctcgcacacttcactaagtacaccattcagggtgaatctcaggaagcctacaaggtattggaccacaaaagctactcctactcagatgtttataatgaatcttatccatgtgatgattcgctaacacacccagaaccgattgctgtagactgtctatgaaattcattatgatgattggacttaagacgagttcaaaagacacagactaggcgctgtccaaaattgctctgccactcttaacggttaccacaagcccactgatgctgatcttcttccacg

SEQ ID NO: 41487 - DNA, 359 bp, Glycine max
  Clone ID: LIB3093-045-Q1-K1-B4
cttaataccaattttctagggtttatacaattttcgatggcttcttcagatgttgagtaccgttgctttgtcggtgggctcgcttgggccactgacgaccaagctctcgagagagccttctctcagtacggcgaaatcgttgaaacgaagattatcaacgatcgtgagactggaagatccaggggttttggatttgtgaccttcgcctcggagcagtccatgaaagacgccatcgaagggatgaacggccaaaaccttgacggccgtaacatcactgttaacgaagctcagtcccgtggtggctgtggcagcggacgcagttgatgtggtggatatggtggtggtcgcagtggtggata

SEQ ID NO: 41488 - DNA, 450 bp, Glycine max
  Clone ID: LIB3093-045-Q1-K1-B5
gccacgcgtccgctgattttctctcttaatccaccatgtcgaatagccaaactcggaattacgatggtagctcatttctcattgacattaccaccactgtgaatgacaccatctgcacactcaaaataagatggcgttttgcttatactgctatttattctagaagggtcatgctttccttggccaacgaaatcatatctaagagaaatacatacactcattcttactctaaactattccaaactcaatctaccgctttcggaagcactcttgatatcattgagccactaattctccaacatgttaccaataatcattattcttaggttcctgatgttgacaaagccagacttgctagcatggtaaaggacataaacttgcaagccttagttgagtttggaagagttgaacgtgttgcacatactcttggaaccattcctgcaaacggaa

SEQ ID NO: 41489 - DNA, 446 bp, Glycine max
  Clone ID: LIB3093-045-Q1-K1-B6
atgatgttgatcatggattaaatttagaaaaggctggagctactgctgttgtccgggagaccttggaaccaagtcttcaactagcagctgccgtgcttgctcaggctaaacttcctacatcagagattgcatcgactataaatgaattcagatcccgccatctatctgagctcactgaactatccgaaacaaatggaacttcttttggatatggatataatacaactacgagcagagccaaatctcattccccagattcatcagatgatacgtaagtctatgaaggtaaactggcgacatgaagattgccccatatatacaaagtggaaggtaaaagaaaacagaaaagtgaaaaattgtatagcaacagagtaaatgttccatcatgatgtacagaaatatatatatctgcctaaaaaaatttgattaatcatccttaaatttca

SEQ ID NO: 41490 - DNA, 455 bp, Glycine max
  Clone ID: LIB3093-045-Q1-K1-B7
ggcacacgtcagatggtcacggtccacatcctggaaacttgaagccgtttgacatggacgacataccaatccgcagagactccaatttccggttgccacctcaccggtgatggctataggcgtagcagtttccggtatgtacacgctcactccaactctctcttcattcaagcaccccacgcgcctcttctcacgcgctgctttcactgcaaagcttccacttcaatttcgagcttcttcaacgtccttcatcgacaccgaaaccaatccaagagaatccaacgtagtagtagttgaaaaggacgtaagcagtagaagcagcaattcgttggcttgtcccgtatgttacgattccttgacatgtaacggtgatcctggtttctacgtagatactatcactggatctagttttcaatgcagcacctgtcagaaaacatataattggtaccaaacgc

SEQ ID NO: 41491 - DNA, 313 bp, Glycine max
  Clone ID: LIB3093-045-Q1-K1-B8
atttcaggaacgttagattcttggcaaagttcataacagaggctggaattcttatgaagagaagccagactggcattagtgcaaaggctcaaaggaaggtcgctagggagataaaaactgcacgagcattcggcttgatgccctttacaacaatgggtacgaagtcttttgtttttgggagaactatgcagaatcttgatgaagactttgcatatcaaagtagggtggcggatatggatggggaacctgatatggaaggagaccatgcttagaacattgatataggtacttatgcttgggggggggtgggggg

SEQ ID NO: 41492 - DNA, 506 bp, Glycine max
  Clone ID: LIB3093-045-Q1-K1-B9
cccaccgtccgcccacgcgtccgcaaagaccgagttagaggtgactgttgagagcaagaacggagacctcaagcacctggggtttgtgaggattgctgctattcaaacatttgtgattgtgtcaaatctgtatgagtacgcaaagcagaattctgggcctttgagatccgtcgtaggaacggttgagaacactgtaaccaccattctcggtcctgtctgcaacaaattcaaggacgtgcctgatgatgtccttgtttttgttgacaaaaaggtggatgaagcttcccacaagttcgatgagcacgctcctccttttgctaaacacattgcggatcaagccaagggtgtgattcagaaagtgacttgtgaggcaaggaaagtagcaagtgaagcacaatcttgtgggccaagagcagctgttcattatgttgctacagaatcaaagcattttgggtttgataattcagtaaagttgtggaatggacttaaccacttttcaccatttc

SEQ ID NO: 41493 - DNA, 339 bp, Glycine max
  Clone ID: LIB3093-045-Q1-K1-C1
cccacgcgtccgcccacacgtgcgctctgacttacttatagctgcacatgtccgatacacgagtctggcatatcacgatggaatccccaattactgtcgcaacacaagaatcattaccccaaaacccagaattcaacaactaaaccccaatgatacagactgatttatttcaacattcttaatacaaacaaacttcttatacgaaaaatgactttcatacatttcataaacactatagctgctagctatcatcctttttctcacacatctctttttcctcaattccatactcctcttctttcataagattaccccaaacgaattcgctattctaactcc

SEQ ID NO: 41494 - DNA, 155 bp, Glycine max
  Clone ID: LIB3093-045-Q1-K1-C10
acgtaaaccctctatatagacacacccagtggatactcttcattgactgagccatagcgtaagggggtctccaattagggagcattgtgtggaacaaagtctaaacctttattcttatgaacatgcatctgaaaagcgttgattcatcatattgt

SEQ ID NO: 41495 - DNA, 401 bp, Glycine max
  Clone ID: LIB3093-045-Q1-K1-C11
ttttacaataacccaatcatagtctcactcgggattggttattcttattctaagagataagccaaatccaaaccgaaaagaacaacacaatgaaaggagaatacgtagagcaacagcaacaacatcctaagagtgaaacaccacctagtatgttctcaaagcttcagcctcagcaccatcctttcccgcaccaccctttccaactctccgccgaggatgccaccaccatcaccccgagcaccgttcagaaggccaactcttccggcggcgacggcgcgaccatcgaggttgttcggcgtcccaggggacgtccgtccggttccaaaaacaagcccaagccaccggttatcataacccgtgacccggaacccgctatgagtccctacattttagaagtgtct

SEQ ID NO: 41496 - DNA, 388 bp, Glycine max
  Clone ID: LIB3093-045-Q1-K1-C12
tccaaccatacgctcaaaacttttaaacctttatgttggaatctgatggaaatctcaatggacaatcatatcggtggctaacagaaaccaaccactgaatgattcttatggaattgctccaatccatgaaaatggcactcttcgcattgcttaacggacagaaacaatttatttcgactacttatctctccaactcgtcatccaataaaacttcccagtattcacattatggtaagctcgtccttaccaaatccacaactggaaacatctcgtaggatacttttcagcaaccttcaaatacattattgcccggcatgaaactttcaacaaataatagctcacgtaataaagtatagcttacattgtggaaaatcccttctaatccttc

SEQ ID NO: 41497 - DNA, 102 bp, Glycine max
  Clone ID: LIB3093-045-Q1-K1-C3
aaactatggatgttcttgttcctcagatgtgtttttgtgtttttattatttaacactcgggaaacttttgggaaattcaattattgaatgcttggttggcag

SEQ ID NO: 41498 - DNA, 500 bp, Glycine max
  Clone ID: LIB3093-045-Q1-K1-C4
aattcccgttcgaccgacgcggccgctaaccaattccaaattctcaactttcctaactttatcaaccatccaagaagttgatcaggtactggtctctccttgagttatgaaaccattcacagtcttgaacccaatttcactctttgcacctcaaacaccttatatgcctcaatttcacacccgaaaatgcaaagttcaatctcacaatctgagatctgcatcactgattaccttctaccccaataagttccatctcaatttcaatttccagatatgagcaacatttacataccaatgaaccataccaaccttcaaatgcctcaaatcacatctttctccaagcctacaaagtccttatcaaatctaaacatccgcttaccgttcttgagaaacatctcaatgccttccataacctcaagtcttacaacaactatggtacaaactacaacatcatacttcaattagctcaaccatggattacatcaataaagttacttttt

SEQ ID NO: 41499 - DNA, 470 bp, Glycine max
  Clone ID: LIB3093-045-Q1-K1-C6
aaagactacggaggtgacaagtacataaatggggagattattccttgtaagtaccctaccgaccaaccgaaacgtagcgcaccaaagaatgagagtagaaggtatgagagacggagagatggccctccccctgaccgcagaaggccaagacaagaggccgctgcctccgattcatcctctacatgagccttgcaggtgagtttcagttttgctgatagtaactaatgccaagtgaaagctgctccttatcacagctctatcatgctcatggtcattttatcaaatagaagattgaacttgggttgaattctcatcagatgcatacaatgtttcttgcaagctcaaactggtattttcacaattcatcttgaggaatatgtgcttttggactatgagtatgacatgtgggacaattgttaggtttatttgtctgtgtaatttggaaagctacttatcgtgcaacccagttg

SEQ ID NO: 41500 - DNA, 54 bp, Glycine max
  Clone ID: LIB3093-045-Q1-K1-C7
tacccattactaaacctacacaagcattcatttatagcttatttctcacactca

SEQ ID NO: 41501 - DNA, 411 bp, Glycine max
  Clone ID: LIB3093-045-Q1-K1-C8
gttgttgttggatatgaatgaattctgagttcaagagactcacaacatgaagcatatacggtcgaaattggaagagatgagggtatgaatgattacaaaggacgagaaggagaacgtagcgttgctgttgatcggaagcgattcactgaaaagcaataaccttgttctttcacaaggaccataatataccaacatcatcgtcgatctgcttccctcgctaacactgactactaggaatctgaaacagatgtaaaattatctgatgttagtgttcaataatgtgatgacacatattggatcatatgggtttgcaatttgagaggtaatgaatggttttgcgtaattaatgatgatgtcatgcaagtatgatttcaacctctgtggattaagtagtcaagtgccttactatga

SEQ ID NO: 41502 - DNA, 232 bp, Glycine max
  Clone ID: LIB3093-045-Q1-K1-D1
ctgctattatcactgtggctataacttacttacaacttgcagctgaggatcatgaatagtggtcggggtcttttctttgtggaggatcaactggcttggtcatctactgctattgctagtaatactactattcacaatcagatatgcatgatattaattcaaacttcgttcttctacaggtacattgtcattatctgctatagtttctttattatgctttgttaattatgtt

SEQ ID NO: 41503 - DNA, 464 bp, Glycine max
  unsure (1)..(464): unsure at all n locations
  Clone ID: LIB3093-045-Q1-K1-D11
attttatgaatgaatgaaaaattaaaggcatgaggggcaagtgtggaaattaaaagaaacggctgcatcgaccagctcgtcacttcttcttcctcttccatttccatttctcggtgttgttgttcttcatccatggctttccctcagcaccacttccaacggcactaccaaagccagcagcaacaacaacaacaacaacaacaacaacaacagcagccacaaaccaaaaacttcaggcaattaatctaattatcctctcaattttttatttatttattgaaatcccaaaccatttcccttcctttccacccttcattttaccaaccctttttgatattttgtttatttttacaatttaatcttctttgcttctttatantttccccctttattgttttcctttgctttcagaaatctgcaaacaatcgatggtcaaatgtcacagcatgtggcgttttacaacc

SEQ ID NO: 41504 - DNA, 180 bp, Glycine max
  Clone ID: LIB3093-045-Q1-K1-D12
tcctggccactctccttctcttctctctaggtcttcagcgcatctccacctaggggtaatgaaaatttatatggggaatgttcgcatccgtatttttgtcacctgctatttctacttttgtaaatccacttccactccttaccctatttacaatctttcatgccttctctagcctgttat

SEQ ID NO: 41505 - DNA, 59 bp, Glycine max
  Clone ID: LIB3093-045-Q1-K1-D2
tgatgtcgtagaatatgaattaattcagagtttttgatactcacaacatgcagcagtca

SEQ ID NO: 41506 - DNA, 251 bp, Glycine max
  Clone ID: LIB3093-045-Q1-K1-D4
gttacgacccgcacgaaaggcgtaacgatctgggcactgcctcggagagagactcggtgaggtagagatgtctgtgaagatgcggactacctgcacctggacagaaagaccctatgaagcttcactgtttcctgggattggctttgggcttttcctgctcaagttatgtggagggcaaagaaggcctacttctgggggggccagagccattagtgagataccactctggaagagcttgaattttaaccttg

SEQ ID NO: 41507 - DNA, 253 bp, Glycine max
  Clone ID: LIB3093-045-Q1-K1-D5
gaaagacaaatggcaacaagcgaagaagtggttgcggctgcgccggtggcagccgggctggaggcatggctgaagcacaaactggatagaaaatggacgttttggtgcgacaaccaatccaaacctaaacagggcgcttcttggggtacctctcttctcaaggtctacaccttcgacaccggtgaagagttctggagtttgtatgatcaggtattcaagcccagcaagtgctaattattgcggtttttcactt

SEQ ID NO: 41508 - DNA, 210 bp, Glycine max
  Clone ID: LIB3093-045-Q1-K1-D6
accgagggagatgtagtggcatgatatgcgtatgaatcggtaagatggatagaggatagagcactgatggtgtggtggatgtagatgatcgcctgacgtagggagatgatggattggagacatatgacatgtctcgtcgtcgatctattaatcctgtcgtttacgatgacgtccttcttctaggatcttgactagattaatcgcctattg

SEQ ID NO: 41509 - DNA, 427 bp, Glycine max
  Clone ID: LIB3093-045-Q1-K1-D7
tgaagatatctctttctcttcaataactcatttttctcttatcatatttggatactcattgccgtctgcacagaaagttgttgaatttggagccatagttactgggtccaaggcctaaagcttccaactttgttttatttcctggtaaataacactgttttcgatcaatttggctttctttttgttgtcgattcagatgggttcgtgccaggaactgtttcttcgttcctaactcctatattcagtgttccggagaaagctttcaagtgttatagttgttaattgctattcttctttcttagtttctgctatgctatgaggctctgagttctctgtaaagtgtgatagacattttatgagttaaagttgaattaaacatctttgatcaatgaatattctgctggttttatagcttgaaatgttttcc

SEQ ID NO: 41510 - DNA, 81 bp, Glycine max
  Clone ID: LIB3093-045-Q1-K1-D8
gtgcaaagaacctctgctctcctcttgctattgatagataagaaagaagcgatacgatgtgggacgcgttctgcagggact
